United States Patent Application Publication US 2024/0390496 A1 - sequence listing, part 3

SEQ ID NO: 5437 - protein, 1163 aa, Artificial Sequence
  Synthetic Polypeptide
MALPVTALLLPLALLLHAARPDIQMTQTTSSLSASLGDRVTISCRASQDISKYLNWYQQKPDGTVKLLIYHTSRLHSGVPSRFSGSGSGTDYSLTISNLEQEDIATYFCQQGNTLPYTFGGGTKLEITLEGKPIPNPLLGLDSTGSGEDLKNVFPPEVAVFEPSEAEISHTQKATLVCLATGFYPDHVELSWWVNGKEVHSGVSTDPQPLKEQPALNDSRYCLSSRLRVSATFWQNPRNHFRCQVQFYGLSENDEWTQDRAKPVTQIVSAEAWGRADCGSQSFGLLDPKLCYLLDGILFIYGVILTALFLKRGRKKLLYIFKQPFMRPVQTTQEEDGCSCRFPEEEEGGCELRVKFSRSADAPAYQQGQNQLYNELNLGRREEYDVLDKRRGRDPEMGGKPQRRKNPQEGLYNELQKDKMAEAYSEIGMKGERRRGKGHDGLYQGLSTATKDTYDALHMQALPPRRAKRSGSGATNFSLLKQAGDVEENPGPTSMDWIWRILFLVGAATGAHSFEVKLQESGPGLVAPSQSLSVTCTVSGVSLPDYGVSWIRQPPRKGLEWLGVIWGSETTYYNSALKSRLTIIKDNSKSQVFLKMNSLQTDDTAIYYCAKHYYYGGSYAMDYWGQGTSVTVSSTREQKLISEEDLGSGIQNPDPAVYQLRDSKSSDKSVCLFTDFDSQTNVSQSKDSDVYITDKTVLDMRSMDFKSNSAVAWSNKSDFACANAFNNSIIPEDTFFPSPESSCGTQSFGLLDPKLCYLLDGILFIYGVILTALFLKRGRKKLLYIFKQPFMRPVQTTQEEDGCSCRFPEEEEGGCELRVKFSRSADAPAYQQGQNQLYNELNLGRREEYDVLDKRRGRDPEMGGKPQRRKNPQEGLYNELQKDKMAEAYSEIGMKGERRRGKGHDGLYQGLSTATKDTYDALHMQALPPRRAKRSGSGVKQTLNFDLLKLAGDVESNPGPSRGHMTEYKPTVRLATRDDVPRAVRTLAAAFADYPATRHTVDPDRHIERVTELQELFLTRVGLDIGKVWVADDGAAVAVWTTPESVEAGAVFAEIGPRMAELSGSRLAAQQQMEGLLAPHRPKEPAWFLATVGVSPDHQGKGLGSAVVLPGVEAAERAGVPAFLETSAPRNLPFYERLGFTVTADVEVPEGPRTWCMTRKPGA

SEQ ID NO: 5438 - protein, 1160 aa, Artificial Sequence
  Synthetic Polypeptide
MALPVTALLLPLALLLHAARPDIQMTQTTSSLSASLGDRVTISCRASQDISKYLNWYQQKPDGTVKLLIYHTSRLHSGVPSRFSGSGSGTDYSLTISNLEQEDIATYFCQQGNTLPYTFGGGTKLEITLEGKPIPNPLLGLDSTGSGEDLKNVFPPEVAVFEPSEAEISHTQKATLVCLATGFYPDHVELSWWVNGKEVHSGVSTDPQPLKEQPALNDSRYCLSSRLRVSATFWQNPRNHFRCQVQFYGLSENDEWTQDRAKPVTQIVSAEAWGRADCGSQSFGLLDPKLCYLLDGILFIYGVILTALFLRSKRSRLLHSDYMNMTPRRPGPTRKHYQPYAPPRDFAAYRSRVKFSRSADAPAYQQGQNQLYNELNLGRREEYDVLDKRRGRDPEMGGKPQRRKNPQEGLYNELQKDKMAEAYSEIGMKGERRRGKGHDGLYQGLSTATKDTYDALHMQALPPRRAKRSGSGATNFSLLKQAGDVEENPGPTSMDWIWRILFLVGAATGAHSFEVKLQESGPGLVAPSQSLSVTCTVSGVSLPDYGVSWIRQPPRKGLEWLGVIWGSETTYYNSALKSRLTIIKDNSKSQVFLKMNSLQTDDTAIYYCAKHYYYGGSYAMDYWGQGTSVTVSSTREQKLISEEDGSGIQNPDPAVYQLRDSKSSDKSVCLFTDFDSQTNVSQSKDSDVYITDKTVLDMRSMDFKSNSAVAWSNKSDFACANAFNNSIIPEDTFFPSPESSCGTQSFGLLDPKLCYLLDGILFIYGVILTALFLRSKRSRLLHSDYMNMTPRRPGPTRKHYQPYAPPRDFAAYRSRVKFSRSADAPAYQQGQNQLYNELNLGRREEYDVLDKRRGRDPEMGGKPQRRKNPQEGLYNELQKDKMAEAYSEIGMKGERRRGKGHDGLYQGLSTATKDTYDALHMQALPPRRAKRSGSGVKQTLNFDLLKLAGDVESNPGPSRGHMTEYKPTVRLATRDDVPRAVRTLAAAFADYPATRHTVDPDRHIERVTELQELFLTRVGLDIGKVWVADDGAAVAVWTTPESVEAGAVFAEIGPRMAELSGSRLAAQQQMEGLLAPHRPKEPAWFLATVGVSPDHQGKGLGSAVVLPGVEAAERAGVPAFLETSAPRNLPFYERLGFTVTADVEVPEGPRTWCMTRKPGA

SEQ ID NO: 5439 - protein, 1051 aa, Artificial Sequence
  Synthetic Polypeptide
MALPVTALLLPLALLLHAARPDIQMTQSPSSLSASVGDRVTITCKASDHINNWLAWYQQKPGQAPKLLIYGATTLETGVPSRFSGSGSGTDYTLTISSLQPEDFATYYCQQSWNTPWTFGQGTKLEIKRLEDLKNVFPPEVAVFEPSKAEIAHTQKATLVCLATGFYPDHVELSWWVNGKEVHSGVCTDPQPLKEQPALNDSRYCLSSRLRVSATFWQNPRNHFRCQVQFYGLSENDEWTQDRAKPVTQIVSAEAWGRADCGSQSFGLLDPKLCYLLDGILFIYGVILTALFLRVKFSRSADAPAYQQGQNQLYNELNLGRREEYDVLDKRRGRDPEMGGKPQRRKNPQEGLYNELQKDKMAEAYSEIGMKGERRRGKGHDGLYQGLSTATKDTYDALHMQALPPRRAKRSGSGATNFSLLKQAGDVEENPGPTSMDWIWRILFLVGAATGAHSFEQVQLQQPGAELVKPGASVKMSCKASGYAFSSYWINWMKQKPGQGLEWIGQIYPGDGDTNYNGKFKGRATLTADTSSSTAYMQLSSLTSEDSAVYFCARSITTVVGCAMDYWGQGTSVTVSSTRIQNPDPAVYQLRDSKSSDKSVCLFTDFDSQTNVSQSKDSDVYITDKCVLDMRSMDFKSNSAVAWSNKSDFACANAFNNSIIPEDTFFPSSDVPCGTQSFGLLDPKLCYLLDGILFIYGVILTALFLRVKFSRSADAPAYQQGQNQLYNELNLGRREEYDVLDKRRGRDPEMGGKPQRRKNPQEGLYNELQKDKMAEAYSEIGMKGERRRGKGHDGLYQGLSTATKDTYDALHMQALPPRRAKRSGSGVKQTLNFDLLKLAGDVESNPGPSRGHMTEYKPTVRLATRDDVPRAVRTLAAAFADYPATRHTVDPDRHIERVTELQELFLTRVGLDIGKVWVADDGAAVAVWTTPESVEAGAVFAEIGPRMAELSGSRLAAQQQMEGLLAPHRPKEPAWFLATVGVSPDHQGKGLGSAVVLPGVEAAERAGVPAFLETSAPRNLPFYERLGFTVTADVEVPEGPRTWCMTRKPGA

SEQ ID NO: 5440 - protein, 726 aa, Artificial Sequence
  Synthetic Polypeptide
MALPVTALLLPLALLLHAARPDIQMTQSPSSLSASVGDRVTITCKASDHINNWLAWYQQKPGQAPKLLIYGATTLETGVPSRFSGSGSGTDYTLTISSLQPEDFATYYCQQSWNTPWTFGQGTKLEIKRGGGGSGGGGSGGGGSQVQLQQPGAELVKPGASVKMSCKASGYAFSSYWINWMKQKPGQGLEWIGQIYPGDGDTNYNGKFKGRATLTADTSSSTAYMQLSSLTSEDSAVYFCARSITTVVGCAMDYWGQGTSVTVSSTREQKLISEEDLAKPTTTPAPRPPTPAPTIASQPLSLRPEACRPAAGGAVHTRGLDFACDIYIWAPLAGTCGVLLLSLVITLYCKRGRKKLLYIFKQPFMRPVQTTQEEDGCSCRFPEEEEGGCELRVKFSRSADAPAYQQGQNQLYNELNLGRREEYDVLDKRRGRDPEMGGKPRRKNPQEGLYNELQKDKMAEAYSEIGMKGERRRGKGHDGLYQGLSTATKDTYDALHMQALPPRSSGSGEGRGSLLTCGDVEENPGPHMTEYKPTVRLATRDDVPRAVRTLAAAFADYPATRHTVDPDRHIERVTELQELFLTRVGLDIGKVWVADDGAAVAVWTTPESVEAGAVFAEIGPRMAELSGSRLAAQQQMEGLLAPHRPKEPAWFLATVGVSPDHQGKGLGSAVVLPGVEAAERAGVPAFLETSAPRNLPFYERLGFTVTADVEVPEGPRTWCMTRKPGA

SEQ ID NO: 5441 - protein, 724 aa, Artificial Sequence
  Synthetic Polypeptide
MALPVTALLLPLALLLHAARPDIQMTQTTSSLSASLGDRVTISCRASQDISKYLNWYQQKPDGTVKLLIYHTSRLHSGVPSRFSGSGSGTDYSLTISNLEQEDIATYFCQQGNTLPYTFGGGTKLEITGGGGSGGGGSGGGGSEVKLQESGPGLVAPSQSLSVTCTVSGVSLPDYGVSWIRQPPRKGLEWLGVIWGSETTYYNSALKSRLTIIKDNSKSQVFLKMNSLQTDDTAIYYCAKHYYYGGSYAMDYWGQGTSVTVSSRVEQKLISEEDLAKPTTTPAPRPPTPAPTIASQPLSLRPEACRPAAGGAVHTRGLDFACDIYIWAPLAGTCGVLLLSLVITLYCKRGRKKLLYIFKQPFMRPVQTTQEEDGCSCRFPEEEEGGCELRVKFSRSADAPAYQQGQNQLYNELNLGRREEYDVLDKRRGRDPEMGGKPRRKNPQEGLYNELQKDKMAEAYSEIGMKGERRRGKGHDGLYQGLSTATKDTYDALHMQALPPRSSGSGEGRGSLLTCGDVEENPGPHMTEYKPTVRLATRDDVPRAVRTLAAAFADYPATRHTVDPDRHIERVTELQELFLTRVGLDIGKVWVADDGAAVAVWTTPESVEAGAVFAEIGPRMAELSGSRLAAQQQMEGLLAPHRPKEPAWFLATVGVSPDHQGKGLGSAVVLPGVEAAERAGVPAFLETSAPRNLPFYERLGFTVTADVEVPEGPRTWCMTRKPGA

SEQ ID NO: 5442-5450 - skipped (9 entries)

SEQ ID NO: 5451 - DNA, 3042 bp, Artificial Sequence; identical to SEQ ID NO: 1626
  Synthetic Polynucleotide

SEQ ID NO: 5452 - DNA, 3204 bp, Artificial Sequence; identical to SEQ ID NO: 1627
  Synthetic Polynucleotide

SEQ ID NO: 5453 - DNA, 3654 bp, Artificial Sequence; identical to SEQ ID NO: 1628
  Synthetic Polynucleotide

SEQ ID NO: 5454 - DNA, 3813 bp, Artificial Sequence; identical to SEQ ID NO: 1629
  Synthetic Polynucleotide

SEQ ID NO: 5455 - DNA, 3681 bp, Artificial Sequence; identical to SEQ ID NO: 1630
  Synthetic Polynucleotide

SEQ ID NO: 5456 - DNA, 4092 bp, Artificial Sequence; identical to SEQ ID NO: 1631
  Synthetic Polynucleotide

SEQ ID NO: 5457 - DNA, 4503 bp, Artificial Sequence; identical to SEQ ID NO: 1632
  Synthetic Polynucleotide

SEQ ID NO: 5458 - DNA, 3702 bp, Artificial Sequence; identical to SEQ ID NO: 1633
  Synthetic Polynucleotide

SEQ ID NO: 5459 - DNA, 3726 bp, Artificial Sequence; identical to SEQ ID NO: 1634
  Synthetic Polynucleotide

SEQ ID NO: 5460 - DNA, 4137 bp, Artificial Sequence; identical to SEQ ID NO: 1635
  Synthetic Polynucleotide

SEQ ID NO: 5461 - DNA, 4548 bp, Artificial Sequence; identical to SEQ ID NO: 1636
  Synthetic Polynucleotide

SEQ ID NO: 5462 - DNA, 3747 bp, Artificial Sequence; identical to SEQ ID NO: 1637
  Synthetic Polynucleotide

SEQ ID NO: 5463 - DNA, 1902 bp, Artificial Sequence; identical to SEQ ID NO: 1638
  Synthetic Polynucleotide

SEQ ID NO: 5464 - DNA, 1515 bp, Artificial Sequence; identical to SEQ ID NO: 4954
  Synthetic Polynucleotide

SEQ ID NO: 5465 - DNA, 1515 bp, Artificial Sequence; identical to SEQ ID NO: 4861
  Synthetic Polynucleotide

SEQ ID NO: 5466 - DNA, 1137 bp, Artificial Sequence; identical to SEQ ID NO: 5047
  Synthetic Polynucleotide

SEQ ID NO: 5467 - DNA, 1137 bp, Artificial Sequence; identical to SEQ ID NO: 5048
  Synthetic Polynucleotide

SEQ ID NO: 5468 - DNA, 1137 bp, Artificial Sequence; identical to SEQ ID NO: 5049
  Synthetic Polynucleotide

SEQ ID NO: 5469 - DNA, 1143 bp, Artificial Sequence; identical to SEQ ID NO: 5066
  Synthetic Polynucleotide

SEQ ID NO: 5470 - DNA, 1167 bp, Artificial Sequence; identical to SEQ ID NO: 5069
  Synthetic Polynucleotide

SEQ ID NO: 5471 - DNA, 1155 bp, Artificial Sequence; identical to SEQ ID NO: 5070
  Synthetic Polynucleotide

SEQ ID NO: 5472 - DNA, 1140 bp, Artificial Sequence; identical to SEQ ID NO: 5056
  Synthetic Polynucleotide

SEQ ID NO: 5473 - DNA, 1155 bp, Artificial Sequence; identical to SEQ ID NO: 5110
  Synthetic Polynucleotide

SEQ ID NO: 5474 - DNA, 957 bp, Artificial Sequence; identical to SEQ ID NO: 5112
  Synthetic Polynucleotide

SEQ ID NO: 5475 - DNA, 1050 bp, Artificial Sequence; identical to SEQ ID NO: 5115
  Synthetic Polynucleotide

SEQ ID NO: 5476 - DNA, 1053 bp, Artificial Sequence; identical to SEQ ID NO: 5121
  Synthetic Polynucleotide

SEQ ID NO: 5477 - DNA, 1704 bp, Artificial Sequence; identical to SEQ ID NO: 5124
  Synthetic Polynucleotide

SEQ ID NO: 5478 - DNA, 1344 bp, Artificial Sequence; identical to SEQ ID NO: 5125
  Synthetic Polynucleotide

SEQ ID NO: 5479 - DNA, 942 bp, Artificial Sequence; identical to SEQ ID NO: 5126
  Synthetic Polynucleotide

SEQ ID NO: 5480 - DNA, 867 bp, Artificial Sequence; identical to SEQ ID NO: 5127
  Synthetic Polynucleotide

SEQ ID NO: 5481 - DNA, 1641 bp, Artificial Sequence; identical to SEQ ID NO: 5128
  Synthetic Polynucleotide

SEQ ID NO: 5482 - DNA, 1641 bp, Artificial Sequence; identical to SEQ ID NO: 5129
  Synthetic Polynucleotide

SEQ ID NO: 5483 - DNA, 3024 bp, Artificial Sequence
  Synthetic Polynucleotide
atggccttaccagtgaccgccttgctcctgccgctggccttgctgctccacgccgccaggccggacatccagatgacacagagccctagcagcctgtctgccagcgtgggagacagagtgaccatcacatgcaaggccagcgaccacatcaacaactggctggcctggtatcagcagaagcctggacaggcccctaagctgctgatctacggcgctaccacactggaaacaggcgtgcccagcagattttctggcagcggctctggcaccgactacaccctgacaatatccagcctccagcctgaggacttcgccacctactactgtcagcagagctggaacaccccttggacattcggccagggcaccaagctggaaatcaagagactcgagggcatgcggactgaagacctcccaaaggctgtggtgttcctggagcctcaatggtacagggtgctggagaaggacagtgtgactctgaagtgccagggagcctactcccctgaggacaattccacacagtggtttcacaatgagagcctcatctcaagccaggcctccagctacttcattgacgctgccacagtggacgacagtggagagtacaggtgccagacaaacctctccaccctcagtgacccggtgcagctagaagtccatatcggctggctgttgctccaggcccctcggtgggtgttcaaggaggaagaccctattcacctgaggtgtcacagctggaagaacactgctctgcataaggtcacatatttacagaatggcaaaggcaggaagtattttcatcataattctgacttctacattccaaaagccacactcaaagacagcggctcctacttctgcagggggcttgttgggagtaaaaatgtgtcttcagagactgtgaacatcaccatcactcaaggtttggcagtgtcaaccatctcatcattctttccacctggctaccaagtgtccttctgcctggtcatggtgctgctgttcgccgtggataccggcctgtacttcagcgtcaagaccaacatccggtccagcaccagagactggaaggaccacaagttcaagtggcggaaggaccctcaggacaagagggccaagcgatctggatctggagcaacaaacttctcactactcaaacaagcaggtgacgtggaggagaatcccgggcctactagtatggactggatttggcgcatccttttccttgtcggcgctgctaccggcgcgcattccttcgaacaagttcagcttcaacagcctggcgctgagctggtcaaacctggcgcttctgtgaagatgagctgcaaagccagcggctacgccttcagcagctactggatcaactggatgaagcagaaacccggccagggactcgaatggatcggccaaatctatcccggcgacggcgacaccaactacaacggcaagttcaagggcagagccacactgaccgccgatacctctagcagcacagcctacatgcagctgagcagcctgaccagcgaagatagcgccgtgtacttctgtgcccggtccatcacaacagtcgtgggctgcgctatggactattggggccagggaacaagcgtgaccgtgtctagtacgcgtcttcaggacccttgcagcaactgtccagccggaaccttttgtgataacaacagaaatcagatatgcagcccctgtccgccaaactcctttagcagtgctggcggccagcggacatgtgacatttgtcggcagtgcaaaggggttttccgcaccagaaaagagtgctcctccaccagcaatgccgagtgtgactgtaccccaggctttcactgtctcggcgctggatgtagcatgtgtgaacaggactgtaaacaggggcaagaactcacgaagaaagggtgcaaagactgctgttttgggacgttcaacgatcagaagcggggaatctgtaggccctggacaaactgttctctggacggcaagtccgtgctcgtgaatggaacaaaagagcgggacgttgtctgcggcccaagtcctgctgatcttagcccaggcgcttcctctgtgactcctccagctcctgcacgcgaacctggacactctccccagatcatctcattttttctcgctctcacatcaaccgctttgctgttcctgctcttttttctcaccctccggttctccgtggttaagagaggccggaaaaaactcctctatatctttaaacagccctttatgcgcccggtccaaacaacccaagaggaagatggctgctcttgcagattcccggaagaggaagaaggcggctgcgagctgcgcgccaagagaagcggatctggcgtgaagcagaccctgaatttcgacctgctgaagctggctggcgacgtggaatccaacccaggcccttctagaggccatatgaccgagtacaagcccacggtgcgcctcgccacccgcgacgacgtccccagggccgtacgcaccctcgccgccgcgttcgccgactaccccgccacgcgccacaccgtcgatccggaccgccacatcgagcgggtcaccgagctgcaagaactcttcctcacgcgcgtcgggctcgacatcggcaaggtgtgggtcgcggacgacggcgccgcggtggcggtctggaccacgccggagagcgtcgaagcgggggcggtgttcgccgagatcggcccgcgcatggccgagttgagcggttcccggctggccgcgcagcaacagatggaaggcctcctggcgccgcaccggcccaaggagcccgcgtggttcctggccaccgtcggcgtctcgcccgaccaccagggcaagggtctgggcagcgccgtcgtgctccccggagtggaggcggccgagcgcgccggggtgcccgccttcctggagacctccgcgccccgcaacctccccttctacgagcggctcggcttcaccgtcaccgccgacgtcgaggtgcccgaaggaccgcgcacctggtgcatgacccgcaagcccggtgcctga

SEQ ID NO: 5484 - DNA, 3186 bp, Artificial Sequence
  Synthetic Polynucleotide
atggccttaccagtgaccgccttgctcctgccgctggccttgctgctccacgccgccaggccggcatgcgaagtgcagctgcttgaaagtggcggcggactgattcagcctggcggatctctgagactgagctgtgccgccagcggcttcaccttttctagccacgccatgacctgggtccgacaggcacctggaaaagggcttgaatgggtgtccgccatcagcggctctggcgattacacacactacgccgacagcgtgaagggcagattcaccatcagcagagacaacagcaagaacaccgtgtacctccagatgaacagcctgagagccgaggacagcgccgtgtattattgcgccaaggatgaggatggcggcagcctgcttggacacagaggacaaggcaccctggtcaccgtttcttccggtaccggcggaggcggatctggcggcggaggtagcggtggcggaggatctgaattcggatctctcgagggcatgcggactgaagacctcccaaaggctgtggtgttcctggagcctcaatggtacagggtgctggagaaggacagtgtgactctgaagtgccagggagcctactcccctgaggacaattccacacagtggtttcacaatgagagcctcatctcaagccaggcctccagctacttcattgacgctgccacagtggacgacagtggagagtacaggtgccagacaaacctctccaccctcagtgacccggtgcagctagaagtccatatcggctggctgttgctccaggcccctcggtgggtgttcaaggaggaagaccctattcacctgaggtgtcacagctggaagaacactgctctgcataaggtcacatatttacagaatggcaaaggcaggaagtattttcatcataattctgacttctacattccaaaagccacactcaaagacagcggctcctacttctgcagggggcttgttgggagtaaaaatgtgtcttcagagactgtgaacatcaccatcactcaaggtttggcagtgtcaaccatctcatcattctttccacctggctaccaagtgtccttctgcctggtcatggtgctgctgttcgccgtggataccggcctgtacttcagcgtcaagaccaacatccggtccagcaccagagactggaaggaccacaagttcaagtggcggaaggaccctcaggacaagagggccaagcgatctggatctggagcaacaaacttctcactactcaaacaagcaggtgacgtggaggagaatcccgggcctactagtgccaccatggactggatttggcgcatccttttccttgtcggcgctgctaccggcgcccattccgggcccgaagtgcagctggttgaatctggcggaggactggttcaggctggcggatctctgagactgtcttgtgccgccagcggcagaacctttagcatgggctggtttagacaggcccctggcaaagagagagagttcgtcgccgccatcacatactctggcggcagcccttactacgccgactctgtgaagggcagattcaccatcagccgggacaacgccaagaacaccgtgtacctccagatgaacagcctgaagcctgaggacaccgccgtgtactactgcgccgccaatccaacatacggcagcgactggaacgccgagaattggggccagggaacccaagtgacagtgtctagcggatccggcggcggaggatctggcggaggcggatctgggggcggaggctctttcgaaggcagcacgcgtcttcaggacccttgcagcaactgtccagccggaaccttttgtgataacaacagaaatcagatatgcagcccctgtccgccaaactcctttagcagtgctggcggccagcggacatgtgacatttgtcggcagtgcaaaggggttttccgcaccagaaaagagtgctcctccaccagcaatgccgagtgtgactgtaccccaggctttcactgtctcggcgctggatgtagcatgtgtgaacaggactgtaaacaggggcaagaactcacgaagaaagggtgcaaagactgctgttttgggacgttcaacgatcagaagcggggaatctgtaggccctggacaaactgttctctggacggcaagtccgtgctcgtgaatggaacaaaagagcgggacgttgtctgcggcccaagtcctgctgatcttagcccaggcgcttcctctgtgactcctccagctcctgcacgcgaacctggacactctccccagatcatctcattttttctcgctctcacatcaaccgctttgctgttcctgctcttttttctcaccctccggttctccgtggttaagagaggccggaaaaaactcctctatatctttaaacagccctttatgcgcccggtccaaacaacccaagaggaagatggctgctcttgcagattcccggaagaggaagaaggcggctgcgagctgcgcgccaagagaagcggatctggcgtgaagcagaccctgaatttcgacctgctgaagctggctggcgacgtggaatccaacccaggcccttctagaggccatatgaccgagtacaagcccacggtgcgcctcgccacccgcgacgacgtccccagggccgtacgcaccctcgccgccgcgttcgccgactaccccgccacgcgccacaccgtcgatccggaccgccacatcgagcgggtcaccgagctgcaagaactcttcctcacgcgcgtcgggctcgacatcggcaaggtgtgggtcgcggacgacggcgccgcggtggcggtctggaccacgccggagagcgtcgaagcgggggcggtgttcgccgagatcggcccgcgcatggccgagttgagcggttcccggctggccgcgcagcaacagatggaaggcctcctggcgccgcaccggcccaaggagcccgcgtggttcctggccaccgtcggcgtctcgcccgaccaccagggcaagggtctgggcagcgccgtcgtgctccccggagtggaggcggccgagcgcgccggggtgcccgccttcctggagacctccgcgccccgcaacctccccttctacgagcggctcggcttcaccgtcaccgccgacgtcgaggtgcccgaaggaccgcgcacctggtgcatgacccgcaagcccggtgcctga

SEQ ID NO: 5485 - DNA, 3636 bp, Artificial Sequence
  Synthetic Polynucleotide
atggccttaccagtgaccgccttgctcctgccgctggccttgctgctccacgccgccaggccggacatccagatgacacagagccctagcagcctgtctgccagcgtgggagacagagtgaccatcacatgcaaggccagcgaccacatcaacaactggctggcctggtatcagcagaagcctggacaggcccctaagctgctgatctacggcgctaccacactggaaacaggcgtgcccagcagattttctggcagcggctctggcaccgactacaccctgacaatatccagcctccagcctgaggacttcgccacctactactgtcagcagagctggaacaccccttggacattcggccagggcaccaagctggaaatcaagagactcgagggacagcctaaggccaatcctaccgtgacactgttccctccaagcagcgaagaactccaggccaacaaggccacacttgtgtgcctgatctccgacttctaccctggggctgtgacagtggcttggaaggccgatggatctcctgtgaaagccggcgtggaaaccaccaagccatccaagcagagcaacaacaaatacgccgccagctcctacctgagcctgacacctgagcagtggaagtcccacagatcctacagctgccaagtgacccacgaaggcagcaccgtggaaaagacagtggcccctacagagtgcagcggatccggcatgcggactgaagacctcccaaaggctgtggtgttcctggagcctcaatggtacagggtgctggagaaggacagtgtgactctgaagtgccagggagcctactcccctgaggacaattccacacagtggtttcacaatgagagcctcatctcaagccaggcctccagctacttcattgacgctgccacagtggacgacagtggagagtacaggtgccagacaaacctctccaccctcagtgacccggtgcagctagaagtccatatcggctggctgttgctccaggcccctcggtgggtgttcaaggaggaagaccctattcacctgaggtgtcacagctggaagaacactgctctgcataaggtcacatatttacagaatggcaaaggcaggaagtattttcatcataattctgacttctacattccaaaagccacactcaaagacagcggctcctacttctgcagggggcttgttgggagtaaaaatgtgtcttcagagactgtgaacatcaccatcactcaaggtttggcagtgtcaaccatctcatcattctttccacctggctaccaagtgtccttctgcctggtcatggtgctgctgttcgccgtggataccggcctgtacttcagcgtcaagaccaacatccggtccagcaccagagactggaaggaccacaagttcaagtggcggaaggaccctcaggacaagagggccaagcgatctggatctggagcaacaaacttctcactactcaaacaagcaggtgacgtggaggagaatcccgggcctactagtatggactggatttggcgcatccttttccttgtcggcgctgctaccggcgcgcattccttcgaacaagttcagcttcaacagcctggcgctgagctggtcaaacctggcgcttctgtgaagatgagctgcaaagccagcggctacgccttcagcagctactggatcaactggatgaagcagaaacccggccagggactcgaatggatcggccaaatctatcccggcgacggcgacaccaactacaacggcaagttcaagggcagagccacactgaccgccgatacctctagcagcacagcctacatgcagctgagcagcctgaccagcgaagatagcgccgtgtacttctgtgcccggtccatcacaacagtcgtgggctgcgctatggactattggggccagggaacaagcgtgaccgtgtctagtacgcgtgcctctacaaagggaccctccgtgtttcctctggctcccagcagcaagtctacaagcggaggaacagccgctctgggctgcctggtcaaggattactttcccgagcctgtgaccgtgtcctggaatagcggagcactgacaagcggcgtgcacacctttccagccgtgctgcaaagcagcggcctgtactctctgagcagcgtggtcacagtgcctagctctagcctgggcacccagacctacatctgcaatgtgaaccacaagcctagcaacaccaaggtggacaagagagtggaacccaagagctgtggtacccttcaggacccttgcagcaactgtccagccggaaccttttgtgataacaacagaaatcagatatgcagcccctgtccgccaaactcctttagcagtgctggcggccagcggacatgtgacatttgtcggcagtgcaaaggggttttccgcaccagaaaagagtgctcctccaccagcaatgccgagtgtgactgtaccccaggctttcactgtctcggcgctggatgtagcatgtgtgaacaggactgtaaacaggggcaagaactcacgaagaaagggtgcaaagactgctgttttgggacgttcaacgatcagaagcggggaatctgtaggccctggacaaactgttctctggacggcaagtccgtgctcgtgaatggaacaaaagagcgggacgttgtctgcggcccaagtcctgctgatcttagcccaggcgcttcctctgtgactcctccagctcctgcacgcgaacctggacactctccccagatcatctcattttttctcgctctcacatcaaccgctttgctgttcctgctcttttttctcaccctccggttctccgtggttaagagaggccggaaaaaactcctctatatctttaaacagccctttatgcgcccggtccaaacaacccaagaggaagatggctgctcttgcagattcccggaagaggaagaaggcggctgcgagctgcgcgccaagagaagcggatctggcgtgaagcagaccctgaatttcgacctgctgaagctggctggcgacgtggaatccaacccaggcccttctagaggcgggatccacaccatggctacctacgaggtgctgtgcgaggtggcaagaaagctgggcaccgacgacagagaagtggtgctgttcctgctgaacgtgttcatccctcagcctacactggcccagctgatcggtgcactgagagccctgaaagaggaaggccggctgacctttcctctgctggccgaatgcctgttcagagccggaagaagggatctgctgcgggacctgctgcatctggaccccagatttctggaaagacacctggccggcaccatgagctacttcagcccttaccagctgaccgtgctgcacgttgacggcgaactgtgcgccagagatattcggagcctgatcttcctgagcaaggacaccatcggcagccggtctacccctcagacatttctgcactgggtgtactgcatggaaaacctggacctgctcggccccacagatgtggatgccctgatgtccatgctgagaagcctgagcagagtggacctccagagacaggtgcagacactgatgggactgcacctgagcggacctagccacagccagcactacagacacacccct

SEQ ID NO: 5486 - DNA, 3795 bp, Artificial Sequence
  Synthetic Polynucleotide
atggccttaccagtgaccgccttgctcctgccgctggccttgctgctccacgccgccaggccggacatccagatgacacagagccctagcagcctgtctgccagcgtgggagacagagtgaccatcacatgcaaggccagcgaccacatcaacaactggctggcctggtatcagcagaagcctggacaggcccctaagctgctgatctacggcgctaccacactggaaacaggcgtgcccagcagattttctggcagcggctctggcaccgactacaccctgacaatatccagcctccagcctgaggacttcgccacctactactgtcagcagagctggaacaccccttggacattcggccagggcaccaagctggaaatcaagagactcgagggacagcctaaggccaatcctaccgtgacactgttccctccaagcagcgaagaactccaggccaacaaggccacacttgtgtgcctgatctccgacttctaccctggggctgtgacagtggcttggaaggccgatggatctcctgtgaaagccggcgtggaaaccaccaagccatccaagcagagcaacaacaaatacgccgccagctcctacctgagcctgacacctgagcagtggaagtcccacagatcctacagctgccaagtgacccacgaaggcagcaccgtggaaaagacagtggcccctacagagtgcagcggatccggcatgcggactgaagacctcccaaaggctgtggtgttcctggagcctcaatggtacagggtgctggagaaggacagtgtgactctgaagtgccagggagcctactcccctgaggacaattccacacagtggtttcacaatgagagcctcatctcaagccaggcctccagctacttcattgacgctgccacagtggacgacagtggagagtacaggtgccagacaaacctctccaccctcagtgacccggtgcagctagaagtccatatcggctggctgttgctccaggcccctcggtgggtgttcaaggaggaagaccctattcacctgaggtgtcacagctggaagaacactgctctgcataaggtcacatatttacagaatggcaaaggcaggaagtattttcatcataattctgacttctacattccaaaagccacactcaaagacagcggctcctacttctgcagggggcttgttgggagtaaaaatgtgtcttcagagactgtgaacatcaccatcactcaaggtttggcagtgtcaaccatctcatcattctttccacctggctaccaagtgtccttctgcctggtcatggtgctgctgttcgccgtggataccggcctgtacttcagcgtcaagaccaacatccggtccagcaccagagactggaaggaccacaagttcaagtggcggaaggaccctcaggacaagagggccaagcgatctggatctggagcaacaaacttctcactactcaaacaagcaggtgacgtggaggagaatcccgggcctactagtatggactggatttggcgcatccttttccttgtcggcgctgctaccggcgcgcattccttcgaacaagttcagcttcaacagcctggcgctgagctggtcaaacctggcgcttctgtgaagatgagctgcaaagccagcggctacgccttcagcagctactggatcaactggatgaagcagaaacccggccagggactcgaatggatcggccaaatctatcccggcgacggcgacaccaactacaacggcaagttcaagggcagagccacactgaccgccgatacctctagcagcacagcctacatgcagctgagcagcctgaccagcgaagatagcgccgtgtacttctgtgcccggtccatcacaacagtcgtgggctgcgctatggactattggggccagggaacaagcgtgaccgtgtctagtacgcgtgcctctacaaagggaccctccgtgtttcctctggctcccagcagcaagtctacaagcggaggaacagccgctctgggctgcctggtcaaggattactttcccgagcctgtgaccgtgtcctggaatagcggagcactgacaagcggcgtgcacacctttccagccgtgctgcaaagcagcggcctgtactctctgagcagcgtggtcacagtgcctagctctagcctgggcacccagacctacatctgcaatgtgaaccacaagcctagcaacaccaaggtggacaagagagtggaacccaagagctgtggtacccttcaggacccttgcagcaactgtccagccggaaccttttgtgataacaacagaaatcagatatgcagcccctgtccgccaaactcctttagcagtgctggcggccagcggacatgtgacatttgtcggcagtgcaaaggggttttccgcaccagaaaagagtgctcctccaccagcaatgccgagtgtgactgtaccccaggctttcactgtctcggcgctggatgtagcatgtgtgaacaggactgtaaacaggggcaagaactcacgaagaaagggtgcaaagactgctgttttgggacgttcaacgatcagaagcggggaatctgtaggccctggacaaactgttctctggacggcaagtccgtgctcgtgaatggaacaaaagagcgggacgttgtctgcggcccaagtcctgctgatcttagcccaggcgcttcctctgtgactcctccagctcctgcacgcgaacctggacactctccccagatcatctcattttttctcgctctcacatcaaccgctttgctgttcctgctcttttttctcaccctccggttctccgtggttaagagaggccggaaaaaactcctctatatctttaaacagccctttatgcgcccggtccaaacaacccaagaggaagatggctgctcttgcagattcccggaagaggaagaaggcggctgcgagctgcgcgccaagagaagcggatctggcgtgaagcagaccctgaatttcgacctgctgaagctggctggcgacgtggaatccaacccaggcccttctagaggcgggatccacaccatgtccgactccaaggaggtccctagccttccatttttgcgacacttgctcgaagagttggacagccatgaggacagcttgctgctgtttctgtgtcacgacgcggccccgggctgcacgacggtcacgcaagctttgtgctcgcttagccaacagcgcaagctgaccctcgcggctctggtcgagatgctctacgtgctgcagcgtatggatcttctcaagagccgcttcgggctcagcaaggagggggccgagcaattgctgggcacaagctttctcacgcgctaccgcaagctcatggtttgcgtgggtgaggagctcgactcgagcgagctacgcgctctacgcttgttcgcgtgcaacctgaatccgagcctgagcacggcgctttctgagagcagccgctttgtcgagcttgtactcgcgcttgaaaacgtaggactcgtctcgccatcgagtgtttccgtgcttgcggacatgttgcgcactcttcggcgcctcgatttgtgccagcagcttgttgagtacgaacaacaagagcaagccaggtaccgttactgttacgcggcctcgccctcattgccagttcgtacgttacgtcgggggcacggcgcgagtgaacacgagcagctgtgcatgcccgtgcaagaatcctctgacagccccgagctgctgcgcacgcccgtacaagaatcctccagcgacagccccgagcaaacgact

SEQ ID NO: 5487 - DNA, 3663 bp, Artificial Sequence
  Synthetic Polynucleotide
atggccttaccagtgaccgccttgctcctgccgctggccttgctgctccacgccgccaggccggacatccagatgacacagagccctagcagcctgtctgccagcgtgggagacagagtgaccatcacatgcaaggccagcgaccacatcaacaactggctggcctggtatcagcagaagcctggacaggcccctaagctgctgatctacggcgctaccacactggaaacaggcgtgcccagcagattttctggcagcggctctggcaccgactacaccctgacaatatccagcctccagcctgaggacttcgccacctactactgtcagcagagctggaacaccccttggacattcggccagggcaccaagctggaaatcaagagactcgagggacagcctaaggccaatcctaccgtgacactgttccctccaagcagcgaagaactccaggccaacaaggccacacttgtgtgcctgatctccgacttctaccctggggctgtgacagtggcttggaaggccgatggatctcctgtgaaagccggcgtggaaaccaccaagccatccaagcagagcaacaacaaatacgccgccagctcctacctgagcctgacacctgagcagtggaagtcccacagatcctacagctgccaagtgacccacgaaggcagcaccgtggaaaagacagtggcccctacagagtgcagcggatccggcatgcggactgaagacctcccaaaggctgtggtgttcctggagcctcaatggtacagggtgctggagaaggacagtgtgactctgaagtgccagggagcctactcccctgaggacaattccacacagtggtttcacaatgagagcctcatctcaagccaggcctccagctacttcattgacgctgccacagtggacgacagtggagagtacaggtgccagacaaacctctccaccctcagtgacccggtgcagctagaagtccatatcggctggctgttgctccaggcccctcggtgggtgttcaaggaggaagaccctattcacctgaggtgtcacagctggaagaacactgctctgcataaggtcacatatttacagaatggcaaaggcaggaagtattttcatcataattctgacttctacattccaaaagccacactcaaagacagcggctcctacttctgcagggggcttgttgggagtaaaaatgtgtcttcagagactgtgaacatcaccatcactcaaggtttggcagtgtcaaccatctcatcattctttccacctggctaccaagtgtccttctgcctggtcatggtgctgctgttcgccgtggataccggcctgtacttcagcgtcaagaccaacatccggtccagcaccagagactggaaggaccacaagttcaagtggcggaaggaccctcaggacaagagggccaagcgatctggatctggagcaacaaacttctcactactcaaacaagcaggtgacgtggaggagaatcccgggcctactagtatggactggatttggcgcatccttttccttgtcggcgctgctaccggcgcgcattccttcgaacaagttcagcttcaacagcctggcgctgagctggtcaaacctggcgcttctgtgaagatgagctgcaaagccagcggctacgccttcagcagctactggatcaactggatgaagcagaaacccggccagggactcgaatggatcggccaaatctatcccggcgacggcgacaccaactacaacggcaagttcaagggcagagccacactgaccgccgatacctctagcagcacagcctacatgcagctgagcagcctgaccagcgaagatagcgccgtgtacttctgtgcccggtccatcacaacagtcgtgggctgcgctatggactattggggccagggaacaagcgtgaccgtgtctagtacgcgtgcctctacaaagggaccctccgtgtttcctctggctcccagcagcaagtctacaagcggaggaacagccgctctgggctgcctggtcaaggattactttcccgagcctgtgaccgtgtcctggaatagcggagcactgacaagcggcgtgcacacctttccagccgtgctgcaaagcagcggcctgtactctctgagcagcgtggtcacagtgcctagctctagcctgggcacccagacctacatctgcaatgtgaaccacaagcctagcaacaccaaggtggacaagagagtggaacccaagagctgtggtacccttcaggacccttgcagcaactgtccagccggaaccttttgtgataacaacagaaatcagatatgcagcccctgtccgccaaactcctttagcagtgctggcggccagcggacatgtgacatttgtcggcagtgcaaaggggttttccgcaccagaaaagagtgctcctccaccagcaatgccgagtgtgactgtaccccaggctttcactgtctcggcgctggatgtagcatgtgtgaacaggactgtaaacaggggcaagaactcacgaagaaagggtgcaaagactgctgttttgggacgttcaacgatcagaagcggggaatctgtaggccctggacaaactgttctctggacggcaagtccgtgctcgtgaatggaacaaaagagcgggacgttgtctgcggcccaagtcctgctgatcttagcccaggcgcttcctctgtgactcctccagctcctgcacgcgaacctggacactctccccagatcatctcattttttctcgctctcacatcaaccgctttgctgttcctgctcttttttctcaccctccggttctccgtggttaagagaggccggaaaaaactcctctatatctttaaacagccctttatgcgcccggtccaaacaacccaagaggaagatggctgctcttgcagattcccggaagaggaagaaggcggctgcgagctgcgcgccaagagaagcggatctggcgtgaagcagaccctgaatttcgacctgctgaagctggctggcgacgtggaatccaacccaggcccttctagaggccatatgaccgagtacaagcccacggtgcgcctcgccacccgcgacgacgtccccagggccgtacgcaccctcgccgccgcgttcgccgactaccccgccacgcgccacaccgtcgatccggaccgccacatcgagcgggtcaccgagctgcaagaactcttcctcacgcgcgtcgggctcgacatcggcaaggtgtgggtcgcggacgacggcgccgcggtggcggtctggaccacgccggagagcgtcgaagcgggggcggtgttcgccgagatcggcccgcgcatggccgagttgagcggttcccggctggccgcgcagcaacagatggaaggcctcctggcgccgcaccggcccaaggagcccgcgtggttcctggccaccgtcggcgtctcgcccgaccaccagggcaagggtctgggcagcgccgtcgtgctccccggagtggaggcggccgagcgcgccggggtgcccgccttcctggagacctccgcgccccgcaacctccccttctacgagcggctcggcttcaccgtcaccgccgacgtcgaggtgcccgaaggaccgcgcacctggtgcatgacccgcaagcccggtgcctga

SEQ ID NO: 5488 - DNA, 4074 bp, Artificial Sequence
  Synthetic Polynucleotide
atggccttaccagtgaccgccttgctcctgccgctggccttgctgctccacgccgccaggccggaagtgcagctggttgaatctggcggaggactggttcaggctggcggatctctgagactgtcttgtgccgccagcggcagaacctttagcatgggctggtttagacaggcccctggcaaagagagagagttcgtcgccgccatcacatactctggcggcagcccttactacgccgactctgtgaagggcagattcaccatcagccgggacaacgccaagaacaccgtgtacctccagatgaacagcctgaagcctgaggacaccgccgtgtactactgcgccgccaatccaacatacggcagcgactggaacgccgagaattggggccagggaacccaagtgacagtgtctagcggtaccggcggaggcggatctggcggcggaggtagcggtggcggaggatctgaattcgacatccagatgacacagagccctagcagcctgtctgccagcgtgggagacagagtgaccatcacatgcaaggccagcgaccacatcaacaactggctggcctggtatcagcagaagcctggacaggcccctaagctgctgatctacggcgctaccacactggaaacaggcgtgcccagcagattttctggcagcggctctggcaccgactacaccctgacaatatccagcctccagcctgaggacttcgccacctactactgtcagcagagctggaacaccccttggacattcggccagggcaccaagctggaaatcaagagactcgagggacagcctaaggccaatcctaccgtgacactgttccctccaagcagcgaagaactccaggccaacaaggccacacttgtgtgcctgatctccgacttctaccctggggctgtgacagtggcttggaaggccgatggatctcctgtgaaagccggcgtggaaaccaccaagccatccaagcagagcaacaacaaatacgccgccagctcctacctgagcctgacacctgagcagtggaagtcccacagatcctacagctgccaagtgacccacgaaggcagcaccgtggaaaagacagtggcccctacagagtgcagcggatccggcatgcggactgaagacctcccaaaggctgtggtgttcctggagcctcaatggtacagggtgctggagaaggacagtgtgactctgaagtgccagggagcctactcccctgaggacaattccacacagtggtttcacaatgagagcctcatctcaagccaggcctccagctacttcattgacgctgccacagtggacgacagtggagagtacaggtgccagacaaacctctccaccctcagtgacccggtgcagctagaagtccatatcggctggctgttgctccaggcccctcggtgggtgttcaaggaggaagaccctattcacctgaggtgtcacagctggaagaacactgctctgcataaggtcacatatttacagaatggcaaaggcaggaagtattttcatcataattctgacttctacattccaaaagccacactcaaagacagcggctcctacttctgcagggggcttgttgggagtaaaaatgtgtcttcagagactgtgaacatcaccatcactcaaggtttggcagtgtcaaccatctcatcattctttccacctggctaccaagtgtccttctgcctggtcatggtgctgctgttcgccgtggataccggcctgtacttcagcgtcaagaccaacatccggtccagcaccagagactggaaggaccacaagttcaagtggcggaaggaccctcaggacaagagggccaagcgatctggatctggagcaacaaacttctcactactcaaacaagcaggtgacgtggaggagaatcccgggcctactagtatggactggatttggcgcatccttttccttgtcggcgctgctaccggcgcgcattccttcgaacaagttcagcttcaacagcctggcgctgagctggtcaaacctggcgcttctgtgaagatgagctgcaaagccagcggctacgccttcagcagctactggatcaactggatgaagcagaaacccggccagggactcgaatggatcggccaaatctatcccggcgacggcgacaccaactacaacggcaagttcaagggcagagccacactgaccgccgatacctctagcagcacagcctacatgcagctgagcagcctgaccagcgaagatagcgccgtgtacttctgtgcccggtccatcacaacagtcgtgggctgcgctatggactattggggccagggaacaagcgtgaccgtgtctagtacgcgtgcctctacaaagggaccctccgtgtttcctctggctcccagcagcaagtctacaagcggaggaacagccgctctgggctgcctggtcaaggattactttcccgagcctgtgaccgtgtcctggaatagcggagcactgacaagcggcgtgcacacctttccagccgtgctgcaaagcagcggcctgtactctctgagcagcgtggtcacagtgcctagctctagcctgggcacccagacctacatctgcaatgtgaaccacaagcctagcaacaccaaggtggacaagagagtggaacccaagagctgtggtacccttcaggacccttgcagcaactgtccagccggaaccttttgtgataacaacagaaatcagatatgcagcccctgtccgccaaactcctttagcagtgctggcggccagcggacatgtgacatttgtcggcagtgcaaaggggttttccgcaccagaaaagagtgctcctccaccagcaatgccgagtgtgactgtaccccaggctttcactgtctcggcgctggatgtagcatgtgtgaacaggactgtaaacaggggcaagaactcacgaagaaagggtgcaaagactgctgttttgggacgttcaacgatcagaagcggggaatctgtaggccctggacaaactgttctctggacggcaagtccgtgctcgtgaatggaacaaaagagcgggacgttgtctgcggcccaagtcctgctgatcttagcccaggcgcttcctctgtgactcctccagctcctgcacgcgaacctggacactctccccagatcatctcattttttctcgctctcacatcaaccgctttgctgttcctgctcttttttctcaccctccggttctccgtggttaagagaggccggaaaaaactcctctatatctttaaacagccctttatgcgcccggtccaaacaacccaagaggaagatggctgctcttgcagattcccggaagaggaagaaggcggctgcgagctgcgcgccaagagaagcggatctggcgtgaagcagaccctgaatttcgacctgctgaagctggctggcgacgtggaatccaacccaggcccttctagaggccatatgaccgagtacaagcccacggtgcgcctcgccacccgcgacgacgtccccagggccgtacgcaccctcgccgccgcgttcgccgactaccccgccacgcgccacaccgtcgatccggaccgccacatcgagcgggtcaccgagctgcaagaactcttcctcacgcgcgtcgggctcgacatcggcaaggtgtgggtcgcggacgacggcgccgcggtggcggtctggaccacgccggagagcgtcgaagcgggggcggtgttcgccgagatcggcccgcgcatggccgagttgagcggttcccggctggccgcgcagcaacagatggaaggcctcctggcgccgcaccggcccaaggagcccgcgtggttcctggccaccgtcggcgtctcgcccgaccaccagggcaagggtctgggcagcgccgtcgtgctccccggagtggaggcggccgagcgcgccggggtgcccgccttcctggagacctccgcgccccgcaacctccccttctacgagcggctcggcttcaccgtcaccgccgacgtcgaggtgcccgaaggaccgcgcacctggtgcatgacccgcaagcccggtgcctga

SEQ ID NO: 5489 - DNA, 4485 bp, Artificial Sequence
  Synthetic Polynucleotide
atggccttaccagtgaccgccttgctcctgccgctggccttgctgctccacgccgccaggccggaagtgcagctggttgaatctggcggaggactggttcaggctggcggatctctgagactgtcttgtgccgccagcggcagaacctttagcatgggctggtttagacaggcccctggcaaagagagagagttcgtcgccgccatcacatactctggcggcagcccttactacgccgactctgtgaagggcagattcaccatcagccgggacaacgccaagaacaccgtgtacctccagatgaacagcctgaagcctgaggacaccgccgtgtactactgcgccgccaatccaacatacggcagcgactggaacgccgagaattggggccagggaacccaagtgacagtgtctagcggtaccggcggaggcggatctggcggcggaggtagcggtggcggaggatctgaattcgacatccagatgacacagagccctagcagcctgtctgccagcgtgggagacagagtgaccatcacatgcaaggccagcgaccacatcaacaactggctggcctggtatcagcagaagcctggacaggcccctaagctgctgatctacggcgctaccacactggaaacaggcgtgcccagcagattttctggcagcggctctggcaccgactacaccctgacaatatccagcctccagcctgaggacttcgccacctactactgtcagcagagctggaacaccccttggacattcggccagggcaccaagctggaaatcaagagactcgagggacagcctaaggccaatcctaccgtgacactgttccctccaagcagcgaagaactccaggccaacaaggccacacttgtgtgcctgatctccgacttctaccctggggctgtgacagtggcttggaaggccgatggatctcctgtgaaagccggcgtggaaaccaccaagccatccaagcagagcaacaacaaatacgccgccagctcctacctgagcctgacacctgagcagtggaagtcccacagatcctacagctgccaagtgacccacgaaggcagcaccgtggaaaagacagtggcccctacagagtgcagcggatccggcatgcggactgaagacctcccaaaggctgtggtgttcctggagcctcaatggtacagggtgctggagaaggacagtgtgactctgaagtgccagggagcctactcccctgaggacaattccacacagtggtttcacaatgagagcctcatctcaagccaggcctccagctacttcattgacgctgccacagtggacgacagtggagagtacaggtgccagacaaacctctccaccctcagtgacccggtgcagctagaagtccatatcggctggctgttgctccaggcccctcggtgggtgttcaaggaggaagaccctattcacctgaggtgtcacagctggaagaacactgctctgcataaggtcacatatttacagaatggcaaaggcaggaagtattttcatcataattctgacttctacattccaaaagccacactcaaagacagcggctcctacttctgcagggggcttgttgggagtaaaaatgtgtcttcagagactgtgaacatcaccatcactcaaggtttggcagtgtcaaccatctcatcattctttccacctggctaccaagtgtccttctgcctggtcatggtgctgctgttcgccgtggataccggcctgtacttcagcgtcaagaccaacatccggtccagcaccagagactggaaggaccacaagttcaagtggcggaaggaccctcaggacaagagggccaagcgatctggatctggagcaacaaacttctcactactcaaacaagcaggtgacgtggaggagaatcccgggcctactagtatggactggatttggcgcatccttttccttgtcggcgctgctaccggcgcgcattccgggcccgaagtgcaactggttgaatccggtggcggcctggtgcaagcaggcggatctctcagacttagctgtgccgcctccggcagaaccttcacaatgggatggtttaggcaggctccagggaaagagagagagttcgtcgccgccatctctctgtctcccacactggcctactacgccgactctgtgaaaggccggttcaccatctccagagataatgccaagaacaccgtggtgctgcaaatgaactctctgaaacccgaggatacagccctgtactattgtgccgctgaccggaagtccgtgatgagcatcagacccgattactggggacagggcacacaagtcacagtgtcctctggatccggcggcggaggatctggcggaggcggatctgggggcggaggctctttcgaacaagttcagcttcaacagcctggcgctgagctggtcaaacctggcgcttctgtgaagatgagctgcaaagccagcggctacgccttcagcagctactggatcaactggatgaagcagaaacccggccagggactcgaatggatcggccaaatctatcccggcgacggcgacaccaactacaacggcaagttcaagggcagagccacactgaccgccgatacctctagcagcacagcctacatgcagctgagcagcctgaccagcgaagatagcgccgtgtacttctgtgcccggtccatcacaacagtcgtgggctgcgctatggactattggggccagggaacaagcgtgaccgtgtctagtacgcgtgcctctacaaagggaccctccgtgtttcctctggctcccagcagcaagtctacaagcggaggaacagccgctctgggctgcctggtcaaggattactttcccgagcctgtgaccgtgtcctggaatagcggagcactgacaagcggcgtgcacacctttccagccgtgctgcaaagcagcggcctgtactctctgagcagcgtggtcacagtgcctagctctagcctgggcacccagacctacatctgcaatgtgaaccacaagcctagcaacaccaaggtggacaagagagtggaacccaagagctgtggtacccttcaggacccttgcagcaactgtccagccggaaccttttgtgataacaacagaaatcagatatgcagcccctgtccgccaaactcctttagcagtgctggcggccagcggacatgtgacatttgtcggcagtgcaaaggggttttccgcaccagaaaagagtgctcctccaccagcaatgccgagtgtgactgtaccccaggctttcactgtctcggcgctggatgtagcatgtgtgaacaggactgtaaacaggggcaagaactcacgaagaaagggtgcaaagactgctgttttgggacgttcaacgatcagaagcggggaatctgtaggccctggacaaactgttctctggacggcaagtccgtgctcgtgaatggaacaaaagagcgggacgttgtctgcggcccaagtcctgctgatcttagcccaggcgcttcctctgtgactcctccagctcctgcacgcgaacctggacactctccccagatcatctcattttttctcgctctcacatcaaccgctttgctgttcctgctcttttttctcaccctccggttctccgtggttaagagaggccggaaaaaactcctctatatctttaaacagccctttatgcgcccggtccaaacaacccaagaggaagatggctgctcttgcagattcccggaagaggaagaaggcggctgcgagctgcgcgccaagagaagcggatctggcgtgaagcagaccctgaatttcgacctgctgaagctggctggcgacgtggaatccaacccaggcccttctagaggccatatgaccgagtacaagcccacggtgcgcctcgccacccgcgacgacgtccccagggccgtacgcaccctcgccgccgcgttcgccgactaccccgccacgcgccacaccgtcgatccggaccgccacatcgagcgggtcaccgagctgcaagaactcttcctcacgcgcgtcgggctcgacatcggcaaggtgtgggtcgcggacgacggcgccgcggtggcggtctggaccacgccggagagcgtcgaagcgggggcggtgttcgccgagatcggcccgcgcatggccgagttgagcggttcccggctggccgcgcagcaacagatggaaggcctcctggcgccgcaccggcccaaggagcccgcgtggttcctggccaccgtcggcgtctcgcccgaccaccagggcaagggtctgggcagcgccgtcgtgctccccggagtggaggcggccgagcgcgccggggtgcccgccttcctggagacctccgcgccccgcaacctccccttctacgagcggctcggcttcaccgtcaccgccgacgtcgaggtgcccgaaggaccgcgcacctggtgcatgacccgcaagcccggtgcctga

SEQ ID NO: 5490 - DNA, 3684 bp, Artificial Sequence
  Synthetic Polynucleotide
atggccttaccagtgaccgccttgctcctgccgctggccttgctgctccacgccgccaggccggaagtgcagctggttgaatctggcggaggactggttcaggctggcggatctctgagactgtcttgtgccgccagcggcagaacctttagcatgggctggtttagacaggcccctggcaaagagagagagttcgtcgccgccatcacatactctggcggcagcccttactacgccgactctgtgaagggcagattcaccatcagccgggacaacgccaagaacaccgtgtacctccagatgaacagcctgaagcctgaggacaccgccgtgtactactgcgccgccaatccaacatacggcagcgactggaacgccgagaattggggccagggaacccaagtgacagtgtctagcctcgagggacagcctaaggccaatcctaccgtgacactgttccctccaagcagcgaagaactccaggccaacaaggccacacttgtgtgcctgatctccgacttctaccctggggctgtgacagtggcttggaaggccgatggatctcctgtgaaagccggcgtggaaaccaccaagccatccaagcagagcaacaacaaatacgccgccagctcctacctgagcctgacacctgagcagtggaagtcccacagatcctacagctgccaagtgacccacgaaggcagcaccgtggaaaagacagtggcccctacagagtgcagcggatccggcatgcggactgaagacctcccaaaggctgtggtgttcctggagcctcaatggtacagggtgctggagaaggacagtgtgactctgaagtgccagggagcctactcccctgaggacaattccacacagtggtttcacaatgagagcctcatctcaagccaggcctccagctacttcattgacgctgccacagtggacgacagtggagagtacaggtgccagacaaacctctccaccctcagtgacccggtgcagctagaagtccatatcggctggctgttgctccaggcccctcggtgggtgttcaaggaggaagaccctattcacctgaggtgtcacagctggaagaacactgctctgcataaggtcacatatttacagaatggcaaaggcaggaagtattttcatcataattctgacttctacattccaaaagccacactcaaagacagcggctcctacttctgcagggggcttgttgggagtaaaaatgtgtcttcagagactgtgaacatcaccatcactcaaggtttggcagtgtcaaccatctcatcattctttccacctggctaccaagtgtccttctgcctggtcatggtgctgctgttcgccgtggataccggcctgtacttcagcgtcaagaccaacatccggtccagcaccagagactggaaggaccacaagttcaagtggcggaaggaccctcaggacaagagggccaagcgatctggatctggagcaacaaacttctcactactcaaacaagcaggtgacgtggaggagaatcccgggcctactagtatggactggatttggcgcatccttttccttgtcggcgctgctaccggcgcgcattccgggcccgaagtgcaactggttgaatccggtggcggcctggtgcaagcaggcggatctctcagacttagctgtgccgcctccggcagaaccttcacaatgggatggtttaggcaggctccagggaaagagagagagttcgtcgccgccatctctctgtctcccacactggcctactacgccgactctgtgaaaggccggttcaccatctccagagataatgccaagaacaccgtggtgctgcaaatgaactctctgaaacccgaggatacagccctgtactattgtgccgctgaccggaagtccgtgatgagcatcagacccgattactggggacagggcacacaagtcacagtgtcctctacgcgtgcctctacaaagggaccctccgtgtttcctctggctcccagcagcaagtctacaagcggaggaacagccgctctgggctgcctggtcaaggattactttcccgagcctgtgaccgtgtcctggaatagcggagcactgacaagcggcgtgcacacctttccagccgtgctgcaaagcagcggcctgtactctctgagcagcgtggtcacagtgcctagctctagcctgggcacccagacctacatctgcaatgtgaaccacaagcctagcaacaccaaggtggacaagagagtggaacccaagagctgtggtacccttcaggacccttgcagcaactgtccagccggaaccttttgtgataacaacagaaatcagatatgcagcccctgtccgccaaactcctttagcagtgctggcggccagcggacatgtgacatttgtcggcagtgcaaaggggttttccgcaccagaaaagagtgctcctccaccagcaatgccgagtgtgactgtaccccaggctttcactgtctcggcgctggatgtagcatgtgtgaacaggactgtaaacaggggcaagaactcacgaagaaagggtgcaaagactgctgttttgggacgttcaacgatcagaagcggggaatctgtaggccctggacaaactgttctctggacggcaagtccgtgctcgtgaatggaacaaaagagcgggacgttgtctgcggcccaagtcctgctgatcttagcccaggcgcttcctctgtgactcctccagctcctgcacgcgaacctggacactctccccagatcatctcattttttctcgctctcacatcaaccgctttgctgttcctgctcttttttctcaccctccggttctccgtggttaagagaggccggaaaaaactcctctatatctttaaacagccctttatgcgcccggtccaaacaacccaagaggaagatggctgctcttgcagattcccggaagaggaagaaggcggctgcgagctgcgcgccaagagaagcggatctggcgtgaagcagaccctgaatttcgacctgctgaagctggctggcgacgtggaatccaacccaggcccttctagaggccatatgaccgagtacaagcccacggtgcgcctcgccacccgcgacgacgtccccagggccgtacgcaccctcgccgccgcgttcgccgactaccccgccacgcgccacaccgtcgatccggaccgccacatcgagcgggtcaccgagctgcaagaactcttcctcacgcgcgtcgggctcgacatcggcaaggtgtgggtcgcggacgacggcgccgcggtggcggtctggaccacgccggagagcgtcgaagcgggggcggtgttcgccgagatcggcccgcgcatggccgagttgagcggttcccggctggccgcgcagcaacagatggaaggcctcctggcgccgcaccggcccaaggagcccgcgtggttcctggccaccgtcggcgtctcgcccgaccaccagggcaagggtctgggcagcgccgtcgtgctccccggagtggaggcggccgagcgcgccggggtgcccgccttcctggagacctccgcgccccgcaacctccccttctacgagcggctcggcttcaccgtcaccgccgacgtcgaggtgcccgaaggaccgcgcacctggtgcatgacccgcaagcccggtgcctga

SEQ ID NO: 5491 - DNA, 3708 bp, Artificial Sequence
  Synthetic Polynucleotide
atggccttaccagtgaccgccttgctcctgccgctggccttgctgctccacgccgccaggccggacatccagatgacacagagccctagcagcctgtctgccagcgtgggagacagagtgaccatcacatgcaaggccagcgaccacatcaacaactggctggcctggtatcagcagaagcctggacaggcccctaagctgctgatctacggcgctaccacactggaaacaggcgtgcccagcagattttctggcagcggctctggcaccgactacaccctgacaatatccagcctccagcctgaggacttcgccacctactactgtcagcagagctggaacaccccttggacattcggccagggcaccaagctggaaatcaagagactcgaggacctgaagaacgtgttcccacctgaggtggccgtgttcgagcctagcgaggccgagatcagccacacccagaaagccaccctcgtgtgcctggctaccggcttctaccccgaccatgtggaactgtcttggtgggtcaacggcaaagaggtgcacagcggcgtgtctaccgacccccagccactgaaagaacagcccgccctgaacgacagccggtactgcctgagcagcagactgagagtgtccgccaccttctggcagaacccccggaaccacttcagatgccaggtgcagttctacggcctgagcgagaacgacgagtggacccaggacagagccaagcccgtgacccagatcgtgtctgccgaagcctggggcagagccgattgcggatccggcatgcggactgaagacctcccaaaggctgtggtgttcctggagcctcaatggtacagggtgctggagaaggacagtgtgactctgaagtgccagggagcctactcccctgaggacaattccacacagtggtttcacaatgagagcctcatctcaagccaggcctccagctacttcattgacgctgccacagtggacgacagtggagagtacaggtgccagacaaacctctccaccctcagtgacccggtgcagctagaagtccatatcggctggctgttgctccaggcccctcggtgggtgttcaaggaggaagaccctattcacctgaggtgtcacagctggaagaacactgctctgcataaggtcacatatttacagaatggcaaaggcaggaagtattttcatcataattctgacttctacattccaaaagccacactcaaagacagcggctcctacttctgcagggggcttgttgggagtaaaaatgtgtcttcagagactgtgaacatcaccatcactcaaggtttggcagtgtcaaccatctcatcattctttccacctggctaccaagtgtccttctgcctggtcatggtgctgctgttcgccgtggataccggcctgtacttcagcgtcaagaccaacatccggtccagcaccagagactggaaggaccacaagttcaagtggcggaaggaccctcaggacaagagggccaagcgatctggatctggagcaacaaacttctcactactcaaacaagcaggtgacgtggaggagaatcccgggcctactagtatggactggatttggcgcatccttttccttgtcggcgctgctaccggcgcgcattccttcgaacaagttcagcttcaacagcctggcgctgagctggtcaaacctggcgcttctgtgaagatgagctgcaaagccagcggctacgccttcagcagctactggatcaactggatgaagcagaaacccggccagggactcgaatggatcggccaaatctatcccggcgacggcgacaccaactacaacggcaagttcaagggcagagccacactgaccgccgatacctctagcagcacagcctacatgcagctgagcagcctgaccagcgaagatagcgccgtgtacttctgtgcccggtccatcacaacagtcgtgggctgcgctatggactattggggccagggaacaagcgtgaccgtgtctagtacgcgtatccagaaccctgatcctgccgtgtaccagctgcgggatagcaagagcagcgacaagagcgtgtgtctgttcaccgacttcgacagccagaccaacgtgtcccagagcaaggactccgacgtgtacatcaccgataagaccgtgctggacatgcggagcatggacttcaagagcaactccgccgtggcctggtccaacaagtccgatttcgcctgcgccaacgccttcaacaacagcattatccccgaggacacattcttcccaagccccgagagcagctgcggtacccttcaggacccttgcagcaactgtccagccggaaccttttgtgataacaacagaaatcagatatgcagcccctgtccgccaaactcctttagcagtgctggcggccagcggacatgtgacatttgtcggcagtgcaaaggggttttccgcaccagaaaagagtgctcctccaccagcaatgccgagtgtgactgtaccccaggctttcactgtctcggcgctggatgtagcatgtgtgaacaggactgtaaacaggggcaagaactcacgaagaaagggtgcaaagactgctgttttgggacgttcaacgatcagaagcggggaatctgtaggccctggacaaactgttctctggacggcaagtccgtgctcgtgaatggaacaaaagagcgggacgttgtctgcggcccaagtcctgctgatcttagcccaggcgcttcctctgtgactcctccagctcctgcacgcgaacctggacactctccccagatcatctcattttttctcgctctcacatcaaccgctttgctgttcctgctcttttttctcaccctccggttctccgtggttaagagaggccggaaaaaactcctctatatctttaaacagccctttatgcgcccggtccaaacaacccaagaggaagatggctgctcttgcagattcccggaagaggaagaaggcggctgcgagctgcgcgccaagagaagcggatctggcgtgaagcagaccctgaatttcgacctgctgaagctggctggcgacgtggaatccaacccaggcccttctagaggccatatgaccgagtacaagcccacggtgcgcctcgccacccgcgacgacgtccccagggccgtacgcaccctcgccgccgcgttcgccgactaccccgccacgcgccacaccgtcgatccggaccgccacatcgagcgggtcaccgagctgcaagaactcttcctcacgcgcgtcgggctcgacatcggcaaggtgtgggtcgcggacgacggcgccgcggtggcggtctggaccacgccggagagcgtcgaagcgggggcggtgttcgccgagatcggcccgcgcatggccgagttgagcggttcccggctggccgcgcagcaacagatggaaggcctcctggcgccgcaccggcccaaggagcccgcgtggttcctggccaccgtcggcgtctcgcccgaccaccagggcaagggtctgggcagcgccgtcgtgctccccggagtggaggcggccgagcgcgccggggtgcccgccttcctggagacctccgcgccccgcaacctccccttctacgagcggctcggcttcaccgtcaccgccgacgtcgaggtgcccgaaggaccgcgcacctggtgcatgacccgcaagcccggtgcctga

SEQ ID NO: 5492 - DNA, 4119 bp, Artificial Sequence
  Synthetic Polynucleotide
atggccttaccagtgaccgccttgctcctgccgctggccttgctgctccacgccgccaggccggaagtgcagctggttgaatctggcggaggactggttcaggctggcggatctctgagactgtcttgtgccgccagcggcagaacctttagcatgggctggtttagacaggcccctggcaaagagagagagttcgtcgccgccatcacatactctggcggcagcccttactacgccgactctgtgaagggcagattcaccatcagccgggacaacgccaagaacaccgtgtacctccagatgaacagcctgaagcctgaggacaccgccgtgtactactgcgccgccaatccaacatacggcagcgactggaacgccgagaattggggccagggaacccaagtgacagtgtctagcggtaccggcggaggcggatctggcggcggaggtagcggtggcggaggatctgaattcgacatccagatgacacagagccctagcagcctgtctgccagcgtgggagacagagtgaccatcacatgcaaggccagcgaccacatcaacaactggctggcctggtatcagcagaagcctggacaggcccctaagctgctgatctacggcgctaccacactggaaacaggcgtgcccagcagattttctggcagcggctctggcaccgactacaccctgacaatatccagcctccagcctgaggacttcgccacctactactgtcagcagagctggaacaccccttggacattcggccagggcaccaagctggaaatcaagagactcgaggacctgaagaacgtgttcccacctgaggtggccgtgttcgagcctagcgaggccgagatcagccacacccagaaagccaccctcgtgtgcctggctaccggcttctaccccgaccatgtggaactgtcttggtgggtcaacggcaaagaggtgcacagcggcgtgtctaccgacccccagccactgaaagaacagcccgccctgaacgacagccggtactgcctgagcagcagactgagagtgtccgccaccttctggcagaacccccggaaccacttcagatgccaggtgcagttctacggcctgagcgagaacgacgagtggacccaggacagagccaagcccgtgacccagatcgtgtctgccgaagcctggggcagagccgattgcggatccggcatgcggactgaagacctcccaaaggctgtggtgttcctggagcctcaatggtacagggtgctggagaaggacagtgtgactctgaagtgccagggagcctactcccctgaggacaattccacacagtggtttcacaatgagagcctcatctcaagccaggcctccagctacttcattgacgctgccacagtggacgacagtggagagtacaggtgccagacaaacctctccaccctcagtgacccggtgcagctagaagtccatatcggctggctgttgctccaggcccctcggtgggtgttcaaggaggaagaccctattcacctgaggtgtcacagctggaagaacactgctctgcataaggtcacatatttacagaatggcaaaggcaggaagtattttcatcataattctgacttctacattccaaaagccacactcaaagacagcggctcctacttctgcagggggcttgttgggagtaaaaatgtgtcttcagagactgtgaacatcaccatcactcaaggtttggcagtgtcaaccatctcatcattctttccacctggctaccaagtgtccttctgcctggtcatggtgctgctgttcgccgtggataccggcctgtacttcagcgtcaagaccaacatccggtccagcaccagagactggaaggaccacaagttcaagtggcggaaggaccctcaggacaagagggccaagcgatctggatctggagcaacaaacttctcactactcaaacaagcaggtgacgtggaggagaatcccgggcctactagtatggactggatttggcgcatccttttccttgtcggcgctgctaccggcgcgcattccttcgaacaagttcagcttcaacagcctggcgctgagctggtcaaacctggcgcttctgtgaagatgagctgcaaagccagcggctacgccttcagcagctactggatcaactggatgaagcagaaacccggccagggactcgaatggatcggccaaatctatcccggcgacggcgacaccaactacaacggcaagttcaagggcagagccacactgaccgccgatacctctagcagcacagcctacatgcagctgagcagcctgaccagcgaagatagcgccgtgtacttctgtgcccggtccatcacaacagtcgtgggctgcgctatggactattggggccagggaacaagcgtgaccgtgtctagtacgcgtatccagaaccctgatcctgccgtgtaccagctgcgggatagcaagagcagcgacaagagcgtgtgtctgttcaccgacttcgacagccagaccaacgtgtcccagagcaaggactccgacgtgtacatcaccgataagaccgtgctggacatgcggagcatggacttcaagagcaactccgccgtggcctggtccaacaagtccgatttcgcctgcgccaacgccttcaacaacagcattatccccgaggacacattcttcccaagccccgagagcagctgcggtacccttcaggacccttgcagcaactgtccagccggaaccttttgtgataacaacagaaatcagatatgcagcccctgtccgccaaactcctttagcagtgctggcggccagcggacatgtgacatttgtcggcagtgcaaaggggttttccgcaccagaaaagagtgctcctccaccagcaatgccgagtgtgactgtaccccaggctttcactgtctcggcgctggatgtagcatgtgtgaacaggactgtaaacaggggcaagaactcacgaagaaagggtgcaaagactgctgttttgggacgttcaacgatcagaagcggggaatctgtaggccctggacaaactgttctctggacggcaagtccgtgctcgtgaatggaacaaaagagcgggacgttgtctgcggcccaagtcctgctgatcttagcccaggcgcttcctctgtgactcctccagctcctgcacgcgaacctggacactctccccagatcatctcattttttctcgctctcacatcaaccgctttgctgttcctgctcttttttctcaccctccggttctccgtggttaagagaggccggaaaaaactcctctatatctttaaacagccctttatgcgcccggtccaaacaacccaagaggaagatggctgctcttgcagattcccggaagaggaagaaggcggctgcgagctgcgcgccaagagaagcggatctggcgtgaagcagaccctgaatttcgacctgctgaagctggctggcgacgtggaatccaacccaggcccttctagaggccatatgaccgagtacaagcccacggtgcgcctcgccacccgcgacgacgtccccagggccgtacgcaccctcgccgccgcgttcgccgactaccccgccacgcgccacaccgtcgatccggaccgccacatcgagcgggtcaccgagctgcaagaactcttcctcacgcgcgtcgggctcgacatcggcaaggtgtgggtcgcggacgacggcgccgcggtggcggtctggaccacgccggagagcgtcgaagcgggggcggtgttcgccgagatcggcccgcgcatggccgagttgagcggttcccggctggccgcgcagcaacagatggaaggcctcctggcgccgcaccggcccaaggagcccgcgtggttcctggccaccgtcggcgtctcgcccgaccaccagggcaagggtctgggcagcgccgtcgtgctccccggagtggaggcggccgagcgcgccggggtgcccgccttcctggagacctccgcgccccgcaacctccccttctacgagcggctcggcttcaccgtcaccgccgacgtcgaggtgcccgaaggaccgcgcacctggtgcatgacccgcaagcccggtgcctga

SEQ ID NO: 5493 - DNA, 4530 bp, Artificial Sequence
  Synthetic Polynucleotide
atggccttaccagtgaccgccttgctcctgccgctggccttgctgctccacgccgccaggccggaagtgcagctggttgaatctggcggaggactggttcaggctggcggatctctgagactgtcttgtgccgccagcggcagaacctttagcatgggctggtttagacaggcccctggcaaagagagagagttcgtcgccgccatcacatactctggcggcagcccttactacgccgactctgtgaagggcagattcaccatcagccgggacaacgccaagaacaccgtgtacctccagatgaacagcctgaagcctgaggacaccgccgtgtactactgcgccgccaatccaacatacggcagcgactggaacgccgagaattggggccagggaacccaagtgacagtgtctagcggtaccggcggaggcggatctggcggcggaggtagcggtggcggaggatctgaattcgacatccagatgacacagagccctagcagcctgtctgccagcgtgggagacagagtgaccatcacatgcaaggccagcgaccacatcaacaactggctggcctggtatcagcagaagcctggacaggcccctaagctgctgatctacggcgctaccacactggaaacaggcgtgcccagcagattttctggcagcggctctggcaccgactacaccctgacaatatccagcctccagcctgaggacttcgccacctactactgtcagcagagctggaacaccccttggacattcggccagggcaccaagctggaaatcaagagactcgaggacctgaagaacgtgttcccacctgaggtggccgtgttcgagcctagcgaggccgagatcagccacacccagaaagccaccctcgtgtgcctggctaccggcttctaccccgaccatgtggaactgtcttggtgggtcaacggcaaagaggtgcacagcggcgtgtctaccgacccccagccactgaaagaacagcccgccctgaacgacagccggtactgcctgagcagcagactgagagtgtccgccaccttctggcagaacccccggaaccacttcagatgccaggtgcagttctacggcctgagcgagaacgacgagtggacccaggacagagccaagcccgtgacccagatcgtgtctgccgaagcctggggcagagccgattgcggatccggcatgcggactgaagacctcccaaaggctgtggtgttcctggagcctcaatggtacagggtgctggagaaggacagtgtgactctgaagtgccagggagcctactcccctgaggacaattccacacagtggtttcacaatgagagcctcatctcaagccaggcctccagctacttcattgacgctgccacagtggacgacagtggagagtacaggtgccagacaaacctctccaccctcagtgacccggtgcagctagaagtccatatcggctggctgttgctccaggcccctcggtgggtgttcaaggaggaagaccctattcacctgaggtgtcacagctggaagaacactgctctgcataaggtcacatatttacagaatggcaaaggcaggaagtattttcatcataattctgacttctacattccaaaagccacactcaaagacagcggctcctacttctgcagggggcttgttgggagtaaaaatgtgtcttcagagactgtgaacatcaccatcactcaaggtttggcagtgtcaaccatctcatcattctttccacctggctaccaagtgtccttctgcctggtcatggtgctgctgttcgccgtggataccggcctgtacttcagcgtcaagaccaacatccggtccagcaccagagactggaaggaccacaagttcaagtggcggaaggaccctcaggacaagagggccaagcgatctggatctggagcaacaaacttctcactactcaaacaagcaggtgacgtggaggagaatcccgggcctactagtatggactggatttggcgcatccttttccttgtcggcgctgctaccggcgcgcattccgggcccgaagtgcaactggttgaatccggtggcggcctggtgcaagcaggcggatctctcagacttagctgtgccgcctccggcagaaccttcacaatgggatggtttaggcaggctccagggaaagagagagagttcgtcgccgccatctctctgtctcccacactggcctactacgccgactctgtgaaaggccggttcaccatctccagagataatgccaagaacaccgtggtgctgcaaatgaactctctgaaacccgaggatacagccctgtactattgtgccgctgaccggaagtccgtgatgagcatcagacccgattactggggacagggcacacaagtcacagtgtcctctggatccggcggcggaggatctggcggaggcggatctgggggcggaggctctttcgaacaagttcagcttcaacagcctggcgctgagctggtcaaacctggcgcttctgtgaagatgagctgcaaagccagcggctacgccttcagcagctactggatcaactggatgaagcagaaacccggccagggactcgaatggatcggccaaatctatcccggcgacggcgacaccaactacaacggcaagttcaagggcagagccacactgaccgccgatacctctagcagcacagcctacatgcagctgagcagcctgaccagcgaagatagcgccgtgtacttctgtgcccggtccatcacaacagtcgtgggctgcgctatggactattggggccagggaacaagcgtgaccgtgtctagtacgcgtatccagaaccctgatcctgccgtgtaccagctgcgggatagcaagagcagcgacaagagcgtgtgtctgttcaccgacttcgacagccagaccaacgtgtcccagagcaaggactccgacgtgtacatcaccgataagaccgtgctggacatgcggagcatggacttcaagagcaactccgccgtggcctggtccaacaagtccgatttcgcctgcgccaacgccttcaacaacagcattatccccgaggacacattcttcccaagccccgagagcagctgcggtacccttcaggacccttgcagcaactgtccagccggaaccttttgtgataacaacagaaatcagatatgcagcccctgtccgccaaactcctttagcagtgctggcggccagcggacatgtgacatttgtcggcagtgcaaaggggttttccgcaccagaaaagagtgctcctccaccagcaatgccgagtgtgactgtaccccaggctttcactgtctcggcgctggatgtagcatgtgtgaacaggactgtaaacaggggcaagaactcacgaagaaagggtgcaaagactgctgttttgggacgttcaacgatcagaagcggggaatctgtaggccctggacaaactgttctctggacggcaagtccgtgctcgtgaatggaacaaaagagcgggacgttgtctgcggcccaagtcctgctgatcttagcccaggcgcttcctctgtgactcctccagctcctgcacgcgaacctggacactctccccagatcatctcattttttctcgctctcacatcaaccgctttgctgttcctgctcttttttctcaccctccggttctccgtggttaagagaggccggaaaaaactcctctatatctttaaacagccctttatgcgcccggtccaaacaacccaagaggaagatggctgctcttgcagattcccggaagaggaagaaggcggctgcgagctgcgcgccaagagaagcggatctggcgtgaagcagaccctgaatttcgacctgctgaagctggctggcgacgtggaatccaacccaggcccttctagaggccatatgaccgagtacaagcccacggtgcgcctcgccacccgcgacgacgtccccagggccgtacgcaccctcgccgccgcgttcgccgactaccccgccacgcgccacaccgtcgatccggaccgccacatcgagcgggtcaccgagctgcaagaactcttcctcacgcgcgtcgggctcgacatcggcaaggtgtgggtcgcggacgacggcgccgcggtggcggtctggaccacgccggagagcgtcgaagcgggggcggtgttcgccgagatcggcccgcgcatggccgagttgagcggttcccggctggccgcgcagcaacagatggaaggcctcctggcgccgcaccggcccaaggagcccgcgtggttcctggccaccgtcggcgtctcgcccgaccaccagggcaagggtctgggcagcgccgtcgtgctccccggagtggaggcggccgagcgcgccggggtgcccgccttcctggagacctccgcgccccgcaacctccccttctacgagcggctcggcttcaccgtcaccgccgacgtcgaggtgcccgaaggaccgcgcacctggtgcatgacccgcaagcccggtgcctga

SEQ ID NO: 5494 - DNA, 3729 bp, Artificial Sequence
  Synthetic Polynucleotide
atggccttaccagtgaccgccttgctcctgccgctggccttgctgctccacgccgccaggccggaagtgcagctggttgaatctggcggaggactggttcaggctggcggatctctgagactgtcttgtgccgccagcggcagaacctttagcatgggctggtttagacaggcccctggcaaagagagagagttcgtcgccgccatcacatactctggcggcagcccttactacgccgactctgtgaagggcagattcaccatcagccgggacaacgccaagaacaccgtgtacctccagatgaacagcctgaagcctgaggacaccgccgtgtactactgcgccgccaatccaacatacggcagcgactggaacgccgagaattggggccagggaacccaagtgacagtgtctagcctcgaggacctgaagaacgtgttcccacctgaggtggccgtgttcgagcctagcgaggccgagatcagccacacccagaaagccaccctcgtgtgcctggctaccggcttctaccccgaccatgtggaactgtcttggtgggtcaacggcaaagaggtgcacagcggcgtgtctaccgacccccagccactgaaagaacagcccgccctgaacgacagccggtactgcctgagcagcagactgagagtgtccgccaccttctggcagaacccccggaaccacttcagatgccaggtgcagttctacggcctgagcgagaacgacgagtggacccaggacagagccaagcccgtgacccagatcgtgtctgccgaagcctggggcagagccgattgcggatccggcatgcggactgaagacctcccaaaggctgtggtgttcctggagcctcaatggtacagggtgctggagaaggacagtgtgactctgaagtgccagggagcctactcccctgaggacaattccacacagtggtttcacaatgagagcctcatctcaagccaggcctccagctacttcattgacgctgccacagtggacgacagtggagagtacaggtgccagacaaacctctccaccctcagtgacccggtgcagctagaagtccatatcggctggctgttgctccaggcccctcggtgggtgttcaaggaggaagaccctattcacctgaggtgtcacagctggaagaacactgctctgcataaggtcacatatttacagaatggcaaaggcaggaagtattttcatcataattctgacttctacattccaaaagccacactcaaagacagcggctcctacttctgcagggggcttgttgggagtaaaaatgtgtcttcagagactgtgaacatcaccatcactcaaggtttggcagtgtcaaccatctcatcattctttccacctggctaccaagtgtccttctgcctggtcatggtgctgctgttcgccgtggataccggcctgtacttcagcgtcaagaccaacatccggtccagcaccagagactggaaggaccacaagttcaagtggcggaaggaccctcaggacaagagggccaagcgatctggatctggagcaacaaacttctcactactcaaacaagcaggtgacgtggaggagaatcccgggcctactagtatggactggatttggcgcatccttttccttgtcggcgctgctaccggcgcgcattccgggcccgaagtgcaactggttgaatccggtggcggcctggtgcaagcaggcggatctctcagacttagctgtgccgcctccggcagaaccttcacaatgggatggtttaggcaggctccagggaaagagagagagttcgtcgccgccatctctctgtctcccacactggcctactacgccgactctgtgaaaggccggttcaccatctccagagataatgccaagaacaccgtggtgctgcaaatgaactctctgaaacccgaggatacagccctgtactattgtgccgctgaccggaagtccgtgatgagcatcagacccgattactggggacagggcacacaagtcacagtgtcctctacgcgtatccagaaccctgatcctgccgtgtaccagctgcgggatagcaagagcagcgacaagagcgtgtgtctgttcaccgacttcgacagccagaccaacgtgtcccagagcaaggactccgacgtgtacatcaccgataagaccgtgctggacatgcggagcatggacttcaagagcaactccgccgtggcctggtccaacaagtccgatttcgcctgcgccaacgccttcaacaacagcattatccccgaggacacattcttcccaagccccgagagcagctgcggtacccttcaggacccttgcagcaactgtccagccggaaccttttgtgataacaacagaaatcagatatgcagcccctgtccgccaaactcctttagcagtgctggcggccagcggacatgtgacatttgtcggcagtgcaaaggggttttccgcaccagaaaagagtgctcctccaccagcaatgccgagtgtgactgtaccccaggctttcactgtctcggcgctggatgtagcatgtgtgaacaggactgtaaacaggggcaagaactcacgaagaaagggtgcaaagactgctgttttgggacgttcaacgatcagaagcggggaatctgtaggccctggacaaactgttctctggacggcaagtccgtgctcgtgaatggaacaaaagagcgggacgttgtctgcggcccaagtcctgctgatcttagcccaggcgcttcctctgtgactcctccagctcctgcacgcgaacctggacactctccccagatcatctcattttttctcgctctcacatcaaccgctttgctgttcctgctcttttttctcaccctccggttctccgtggttaagagaggccggaaaaaactcctctatatctttaaacagccctttatgcgcccggtccaaacaacccaagaggaagatggctgctcttgcagattcccggaagaggaagaaggcggctgcgagctgcgcgccaagagaagcggatctggcgtgaagcagaccctgaatttcgacctgctgaagctggctggcgacgtggaatccaacccaggcccttctagaggccatatgaccgagtacaagcccacggtgcgcctcgccacccgcgacgacgtccccagggccgtacgcaccctcgccgccgcgttcgccgactaccccgccacgcgccacaccgtcgatccggaccgccacatcgagcgggtcaccgagctgcaagaactcttcctcacgcgcgtcgggctcgacatcggcaaggtgtgggtcgcggacgacggcgccgcggtggcggtctggaccacgccggagagcgtcgaagcgggggcggtgttcgccgagatcggcccgcgcatggccgagttgagcggttcccggctggccgcgcagcaacagatggaaggcctcctggcgccgcaccggcccaaggagcccgcgtggttcctggccaccgtcggcgtctcgcccgaccaccagggcaagggtctgggcagcgccgtcgtgctccccggagtggaggcggccgagcgcgccggggtgcccgccttcctggagacctccgcgccccgcaacctccccttctacgagcggctcggcttcaccgtcaccgccgacgtcgaggtgcccgaaggaccgcgcacctggtgcatgacccgcaagcccggtgcctga

SEQ ID NO: 5495 - DNA, 1902 bp, Artificial Sequence; identical to SEQ ID NO: 1638
  Synthetic Polynucleotide

SEQ ID NO: 5496 - DNA, 1497 bp, Artificial Sequence
  Synthetic Polynucleotide
atggccttaccagtgaccgccttgctcctgccgctggccttgctgctccacgccgccaggccggacatccagatgacacagagccctagcagcctgtctgccagcgtgggagacagagtgaccatcacatgcaaggccagcgaccacatcaacaactggctggcctggtatcagcagaagcctggacaggcccctaagctgctgatctacggcgctaccacactggaaacaggcgtgcccagcagattttctggcagcggctctggcaccgactacaccctgacaatatccagcctccagcctgaggacttcgccacctactactgtcagcagagctggaacaccccttggacattcggccagggcaccaagctggaaatcaagagaggcggaggcggaagtggaggcggaggatctggcggcggaggctctcaagttcagcttcaacagcctggcgctgagctggtcaaacctggcgcttctgtgaagatgagctgcaaagccagcggctacgccttcagcagctactggatcaactggatgaagcagaaacccggccagggactcgaatggatcggccaaatctatcccggcgacggcgacaccaactacaacggcaagttcaagggcagagccacactgaccgccgatacctctagcagcacagcctacatgcagctgagcagcctgaccagcgaagatagcgccgtgtacttctgtgcccggtccatcacaacagtcgtgggctgcgctatggactattggggccagggaacaagcgtgaccgtgtctagtacgcgtcttcaggacccttgcagcaactgtccagccggaaccttttgtgataacaacagaaatcagatatgcagcccctgtccgccaaactcctttagcagtgctggcggccagcggacatgtgacatttgtcggcagtgcaaaggggttttccgcaccagaaaagagtgctcctccaccagcaatgccgagtgtgactgtaccccaggctttcactgtctcggcgctggatgtagcatgtgtgaacaggactgtaaacaggggcaagaactcacgaagaaagggtgcaaagactgctgttttgggacgttcaacgatcagaagcggggaatctgtaggccctggacaaactgttctctggacggcaagtccgtgctcgtgaatggaacaaaagagcgggacgttgtctgcggcccaagtcctgctgatcttagcccaggcgcttcctctgtgactcctccagctcctgcacgcgaacctggacactctccccagatcatctcattttttctcgctctcacatcaaccgctttgctgttcctgctcttttttctcaccctccggttctccgtggttaagagaggccggaaaaaactcctctatatctttaaacagccctttatgcgcccggtccaaacaacccaagaggaagatggctgctcttgcagattcccggaagaggaagaaggcggctgcgagctg

SEQ ID NO: 5497 - DNA, 1497 bp, Artificial Sequence
  Synthetic Polynucleotide
atggccttaccagtgaccgccttgctcctgccgctggccttgctgctccacgccgccaggccggagatcgtgctgacacagagccctgccaccctgtctctgagccctggcgaaagagccaccctgagctgtagagccagccagagcgtgtccagctacctggcctggtatcagcagaagcccggccaggctccccggctgctgatctacgatgccagcaatagagccaccggcatccccgccagattttccggctctggcagcggcaccgacttcaccctgaccatcagctccctggaacccgaggacttcgccgtgtactactgccagcagcggagcaactggcccatcacattcggccagggcacccggctggaaatcaaaggcggaggcggaagtggaggcggaggatctggcggcggaggctctgaagtgcagctggtggaatcaggcggcggactggtgcagcctggcagaagcctgagactgagctgtgccgccagcggcttcaccttcaacgactacgccatgcactgggtgcgccaggcccctggaaaaggactggaatgggtgtccacaatcagctggaacagcggcagcatcggctacgccgatagcgtgaagggccggttcaccatcagccgggacaacgccaagaagtccctgtacctccagatgaacagcctgcgggccgaggacacagccctgtactattgcgccaaggacatccagtacggcaactactactacggcatggacgtgtggggccagggaaccaccgtgaccgtgtcatctacgcgtcttcaggacccttgcagcaactgtccagccggaaccttttgtgataacaacagaaatcagatatgcagcccctgtccgccaaactcctttagcagtgctggcggccagcggacatgtgacatttgtcggcagtgcaaaggggttttccgcaccagaaaagagtgctcctccaccagcaatgccgagtgtgactgtaccccaggctttcactgtctcggcgctggatgtagcatgtgtgaacaggactgtaaacaggggcaagaactcacgaagaaagggtgcaaagactgctgttttgggacgttcaacgatcagaagcggggaatctgtaggccctggacaaactgttctctggacggcaagtccgtgctcgtgaatggaacaaaagagcgggacgttgtctgcggcccaagtcctgctgatcttagcccaggcgcttcctctgtgactcctccagctcctgcacgcgaacctggacactctccccagatcatctcattttttctcgctctcacatcaaccgctttgctgttcctgctcttttttctcaccctccggttctccgtggttaagagaggccggaaaaaactcctctatatctttaaacagccctttatgcgcccggtccaaacaacccaagaggaagatggctgctcttgcagattcccggaagaggaagaaggcggctgcgagctg

SEQ ID NO: 5498 - DNA, 1119 bp, Artificial Sequence
  Synthetic Polynucleotide
atggccttaccagtgaccgccttgctcctgccgctggccttgctgctccacgccgccaggccggaagtgcagctggttgaatctggcggaggactggttcaggctggcggatctctgagactgtcttgtgccgccagcggcagaacctttagcatgggctggtttagacaggcccctggcaaagagagagagttcgtcgccgccatcacatactctggcggcagcccttactacgccgactctgtgaagggcagattcaccatcagccgggacaacgccaagaacaccgtgtacctccagatgaacagcctgaagcctgaggacaccgccgtgtactactgcgccgccaatccaacatacggcagcgactggaacgccgagaattggggccagggaacccaagtgacagtgtctagcacgcgtcttcaggacccttgcagcaactgtccagccggaaccttttgtgataacaacagaaatcagatatgcagcccctgtccgccaaactcctttagcagtgctggcggccagcggacatgtgacatttgtcggcagtgcaaaggggttttccgcaccagaaaagagtgctcctccaccagcaatgccgagtgtgactgtaccccaggctttcactgtctcggcgctggatgtagcatgtgtgaacaggactgtaaacaggggcaagaactcacgaagaaagggtgcaaagactgctgttttgggacgttcaacgatcagaagcggggaatctgtaggccctggacaaactgttctctggacggcaagtccgtgctcgtgaatggaacaaaagagcgggacgttgtctgcggcccaagtcctgctgatcttagcccaggcgcttcctctgtgactcctccagctcctgcacgcgaacctggacactctccccagatcatctcattttttctcgctctcacatcaaccgctttgctgttcctgctcttttttctcaccctccggttctccgtggttaagagaggccggaaaaaactcctctatatctttaaacagccctttatgcgcccggtccaaacaacccaagaggaagatggctgctcttgcagattcccggaagaggaagaaggcggctgcgagctg

SEQ ID NO: 5499 - DNA, 1119 bp, Artificial Sequence
  Synthetic Polynucleotide
atggccttaccagtgaccgccttgctcctgccgctggccttgctgctccacgccgccaggccgcagctccagttgcaagagagcggccctggcttggtaaaaccttccgagacccttagcctcacatgcacggttagtgggggcagcatttcctcaggtgattactattggggatggattcggcaacccccgggtaaaggattggagtggattggtcatatttattatagtggagcgacgtactacaacccaagtctcaaatccagggttacaatatccgtcgatacgagcaggaaccaattcagcttgaaactttctagtgtcaccgcagcagacacagccgtctattactgtacgcgggatgactccagtaattggcggtcccgagggcaagggacactggtcacggtctcctcaacgcgtcttcaggacccttgcagcaactgtccagccggaaccttttgtgataacaacagaaatcagatatgcagcccctgtccgccaaactcctttagcagtgctggcggccagcggacatgtgacatttgtcggcagtgcaaaggggttttccgcaccagaaaagagtgctcctccaccagcaatgccgagtgtgactgtaccccaggctttcactgtctcggcgctggatgtagcatgtgtgaacaggactgtaaacaggggcaagaactcacgaagaaagggtgcaaagactgctgttttgggacgttcaacgatcagaagcggggaatctgtaggccctggacaaactgttctctggacggcaagtccgtgctcgtgaatggaacaaaagagcgggacgttgtctgcggcccaagtcctgctgatcttagcccaggcgcttcctctgtgactcctccagctcctgcacgcgaacctggacactctccccagatcatctcattttttctcgctctcacatcaaccgctttgctgttcctgctcttttttctcaccctccggttctccgtggttaagagaggccggaaaaaactcctctatatctttaaacagccctttatgcgcccggtccaaacaacccaagaggaagatggctgctcttgcagattcccggaagaggaagaaggcggctgcgagctg

SEQ ID NO: 5500 - DNA, 1119 bp, Artificial Sequence
  Synthetic Polynucleotide
atggccttaccagtgaccgccttgctcctgccgctggccttgctgctccacgccgccaggccgcagctccagctgcaagagtctggacctggcctggtcaagcctagcgagacactgagcctgacctgtaccgtgtccggcgatagcatcagcagcggcgattactactggggctggatcagacagcctcctggcaaaggactggaatggatcggccacatctactacagcggcgtgacctactacaaccccagcctgaagtccagagtgaccatcagcgtggacaccagccggaaccagttctccctgaagctgtctagcgtgacagccgccgataccgccgtgtactactgcaccagagaggacagcagcaactggcggagtagaggccagggaacactggtcacagttagctctacgcgtcttcaggacccttgcagcaactgtccagccggaaccttttgtgataacaacagaaatcagatatgcagcccctgtccgccaaactcctttagcagtgctggcggccagcggacatgtgacatttgtcggcagtgcaaaggggttttccgcaccagaaaagagtgctcctccaccagcaatgccgagtgtgactgtaccccaggctttcactgtctcggcgctggatgtagcatgtgtgaacaggactgtaaacaggggcaagaactcacgaagaaagggtgcaaagactgctgttttgggacgttcaacgatcagaagcggggaatctgtaggccctggacaaactgttctctggacggcaagtccgtgctcgtgaatggaacaaaagagcgggacgttgtctgcggcccaagtcctgctgatcttagcccaggcgcttcctctgtgactcctccagctcctgcacgcgaacctggacactctccccagatcatctcattttttctcgctctcacatcaaccgctttgctgttcctgctcttttttctcaccctccggttctccgtggttaagagaggccggaaaaaactcctctatatctttaaacagccctttatgcgcccggtccaaacaacccaagaggaagatggctgctcttgcagattcccggaagaggaagaaggcggctgcgagctg

SEQ ID NO: 5501 - DNA, 1125 bp, Artificial Sequence
  Synthetic Polynucleotide
atggccttaccagtgaccgccttgctcctgccgctggccttgctgctccacgccgccaggccggaagttcagctgcaagagtctggcggaggactggttcaacctggcggaagcctgagactgtcttgtgccgcctctggcagaaccttcagcagcctgttcatgggctggttcagacaggcccctggcaaagagagagaactggtcgccgccatcagccggtacagcctgtacacctactacgccgacagcgtgaagggcagattcaccatcagcgccgacaacgccaagaacgccgtgtacctccagatgaacagcctgaagccagaggacacagccgtgtactactgcgccagcaaacttgagtacaccagcaacgactacgacagctggggccagggaacccaagtgacagtctcttctacgcgtcttcaggacccttgcagcaactgtccagccggaaccttttgtgataacaacagaaatcagatatgcagcccctgtccgccaaactcctttagcagtgctggcggccagcggacatgtgacatttgtcggcagtgcaaaggggttttccgcaccagaaaagagtgctcctccaccagcaatgccgagtgtgactgtaccccaggctttcactgtctcggcgctggatgtagcatgtgtgaacaggactgtaaacaggggcaagaactcacgaagaaagggtgcaaagactgctgttttgggacgttcaacgatcagaagcggggaatctgtaggccctggacaaactgttctctggacggcaagtccgtgctcgtgaatggaacaaaagagcgggacgttgtctgcggcccaagtcctgctgatcttagcccaggcgcttcctctgtgactcctccagctcctgcacgcgaacctggacactctccccagatcatctcattttttctcgctctcacatcaaccgctttgctgttcctgctcttttttctcaccctccggttctccgtggttaagagaggccggaaaaaactcctctatatctttaaacagccctttatgcgcccggtccaaacaacccaagaggaagatggctgctcttgcagattcccggaagaggaagaaggcggctgcgagctg

SEQ ID NO: 5502 - DNA, 1149 bp, Artificial Sequence
  Synthetic Polynucleotide
atggccttaccagtgaccgccttgctcctgccgctggccttgctgctccacgccgccaggccggaagtgcagctggttgaatctggcggaggactggttcagcctggcggatctctgagactgtcttgtgccgcctctggcttcgccagcgactactatatcatcggctggttcagacaggcccctggcaaagagagagagggcgtcagctgtatcagcagcagatacgccaacaccaactacgccgacagcgtgaagggcagattcaccatcagccgggacaacgccaagaacaccgtgtacctccagatgaacagcctgaagcctgaggacaccgccgtgtactactgtgccgccgacaccagaagatacacctgtcctgacattgccaccatgcaccggaacttcgattcttggggccagggcacactggtcaccgtttcttctacgcgtcttcaggacccttgcagcaactgtccagccggaaccttttgtgataacaacagaaatcagatatgcagcccctgtccgccaaactcctttagcagtgctggcggccagcggacatgtgacatttgtcggcagtgcaaaggggttttccgcaccagaaaagagtgctcctccaccagcaatgccgagtgtgactgtaccccaggctttcactgtctcggcgctggatgtagcatgtgtgaacaggactgtaaacaggggcaagaactcacgaagaaagggtgcaaagactgctgttttgggacgttcaacgatcagaagcggggaatctgtaggccctggacaaactgttctctggacggcaagtccgtgctcgtgaatggaacaaaagagcgggacgttgtctgcggcccaagtcctgctgatcttagcccaggcgcttcctctgtgactcctccagctcctgcacgcgaacctggacactctccccagatcatctcattttttctcgctctcacatcaaccgctttgctgttcctgctcttttttctcaccctccggttctccgtggttaagagaggccggaaaaaactcctctatatctttaaacagccctttatgcgcccggtccaaacaacccaagaggaagatggctgctcttgcagattcccggaagaggaagaaggcggctgcgagctg

SEQ ID NO: 5503 - DNA, 1137 bp, Artificial Sequence
  Synthetic Polynucleotide
atggccttaccagtgaccgccttgctcctgccgctggccttgctgctccacgccgccaggccggaagtgcaactggtggaatctggaggctctctggtgcagccagggggaagcctgagactgtcttgtgccgcttccggcttcaccttcgacgactacgccatgagctgggtgcgccaggtgccaggcaaaggcctggaatgggtgtccagcatcaactggagcggcacccacaccgattacgccgactccgtgaaaggcagattcacaatcagcagaaacaacgccaacaataccctgtacctgcagatgaactccctgaagtctgaggatacagcagtgtattattgcgccaagaactggcgggacgccggcaccacttggtttgagaaaagcggctctgccggacagggaacccaagtgacagtgtcctccacgcgtcttcaggacccttgcagcaactgtccagccggaaccttttgtgataacaacagaaatcagatatgcagcccctgtccgccaaactcctttagcagtgctggcggccagcggacatgtgacatttgtcggcagtgcaaaggggttttccgcaccagaaaagagtgctcctccaccagcaatgccgagtgtgactgtaccccaggctttcactgtctcggcgctggatgtagcatgtgtgaacaggactgtaaacaggggcaagaactcacgaagaaagggtgcaaagactgctgttttgggacgttcaacgatcagaagcggggaatctgtaggccctggacaaactgttctctggacggcaagtccgtgctcgtgaatggaacaaaagagcgggacgttgtctgcggcccaagtcctgctgatcttagcccaggcgcttcctctgtgactcctccagctcctgcacgcgaacctggacactctccccagatcatctcattttttctcgctctcacatcaaccgctttgctgttcctgctcttttttctcaccctccggttctccgtggttaagagaggccggaaaaaactcctctatatctttaaacagccctttatgcgcccggtccaaacaacccaagaggaagatggctgctcttgcagattcccggaagaggaagaaggcggctgcgagctg

SEQ ID NO: 5504 - DNA, 1122 bp, Artificial Sequence
  Synthetic Polynucleotide
atggccttaccagtgaccgccttgctcctgccgctggccttgctgctccacgccgccaggccggaggtgcagctggttgaatctggcggaggactggttcagcctggcggatctctgagactgtcttgtgccgccagcggcttcaacatcaaggatacctgtatcggctgggttcgcagagcccctggcaaagaggaagaactggtcgccaaaatctgcaagtacagcggccacaccagatacgccgacagcgtgaagggcagattcaccatcagcgccgacaccagcaagaacaccgcctacctccagatgaacagcctgagagccgaggacaccgccgtgtactattgtgccgctgtgtccgtcagagatgggcactacaattactggggccagggcaccaccgtgaccgtttcttcaacgcgtcttcaggacccttgcagcaactgtccagccggaaccttttgtgataacaacagaaatcagatatgcagcccctgtccgccaaactcctttagcagtgctggcggccagcggacatgtgacatttgtcggcagtgcaaaggggttttccgcaccagaaaagagtgctcctccaccagcaatgccgagtgtgactgtaccccaggctttcactgtctcggcgctggatgtagcatgtgtgaacaggactgtaaacaggggcaagaactcacgaagaaagggtgcaaagactgctgttttgggacgttcaacgatcagaagcggggaatctgtaggccctggacaaactgttctctggacggcaagtccgtgctcgtgaatggaacaaaagagcgggacgttgtctgcggcccaagtcctgctgatcttagcccaggcgcttcctctgtgactcctccagctcctgcacgcgaacctggacactctccccagatcatctcattttttctcgctctcacatcaaccgctttgctgttcctgctcttttttctcaccctccggttctccgtggttaagagaggccggaaaaaactcctctatatctttaaacagccctttatgcgcccggtccaaacaacccaagaggaagatggctgctcttgcagattcccggaagaggaagaaggcggctgcgagctg

SEQ ID NO: 5505 - DNA, 1137 bp, Artificial Sequence
  Synthetic Polynucleotide
atggccttaccagtgaccgccttgctcctgccgctggccttgctgctccacgccgccaggccgggctctgacctgggcatcaagctgctgttcgccgctgccaagggccaggacgacgaagtgcggattctgctggctgctggggccgacgtgaacgccaaggatttcgagggctacacccccctgcacgtggccgcctatgatggacacctggaaatcgtggaagtgctgctgaaggctggcgctgatgtgaatgccaaagacagccagggccggacccctctgcatgaagccgcctacagcggccatctggaaattgtggaagtgctgctgaaagccggggcagacgtgaacgctcaggacgacgctggcgagacaccagccgatctggctgcagcttggggccacgaagatatcgccgaggtgctgcagaagacgcgtcttcaggacccttgcagcaactgtccagccggaaccttttgtgataacaacagaaatcagatatgcagcccctgtccgccaaactcctttagcagtgctggcggccagcggacatgtgacatttgtcggcagtgcaaaggggttttccgcaccagaaaagagtgctcctccaccagcaatgccgagtgtgactgtaccccaggctttcactgtctcggcgctggatgtagcatgtgtgaacaggactgtaaacaggggcaagaactcacgaagaaagggtgcaaagactgctgttttgggacgttcaacgatcagaagcggggaatctgtaggccctggacaaactgttctctggacggcaagtccgtgctcgtgaatggaacaaaagagcgggacgttgtctgcggcccaagtcctgctgatcttagcccaggcgcttcctctgtgactcctccagctcctgcacgcgaacctggacactctccccagatcatctcattttttctcgctctcacatcaaccgctttgctgttcctgctcttttttctcaccctccggttctccgtggttaagagaggccggaaaaaactcctctatatctttaaacagccctttatgcgcccggtccaaacaacccaagaggaagatggctgctcttgcagattcccggaagaggaagaaggcggctgcgagctg

SEQ ID NO: 5506 - DNA, 939 bp, Artificial Sequence
  Synthetic Polynucleotide
atggccttaccagtgaccgccttgctcctgccgctggccttgctgctccacgccgccaggccggtggacaacaagttcaacaaagagcggtacagcgcctactacgagatttggcaactgcccaacctgaacgtgcggcagaaggccgccttcatcggatctctgcaggacgaccctagccagagcgccaatctgctggccgaggccaagaagctgaacgacgcccaggcccctaaaacgcgtcttcaggacccttgcagcaactgtccagccggaaccttttgtgataacaacagaaatcagatatgcagcccctgtccgccaaactcctttagcagtgctggcggccagcggacatgtgacatttgtcggcagtgcaaaggggttttccgcaccagaaaagagtgctcctccaccagcaatgccgagtgtgactgtaccccaggctttcactgtctcggcgctggatgtagcatgtgtgaacaggactgtaaacaggggcaagaactcacgaagaaagggtgcaaagactgctgttttgggacgttcaacgatcagaagcggggaatctgtaggccctggacaaactgttctctggacggcaagtccgtgctcgtgaatggaacaaaagagcgggacgttgtctgcggcccaagtcctgctgatcttagcccaggcgcttcctctgtgactcctccagctcctgcacgcgaacctggacactctccccagatcatctcattttttctcgctctcacatcaaccgctttgctgttcctgctcttttttctcaccctccggttctccgtggttaagagaggccggaaaaaactcctctatatctttaaacagccctttatgcgcccggtccaaacaacccaagaggaagatggctgctcttgcagattcccggaagaggaagaaggcggctgcgagctg

SEQ ID NO: 5507 - DNA, 1032 bp, Artificial Sequence
  Synthetic Polynucleotide
atggccttaccagtgaccgccttgctcctgccgctggccttgctgctccacgccgccaggccgctgccagccccgaagaatttggtcgtttcccgtgtcactgaggactctgcacgtctgagctggaccgcaccggacgcggcgttcgacagctttgcaatcggctactgggagtgggatgatgacggcgaggccattgtgctgaccgttccgggtagcgagcgcagctacgatctgaccggtctgaagccgggtacggaatatccggtgtatattgcgggcgtgaagggtggccagtggagcttcccgctgagcgcgatctttaccaccacgcgtcttcaggacccttgcagcaactgtccagccggaaccttttgtgataacaacagaaatcagatatgcagcccctgtccgccaaactcctttagcagtgctggcggccagcggacatgtgacatttgtcggcagtgcaaaggggttttccgcaccagaaaagagtgctcctccaccagcaatgccgagtgtgactgtaccccaggctttcactgtctcggcgctggatgtagcatgtgtgaacaggactgtaaacaggggcaagaactcacgaagaaagggtgcaaagactgctgttttgggacgttcaacgatcagaagcggggaatctgtaggccctggacaaactgttctctggacggcaagtccgtgctcgtgaatggaacaaaagagcgggacgttgtctgcggcccaagtcctgctgatcttagcccaggcgcttcctctgtgactcctccagctcctgcacgcgaacctggacactctccccagatcatctcattttttctcgctctcacatcaaccgctttgctgttcctgctcttttttctcaccctccggttctccgtggttaagagaggccggaaaaaactcctctatatctttaaacagccctttatgcgcccggtccaaacaacccaagaggaagatggctgctcttgcagattcccggaagaggaagaaggcggctgcgagctg

SEQ ID NO: 5508 - DNA, 1035 bp, Artificial Sequence
  Synthetic Polynucleotide
atggccttaccagtgaccgccttgctcctgccgctggccttgctgctccacgccgccaggccgatgctgcccgctcctaagaatctggtggtgtccagaatcaccgaggacagcgccagactgtcttggacagctcctgatgccgccttcgacagcttccccatccggtacatcgagacactgatctggggcgaagccatctggctggatgtgcctggaagcgagagaagctacgacctgaccggactgaagcctggcacagagtatgccgtggtcatcaccggcgtgaaaggcggcagattctctagccctctggtggcctctttcaccaccacgcgtcttcaggacccttgcagcaactgtccagccggaaccttttgtgataacaacagaaatcagatatgcagcccctgtccgccaaactcctttagcagtgctggcggccagcggacatgtgacatttgtcggcagtgcaaaggggttttccgcaccagaaaagagtgctcctccaccagcaatgccgagtgtgactgtaccccaggctttcactgtctcggcgctggatgtagcatgtgtgaacaggactgtaaacaggggcaagaactcacgaagaaagggtgcaaagactgctgttttgggacgttcaacgatcagaagcggggaatctgtaggccctggacaaactgttctctggacggcaagtccgtgctcgtgaatggaacaaaagagcgggacgttgtctgcggcccaagtcctgctgatcttagcccaggcgcttcctctgtgactcctccagctcctgcacgcgaacctggacactctccccagatcatctcattttttctcgctctcacatcaaccgctttgctgttcctgctcttttttctcaccctccggttctccgtggttaagagaggccggaaaaaactcctctatatctttaaacagccctttatgcgcccggtccaaacaacccaagaggaagatggctgctcttgcagattcccggaagaggaagaaggcggctgcgagctg

SEQ ID NO: 5509 - DNA, 1686 bp, Artificial Sequence
  Synthetic Polynucleotide
atggccttaccagtgaccgccttgctcctgccgctggccttgctgctccacgccgccaggccgatggccttaccagtgaccgccttgctcctgccgctggccttgctgctccacgccgccaggccgctgttcaatcaagaggtgcagatccctctgaccgagagctactgtggcccctgtcctaagaactggatctgctacaagaacaactgctaccagttcttcgacgagagcaagaattggtacgagagccaggccagctgcatgagccagaatgccagcctgctgaaggtgtacagcaaagaggaccaggacctgctgaaactggtcaagagctaccactggatgggccttgtgcacatccccaccaatggctcttggcagtgggaggacggcagcattctgagccctaacctgctgaccatcatcgagatgcagaagggcgactgcgccctgtacgccagcagctttaagggctacatcgagaattgcagcaccccgaacacctacatctgtatgcagagaaccgttggcggaggcggaagtggaggcggaggatctggcggcggaggctctgacctctttaatcaagaagtccagattccactcaccgaatcctactgcggaccttgtccaaaaaattggatttgttataagaacaactgttatcaattctttgatgagtctaaaaattggtatgagtcccaggcttcctgcatgtctcagaacgcttctctgctgaaagtctactctaaagaagatcaggatctcctgaagctcgtcaagtcttatcattggatggggctcgtccacattcctaccaacggaagctggcaatgggaagatggctccatcctgtctccaaatctgctcacgattattgaaatgcagaaaggggattgtgctctctacgccagctccttcaagggatatattgagaactgtagcacgcccaatacttatatctgtatgcaacggaccgtgacgcgtcttcaggacccttgcagcaactgtccagccggaaccttttgtgataacaacagaaatcagatatgcagcccctgtccgccaaactcctttagcagtgctggcggccagcggacatgtgacatttgtcggcagtgcaaaggggttttccgcaccagaaaagagtgctcctccaccagcaatgccgagtgtgactgtaccccaggctttcactgtctcggcgctggatgtagcatgtgtgaacaggactgtaaacaggggcaagaactcacgaagaaagggtgcaaagactgctgttttgggacgttcaacgatcagaagcggggaatctgtaggccctggacaaactgttctctggacggcaagtccgtgctcgtgaatggaacaaaagagcgggacgttgtctgcggcccaagtcctgctgatcttagcccaggcgcttcctctgtgactcctccagctcctgcacgcgaacctggacactctccccagatcatctcattttttctcgctctcacatcaaccgctttgctgttcctgctcttttttctcaccctccggttctccgtggttaagagaggccggaaaaaactcctctatatctttaaacagccctttatgcgcccggtccaaacaacccaagaggaagatggctgctcttgcagattcccggaagaggaagaaggcggctgcgagctg

SEQ ID NO: 5510 - DNA, 1326 bp, Artificial Sequence
  Synthetic Polynucleotide
atggccttaccagtgaccgccttgctcctgccgctggccttgctgctccacgccgccaggccgatggagctgactgatttgctcctggcggccatgcttcttgcagtggcaagactaactctgtccagccccgtagctcctgcctgtgaccccagactcctaaataaactgctgcgtgactcccacctccttcacagccgactgagtcagtgtcccgacgtggaccctttgtctatccctgttctgctgcctgctgtggactttagcctgggagaatggaaaacccagacggaacagagcaaggcacaggacattctaggggcagtgtcccttctactggagggagtgatggcagcacgaggacagttggaaccctcctgcctctcatccctcctgggacagctttctgggcaggttcgcctcctcttgggggccctgcagggcctcctaggaacccagcttcctctacagggcaggaccacagctcacaaggaccccaatgccctcttcttgagcttgcaacaactgcttcggggaaaggtgcgcttcctgcttctggtagaaggtcccaccctctgtgtcagacggaccctgccaaccacagctgtcccaagcagtacttctacgcgtcttcaggacccttgcagcaactgtccagccggaaccttttgtgataacaacagaaatcagatatgcagcccctgtccgccaaactcctttagcagtgctggcggccagcggacatgtgacatttgtcggcagtgcaaaggggttttccgcaccagaaaagagtgctcctccaccagcaatgccgagtgtgactgtaccccaggctttcactgtctcggcgctggatgtagcatgtgtgaacaggactgtaaacaggggcaagaactcacgaagaaagggtgcaaagactgctgttttgggacgttcaacgatcagaagcggggaatctgtaggccctggacaaactgttctctggacggcaagtccgtgctcgtgaatggaacaaaagagcgggacgttgtctgcggcccaagtcctgctgatcttagcccaggcgcttcctctgtgactcctccagctcctgcacgcgaacctggacactctccccagatcatctcattttttctcgctctcacatcaaccgctttgctgttcctgctcttttttctcaccctccggttctccgtggttaagagaggccggaaaaaactcctctatatctttaaacagccctttatgcgcccggtccaaacaacccaagaggaagatggctgctcttgcagattcccggaagaggaagaaggcggctgcgagctg

SEQ ID NO: 5511 - DNA, 924 bp, Artificial Sequence
  Synthetic Polynucleotide
atggccttaccagtgaccgccttgctcctgccgctggccttgctgctccacgccgccaggccgatggaccccgacctggaaatcagagccgccttcctgcggcagagaaacacagccctgagaacagaggtggccgagctggaacaagaggtgcagcggctggaaaacgaggtgtcccagtacgagacaagatacggccctctcggaggcggaaaaacgcgtacgcgtcttcaggacccttgcagcaactgtccagccggaaccttttgtgataacaacagaaatcagatatgcagcccctgtccgccaaactcctttagcagtgctggcggccagcggacatgtgacatttgtcggcagtgcaaaggggttttccgcaccagaaaagagtgctcctccaccagcaatgccgagtgtgactgtaccccaggctttcactgtctcggcgctggatgtagcatgtgtgaacaggactgtaaacaggggcaagaactcacgaagaaagggtgcaaagactgctgttttgggacgttcaacgatcagaagcggggaatctgtaggccctggacaaactgttctctggacggcaagtccgtgctcgtgaatggaacaaaagagcgggacgttgtctgcggcccaagtcctgctgatcttagcccaggcgcttcctctgtgactcctccagctcctgcacgcgaacctggacactctccccagatcatctcattttttctcgctctcacatcaaccgctttgctgttcctgctcttttttctcaccctccggttctccgtggttaagagaggccggaaaaaactcctctatatctttaaacagccctttatgcgcccggtccaaacaacccaagaggaagatggctgctcttgcagattcccggaagaggaagaaggcggctgcgagctg

SEQ ID NO: 5512 - DNA, 849 bp, Artificial Sequence
  Synthetic Polynucleotide
atggccttaccagtgaccgccttgctcctgccgctggccttgctgctccacgccgccaggccggaagttgctgccctcgagaaggaggtagcagctttggaaaaagaagtcgcagcccttgagaaagaagttgcggctctggagaagacgcgtcttcaggacccttgcagcaactgtccagccggaaccttttgtgataacaacagaaatcagatatgcagcccctgtccgccaaactcctttagcagtgctggcggccagcggacatgtgacatttgtcggcagtgcaaaggggttttccgcaccagaaaagagtgctcctccaccagcaatgccgagtgtgactgtaccccaggctttcactgtctcggcgctggatgtagcatgtgtgaacaggactgtaaacaggggcaagaactcacgaagaaagggtgcaaagactgctgttttgggacgttcaacgatcagaagcggggaatctgtaggccctggacaaactgttctctggacggcaagtccgtgctcgtgaatggaacaaaagagcgggacgttgtctgcggcccaagtcctgctgatcttagcccaggcgcttcctctgtgactcctccagctcctgcacgcgaacctggacactctccccagatcatctcattttttctcgctctcacatcaaccgctttgctgttcctgctcttttttctcaccctccggttctccgtggttaagagaggccggaaaaaactcctctatatctttaaacagccctttatgcgcccggtccaaacaacccaagaggaagatggctgctcttgcagattcccggaagaggaagaaggcggctgcgagctg

SEQ ID NO: 5513 - DNA, 1623 bp, Artificial Sequence
  Synthetic Polynucleotide
atggccttaccagtgaccgccttgctcctgccgctggccttgctgctccacgccgccaggccgctgttcaatcaagaggtgcagatccctctgaccgagagctactgtggcccctgtcctaagaactggatctgctacaagaacaactgctaccagttcttcgacgagagcaagaattggtacgagagccaggccagctgcatgagccagaatgccagcctgctgaaggtgtacagcaaagaggaccaggacctgctgaaactggtcaagagcgcccactggatgggccttgtgcacatccccaccaatggctcttggcagtgggaggacggcagcattctgagccctaacctgctgaccatcatcgagatgcagaagggcgactgcgccctgtacgccagcagctttaagggcttcatcgagaattgcagcaccccgaacacctacatctgtatgcagagaaccgttggcggaggcggaagtggaggcggaggatctggcggcggaggctctgacctctttaatcaagaagtccagattccactcaccgaatcctactgcggaccttgtccaaaaaattggatttgttataagaacaactgttatcaattctttgatgagtctaaaaattggtatgagtcccaggcttcctgcatgtctcagaacgcttctctgctgaaagtctactctaaagaagatcaggatctcctgaagctcgtcaagtctgcccattggatggggctcgtccacattcctaccaacggaagctggcaatgggaagatggctccatcctgtctccaaatctgctcacgattattgaaatgcagaaaggggattgtgctctctacgccagctccttcaagggatttattgagaactgtagcacgcccaatacttatatctgtatgcaacggaccgtgacgcgtcttcaggacccttgcagcaactgtccagccggaaccttttgtgataacaacagaaatcagatatgcagcccctgtccgccaaactcctttagcagtgctggcggccagcggacatgtgacatttgtcggcagtgcaaaggggttttccgcaccagaaaagagtgctcctccaccagcaatgccgagtgtgactgtaccccaggctttcactgtctcggcgctggatgtagcatgtgtgaacaggactgtaaacaggggcaagaactcacgaagaaagggtgcaaagactgctgttttgggacgttcaacgatcagaagcggggaatctgtaggccctggacaaactgttctctggacggcaagtccgtgctcgtgaatggaacaaaagagcgggacgttgtctgcggcccaagtcctgctgatcttagcccaggcgcttcctctgtgactcctccagctcctgcacgcgaacctggacactctccccagatcatctcattttttctcgctctcacatcaaccgctttgctgttcctgctcttttttctcaccctccggttctccgtggttaagagaggccggaaaaaactcctctatatctttaaacagccctttatgcgcccggtccaaacaacccaagaggaagatggctgctcttgcagattcccggaagaggaagaaggcggctgcgagctg

SEQ ID NO: 5514 - DNA, 1623 bp, Artificial Sequence
  Synthetic Polynucleotide
atggccttaccagtgaccgccttgctcctgccgctggccttgctgctccacgccgccaggccgctgttcaatcaagaggtgcagatccctctgaccgagagctactgtggcccctgtcctaagaactggatctgctacaagaacaactgctaccagttcttcgacgagagcaagaattggtacgagagccaggccagctgcatgagccagaatgccagcctgctgaaggtgtacagcaaagaggaccaggacctgctgaaactggtcaagagcgcccactggatgggccttgtgcacatccccaccaatggctcttggcagtgggaggacggcagcattctgagccctaacctgctgaccatcatcgagatgcagaagggcgactgcgccctgtacgccagcagctttaagggctacatcgagaattgcagcaccccgaacacctacatctgtatgcagagaaccgtttctggcggaggcggctctggaggaggcggaagtggcggcggaggcgacctctttaatcaagaagtccagattccactcaccgaatcctactgcggaccttgtccaaaaaattggatttgttataagaacaactgttatcaattctttgatgagtctaaaaattggtatgagtcccaggcttcctgcatgtctcagaacgcttctctgctgaaagtctactctaaagaagatcaggatctcctgaagctcgtcaagtctgcccattggatggggctcgtccacattcctaccaacggaagctggcaatgggaagatggctccatcctgtctccaaatctgctcacgattattgaaatgcagaaaggggattgtgctctctacgccagctccttcaagggatatattgagaactgtagcacgcccaatacttatatctgtatgcaacggaccgtgacgcgtcttcaggacccttgcagcaactgtccagccggaaccttttgtgataacaacagaaatcagatatgcagcccctgtccgccaaactcctttagcagtgctggcggccagcggacatgtgacatttgtcggcagtgcaaaggggttttccgcaccagaaaagagtgctcctccaccagcaatgccgagtgtgactgtaccccaggctttcactgtctcggcgctggatgtagcatgtgtgaacaggactgtaaacaggggcaagaactcacgaagaaagggtgcaaagactgctgttttgggacgttcaacgatcagaagcggggaatctgtaggccctggacaaactgttctctggacggcaagtccgtgctcgtgaatggaacaaaagagcgggacgttgtctgcggcccaagtcctgctgatcttagcccaggcgcttcctctgtgactcctccagctcctgcacgcgaacctggacactctccccagatcatctcattttttctcgctctcacatcaaccgctttgctgttcctgctcttttttctcaccctccggttctccgtggttaagagaggccggaaaaaactcctctatatctttaaacagccctttatgcgcccggtccaaacaacccaagaggaagatggctgctcttgcagattcccggaagaggaagaaggcggctgcgagctg

SEQ ID NO: 5515 - DNA, 3006 bp, Artificial Sequence
  Synthetic Polynucleotide
atggccttaccagtgaccgccttgctcctgccgctggccttgctgctccacgccgccaggccggacatccagatgacacagagccctagcagcctgtctgccagcgtgggagacagagtgaccatcacatgcaaggccagcgaccacatcaacaactggctggcctggtatcagcagaagcctggacaggcccctaagctgctgatctacggcgctaccacactggaaacaggcgtgcccagcagattttctggcagcggctctggcaccgactacaccctgacaatatccagcctccagcctgaggacttcgccacctactactgtcagcagagctggaacaccccttggacattcggccagggcaccaagctggaaatcaagagactcgagctgcaagacccttgctctaattgccctgccggcaccttctgcgacaacaaccggaaccagatttgctccccttgtcctcctaacagcttcagctctgccggcggacagagaacctgcgacatctgtagacagtgcaagggcgtgttcagaacccggaaagagtgcagcagcacctccaacgccgagtgcgattgcacacctggcttccattgtctcggagccggctgttctatgtgcgagcaggattgcaagcagggccaagagctgaccaagaagggctgcaaggattgctgcttcggcacctttaacgaccagaagagaggcatctgccggccttggaccaactgtagcctggatggcaagagcgtgctggtcaacggcaccaaagaacgggatgtcgtgtgcggaccttctccagccgatttgtctcctggcgcttctagcgtgacacctcctgctccagctagagagcctggacacagccctcagatcatctcattctttctggccctgacctctacagccctgctgtttctgctgttcttcctgacactgcggttcagcgtggtcaagcggggcagaaagaagctgctgtacatcttcaagcagcctttcatgcggcccgtgcagaccacacaagaagaggacggctgctcctgtcggttccccgaggaagaggaaggcggttgcgaacttagggccaagcgatctggatctggagcaacaaacttctcactactcaaacaagcaggtgacgtggaggagaatcccgggcctactagtatggactggatttggcgcatccttttccttgtcggcgctgctaccggcgcgcattccttcgaacaagttcagcttcaacagcctggcgctgagctggtcaaacctggcgcttctgtgaagatgagctgcaaagccagcggctacgccttcagcagctactggatcaactggatgaagcagaaacccggccagggactcgaatggatcggccaaatctatcccggcgacggcgacaccaactacaacggcaagttcaagggcagagccacactgaccgccgatacctctagcagcacagcctacatgcagctgagcagcctgaccagcgaagatagcgccgtgtacttctgtgcccggtccatcacaacagtcgtgggctgcgctatggactattggggccagggaacaagcgtgaccgtgtctagtacgcgtcttcaggacccttgcagcaactgtccagccggaaccttttgtgataacaacagaaatcagatatgcagcccctgtccgccaaactcctttagcagtgctggcggccagcggacatgtgacatttgtcggcagtgcaaaggggttttccgcaccagaaaagagtgctcctccaccagcaatgccgagtgtgactgtaccccaggctttcactgtctcggcgctggatgtagcatgtgtgaacaggactgtaaacaggggcaagaactcacgaagaaagggtgcaaagactgctgttttgggacgttcaacgatcagaagcggggaatctgtaggccctggacaaactgttctctggacggcaagtccgtgctcgtgaatggaacaaaagagcgggacgttgtctgcggcccaagtcctgctgatcttagcccaggcgcttcctctgtgactcctccagctcctgcacgcgaacctggacactctccccagatcatctcattttttctcgctctcacatcaaccgctttgctgttcctgctcttttttctcaccctccggttctccgtggttaagagaggccggaaaaaactcctctatatctttaaacagccctttatgcgcccggtccaaacaacccaagaggaagatggctgctcttgcagattcccggaagaggaagaaggcggctgcgagctgcgcgccaagagaagcggatctggcgtgaagcagaccctgaatttcgacctgctgaagctggctggcgacgtggaatccaacccaggcccttctagaggccatatgaccgagtacaagcccacggtgcgcctcgccacccgcgacgacgtccccagggccgtacgcaccctcgccgccgcgttcgccgactaccccgccacgcgccacaccgtcgatccggaccgccacatcgagcgggtcaccgagctgcaagaactcttcctcacgcgcgtcgggctcgacatcggcaaggtgtgggtcgcggacgacggcgccgcggtggcggtctggaccacgccggagagcgtcgaagcgggggcggtgttcgccgagatcggcccgcgcatggccgagttgagcggttcccggctggccgcgcagcaacagatggaaggcctcctggcgccgcaccggcccaaggagcccgcgtggttcctggccaccgtcggcgtctcgcccgaccaccagggcaagggtctgggcagcgccgtcgtgctccccggagtggaggcggccgagcgcgccggggtgcccgccttcctggagacctccgcgccccgcaacctccccttctacgagcggctcggcttcaccgtcaccgccgacgtcgaggtgcccgaaggaccgcgcacctggtgcatgacccgcaagcccggtgcctga

SEQ ID NO: 5516 - DNA, 3168 bp, Artificial Sequence
  Synthetic Polynucleotide
atggccttaccagtgaccgccttgctcctgccgctggccttgctgctccacgccgccaggccggcatgcgaagtgcagctgcttgaaagtggcggcggactgattcagcctggcggatctctgagactgagctgtgccgccagcggcttcaccttttctagccacgccatgacctgggtccgacaggcacctggaaaagggcttgaatgggtgtccgccatcagcggctctggcgattacacacactacgccgacagcgtgaagggcagattcaccatcagcagagacaacagcaagaacaccgtgtacctccagatgaacagcctgagagccgaggacagcgccgtgtattattgcgccaaggatgaggatggcggcagcctgcttggacacagaggacaaggcaccctggtcaccgtttcttccggtaccggcggaggcggatctggcggcggaggtagcggtggcggaggatctgaattcggatctctcgagctgcaagacccttgctctaattgccctgccggcaccttctgcgacaacaaccggaaccagatttgctccccttgtcctcctaacagcttcagctctgccggcggacagagaacctgcgacatctgtagacagtgcaagggcgtgttcagaacccggaaagagtgcagcagcacctccaacgccgagtgcgattgcacacctggcttccattgtctcggagccggctgttctatgtgcgagcaggattgcaagcagggccaagagctgaccaagaagggctgcaaggattgctgcttcggcacctttaacgaccagaagagaggcatctgccggccttggaccaactgtagcctggatggcaagagcgtgctggtcaacggcaccaaagaacgggatgtcgtgtgcggaccttctccagccgatttgtctcctggcgcttctagcgtgacacctcctgctccagctagagagcctggacacagccctcagatcatctcattctttctggccctgacctctacagccctgctgtttctgctgttcttcctgacactgcggttcagcgtggtcaagcggggcagaaagaagctgctgtacatcttcaagcagcctttcatgcggcccgtgcagaccacacaagaagaggacggctgctcctgtcggttccccgaggaagaggaaggcggttgcgaacttagggccaagcgatctggatctggagcaacaaacttctcactactcaaacaagcaggtgacgtggaggagaatcccgggcctactagtgccaccatggactggatttggcgcatccttttccttgtcggcgctgctaccggcgcccattccgggcccgaagtgcagctggttgaatctggcggaggactggttcaggctggcggatctctgagactgtcttgtgccgccagcggcagaacctttagcatgggctggtttagacaggcccctggcaaagagagagagttcgtcgccgccatcacatactctggcggcagcccttactacgccgactctgtgaagggcagattcaccatcagccgggacaacgccaagaacaccgtgtacctccagatgaacagcctgaagcctgaggacaccgccgtgtactactgcgccgccaatccaacatacggcagcgactggaacgccgagaattggggccagggaacccaagtgacagtgtctagcggatccggcggcggaggatctggcggaggcggatctgggggcggaggctctttcgaaggcagcacgcgtcttcaggacccttgcagcaactgtccagccggaaccttttgtgataacaacagaaatcagatatgcagcccctgtccgccaaactcctttagcagtgctggcggccagcggacatgtgacatttgtcggcagtgcaaaggggttttccgcaccagaaaagagtgctcctccaccagcaatgccgagtgtgactgtaccccaggctttcactgtctcggcgctggatgtagcatgtgtgaacaggactgtaaacaggggcaagaactcacgaagaaagggtgcaaagactgctgttttgggacgttcaacgatcagaagcggggaatctgtaggccctggacaaactgttctctggacggcaagtccgtgctcgtgaatggaacaaaagagcgggacgttgtctgcggcccaagtcctgctgatcttagcccaggcgcttcctctgtgactcctccagctcctgcacgcgaacctggacactctccccagatcatctcattttttctcgctctcacatcaaccgctttgctgttcctgctcttttttctcaccctccggttctccgtggttaagagaggccggaaaaaactcctctatatctttaaacagccctttatgcgcccggtccaaacaacccaagaggaagatggctgctcttgcagattcccggaagaggaagaaggcggctgcgagctgcgcgccaagagaagcggatctggcgtgaagcagaccctgaatttcgacctgctgaagctggctggcgacgtggaatccaacccaggcccttctagaggccatatgaccgagtacaagcccacggtgcgcctcgccacccgcgacgacgtccccagggccgtacgcaccctcgccgccgcgttcgccgactaccccgccacgcgccacaccgtcgatccggaccgccacatcgagcgggtcaccgagctgcaagaactcttcctcacgcgcgtcgggctcgacatcggcaaggtgtgggtcgcggacgacggcgccgcggtggcggtctggaccacgccggagagcgtcgaagcgggggcggtgttcgccgagatcggcccgcgcatggccgagttgagcggttcccggctggccgcgcagcaacagatggaaggcctcctggcgccgcaccggcccaaggagcccgcgtggttcctggccaccgtcggcgtctcgcccgaccaccagggcaagggtctgggcagcgccgtcgtgctccccggagtggaggcggccgagcgcgccggggtgcccgccttcctggagacctccgcgccccgcaacctccccttctacgagcggctcggcttcaccgtcaccgccgacgtcgaggtgcccgaaggaccgcgcacctggtgcatgacccgcaagcccggtgcctga

SEQ ID NO: 5517 - DNA, 3618 bp, Artificial Sequence
  Synthetic Polynucleotide
atggccttaccagtgaccgccttgctcctgccgctggccttgctgctccacgccgccaggccggacatccagatgacacagagccctagcagcctgtctgccagcgtgggagacagagtgaccatcacatgcaaggccagcgaccacatcaacaactggctggcctggtatcagcagaagcctggacaggcccctaagctgctgatctacggcgctaccacactggaaacaggcgtgcccagcagattttctggcagcggctctggcaccgactacaccctgacaatatccagcctccagcctgaggacttcgccacctactactgtcagcagagctggaacaccccttggacattcggccagggcaccaagctggaaatcaagagactcgagggacagcctaaggccaatcctaccgtgacactgttccctccaagcagcgaagaactccaggccaacaaggccacacttgtgtgcctgatctccgacttctaccctggggctgtgacagtggcttggaaggccgatggatctcctgtgaaagccggcgtggaaaccaccaagccatccaagcagagcaacaacaaatacgccgccagctcctacctgagcctgacacctgagcagtggaagtcccacagatcctacagctgccaagtgacccacgaaggcagcaccgtggaaaagacagtggcccctacagagtgcagcggatccctgcaagacccttgctctaattgccctgccggcaccttctgcgacaacaaccggaaccagatttgctccccttgtcctcctaacagcttcagctctgccggcggacagagaacctgcgacatctgtagacagtgcaagggcgtgttcagaacccggaaagagtgcagcagcacctccaacgccgagtgcgattgcacacctggcttccattgtctcggagccggctgttctatgtgcgagcaggattgcaagcagggccaagagctgaccaagaagggctgcaaggattgctgcttcggcacctttaacgaccagaagagaggcatctgccggccttggaccaactgtagcctggatggcaagagcgtgctggtcaacggcaccaaagaacgggatgtcgtgtgcggaccttctccagccgatttgtctcctggcgcttctagcgtgacacctcctgctccagctagagagcctggacacagccctcagatcatctcattctttctggccctgacctctacagccctgctgtttctgctgttcttcctgacactgcggttcagcgtggtcaagcggggcagaaagaagctgctgtacatcttcaagcagcctttcatgcggcccgtgcagaccacacaagaagaggacggctgctcctgtcggttccccgaggaagaggaaggcggttgcgaacttagggccaagcgatctggatctggagcaacaaacttctcactactcaaacaagcaggtgacgtggaggagaatcccgggcctactagtatggactggatttggcgcatccttttccttgtcggcgctgctaccggcgcgcattccttcgaacaagttcagcttcaacagcctggcgctgagctggtcaaacctggcgcttctgtgaagatgagctgcaaagccagcggctacgccttcagcagctactggatcaactggatgaagcagaaacccggccagggactcgaatggatcggccaaatctatcccggcgacggcgacaccaactacaacggcaagttcaagggcagagccacactgaccgccgatacctctagcagcacagcctacatgcagctgagcagcctgaccagcgaagatagcgccgtgtacttctgtgcccggtccatcacaacagtcgtgggctgcgctatggactattggggccagggaacaagcgtgaccgtgtctagtacgcgtgcctctacaaagggaccctccgtgtttcctctggctcccagcagcaagtctacaagcggaggaacagccgctctgggctgcctggtcaaggattactttcccgagcctgtgaccgtgtcctggaatagcggagcactgacaagcggcgtgcacacctttccagccgtgctgcaaagcagcggcctgtactctctgagcagcgtggtcacagtgcctagctctagcctgggcacccagacctacatctgcaatgtgaaccacaagcctagcaacaccaaggtggacaagagagtggaacccaagagctgtggtacccttcaggacccttgcagcaactgtccagccggaaccttttgtgataacaacagaaatcagatatgcagcccctgtccgccaaactcctttagcagtgctggcggccagcggacatgtgacatttgtcggcagtgcaaaggggttttccgcaccagaaaagagtgctcctccaccagcaatgccgagtgtgactgtaccccaggctttcactgtctcggcgctggatgtagcatgtgtgaacaggactgtaaacaggggcaagaactcacgaagaaagggtgcaaagactgctgttttgggacgttcaacgatcagaagcggggaatctgtaggccctggacaaactgttctctggacggcaagtccgtgctcgtgaatggaacaaaagagcgggacgttgtctgcggcccaagtcctgctgatcttagcccaggcgcttcctctgtgactcctccagctcctgcacgcgaacctggacactctccccagatcatctcattttttctcgctctcacatcaaccgctttgctgttcctgctcttttttctcaccctccggttctccgtggttaagagaggccggaaaaaactcctctatatctttaaacagccctttatgcgcccggtccaaacaacccaagaggaagatggctgctcttgcagattcccggaagaggaagaaggcggctgcgagctgcgcgccaagagaagcggatctggcgtgaagcagaccctgaatttcgacctgctgaagctggctggcgacgtggaatccaacccaggcccttctagaggcgggatccacaccatggctacctacgaggtgctgtgcgaggtggcaagaaagctgggcaccgacgacagagaagtggtgctgttcctgctgaacgtgttcatccctcagcctacactggcccagctgatcggtgcactgagagccctgaaagaggaaggccggctgacctttcctctgctggccgaatgcctgttcagagccggaagaagggatctgctgcgggacctgctgcatctggaccccagatttctggaaagacacctggccggcaccatgagctacttcagcccttaccagctgaccgtgctgcacgttgacggcgaactgtgcgccagagatattcggagcctgatcttcctgagcaaggacaccatcggcagccggtctacccctcagacatttctgcactgggtgtactgcatggaaaacctggacctgctcggccccacagatgtggatgccctgatgtccatgctgagaagcctgagcagagtggacctccagagacaggtgcagacactgatgggactgcacctgagcggacctagccacagccagcactacagacacacccct

SEQ ID NO: 5518 - DNA, 3777 bp, Artificial Sequence
  Synthetic Polynucleotide
atggccttaccagtgaccgccttgctcctgccgctggccttgctgctccacgccgccaggccggacatccagatgacacagagccctagcagcctgtctgccagcgtgggagacagagtgaccatcacatgcaaggccagcgaccacatcaacaactggctggcctggtatcagcagaagcctggacaggcccctaagctgctgatctacggcgctaccacactggaaacaggcgtgcccagcagattttctggcagcggctctggcaccgactacaccctgacaatatccagcctccagcctgaggacttcgccacctactactgtcagcagagctggaacaccccttggacattcggccagggcaccaagctggaaatcaagagactcgagggacagcctaaggccaatcctaccgtgacactgttccctccaagcagcgaagaactccaggccaacaaggccacacttgtgtgcctgatctccgacttctaccctggggctgtgacagtggcttggaaggccgatggatctcctgtgaaagccggcgtggaaaccaccaagccatccaagcagagcaacaacaaatacgccgccagctcctacctgagcctgacacctgagcagtggaagtcccacagatcctacagctgccaagtgacccacgaaggcagcaccgtggaaaagacagtggcccctacagagtgcagcggatccctgcaagacccttgctctaattgccctgccggcaccttctgcgacaacaaccggaaccagatttgctccccttgtcctcctaacagcttcagctctgccggcggacagagaacctgcgacatctgtagacagtgcaagggcgtgttcagaacccggaaagagtgcagcagcacctccaacgccgagtgcgattgcacacctggcttccattgtctcggagccggctgttctatgtgcgagcaggattgcaagcagggccaagagctgaccaagaagggctgcaaggattgctgcttcggcacctttaacgaccagaagagaggcatctgccggccttggaccaactgtagcctggatggcaagagcgtgctggtcaacggcaccaaagaacgggatgtcgtgtgcggaccttctccagccgatttgtctcctggcgcttctagcgtgacacctcctgctccagctagagagcctggacacagccctcagatcatctcattctttctggccctgacctctacagccctgctgtttctgctgttcttcctgacactgcggttcagcgtggtcaagcggggcagaaagaagctgctgtacatcttcaagcagcctttcatgcggcccgtgcagaccacacaagaagaggacggctgctcctgtcggttccccgaggaagaggaaggcggttgcgaacttagggccaagcgatctggatctggagcaacaaacttctcactactcaaacaagcaggtgacgtggaggagaatcccgggcctactagtatggactggatttggcgcatccttttccttgtcggcgctgctaccggcgcgcattccttcgaacaagttcagcttcaacagcctggcgctgagctggtcaaacctggcgcttctgtgaagatgagctgcaaagccagcggctacgccttcagcagctactggatcaactggatgaagcagaaacccggccagggactcgaatggatcggccaaatctatcccggcgacggcgacaccaactacaacggcaagttcaagggcagagccacactgaccgccgatacctctagcagcacagcctacatgcagctgagcagcctgaccagcgaagatagcgccgtgtacttctgtgcccggtccatcacaacagtcgtgggctgcgctatggactattggggccagggaacaagcgtgaccgtgtctagtacgcgtgcctctacaaagggaccctccgtgtttcctctggctcccagcagcaagtctacaagcggaggaacagccgctctgggctgcctggtcaaggattactttcccgagcctgtgaccgtgtcctggaatagcggagcactgacaagcggcgtgcacacctttccagccgtgctgcaaagcagcggcctgtactctctgagcagcgtggtcacagtgcctagctctagcctgggcacccagacctacatctgcaatgtgaaccacaagcctagcaacaccaaggtggacaagagagtggaacccaagagctgtggtacccttcaggacccttgcagcaactgtccagccggaaccttttgtgataacaacagaaatcagatatgcagcccctgtccgccaaactcctttagcagtgctggcggccagcggacatgtgacatttgtcggcagtgcaaaggggttttccgcaccagaaaagagtgctcctccaccagcaatgccgagtgtgactgtaccccaggctttcactgtctcggcgctggatgtagcatgtgtgaacaggactgtaaacaggggcaagaactcacgaagaaagggtgcaaagactgctgttttgggacgttcaacgatcagaagcggggaatctgtaggccctggacaaactgttctctggacggcaagtccgtgctcgtgaatggaacaaaagagcgggacgttgtctgcggcccaagtcctgctgatcttagcccaggcgcttcctctgtgactcctccagctcctgcacgcgaacctggacactctccccagatcatctcattttttctcgctctcacatcaaccgctttgctgttcctgctcttttttctcaccctccggttctccgtggttaagagaggccggaaaaaactcctctatatctttaaacagccctttatgcgcccggtccaaacaacccaagaggaagatggctgctcttgcagattcccggaagaggaagaaggcggctgcgagctgcgcgccaagagaagcggatctggcgtgaagcagaccctgaatttcgacctgctgaagctggctggcgacgtggaatccaacccaggcccttctagaggcgggatccacaccatgtccgactccaaggaggtccctagccttccatttttgcgacacttgctcgaagagttggacagccatgaggacagcttgctgctgtttctgtgtcacgacgcggccccgggctgcacgacggtcacgcaagctttgtgctcgcttagccaacagcgcaagctgaccctcgcggctctggtcgagatgctctacgtgctgcagcgtatggatcttctcaagagccgcttcgggctcagcaaggagggggccgagcaattgctgggcacaagctttctcacgcgctaccgcaagctcatggtttgcgtgggtgaggagctcgactcgagcgagctacgcgctctacgcttgttcgcgtgcaacctgaatccgagcctgagcacggcgctttctgagagcagccgctttgtcgagcttgtactcgcgcttgaaaacgtaggactcgtctcgccatcgagtgtttccgtgcttgcggacatgttgcgcactcttcggcgcctcgatttgtgccagcagcttgttgagtacgaacaacaagagcaagccaggtaccgttactgttacgcggcctcgccctcattgccagttcgtacgttacgtcgggggcacggcgcgagtgaacacgagcagctgtgcatgcccgtgcaagaatcctctgacagccccgagctgctgcgcacgcccgtacaagaatcctccagcgacagccccgagcaaacgact

SEQ ID NO: 5519 - DNA, 3645 bp, Artificial Sequence
  Synthetic Polynucleotide
atggccttaccagtgaccgccttgctcctgccgctggccttgctgctccacgccgccaggccggacatccagatgacacagagccctagcagcctgtctgccagcgtgggagacagagtgaccatcacatgcaaggccagcgaccacatcaacaactggctggcctggtatcagcagaagcctggacaggcccctaagctgctgatctacggcgctaccacactggaaacaggcgtgcccagcagattttctggcagcggctctggcaccgactacaccctgacaatatccagcctccagcctgaggacttcgccacctactactgtcagcagagctggaacaccccttggacattcggccagggcaccaagctggaaatcaagagactcgagggacagcctaaggccaatcctaccgtgacactgttccctccaagcagcgaagaactccaggccaacaaggccacacttgtgtgcctgatctccgacttctaccctggggctgtgacagtggcttggaaggccgatggatctcctgtgaaagccggcgtggaaaccaccaagccatccaagcagagcaacaacaaatacgccgccagctcctacctgagcctgacacctgagcagtggaagtcccacagatcctacagctgccaagtgacccacgaaggcagcaccgtggaaaagacagtggcccctacagagtgcagcggatccctgcaagacccttgctctaattgccctgccggcaccttctgcgacaacaaccggaaccagatttgctccccttgtcctcctaacagcttcagctctgccggcggacagagaacctgcgacatctgtagacagtgcaagggcgtgttcagaacccggaaagagtgcagcagcacctccaacgccgagtgcgattgcacacctggcttccattgtctcggagccggctgttctatgtgcgagcaggattgcaagcagggccaagagctgaccaagaagggctgcaaggattgctgcttcggcacctttaacgaccagaagagaggcatctgccggccttggaccaactgtagcctggatggcaagagcgtgctggtcaacggcaccaaagaacgggatgtcgtgtgcggaccttctccagccgatttgtctcctggcgcttctagcgtgacacctcctgctccagctagagagcctggacacagccctcagatcatctcattctttctggccctgacctctacagccctgctgtttctgctgttcttcctgacactgcggttcagcgtggtcaagcggggcagaaagaagctgctgtacatcttcaagcagcctttcatgcggcccgtgcagaccacacaagaagaggacggctgctcctgtcggttccccgaggaagaggaaggcggttgcgaacttagggccaagcgatctggatctggagcaacaaacttctcactactcaaacaagcaggtgacgtggaggagaatcccgggcctactagtatggactggatttggcgcatccttttccttgtcggcgctgctaccggcgcgcattccttcgaacaagttcagcttcaacagcctggcgctgagctggtcaaacctggcgcttctgtgaagatgagctgcaaagccagcggctacgccttcagcagctactggatcaactggatgaagcagaaacccggccagggactcgaatggatcggccaaatctatcccggcgacggcgacaccaactacaacggcaagttcaagggcagagccacactgaccgccgatacctctagcagcacagcctacatgcagctgagcagcctgaccagcgaagatagcgccgtgtacttctgtgcccggtccatcacaacagtcgtgggctgcgctatggactattggggccagggaacaagcgtgaccgtgtctagtacgcgtgcctctacaaagggaccctccgtgtttcctctggctcccagcagcaagtctacaagcggaggaacagccgctctgggctgcctggtcaaggattactttcccgagcctgtgaccgtgtcctggaatagcggagcactgacaagcggcgtgcacacctttccagccgtgctgcaaagcagcggcctgtactctctgagcagcgtggtcacagtgcctagctctagcctgggcacccagacctacatctgcaatgtgaaccacaagcctagcaacaccaaggtggacaagagagtggaacccaagagctgtggtacccttcaggacccttgcagcaactgtccagccggaaccttttgtgataacaacagaaatcagatatgcagcccctgtccgccaaactcctttagcagtgctggcggccagcggacatgtgacatttgtcggcagtgcaaaggggttttccgcaccagaaaagagtgctcctccaccagcaatgccgagtgtgactgtaccccaggctttcactgtctcggcgctggatgtagcatgtgtgaacaggactgtaaacaggggcaagaactcacgaagaaagggtgcaaagactgctgttttgggacgttcaacgatcagaagcggggaatctgtaggccctggacaaactgttctctggacggcaagtccgtgctcgtgaatggaacaaaagagcgggacgttgtctgcggcccaagtcctgctgatcttagcccaggcgcttcctctgtgactcctccagctcctgcacgcgaacctggacactctccccagatcatctcattttttctcgctctcacatcaaccgctttgctgttcctgctcttttttctcaccctccggttctccgtggttaagagaggccggaaaaaactcctctatatctttaaacagccctttatgcgcccggtccaaacaacccaagaggaagatggctgctcttgcagattcccggaagaggaagaaggcggctgcgagctgcgcgccaagagaagcggatctggcgtgaagcagaccctgaatttcgacctgctgaagctggctggcgacgtggaatccaacccaggcccttctagaggccatatgaccgagtacaagcccacggtgcgcctcgccacccgcgacgacgtccccagggccgtacgcaccctcgccgccgcgttcgccgactaccccgccacgcgccacaccgtcgatccggaccgccacatcgagcgggtcaccgagctgcaagaactcttcctcacgcgcgtcgggctcgacatcggcaaggtgtgggtcgcggacgacggcgccgcggtggcggtctggaccacgccggagagcgtcgaagcgggggcggtgttcgccgagatcggcccgcgcatggccgagttgagcggttcccggctggccgcgcagcaacagatggaaggcctcctggcgccgcaccggcccaaggagcccgcgtggttcctggccaccgtcggcgtctcgcccgaccaccagggcaagggtctgggcagcgccgtcgtgctccccggagtggaggcggccgagcgcgccggggtgcccgccttcctggagacctccgcgccccgcaacctccccttctacgagcggctcggcttcaccgtcaccgccgacgtcgaggtgcccgaaggaccgcgcacctggtgcatgacccgcaagcccggtgcctga

SEQ ID NO: 5520 - DNA, 4056 bp, Artificial Sequence
  Synthetic Polynucleotide
atggccttaccagtgaccgccttgctcctgccgctggccttgctgctccacgccgccaggccggaagtgcagctggttgaatctggcggaggactggttcaggctggcggatctctgagactgtcttgtgccgccagcggcagaacctttagcatgggctggtttagacaggcccctggcaaagagagagagttcgtcgccgccatcacatactctggcggcagcccttactacgccgactctgtgaagggcagattcaccatcagccgggacaacgccaagaacaccgtgtacctccagatgaacagcctgaagcctgaggacaccgccgtgtactactgcgccgccaatccaacatacggcagcgactggaacgccgagaattggggccagggaacccaagtgacagtgtctagcggtaccggcggaggcggatctggcggcggaggtagcggtggcggaggatctgaattcgacatccagatgacacagagccctagcagcctgtctgccagcgtgggagacagagtgaccatcacatgcaaggccagcgaccacatcaacaactggctggcctggtatcagcagaagcctggacaggcccctaagctgctgatctacggcgctaccacactggaaacaggcgtgcccagcagattttctggcagcggctctggcaccgactacaccctgacaatatccagcctccagcctgaggacttcgccacctactactgtcagcagagctggaacaccccttggacattcggccagggcaccaagctggaaatcaagagactcgagggacagcctaaggccaatcctaccgtgacactgttccctccaagcagcgaagaactccaggccaacaaggccacacttgtgtgcctgatctccgacttctaccctggggctgtgacagtggcttggaaggccgatggatctcctgtgaaagccggcgtggaaaccaccaagccatccaagcagagcaacaacaaatacgccgccagctcctacctgagcctgacacctgagcagtggaagtcccacagatcctacagctgccaagtgacccacgaaggcagcaccgtggaaaagacagtggcccctacagagtgcagcggatccctgcaagacccttgctctaattgccctgccggcaccttctgcgacaacaaccggaaccagatttgctccccttgtcctcctaacagcttcagctctgccggcggacagagaacctgcgacatctgtagacagtgcaagggcgtgttcagaacccggaaagagtgcagcagcacctccaacgccgagtgcgattgcacacctggcttccattgtctcggagccggctgttctatgtgcgagcaggattgcaagcagggccaagagctgaccaagaagggctgcaaggattgctgcttcggcacctttaacgaccagaagagaggcatctgccggccttggaccaactgtagcctggatggcaagagcgtgctggtcaacggcaccaaagaacgggatgtcgtgtgcggaccttctccagccgatttgtctcctggcgcttctagcgtgacacctcctgctccagctagagagcctggacacagccctcagatcatctcattctttctggccctgacctctacagccctgctgtttctgctgttcttcctgacactgcggttcagcgtggtcaagcggggcagaaagaagctgctgtacatcttcaagcagcctttcatgcggcccgtgcagaccacacaagaagaggacggctgctcctgtcggttccccgaggaagaggaaggcggttgcgaacttagggccaagcgatctggatctggagcaacaaacttctcactactcaaacaagcaggtgacgtggaggagaatcccgggcctactagtatggactggatttggcgcatccttttccttgtcggcgctgctaccggcgcgcattccttcgaacaagttcagcttcaacagcctggcgctgagctggtcaaacctggcgcttctgtgaagatgagctgcaaagccagcggctacgccttcagcagctactggatcaactggatgaagcagaaacccggccagggactcgaatggatcggccaaatctatcccggcgacggcgacaccaactacaacggcaagttcaagggcagagccacactgaccgccgatacctctagcagcacagcctacatgcagctgagcagcctgaccagcgaagatagcgccgtgtacttctgtgcccggtccatcacaacagtcgtgggctgcgctatggactattggggccagggaacaagcgtgaccgtgtctagtacgcgtgcctctacaaagggaccctccgtgtttcctctggctcccagcagcaagtctacaagcggaggaacagccgctctgggctgcctggtcaaggattactttcccgagcctgtgaccgtgtcctggaatagcggagcactgacaagcggcgtgcacacctttccagccgtgctgcaaagcagcggcctgtactctctgagcagcgtggtcacagtgcctagctctagcctgggcacccagacctacatctgcaatgtgaaccacaagcctagcaacaccaaggtggacaagagagtggaacccaagagctgtggtacccttcaggacccttgcagcaactgtccagccggaaccttttgtgataacaacagaaatcagatatgcagcccctgtccgccaaactcctttagcagtgctggcggccagcggacatgtgacatttgtcggcagtgcaaaggggttttccgcaccagaaaagagtgctcctccaccagcaatgccgagtgtgactgtaccccaggctttcactgtctcggcgctggatgtagcatgtgtgaacaggactgtaaacaggggcaagaactcacgaagaaagggtgcaaagactgctgttttgggacgttcaacgatcagaagcggggaatctgtaggccctggacaaactgttctctggacggcaagtccgtgctcgtgaatggaacaaaagagcgggacgttgtctgcggcccaagtcctgctgatcttagcccaggcgcttcctctgtgactcctccagctcctgcacgcgaacctggacactctccccagatcatctcattttttctcgctctcacatcaaccgctttgctgttcctgctcttttttctcaccctccggttctccgtggttaagagaggccggaaaaaactcctctatatctttaaacagccctttatgcgcccggtccaaacaacccaagaggaagatggctgctcttgcagattcccggaagaggaagaaggcggctgcgagctgcgcgccaagagaagcggatctggcgtgaagcagaccctgaatttcgacctgctgaagctggctggcgacgtggaatccaacccaggcccttctagaggccatatgaccgagtacaagcccacggtgcgcctcgccacccgcgacgacgtccccagggccgtacgcaccctcgccgccgcgttcgccgactaccccgccacgcgccacaccgtcgatccggaccgccacatcgagcgggtcaccgagctgcaagaactcttcctcacgcgcgtcgggctcgacatcggcaaggtgtgggtcgcggacgacggcgccgcggtggcggtctggaccacgccggagagcgtcgaagcgggggcggtgttcgccgagatcggcccgcgcatggccgagttgagcggttcccggctggccgcgcagcaacagatggaaggcctcctggcgccgcaccggcccaaggagcccgcgtggttcctggccaccgtcggcgtctcgcccgaccaccagggcaagggtctgggcagcgccgtcgtgctccccggagtggaggcggccgagcgcgccggggtgcccgccttcctggagacctccgcgccccgcaacctccccttctacgagcggctcggcttcaccgtcaccgccgacgtcgaggtgcccgaaggaccgcgcacctggtgcatgacccgcaagcccggtgcctga

SEQ ID NO: 5521 - DNA, 4467 bp, Artificial Sequence
  Synthetic Polynucleotide
atggccttaccagtgaccgccttgctcctgccgctggccttgctgctccacgccgccaggccggaagtgcagctggttgaatctggcggaggactggttcaggctggcggatctctgagactgtcttgtgccgccagcggcagaacctttagcatgggctggtttagacaggcccctggcaaagagagagagttcgtcgccgccatcacatactctggcggcagcccttactacgccgactctgtgaagggcagattcaccatcagccgggacaacgccaagaacaccgtgtacctccagatgaacagcctgaagcctgaggacaccgccgtgtactactgcgccgccaatccaacatacggcagcgactggaacgccgagaattggggccagggaacccaagtgacagtgtctagcggtaccggcggaggcggatctggcggcggaggtagcggtggcggaggatctgaattcgacatccagatgacacagagccctagcagcctgtctgccagcgtgggagacagagtgaccatcacatgcaaggccagcgaccacatcaacaactggctggcctggtatcagcagaagcctggacaggcccctaagctgctgatctacggcgctaccacactggaaacaggcgtgcccagcagattttctggcagcggctctggcaccgactacaccctgacaatatccagcctccagcctgaggacttcgccacctactactgtcagcagagctggaacaccccttggacattcggccagggcaccaagctggaaatcaagagactcgagggacagcctaaggccaatcctaccgtgacactgttccctccaagcagcgaagaactccaggccaacaaggccacacttgtgtgcctgatctccgacttctaccctggggctgtgacagtggcttggaaggccgatggatctcctgtgaaagccggcgtggaaaccaccaagccatccaagcagagcaacaacaaatacgccgccagctcctacctgagcctgacacctgagcagtggaagtcccacagatcctacagctgccaagtgacccacgaaggcagcaccgtggaaaagacagtggcccctacagagtgcagcggatccctgcaagacccttgctctaattgccctgccggcaccttctgcgacaacaaccggaaccagatttgctccccttgtcctcctaacagcttcagctctgccggcggacagagaacctgcgacatctgtagacagtgcaagggcgtgttcagaacccggaaagagtgcagcagcacctccaacgccgagtgcgattgcacacctggcttccattgtctcggagccggctgttctatgtgcgagcaggattgcaagcagggccaagagctgaccaagaagggctgcaaggattgctgcttcggcacctttaacgaccagaagagaggcatctgccggccttggaccaactgtagcctggatggcaagagcgtgctggtcaacggcaccaaagaacgggatgtcgtgtgcggaccttctccagccgatttgtctcctggcgcttctagcgtgacacctcctgctccagctagagagcctggacacagccctcagatcatctcattctttctggccctgacctctacagccctgctgtttctgctgttcttcctgacactgcggttcagcgtggtcaagcggggcagaaagaagctgctgtacatcttcaagcagcctttcatgcggcccgtgcagaccacacaagaagaggacggctgctcctgtcggttccccgaggaagaggaaggcggttgcgaacttagggccaagcgatctggatctggagcaacaaacttctcactactcaaacaagcaggtgacgtggaggagaatcccgggcctactagtatggactggatttggcgcatccttttccttgtcggcgctgctaccggcgcgcattccgggcccgaagtgcaactggttgaatccggtggcggcctggtgcaagcaggcggatctctcagacttagctgtgccgcctccggcagaaccttcacaatgggatggtttaggcaggctccagggaaagagagagagttcgtcgccgccatctctctgtctcccacactggcctactacgccgactctgtgaaaggccggttcaccatctccagagataatgccaagaacaccgtggtgctgcaaatgaactctctgaaacccgaggatacagccctgtactattgtgccgctgaccggaagtccgtgatgagcatcagacccgattactggggacagggcacacaagtcacagtgtcctctggatccggcggcggaggatctggcggaggcggatctgggggcggaggctctttcgaacaagttcagcttcaacagcctggcgctgagctggtcaaacctggcgcttctgtgaagatgagctgcaaagccagcggctacgccttcagcagctactggatcaactggatgaagcagaaacccggccagggactcgaatggatcggccaaatctatcccggcgacggcgacaccaactacaacggcaagttcaagggcagagccacactgaccgccgatacctctagcagcacagcctacatgcagctgagcagcctgaccagcgaagatagcgccgtgtacttctgtgcccggtccatcacaacagtcgtgggctgcgctatggactattggggccagggaacaagcgtgaccgtgtctagtacgcgtgcctctacaaagggaccctccgtgtttcctctggctcccagcagcaagtctacaagcggaggaacagccgctctgggctgcctggtcaaggattactttcccgagcctgtgaccgtgtcctggaatagcggagcactgacaagcggcgtgcacacctttccagccgtgctgcaaagcagcggcctgtactctctgagcagcgtggtcacagtgcctagctctagcctgggcacccagacctacatctgcaatgtgaaccacaagcctagcaacaccaaggtggacaagagagtggaacccaagagctgtggtacccttcaggacccttgcagcaactgtccagccggaaccttttgtgataacaacagaaatcagatatgcagcccctgtccgccaaactcctttagcagtgctggcggccagcggacatgtgacatttgtcggcagtgcaaaggggttttccgcaccagaaaagagtgctcctccaccagcaatgccgagtgtgactgtaccccaggctttcactgtctcggcgctggatgtagcatgtgtgaacaggactgtaaacaggggcaagaactcacgaagaaagggtgcaaagactgctgttttgggacgttcaacgatcagaagcggggaatctgtaggccctggacaaactgttctctggacggcaagtccgtgctcgtgaatggaacaaaagagcgggacgttgtctgcggcccaagtcctgctgatcttagcccaggcgcttcctctgtgactcctccagctcctgcacgcgaacctggacactctccccagatcatctcattttttctcgctctcacatcaaccgctttgctgttcctgctcttttttctcaccctccggttctccgtggttaagagaggccggaaaaaactcctctatatctttaaacagccctttatgcgcccggtccaaacaacccaagaggaagatggctgctcttgcagattcccggaagaggaagaaggcggctgcgagctgcgcgccaagagaagcggatctggcgtgaagcagaccctgaatttcgacctgctgaagctggctggcgacgtggaatccaacccaggcccttctagaggccatatgaccgagtacaagcccacggtgcgcctcgccacccgcgacgacgtccccagggccgtacgcaccctcgccgccgcgttcgccgactaccccgccacgcgccacaccgtcgatccggaccgccacatcgagcgggtcaccgagctgcaagaactcttcctcacgcgcgtcgggctcgacatcggcaaggtgtgggtcgcggacgacggcgccgcggtggcggtctggaccacgccggagagcgtcgaagcgggggcggtgttcgccgagatcggcccgcgcatggccgagttgagcggttcccggctggccgcgcagcaacagatggaaggcctcctggcgccgcaccggcccaaggagcccgcgtggttcctggccaccgtcggcgtctcgcccgaccaccagggcaagggtctgggcagcgccgtcgtgctccccggagtggaggcggccgagcgcgccggggtgcccgccttcctggagacctccgcgccccgcaacctccccttctacgagcggctcggcttcaccgtcaccgccgacgtcgaggtgcccgaaggaccgcgcacctggtgcatgacccgcaagcccggtgcctga

SEQ ID NO: 5522 - DNA, 3666 bp, Artificial Sequence
  Synthetic Polynucleotide
atggccttaccagtgaccgccttgctcctgccgctggccttgctgctccacgccgccaggccggaagtgcagctggttgaatctggcggaggactggttcaggctggcggatctctgagactgtcttgtgccgccagcggcagaacctttagcatgggctggtttagacaggcccctggcaaagagagagagttcgtcgccgccatcacatactctggcggcagcccttactacgccgactctgtgaagggcagattcaccatcagccgggacaacgccaagaacaccgtgtacctccagatgaacagcctgaagcctgaggacaccgccgtgtactactgcgccgccaatccaacatacggcagcgactggaacgccgagaattggggccagggaacccaagtgacagtgtctagcctcgagggacagcctaaggccaatcctaccgtgacactgttccctccaagcagcgaagaactccaggccaacaaggccacacttgtgtgcctgatctccgacttctaccctggggctgtgacagtggcttggaaggccgatggatctcctgtgaaagccggcgtggaaaccaccaagccatccaagcagagcaacaacaaatacgccgccagctcctacctgagcctgacacctgagcagtggaagtcccacagatcctacagctgccaagtgacccacgaaggcagcaccgtggaaaagacagtggcccctacagagtgcagcggatccctgcaagacccttgctctaattgccctgccggcaccttctgcgacaacaaccggaaccagatttgctccccttgtcctcctaacagcttcagctctgccggcggacagagaacctgcgacatctgtagacagtgcaagggcgtgttcagaacccggaaagagtgcagcagcacctccaacgccgagtgcgattgcacacctggcttccattgtctcggagccggctgttctatgtgcgagcaggattgcaagcagggccaagagctgaccaagaagggctgcaaggattgctgcttcggcacctttaacgaccagaagagaggcatctgccggccttggaccaactgtagcctggatggcaagagcgtgctggtcaacggcaccaaagaacgggatgtcgtgtgcggaccttctccagccgatttgtctcctggcgcttctagcgtgacacctcctgctccagctagagagcctggacacagccctcagatcatctcattctttctggccctgacctctacagccctgctgtttctgctgttcttcctgacactgcggttcagcgtggtcaagcggggcagaaagaagctgctgtacatcttcaagcagcctttcatgcggcccgtgcagaccacacaagaagaggacggctgctcctgtcggttccccgaggaagaggaaggcggttgcgaacttagggccaagcgatctggatctggagcaacaaacttctcactactcaaacaagcaggtgacgtggaggagaatcccgggcctactagtatggactggatttggcgcatccttttccttgtcggcgctgctaccggcgcgcattccgggcccgaagtgcaactggttgaatccggtggcggcctggtgcaagcaggcggatctctcagacttagctgtgccgcctccggcagaaccttcacaatgggatggtttaggcaggctccagggaaagagagagagttcgtcgccgccatctctctgtctcccacactggcctactacgccgactctgtgaaaggccggttcaccatctccagagataatgccaagaacaccgtggtgctgcaaatgaactctctgaaacccgaggatacagccctgtactattgtgccgctgaccggaagtccgtgatgagcatcagacccgattactggggacagggcacacaagtcacagtgtcctctacgcgtgcctctacaaagggaccctccgtgtttcctctggctcccagcagcaagtctacaagcggaggaacagccgctctgggctgcctggtcaaggattactttcccgagcctgtgaccgtgtcctggaatagcggagcactgacaagcggcgtgcacacctttccagccgtgctgcaaagcagcggcctgtactctctgagcagcgtggtcacagtgcctagctctagcctgggcacccagacctacatctgcaatgtgaaccacaagcctagcaacaccaaggtggacaagagagtggaacccaagagctgtggtacccttcaggacccttgcagcaactgtccagccggaaccttttgtgataacaacagaaatcagatatgcagcccctgtccgccaaactcctttagcagtgctggcggccagcggacatgtgacatttgtcggcagtgcaaaggggttttccgcaccagaaaagagtgctcctccaccagcaatgccgagtgtgactgtaccccaggctttcactgtctcggcgctggatgtagcatgtgtgaacaggactgtaaacaggggcaagaactcacgaagaaagggtgcaaagactgctgttttgggacgttcaacgatcagaagcggggaatctgtaggccctggacaaactgttctctggacggcaagtccgtgctcgtgaatggaacaaaagagcgggacgttgtctgcggcccaagtcctgctgatcttagcccaggcgcttcctctgtgactcctccagctcctgcacgcgaacctggacactctccccagatcatctcattttttctcgctctcacatcaaccgctttgctgttcctgctcttttttctcaccctccggttctccgtggttaagagaggccggaaaaaactcctctatatctttaaacagccctttatgcgcccggtccaaacaacccaagaggaagatggctgctcttgcagattcccggaagaggaagaaggcggctgcgagctgcgcgccaagagaagcggatctggcgtgaagcagaccctgaatttcgacctgctgaagctggctggcgacgtggaatccaacccaggcccttctagaggccatatgaccgagtacaagcccacggtgcgcctcgccacccgcgacgacgtccccagggccgtacgcaccctcgccgccgcgttcgccgactaccccgccacgcgccacaccgtcgatccggaccgccacatcgagcgggtcaccgagctgcaagaactcttcctcacgcgcgtcgggctcgacatcggcaaggtgtgggtcgcggacgacggcgccgcggtggcggtctggaccacgccggagagcgtcgaagcgggggcggtgttcgccgagatcggcccgcgcatggccgagttgagcggttcccggctggccgcgcagcaacagatggaaggcctcctggcgccgcaccggcccaaggagcccgcgtggttcctggccaccgtcggcgtctcgcccgaccaccagggcaagggtctgggcagcgccgtcgtgctccccggagtggaggcggccgagcgcgccggggtgcccgccttcctggagacctccgcgccccgcaacctccccttctacgagcggctcggcttcaccgtcaccgccgacgtcgaggtgcccgaaggaccgcgcacctggtgcatgacccgcaagcccggtgcctga

SEQ ID NO: 5523 - DNA, 3690 bp, Artificial Sequence
  Synthetic Polynucleotide
atggccttaccagtgaccgccttgctcctgccgctggccttgctgctccacgccgccaggccggacatccagatgacacagagccctagcagcctgtctgccagcgtgggagacagagtgaccatcacatgcaaggccagcgaccacatcaacaactggctggcctggtatcagcagaagcctggacaggcccctaagctgctgatctacggcgctaccacactggaaacaggcgtgcccagcagattttctggcagcggctctggcaccgactacaccctgacaatatccagcctccagcctgaggacttcgccacctactactgtcagcagagctggaacaccccttggacattcggccagggcaccaagctggaaatcaagagactcgaggacctgaagaacgtgttcccacctgaggtggccgtgttcgagcctagcgaggccgagatcagccacacccagaaagccaccctcgtgtgcctggctaccggcttctaccccgaccatgtggaactgtcttggtgggtcaacggcaaagaggtgcacagcggcgtgtctaccgacccccagccactgaaagaacagcccgccctgaacgacagccggtactgcctgagcagcagactgagagtgtccgccaccttctggcagaacccccggaaccacttcagatgccaggtgcagttctacggcctgagcgagaacgacgagtggacccaggacagagccaagcccgtgacccagatcgtgtctgccgaagcctggggcagagccgattgcggatccctgcaagacccttgctctaattgccctgccggcaccttctgcgacaacaaccggaaccagatttgctccccttgtcctcctaacagcttcagctctgccggcggacagagaacctgcgacatctgtagacagtgcaagggcgtgttcagaacccggaaagagtgcagcagcacctccaacgccgagtgcgattgcacacctggcttccattgtctcggagccggctgttctatgtgcgagcaggattgcaagcagggccaagagctgaccaagaagggctgcaaggattgctgcttcggcacctttaacgaccagaagagaggcatctgccggccttggaccaactgtagcctggatggcaagagcgtgctggtcaacggcaccaaagaacgggatgtcgtgtgcggaccttctccagccgatttgtctcctggcgcttctagcgtgacacctcctgctccagctagagagcctggacacagccctcagatcatctcattctttctggccctgacctctacagccctgctgtttctgctgttcttcctgacactgcggttcagcgtggtcaagcggggcagaaagaagctgctgtacatcttcaagcagcctttcatgcggcccgtgcagaccacacaagaagaggacggctgctcctgtcggttccccgaggaagaggaaggcggttgcgaacttagggccaagcgatctggatctggagcaacaaacttctcactactcaaacaagcaggtgacgtggaggagaatcccgggcctactagtatggactggatttggcgcatccttttccttgtcggcgctgctaccggcgcgcattccttcgaacaagttcagcttcaacagcctggcgctgagctggtcaaacctggcgcttctgtgaagatgagctgcaaagccagcggctacgccttcagcagctactggatcaactggatgaagcagaaacccggccagggactcgaatggatcggccaaatctatcccggcgacggcgacaccaactacaacggcaagttcaagggcagagccacactgaccgccgatacctctagcagcacagcctacatgcagctgagcagcctgaccagcgaagatagcgccgtgtacttctgtgcccggtccatcacaacagtcgtgggctgcgctatggactattggggccagggaacaagcgtgaccgtgtctagtacgcgtatccagaaccctgatcctgccgtgtaccagctgcgggatagcaagagcagcgacaagagcgtgtgtctgttcaccgacttcgacagccagaccaacgtgtcccagagcaaggactccgacgtgtacatcaccgataagaccgtgctggacatgcggagcatggacttcaagagcaactccgccgtggcctggtccaacaagtccgatttcgcctgcgccaacgccttcaacaacagcattatccccgaggacacattcttcccaagccccgagagcagctgcggtacccttcaggacccttgcagcaactgtccagccggaaccttttgtgataacaacagaaatcagatatgcagcccctgtccgccaaactcctttagcagtgctggcggccagcggacatgtgacatttgtcggcagtgcaaaggggttttccgcaccagaaaagagtgctcctccaccagcaatgccgagtgtgactgtaccccaggctttcactgtctcggcgctggatgtagcatgtgtgaacaggactgtaaacaggggcaagaactcacgaagaaagggtgcaaagactgctgttttgggacgttcaacgatcagaagcggggaatctgtaggccctggacaaactgttctctggacggcaagtccgtgctcgtgaatggaacaaaagagcgggacgttgtctgcggcccaagtcctgctgatcttagcccaggcgcttcctctgtgactcctccagctcctgcacgcgaacctggacactctccccagatcatctcattttttctcgctctcacatcaaccgctttgctgttcctgctcttttttctcaccctccggttctccgtggttaagagaggccggaaaaaactcctctatatctttaaacagccctttatgcgcccggtccaaacaacccaagaggaagatggctgctcttgcagattcccggaagaggaagaaggcggctgcgagctgcgcgccaagagaagcggatctggcgtgaagcagaccctgaatttcgacctgctgaagctggctggcgacgtggaatccaacccaggcccttctagaggccatatgaccgagtacaagcccacggtgcgcctcgccacccgcgacgacgtccccagggccgtacgcaccctcgccgccgcgttcgccgactaccccgccacgcgccacaccgtcgatccggaccgccacatcgagcgggtcaccgagctgcaagaactcttcctcacgcgcgtcgggctcgacatcggcaaggtgtgggtcgcggacgacggcgccgcggtggcggtctggaccacgccggagagcgtcgaagcgggggcggtgttcgccgagatcggcccgcgcatggccgagttgagcggttcccggctggccgcgcagcaacagatggaaggcctcctggcgccgcaccggcccaaggagcccgcgtggttcctggccaccgtcggcgtctcgcccgaccaccagggcaagggtctgggcagcgccgtcgtgctccccggagtggaggcggccgagcgcgccggggtgcccgccttcctggagacctccgcgccccgcaacctccccttctacgagcggctcggcttcaccgtcaccgccgacgtcgaggtgcccgaaggaccgcgcacctggtgcatgacccgcaagcccggtgcctga

SEQ ID NO: 5524 - DNA, 4101 bp, Artificial Sequence
  Synthetic Polynucleotide
atggccttaccagtgaccgccttgctcctgccgctggccttgctgctccacgccgccaggccggaagtgcagctggttgaatctggcggaggactggttcaggctggcggatctctgagactgtcttgtgccgccagcggcagaacctttagcatgggctggtttagacaggcccctggcaaagagagagagttcgtcgccgccatcacatactctggcggcagcccttactacgccgactctgtgaagggcagattcaccatcagccgggacaacgccaagaacaccgtgtacctccagatgaacagcctgaagcctgaggacaccgccgtgtactactgcgccgccaatccaacatacggcagcgactggaacgccgagaattggggccagggaacccaagtgacagtgtctagcggtaccggcggaggcggatctggcggcggaggtagcggtggcggaggatctgaattcgacatccagatgacacagagccctagcagcctgtctgccagcgtgggagacagagtgaccatcacatgcaaggccagcgaccacatcaacaactggctggcctggtatcagcagaagcctggacaggcccctaagctgctgatctacggcgctaccacactggaaacaggcgtgcccagcagattttctggcagcggctctggcaccgactacaccctgacaatatccagcctccagcctgaggacttcgccacctactactgtcagcagagctggaacaccccttggacattcggccagggcaccaagctggaaatcaagagactcgaggacctgaagaacgtgttcccacctgaggtggccgtgttcgagcctagcgaggccgagatcagccacacccagaaagccaccctcgtgtgcctggctaccggcttctaccccgaccatgtggaactgtcttggtgggtcaacggcaaagaggtgcacagcggcgtgtctaccgacccccagccactgaaagaacagcccgccctgaacgacagccggtactgcctgagcagcagactgagagtgtccgccaccttctggcagaacccccggaaccacttcagatgccaggtgcagttctacggcctgagcgagaacgacgagtggacccaggacagagccaagcccgtgacccagatcgtgtctgccgaagcctggggcagagccgattgcggatccctgcaagacccttgctctaattgccctgccggcaccttctgcgacaacaaccggaaccagatttgctccccttgtcctcctaacagcttcagctctgccggcggacagagaacctgcgacatctgtagacagtgcaagggcgtgttcagaacccggaaagagtgcagcagcacctccaacgccgagtgcgattgcacacctggcttccattgtctcggagccggctgttctatgtgcgagcaggattgcaagcagggccaagagctgaccaagaagggctgcaaggattgctgcttcggcacctttaacgaccagaagagaggcatctgccggccttggaccaactgtagcctggatggcaagagcgtgctggtcaacggcaccaaagaacgggatgtcgtgtgcggaccttctccagccgatttgtctcctggcgcttctagcgtgacacctcctgctccagctagagagcctggacacagccctcagatcatctcattctttctggccctgacctctacagccctgctgtttctgctgttcttcctgacactgcggttcagcgtggtcaagcggggcagaaagaagctgctgtacatcttcaagcagcctttcatgcggcccgtgcagaccacacaagaagaggacggctgctcctgtcggttccccgaggaagaggaaggcggttgcgaacttagggccaagcgatctggatctggagcaacaaacttctcactactcaaacaagcaggtgacgtggaggagaatcccgggcctactagtatggactggatttggcgcatccttttccttgtcggcgctgctaccggcgcgcattccttcgaacaagttcagcttcaacagcctggcgctgagctggtcaaacctggcgcttctgtgaagatgagctgcaaagccagcggctacgccttcagcagctactggatcaactggatgaagcagaaacccggccagggactcgaatggatcggccaaatctatcccggcgacggcgacaccaactacaacggcaagttcaagggcagagccacactgaccgccgatacctctagcagcacagcctacatgcagctgagcagcctgaccagcgaagatagcgccgtgtacttctgtgcccggtccatcacaacagtcgtgggctgcgctatggactattggggccagggaacaagcgtgaccgtgtctagtacgcgtatccagaaccctgatcctgccgtgtaccagctgcgggatagcaagagcagcgacaagagcgtgtgtctgttcaccgacttcgacagccagaccaacgtgtcccagagcaaggactccgacgtgtacatcaccgataagaccgtgctggacatgcggagcatggacttcaagagcaactccgccgtggcctggtccaacaagtccgatttcgcctgcgccaacgccttcaacaacagcattatccccgaggacacattcttcccaagccccgagagcagctgcggtacccttcaggacccttgcagcaactgtccagccggaaccttttgtgataacaacagaaatcagatatgcagcccctgtccgccaaactcctttagcagtgctggcggccagcggacatgtgacatttgtcggcagtgcaaaggggttttccgcaccagaaaagagtgctcctccaccagcaatgccgagtgtgactgtaccccaggctttcactgtctcggcgctggatgtagcatgtgtgaacaggactgtaaacaggggcaagaactcacgaagaaagggtgcaaagactgctgttttgggacgttcaacgatcagaagcggggaatctgtaggccctggacaaactgttctctggacggcaagtccgtgctcgtgaatggaacaaaagagcgggacgttgtctgcggcccaagtcctgctgatcttagcccaggcgcttcctctgtgactcctccagctcctgcacgcgaacctggacactctccccagatcatctcattttttctcgctctcacatcaaccgctttgctgttcctgctcttttttctcaccctccggttctccgtggttaagagaggccggaaaaaactcctctatatctttaaacagccctttatgcgcccggtccaaacaacccaagaggaagatggctgctcttgcagattcccggaagaggaagaaggcggctgcgagctgcgcgccaagagaagcggatctggcgtgaagcagaccctgaatttcgacctgctgaagctggctggcgacgtggaatccaacccaggcccttctagaggccatatgaccgagtacaagcccacggtgcgcctcgccacccgcgacgacgtccccagggccgtacgcaccctcgccgccgcgttcgccgactaccccgccacgcgccacaccgtcgatccggaccgccacatcgagcgggtcaccgagctgcaagaactcttcctcacgcgcgtcgggctcgacatcggcaaggtgtgggtcgcggacgacggcgccgcggtggcggtctggaccacgccggagagcgtcgaagcgggggcggtgttcgccgagatcggcccgcgcatggccgagttgagcggttcccggctggccgcgcagcaacagatggaaggcctcctggcgccgcaccggcccaaggagcccgcgtggttcctggccaccgtcggcgtctcgcccgaccaccagggcaagggtctgggcagcgccgtcgtgctccccggagtggaggcggccgagcgcgccggggtgcccgccttcctggagacctccgcgccccgcaacctccccttctacgagcggctcggcttcaccgtcaccgccgacgtcgaggtgcccgaaggaccgcgcacctggtgcatgacccgcaagcccggtgcctga

SEQ ID NO: 5525 - DNA, 4512 bp, Artificial Sequence
  Synthetic Polynucleotide
atggccttaccagtgaccgccttgctcctgccgctggccttgctgctccacgccgccaggccggaagtgcagctggttgaatctggcggaggactggttcaggctggcggatctctgagactgtcttgtgccgccagcggcagaacctttagcatgggctggtttagacaggcccctggcaaagagagagagttcgtcgccgccatcacatactctggcggcagcccttactacgccgactctgtgaagggcagattcaccatcagccgggacaacgccaagaacaccgtgtacctccagatgaacagcctgaagcctgaggacaccgccgtgtactactgcgccgccaatccaacatacggcagcgactggaacgccgagaattggggccagggaacccaagtgacagtgtctagcggtaccggcggaggcggatctggcggcggaggtagcggtggcggaggatctgaattcgacatccagatgacacagagccctagcagcctgtctgccagcgtgggagacagagtgaccatcacatgcaaggccagcgaccacatcaacaactggctggcctggtatcagcagaagcctggacaggcccctaagctgctgatctacggcgctaccacactggaaacaggcgtgcccagcagattttctggcagcggctctggcaccgactacaccctgacaatatccagcctccagcctgaggacttcgccacctactactgtcagcagagctggaacaccccttggacattcggccagggcaccaagctggaaatcaagagactcgaggacctgaagaacgtgttcccacctgaggtggccgtgttcgagcctagcgaggccgagatcagccacacccagaaagccaccctcgtgtgcctggctaccggcttctaccccgaccatgtggaactgtcttggtgggtcaacggcaaagaggtgcacagcggcgtgtctaccgacccccagccactgaaagaacagcccgccctgaacgacagccggtactgcctgagcagcagactgagagtgtccgccaccttctggcagaacccccggaaccacttcagatgccaggtgcagttctacggcctgagcgagaacgacgagtggacccaggacagagccaagcccgtgacccagatcgtgtctgccgaagcctggggcagagccgattgcggatccctgcaagacccttgctctaattgccctgccggcaccttctgcgacaacaaccggaaccagatttgctccccttgtcctcctaacagcttcagctctgccggcggacagagaacctgcgacatctgtagacagtgcaagggcgtgttcagaacccggaaagagtgcagcagcacctccaacgccgagtgcgattgcacacctggcttccattgtctcggagccggctgttctatgtgcgagcaggattgcaagcagggccaagagctgaccaagaagggctgcaaggattgctgcttcggcacctttaacgaccagaagagaggcatctgccggccttggaccaactgtagcctggatggcaagagcgtgctggtcaacggcaccaaagaacgggatgtcgtgtgcggaccttctccagccgatttgtctcctggcgcttctagcgtgacacctcctgctccagctagagagcctggacacagccctcagatcatctcattctttctggccctgacctctacagccctgctgtttctgctgttcttcctgacactgcggttcagcgtggtcaagcggggcagaaagaagctgctgtacatcttcaagcagcctttcatgcggcccgtgcagaccacacaagaagaggacggctgctcctgtcggttccccgaggaagaggaaggcggttgcgaacttagggccaagcgatctggatctggagcaacaaacttctcactactcaaacaagcaggtgacgtggaggagaatcccgggcctactagtatggactggatttggcgcatccttttccttgtcggcgctgctaccggcgcgcattccgggcccgaagtgcaactggttgaatccggtggcggcctggtgcaagcaggcggatctctcagacttagctgtgccgcctccggcagaaccttcacaatgggatggtttaggcaggctccagggaaagagagagagttcgtcgccgccatctctctgtctcccacactggcctactacgccgactctgtgaaaggccggttcaccatctccagagataatgccaagaacaccgtggtgctgcaaatgaactctctgaaacccgaggatacagccctgtactattgtgccgctgaccggaagtccgtgatgagcatcagacccgattactggggacagggcacacaagtcacagtgtcctctggatccggcggcggaggatctggcggaggcggatctgggggcggaggctctttcgaacaagttcagcttcaacagcctggcgctgagctggtcaaacctggcgcttctgtgaagatgagctgcaaagccagcggctacgccttcagcagctactggatcaactggatgaagcagaaacccggccagggactcgaatggatcggccaaatctatcccggcgacggcgacaccaactacaacggcaagttcaagggcagagccacactgaccgccgatacctctagcagcacagcctacatgcagctgagcagcctgaccagcgaagatagcgccgtgtacttctgtgcccggtccatcacaacagtcgtgggctgcgctatggactattggggccagggaacaagcgtgaccgtgtctagtacgcgtatccagaaccctgatcctgccgtgtaccagctgcgggatagcaagagcagcgacaagagcgtgtgtctgttcaccgacttcgacagccagaccaacgtgtcccagagcaaggactccgacgtgtacatcaccgataagaccgtgctggacatgcggagcatggacttcaagagcaactccgccgtggcctggtccaacaagtccgatttcgcctgcgccaacgccttcaacaacagcattatccccgaggacacattcttcccaagccccgagagcagctgcggtacccttcaggacccttgcagcaactgtccagccggaaccttttgtgataacaacagaaatcagatatgcagcccctgtccgccaaactcctttagcagtgctggcggccagcggacatgtgacatttgtcggcagtgcaaaggggttttccgcaccagaaaagagtgctcctccaccagcaatgccgagtgtgactgtaccccaggctttcactgtctcggcgctggatgtagcatgtgtgaacaggactgtaaacaggggcaagaactcacgaagaaagggtgcaaagactgctgttttgggacgttcaacgatcagaagcggggaatctgtaggccctggacaaactgttctctggacggcaagtccgtgctcgtgaatggaacaaaagagcgggacgttgtctgcggcccaagtcctgctgatcttagcccaggcgcttcctctgtgactcctccagctcctgcacgcgaacctggacactctccccagatcatctcattttttctcgctctcacatcaaccgctttgctgttcctgctcttttttctcaccctccggttctccgtggttaagagaggccggaaaaaactcctctatatctttaaacagccctttatgcgcccggtccaaacaacccaagaggaagatggctgctcttgcagattcccggaagaggaagaaggcggctgcgagctgcgcgccaagagaagcggatctggcgtgaagcagaccctgaatttcgacctgctgaagctggctggcgacgtggaatccaacccaggcccttctagaggccatatgaccgagtacaagcccacggtgcgcctcgccacccgcgacgacgtccccagggccgtacgcaccctcgccgccgcgttcgccgactaccccgccacgcgccacaccgtcgatccggaccgccacatcgagcgggtcaccgagctgcaagaactcttcctcacgcgcgtcgggctcgacatcggcaaggtgtgggtcgcggacgacggcgccgcggtggcggtctggaccacgccggagagcgtcgaagcgggggcggtgttcgccgagatcggcccgcgcatggccgagttgagcggttcccggctggccgcgcagcaacagatggaaggcctcctggcgccgcaccggcccaaggagcccgcgtggttcctggccaccgtcggcgtctcgcccgaccaccagggcaagggtctgggcagcgccgtcgtgctccccggagtggaggcggccgagcgcgccggggtgcccgccttcctggagacctccgcgccccgcaacctccccttctacgagcggctcggcttcaccgtcaccgccgacgtcgaggtgcccgaaggaccgcgcacctggtgcatgacccgcaagcccggtgcctga

SEQ ID NO: 5526 - DNA, 3711 bp, Artificial Sequence
  Synthetic Polynucleotide
atggccttaccagtgaccgccttgctcctgccgctggccttgctgctccacgccgccaggccggaagtgcagctggttgaatctggcggaggactggttcaggctggcggatctctgagactgtcttgtgccgccagcggcagaacctttagcatgggctggtttagacaggcccctggcaaagagagagagttcgtcgccgccatcacatactctggcggcagcccttactacgccgactctgtgaagggcagattcaccatcagccgggacaacgccaagaacaccgtgtacctccagatgaacagcctgaagcctgaggacaccgccgtgtactactgcgccgccaatccaacatacggcagcgactggaacgccgagaattggggccagggaacccaagtgacagtgtctagcctcgaggacctgaagaacgtgttcccacctgaggtggccgtgttcgagcctagcgaggccgagatcagccacacccagaaagccaccctcgtgtgcctggctaccggcttctaccccgaccatgtggaactgtcttggtgggtcaacggcaaagaggtgcacagcggcgtgtctaccgacccccagccactgaaagaacagcccgccctgaacgacagccggtactgcctgagcagcagactgagagtgtccgccaccttctggcagaacccccggaaccacttcagatgccaggtgcagttctacggcctgagcgagaacgacgagtggacccaggacagagccaagcccgtgacccagatcgtgtctgccgaagcctggggcagagccgattgcggatccctgcaagacccttgctctaattgccctgccggcaccttctgcgacaacaaccggaaccagatttgctccccttgtcctcctaacagcttcagctctgccggcggacagagaacctgcgacatctgtagacagtgcaagggcgtgttcagaacccggaaagagtgcagcagcacctccaacgccgagtgcgattgcacacctggcttccattgtctcggagccggctgttctatgtgcgagcaggattgcaagcagggccaagagctgaccaagaagggctgcaaggattgctgcttcggcacctttaacgaccagaagagaggcatctgccggccttggaccaactgtagcctggatggcaagagcgtgctggtcaacggcaccaaagaacgggatgtcgtgtgcggaccttctccagccgatttgtctcctggcgcttctagcgtgacacctcctgctccagctagagagcctggacacagccctcagatcatctcattctttctggccctgacctctacagccctgctgtttctgctgttcttcctgacactgcggttcagcgtggtcaagcggggcagaaagaagctgctgtacatcttcaagcagcctttcatgcggcccgtgcagaccacacaagaagaggacggctgctcctgtcggttccccgaggaagaggaaggcggttgcgaacttagggccaagcgatctggatctggagcaacaaacttctcactactcaaacaagcaggtgacgtggaggagaatcccgggcctactagtatggactggatttggcgcatccttttccttgtcggcgctgctaccggcgcgcattccgggcccgaagtgcaactggttgaatccggtggcggcctggtgcaagcaggcggatctctcagacttagctgtgccgcctccggcagaaccttcacaatgggatggtttaggcaggctccagggaaagagagagagttcgtcgccgccatctctctgtctcccacactggcctactacgccgactctgtgaaaggccggttcaccatctccagagataatgccaagaacaccgtggtgctgcaaatgaactctctgaaacccgaggatacagccctgtactattgtgccgctgaccggaagtccgtgatgagcatcagacccgattactggggacagggcacacaagtcacagtgtcctctacgcgtatccagaaccctgatcctgccgtgtaccagctgcgggatagcaagagcagcgacaagagcgtgtgtctgttcaccgacttcgacagccagaccaacgtgtcccagagcaaggactccgacgtgtacatcaccgataagaccgtgctggacatgcggagcatggacttcaagagcaactccgccgtggcctggtccaacaagtccgatttcgcctgcgccaacgccttcaacaacagcattatccccgaggacacattcttcccaagccccgagagcagctgcggtacccttcaggacccttgcagcaactgtccagccggaaccttttgtgataacaacagaaatcagatatgcagcccctgtccgccaaactcctttagcagtgctggcggccagcggacatgtgacatttgtcggcagtgcaaaggggttttccgcaccagaaaagagtgctcctccaccagcaatgccgagtgtgactgtaccccaggctttcactgtctcggcgctggatgtagcatgtgtgaacaggactgtaaacaggggcaagaactcacgaagaaagggtgcaaagactgctgttttgggacgttcaacgatcagaagcggggaatctgtaggccctggacaaactgttctctggacggcaagtccgtgctcgtgaatggaacaaaagagcgggacgttgtctgcggcccaagtcctgctgatcttagcccaggcgcttcctctgtgactcctccagctcctgcacgcgaacctggacactctccccagatcatctcattttttctcgctctcacatcaaccgctttgctgttcctgctcttttttctcaccctccggttctccgtggttaagagaggccggaaaaaactcctctatatctttaaacagccctttatgcgcccggtccaaacaacccaagaggaagatggctgctcttgcagattcccggaagaggaagaaggcggctgcgagctgcgcgccaagagaagcggatctggcgtgaagcagaccctgaatttcgacctgctgaagctggctggcgacgtggaatccaacccaggcccttctagaggccatatgaccgagtacaagcccacggtgcgcctcgccacccgcgacgacgtccccagggccgtacgcaccctcgccgccgcgttcgccgactaccccgccacgcgccacaccgtcgatccggaccgccacatcgagcgggtcaccgagctgcaagaactcttcctcacgcgcgtcgggctcgacatcggcaaggtgtgggtcgcggacgacggcgccgcggtggcggtctggaccacgccggagagcgtcgaagcgggggcggtgttcgccgagatcggcccgcgcatggccgagttgagcggttcccggctggccgcgcagcaacagatggaaggcctcctggcgccgcaccggcccaaggagcccgcgtggttcctggccaccgtcggcgtctcgcccgaccaccagggcaagggtctgggcagcgccgtcgtgctccccggagtggaggcggccgagcgcgccggggtgcccgccttcctggagacctccgcgccccgcaacctccccttctacgagcggctcggcttcaccgtcaccgccgacgtcgaggtgcccgaaggaccgcgcacctggtgcatgacccgcaagcccggtgcctga

SEQ ID NO: 5527 - DNA, 1884 bp, Artificial Sequence
  Synthetic Polynucleotide
atggccttaccagtgaccgccttgctcctgccgctggccttgctgctccacgccgccaggccggcatgcgaagtgcagctgcttgaaagtggcggcggactgattcagcctggcggatctctgagactgagctgtgccgccagcggcttcaccttttctagccacgccatgacctgggtccgacaggcacctggaaaagggcttgaatgggtgtccgccatcagcggctctggcgattacacacactacgccgacagcgtgaagggcagattcaccatcagcagagacaacagcaagaacaccgtgtacctccagatgaacagcctgagagccgaggacagcgccgtgtattattgcgccaaggatgaggatggcggcagcctgcttggacacagaggacaaggcaccctggtcaccgtttcttccggtaccggcggaggcggatctggcggcggaggtagcggtggcggaggatctgaattcggatctctcgagctgcaagacccttgctctaattgccctgccggcaccttctgcgacaacaaccggaaccagatttgctccccttgtcctcctaacagcttcagctctgccggcggacagagaacctgcgacatctgtagacagtgcaagggcgtgttcagaacccggaaagagtgcagcagcacctccaacgccgagtgcgattgcacacctggcttccattgtctcggagccggctgttctatgtgcgagcaggattgcaagcagggccaagagctgaccaagaagggctgcaaggattgctgcttcggcacctttaacgaccagaagagaggcatctgccggccttggaccaactgtagcctggatggcaagagcgtgctggtcaacggcaccaaagaacgggatgtcgtgtgcggaccttctccagccgatttgtctcctggcgcttctagcgtgacacctcctgctccagctagagagcctggacacagccctcagatcatctcattctttctggccctgacctctacagccctgctgtttctgctgttcttcctgacactgcggttcagcgtggtcaagcggggcagaaagaagctgctgtacatcttcaagcagcctttcatgcggcccgtgcagaccacacaagaagaggacggctgctcctgtcggttccccgaggaagaggaaggcggttgcgaacttagggccaagcgatctggatctggagcaacaaacttctcactactcaaacaagcaggtgacgtggaggagaatcccgggcctactagaggccatatgaccgagtacaagcccacggtgcgcctcgccacccgcgacgacgtccccagggccgtacgcaccctcgccgccgcgttcgccgactaccccgccacgcgccacaccgtcgatccggaccgccacatcgagcgggtcaccgagctgcaagaactcttcctcacgcgcgtcgggctcgacatcggcaaggtgtgggtcgcggacgacggcgccgcggtggcggtctggaccacgccggagagcgtcgaagcgggggcggtgttcgccgagatcggcccgcgcatggccgagttgagcggttcccggctggccgcgcagcaacagatggaaggcctcctggcgccgcaccggcccaaggagcccgcgtggttcctggccaccgtcggcgtctcgcccgaccaccagggcaagggtctgggcagcgccgtcgtgctccccggagtggaggcggccgagcgcgccggggtgcccgccttcctggagacctccgcgccccgcaacctccccttctacgagcggctcggcttcaccgtcaccgccgacgtcgaggtgcccgaaggaccgcgcacctggtgcatgacccgcaagcccggtgcctga

SEQ ID NO: 5528 - DNA, 1497 bp, Artificial Sequence; identical to SEQ ID NO: 5496
  Synthetic Polynucleotide

SEQ ID NO: 5529 - DNA, 1497 bp, Artificial Sequence; identical to SEQ ID NO: 5497
  Synthetic Polynucleotide

SEQ ID NO: 5530 - DNA, 1119 bp, Artificial Sequence; identical to SEQ ID NO: 5498
  Synthetic Polynucleotide

SEQ ID NO: 5531 - DNA, 1119 bp, Artificial Sequence; identical to SEQ ID NO: 5499
  Synthetic Polynucleotide

SEQ ID NO: 5532 - DNA, 1119 bp, Artificial Sequence; identical to SEQ ID NO: 5500
  Synthetic Polynucleotide

SEQ ID NO: 5533 - DNA, 1125 bp, Artificial Sequence; identical to SEQ ID NO: 5501
  Synthetic Polynucleotide

SEQ ID NO: 5534 - DNA, 1149 bp, Artificial Sequence; identical to SEQ ID NO: 5502
  Synthetic Polynucleotide

SEQ ID NO: 5535 - DNA, 1137 bp, Artificial Sequence; identical to SEQ ID NO: 5503
  Synthetic Polynucleotide

SEQ ID NO: 5536 - DNA, 1122 bp, Artificial Sequence; identical to SEQ ID NO: 5504
  Synthetic Polynucleotide

SEQ ID NO: 5537 - DNA, 1137 bp, Artificial Sequence; identical to SEQ ID NO: 5505
  Synthetic Polynucleotide

SEQ ID NO: 5538 - DNA, 939 bp, Artificial Sequence; identical to SEQ ID NO: 5506
  Synthetic Polynucleotide

SEQ ID NO: 5539 - DNA, 1032 bp, Artificial Sequence; identical to SEQ ID NO: 5507
  Synthetic Polynucleotide

SEQ ID NO: 5540 - DNA, 1035 bp, Artificial Sequence; identical to SEQ ID NO: 5508
  Synthetic Polynucleotide

SEQ ID NO: 5541 - DNA, 1686 bp, Artificial Sequence; identical to SEQ ID NO: 5509
  Synthetic Polynucleotide

SEQ ID NO: 5542 - DNA, 1326 bp, Artificial Sequence; identical to SEQ ID NO: 5510
  Synthetic Polynucleotide

SEQ ID NO: 5543 - DNA, 924 bp, Artificial Sequence; identical to SEQ ID NO: 5511
  Synthetic Polynucleotide

SEQ ID NO: 5544 - DNA, 849 bp, Artificial Sequence; identical to SEQ ID NO: 5512
  Synthetic Polynucleotide

SEQ ID NO: 5545 - DNA, 1623 bp, Artificial Sequence; identical to SEQ ID NO: 5513
  Synthetic Polynucleotide

SEQ ID NO: 5546 - DNA, 1623 bp, Artificial Sequence; identical to SEQ ID NO: 5514
  Synthetic Polynucleotide

SEQ ID NO: 5547 - DNA, 2934 bp, Artificial Sequence
  Synthetic Polynucleotide
atggccttaccagtgaccgccttgctcctgccgctggccttgctgctccacgccgccaggccggacatccagatgacacagagccctagcagcctgtctgccagcgtgggagacagagtgaccatcacatgcaaggccagcgaccacatcaacaactggctggcctggtatcagcagaagcctggacaggcccctaagctgctgatctacggcgctaccacactggaaacaggcgtgcccagcagattttctggcagcggctctggcaccgactacaccctgacaatatccagcctccagcctgaggacttcgccacctactactgtcagcagagctggaacaccccttggacattcggccagggcaccaagctggaaatcaagagactcgagggcatgcggactgaagacctcccaaaggctgtggtgttcctggagcctcaatggtacagggtgctggagaaggacagtgtgactctgaagtgccagggagcctactcccctgaggacaattccacacagtggtttcacaatgagagcctcatctcaagccaggcctccagctacttcattgacgctgccacagtggacgacagtggagagtacaggtgccagacaaacctctccaccctcagtgacccggtgcagctagaagtccatatcggctggctgttgctccaggcccctcggtgggtgttcaaggaggaagaccctattcacctgaggtgtcacagctggaagaacactgctctgcataaggtcacatatttacagaatggcaaaggcaggaagtattttcatcataattctgacttctacattccaaaagccacactcaaagacagcggctcctacttctgcagggggcttgttgggagtaaaaatgtgtcttcagagactgtgaacatcaccatcactcaaggtttggcagtgtcaaccatctcatcattctttccacctggctaccaagtgtccttctgcctggtcatggtgctgctgttcgccgtggataccggcctgtacttcagcgtcaagaccaacatccggtccagcaccagagactggaaggaccacaagttcaagtggcggaaggaccctcaggacaagagggccaagcgatctggatctggagcaacaaacttctcactactcaaacaagcaggtgacgtggaggagaatcccgggcctactagtatggactggatttggcgcatccttttccttgtcggcgctgctaccggcgcgcattccttcgaacaagttcagcttcaacagcctggcgctgagctggtcaaacctggcgcttctgtgaagatgagctgcaaagccagcggctacgccttcagcagctactggatcaactggatgaagcagaaacccggccagggactcgaatggatcggccaaatctatcccggcgacggcgacaccaactacaacggcaagttcaagggcagagccacactgaccgccgatacctctagcagcacagcctacatgcagctgagcagcctgaccagcgaagatagcgccgtgtacttctgtgcccggtccatcacaacagtcgtgggctgcgctatggactattggggccagggaacaagcgtgaccgtgtctagtacgcgtaacaaaattcttgtgaagcagtccccaatgctcgtcgcctatgataatgccgtgaatctgtcctgcaaatactcctacaatctgtttagccgcgagtttagggcctcactgcacaagggccttgacagcgccgtggaagtctgtgtggtctatggaaattactcccagcaactgcaagtgtactctaagacggggttcaactgtgatggaaaactgggaaacgagtccgtgacgttttacctccaaaatctctatgtcaatcaaacggacatctatttctgcaaaattgaagtcatgtatcctccgccgtacctcgataacgagaaaagcaatgggacgatcattcacgtcaagggaaaacatctctgccccagtcctctgttccctgggccttccaaaccattttgggttctcgtcgtcgtcggcggagtcctggcttgttattctctgcttgtgacagtcgcctttatcatattctgggtccgctccaagagaagcagactgctccactccgattatatgaatatgacacccaggcggccagggcctacacggaaacactatcaaccctacgctccacctcgggatttcgctgcctacagatcacgcgccaagagaagcggatctggcgtgaagcagaccctgaatttcgacctgctgaagctggctggcgacgtggaatccaacccaggcccttctagaggccatatgaccgagtacaagcccacggtgcgcctcgccacccgcgacgacgtccccagggccgtacgcaccctcgccgccgcgttcgccgactaccccgccacgcgccacaccgtcgatccggaccgccacatcgagcgggtcaccgagctgcaagaactcttcctcacgcgcgtcgggctcgacatcggcaaggtgtgggtcgcggacgacggcgccgcggtggcggtctggaccacgccggagagcgtcgaagcgggggcggtgttcgccgagatcggcccgcgcatggccgagttgagcggttcccggctggccgcgcagcaacagatggaaggcctcctggcgccgcaccggcccaaggagcccgcgtggttcctggccaccgtcggcgtctcgcccgaccaccagggcaagggtctgggcagcgccgtcgtgctccccggagtggaggcggccgagcgcgccggggtgcccgccttcctggagacctccgcgccccgcaacctccccttctacgagcggctcggcttcaccgtcaccgccgacgtcgaggtgcccgaaggaccgcgcacctggtgcatgacccgcaagcccggtgcctga

SEQ ID NO: 5548 - DNA, 3096 bp, Artificial Sequence
  Synthetic Polynucleotide
atggccttaccagtgaccgccttgctcctgccgctggccttgctgctccacgccgccaggccggcatgcgaagtgcagctgcttgaaagtggcggcggactgattcagcctggcggatctctgagactgagctgtgccgccagcggcttcaccttttctagccacgccatgacctgggtccgacaggcacctggaaaagggcttgaatgggtgtccgccatcagcggctctggcgattacacacactacgccgacagcgtgaagggcagattcaccatcagcagagacaacagcaagaacaccgtgtacctccagatgaacagcctgagagccgaggacagcgccgtgtattattgcgccaaggatgaggatggcggcagcctgcttggacacagaggacaaggcaccctggtcaccgtttcttccggtaccggcggaggcggatctggcggcggaggtagcggtggcggaggatctgaattcggatctctcgagggcatgcggactgaagacctcccaaaggctgtggtgttcctggagcctcaatggtacagggtgctggagaaggacagtgtgactctgaagtgccagggagcctactcccctgaggacaattccacacagtggtttcacaatgagagcctcatctcaagccaggcctccagctacttcattgacgctgccacagtggacgacagtggagagtacaggtgccagacaaacctctccaccctcagtgacccggtgcagctagaagtccatatcggctggctgttgctccaggcccctcggtgggtgttcaaggaggaagaccctattcacctgaggtgtcacagctggaagaacactgctctgcataaggtcacatatttacagaatggcaaaggcaggaagtattttcatcataattctgacttctacattccaaaagccacactcaaagacagcggctcctacttctgcagggggcttgttgggagtaaaaatgtgtcttcagagactgtgaacatcaccatcactcaaggtttggcagtgtcaaccatctcatcattctttccacctggctaccaagtgtccttctgcctggtcatggtgctgctgttcgccgtggataccggcctgtacttcagcgtcaagaccaacatccggtccagcaccagagactggaaggaccacaagttcaagtggcggaaggaccctcaggacaagagggccaagcgatctggatctggagcaacaaacttctcactactcaaacaagcaggtgacgtggaggagaatcccgggcctactagtgccaccatggactggatttggcgcatccttttccttgtcggcgctgctaccggcgcccattccgggcccgaagtgcagctggttgaatctggcggaggactggttcaggctggcggatctctgagactgtcttgtgccgccagcggcagaacctttagcatgggctggtttagacaggcccctggcaaagagagagagttcgtcgccgccatcacatactctggcggcagcccttactacgccgactctgtgaagggcagattcaccatcagccgggacaacgccaagaacaccgtgtacctccagatgaacagcctgaagcctgaggacaccgccgtgtactactgcgccgccaatccaacatacggcagcgactggaacgccgagaattggggccagggaacccaagtgacagtgtctagcggatccggcggcggaggatctggcggaggcggatctgggggcggaggctctttcgaaggcagcacgcgtaacaaaattcttgtgaagcagtccccaatgctcgtcgcctatgataatgccgtgaatctgtcctgcaaatactcctacaatctgtttagccgcgagtttagggcctcactgcacaagggccttgacagcgccgtggaagtctgtgtggtctatggaaattactcccagcaactgcaagtgtactctaagacggggttcaactgtgatggaaaactgggaaacgagtccgtgacgttttacctccaaaatctctatgtcaatcaaacggacatctatttctgcaaaattgaagtcatgtatcctccgccgtacctcgataacgagaaaagcaatgggacgatcattcacgtcaagggaaaacatctctgccccagtcctctgttccctgggccttccaaaccattttgggttctcgtcgtcgtcggcggagtcctggcttgttattctctgcttgtgacagtcgcctttatcatattctgggtccgctccaagagaagcagactgctccactccgattatatgaatatgacacccaggcggccagggcctacacggaaacactatcaaccctacgctccacctcgggatttcgctgcctacagatcacgcgccaagagaagcggatctggcgtgaagcagaccctgaatttcgacctgctgaagctggctggcgacgtggaatccaacccaggcccttctagaggccatatgaccgagtacaagcccacggtgcgcctcgccacccgcgacgacgtccccagggccgtacgcaccctcgccgccgcgttcgccgactaccccgccacgcgccacaccgtcgatccggaccgccacatcgagcgggtcaccgagctgcaagaactcttcctcacgcgcgtcgggctcgacatcggcaaggtgtgggtcgcggacgacggcgccgcggtggcggtctggaccacgccggagagcgtcgaagcgggggcggtgttcgccgagatcggcccgcgcatggccgagttgagcggttcccggctggccgcgcagcaacagatggaaggcctcctggcgccgcaccggcccaaggagcccgcgtggttcctggccaccgtcggcgtctcgcccgaccaccagggcaagggtctgggcagcgccgtcgtgctccccggagtggaggcggccgagcgcgccggggtgcccgccttcctggagacctccgcgccccgcaacctccccttctacgagcggctcggcttcaccgtcaccgccgacgtcgaggtgcccgaaggaccgcgcacctggtgcatgacccgcaagcccggtgcctga

SEQ ID NO: 5549 - DNA, 3546 bp, Artificial Sequence
  Synthetic Polynucleotide
atggccttaccagtgaccgccttgctcctgccgctggccttgctgctccacgccgccaggccggacatccagatgacacagagccctagcagcctgtctgccagcgtgggagacagagtgaccatcacatgcaaggccagcgaccacatcaacaactggctggcctggtatcagcagaagcctggacaggcccctaagctgctgatctacggcgctaccacactggaaacaggcgtgcccagcagattttctggcagcggctctggcaccgactacaccctgacaatatccagcctccagcctgaggacttcgccacctactactgtcagcagagctggaacaccccttggacattcggccagggcaccaagctggaaatcaagagactcgagggacagcctaaggccaatcctaccgtgacactgttccctccaagcagcgaagaactccaggccaacaaggccacacttgtgtgcctgatctccgacttctaccctggggctgtgacagtggcttggaaggccgatggatctcctgtgaaagccggcgtggaaaccaccaagccatccaagcagagcaacaacaaatacgccgccagctcctacctgagcctgacacctgagcagtggaagtcccacagatcctacagctgccaagtgacccacgaaggcagcaccgtggaaaagacagtggcccctacagagtgcagcggatccggcatgcggactgaagacctcccaaaggctgtggtgttcctggagcctcaatggtacagggtgctggagaaggacagtgtgactctgaagtgccagggagcctactcccctgaggacaattccacacagtggtttcacaatgagagcctcatctcaagccaggcctccagctacttcattgacgctgccacagtggacgacagtggagagtacaggtgccagacaaacctctccaccctcagtgacccggtgcagctagaagtccatatcggctggctgttgctccaggcccctcggtgggtgttcaaggaggaagaccctattcacctgaggtgtcacagctggaagaacactgctctgcataaggtcacatatttacagaatggcaaaggcaggaagtattttcatcataattctgacttctacattccaaaagccacactcaaagacagcggctcctacttctgcagggggcttgttgggagtaaaaatgtgtcttcagagactgtgaacatcaccatcactcaaggtttggcagtgtcaaccatctcatcattctttccacctggctaccaagtgtccttctgcctggtcatggtgctgctgttcgccgtggataccggcctgtacttcagcgtcaagaccaacatccggtccagcaccagagactggaaggaccacaagttcaagtggcggaaggaccctcaggacaagagggccaagcgatctggatctggagcaacaaacttctcactactcaaacaagcaggtgacgtggaggagaatcccgggcctactagtatggactggatttggcgcatccttttccttgtcggcgctgctaccggcgcgcattccttcgaacaagttcagcttcaacagcctggcgctgagctggtcaaacctggcgcttctgtgaagatgagctgcaaagccagcggctacgccttcagcagctactggatcaactggatgaagcagaaacccggccagggactcgaatggatcggccaaatctatcccggcgacggcgacaccaactacaacggcaagttcaagggcagagccacactgaccgccgatacctctagcagcacagcctacatgcagctgagcagcctgaccagcgaagatagcgccgtgtacttctgtgcccggtccatcacaacagtcgtgggctgcgctatggactattggggccagggaacaagcgtgaccgtgtctagtacgcgtgcctctacaaagggaccctccgtgtttcctctggctcccagcagcaagtctacaagcggaggaacagccgctctgggctgcctggtcaaggattactttcccgagcctgtgaccgtgtcctggaatagcggagcactgacaagcggcgtgcacacctttccagccgtgctgcaaagcagcggcctgtactctctgagcagcgtggtcacagtgcctagctctagcctgggcacccagacctacatctgcaatgtgaaccacaagcctagcaacaccaaggtggacaagagagtggaacccaagagctgtggtaccaacaaaattcttgtgaagcagtccccaatgctcgtcgcctatgataatgccgtgaatctgtcctgcaaatactcctacaatctgtttagccgcgagtttagggcctcactgcacaagggccttgacagcgccgtggaagtctgtgtggtctatggaaattactcccagcaactgcaagtgtactctaagacggggttcaactgtgatggaaaactgggaaacgagtccgtgacgttttacctccaaaatctctatgtcaatcaaacggacatctatttctgcaaaattgaagtcatgtatcctccgccgtacctcgataacgagaaaagcaatgggacgatcattcacgtcaagggaaaacatctctgccccagtcctctgttccctgggccttccaaaccattttgggttctcgtcgtcgtcggcggagtcctggcttgttattctctgcttgtgacagtcgcctttatcatattctgggtccgctccaagagaagcagactgctccactccgattatatgaatatgacacccaggcggccagggcctacacggaaacactatcaaccctacgctccacctcgggatttcgctgcctacagatcacgcgccaagagaagcggatctggcgtgaagcagaccctgaatttcgacctgctgaagctggctggcgacgtggaatccaacccaggcccttctagaggcgggatccacaccatggctacctacgaggtgctgtgcgaggtggcaagaaagctgggcaccgacgacagagaagtggtgctgttcctgctgaacgtgttcatccctcagcctacactggcccagctgatcggtgcactgagagccctgaaagaggaaggccggctgacctttcctctgctggccgaatgcctgttcagagccggaagaagggatctgctgcgggacctgctgcatctggaccccagatttctggaaagacacctggccggcaccatgagctacttcagcccttaccagctgaccgtgctgcacgttgacggcgaactgtgcgccagagatattcggagcctgatcttcctgagcaaggacaccatcggcagccggtctacccctcagacatttctgcactgggtgtactgcatggaaaacctggacctgctcggccccacagatgtggatgccctgatgtccatgctgagaagcctgagcagagtggacctccagagacaggtgcagacactgatgggactgcacctgagcggacctagccacagccagcactacagacacacccct

SEQ ID NO: 5550 - DNA, 3705 bp, Artificial Sequence
  Synthetic Polynucleotide
atggccttaccagtgaccgccttgctcctgccgctggccttgctgctccacgccgccaggccggacatccagatgacacagagccctagcagcctgtctgccagcgtgggagacagagtgaccatcacatgcaaggccagcgaccacatcaacaactggctggcctggtatcagcagaagcctggacaggcccctaagctgctgatctacggcgctaccacactggaaacaggcgtgcccagcagattttctggcagcggctctggcaccgactacaccctgacaatatccagcctccagcctgaggacttcgccacctactactgtcagcagagctggaacaccccttggacattcggccagggcaccaagctggaaatcaagagactcgagggacagcctaaggccaatcctaccgtgacactgttccctccaagcagcgaagaactccaggccaacaaggccacacttgtgtgcctgatctccgacttctaccctggggctgtgacagtggcttggaaggccgatggatctcctgtgaaagccggcgtggaaaccaccaagccatccaagcagagcaacaacaaatacgccgccagctcctacctgagcctgacacctgagcagtggaagtcccacagatcctacagctgccaagtgacccacgaaggcagcaccgtggaaaagacagtggcccctacagagtgcagcggatccggcatgcggactgaagacctcccaaaggctgtggtgttcctggagcctcaatggtacagggtgctggagaaggacagtgtgactctgaagtgccagggagcctactcccctgaggacaattccacacagtggtttcacaatgagagcctcatctcaagccaggcctccagctacttcattgacgctgccacagtggacgacagtggagagtacaggtgccagacaaacctctccaccctcagtgacccggtgcagctagaagtccatatcggctggctgttgctccaggcccctcggtgggtgttcaaggaggaagaccctattcacctgaggtgtcacagctggaagaacactgctctgcataaggtcacatatttacagaatggcaaaggcaggaagtattttcatcataattctgacttctacattccaaaagccacactcaaagacagcggctcctacttctgcagggggcttgttgggagtaaaaatgtgtcttcagagactgtgaacatcaccatcactcaaggtttggcagtgtcaaccatctcatcattctttccacctggctaccaagtgtccttctgcctggtcatggtgctgctgttcgccgtggataccggcctgtacttcagcgtcaagaccaacatccggtccagcaccagagactggaaggaccacaagttcaagtggcggaaggaccctcaggacaagagggccaagcgatctggatctggagcaacaaacttctcactactcaaacaagcaggtgacgtggaggagaatcccgggcctactagtatggactggatttggcgcatccttttccttgtcggcgctgctaccggcgcgcattccttcgaacaagttcagcttcaacagcctggcgctgagctggtcaaacctggcgcttctgtgaagatgagctgcaaagccagcggctacgccttcagcagctactggatcaactggatgaagcagaaacccggccagggactcgaatggatcggccaaatctatcccggcgacggcgacaccaactacaacggcaagttcaagggcagagccacactgaccgccgatacctctagcagcacagcctacatgcagctgagcagcctgaccagcgaagatagcgccgtgtacttctgtgcccggtccatcacaacagtcgtgggctgcgctatggactattggggccagggaacaagcgtgaccgtgtctagtacgcgtgcctctacaaagggaccctccgtgtttcctctggctcccagcagcaagtctacaagcggaggaacagccgctctgggctgcctggtcaaggattactttcccgagcctgtgaccgtgtcctggaatagcggagcactgacaagcggcgtgcacacctttccagccgtgctgcaaagcagcggcctgtactctctgagcagcgtggtcacagtgcctagctctagcctgggcacccagacctacatctgcaatgtgaaccacaagcctagcaacaccaaggtggacaagagagtggaacccaagagctgtggtaccaacaaaattcttgtgaagcagtccccaatgctcgtcgcctatgataatgccgtgaatctgtcctgcaaatactcctacaatctgtttagccgcgagtttagggcctcactgcacaagggccttgacagcgccgtggaagtctgtgtggtctatggaaattactcccagcaactgcaagtgtactctaagacggggttcaactgtgatggaaaactgggaaacgagtccgtgacgttttacctccaaaatctctatgtcaatcaaacggacatctatttctgcaaaattgaagtcatgtatcctccgccgtacctcgataacgagaaaagcaatgggacgatcattcacgtcaagggaaaacatctctgccccagtcctctgttccctgggccttccaaaccattttgggttctcgtcgtcgtcggcggagtcctggcttgttattctctgcttgtgacagtcgcctttatcatattctgggtccgctccaagagaagcagactgctccactccgattatatgaatatgacacccaggcggccagggcctacacggaaacactatcaaccctacgctccacctcgggatttcgctgcctacagatcacgcgccaagagaagcggatctggcgtgaagcagaccctgaatttcgacctgctgaagctggctggcgacgtggaatccaacccaggcccttctagaggcgggatccacaccatgtccgactccaaggaggtccctagccttccatttttgcgacacttgctcgaagagttggacagccatgaggacagcttgctgctgtttctgtgtcacgacgcggccccgggctgcacgacggtcacgcaagctttgtgctcgcttagccaacagcgcaagctgaccctcgcggctctggtcgagatgctctacgtgctgcagcgtatggatcttctcaagagccgcttcgggctcagcaaggagggggccgagcaattgctgggcacaagctttctcacgcgctaccgcaagctcatggtttgcgtgggtgaggagctcgactcgagcgagctacgcgctctacgcttgttcgcgtgcaacctgaatccgagcctgagcacggcgctttctgagagcagccgctttgtcgagcttgtactcgcgcttgaaaacgtaggactcgtctcgccatcgagtgtttccgtgcttgcggacatgttgcgcactcttcggcgcctcgatttgtgccagcagcttgttgagtacgaacaacaagagcaagccaggtaccgttactgttacgcggcctcgccctcattgccagttcgtacgttacgtcgggggcacggcgcgagtgaacacgagcagctgtgcatgcccgtgcaagaatcctctgacagccccgagctgctgcgcacgcccgtacaagaatcctccagcgacagccccgagcaaacgact

SEQ ID NO: 5551 - DNA, 3573 bp, Artificial Sequence
  Synthetic Polynucleotide
atggccttaccagtgaccgccttgctcctgccgctggccttgctgctccacgccgccaggccggacatccagatgacacagagccctagcagcctgtctgccagcgtgggagacagagtgaccatcacatgcaaggccagcgaccacatcaacaactggctggcctggtatcagcagaagcctggacaggcccctaagctgctgatctacggcgctaccacactggaaacaggcgtgcccagcagattttctggcagcggctctggcaccgactacaccctgacaatatccagcctccagcctgaggacttcgccacctactactgtcagcagagctggaacaccccttggacattcggccagggcaccaagctggaaatcaagagactcgagggacagcctaaggccaatcctaccgtgacactgttccctccaagcagcgaagaactccaggccaacaaggccacacttgtgtgcctgatctccgacttctaccctggggctgtgacagtggcttggaaggccgatggatctcctgtgaaagccggcgtggaaaccaccaagccatccaagcagagcaacaacaaatacgccgccagctcctacctgagcctgacacctgagcagtggaagtcccacagatcctacagctgccaagtgacccacgaaggcagcaccgtggaaaagacagtggcccctacagagtgcagcggatccggcatgcggactgaagacctcccaaaggctgtggtgttcctggagcctcaatggtacagggtgctggagaaggacagtgtgactctgaagtgccagggagcctactcccctgaggacaattccacacagtggtttcacaatgagagcctcatctcaagccaggcctccagctacttcattgacgctgccacagtggacgacagtggagagtacaggtgccagacaaacctctccaccctcagtgacccggtgcagctagaagtccatatcggctggctgttgctccaggcccctcggtgggtgttcaaggaggaagaccctattcacctgaggtgtcacagctggaagaacactgctctgcataaggtcacatatttacagaatggcaaaggcaggaagtattttcatcataattctgacttctacattccaaaagccacactcaaagacagcggctcctacttctgcagggggcttgttgggagtaaaaatgtgtcttcagagactgtgaacatcaccatcactcaaggtttggcagtgtcaaccatctcatcattctttccacctggctaccaagtgtccttctgcctggtcatggtgctgctgttcgccgtggataccggcctgtacttcagcgtcaagaccaacatccggtccagcaccagagactggaaggaccacaagttcaagtggcggaaggaccctcaggacaagagggccaagcgatctggatctggagcaacaaacttctcactactcaaacaagcaggtgacgtggaggagaatcccgggcctactagtatggactggatttggcgcatccttttccttgtcggcgctgctaccggcgcgcattccttcgaacaagttcagcttcaacagcctggcgctgagctggtcaaacctggcgcttctgtgaagatgagctgcaaagccagcggctacgccttcagcagctactggatcaactggatgaagcagaaacccggccagggactcgaatggatcggccaaatctatcccggcgacggcgacaccaactacaacggcaagttcaagggcagagccacactgaccgccgatacctctagcagcacagcctacatgcagctgagcagcctgaccagcgaagatagcgccgtgtacttctgtgcccggtccatcacaacagtcgtgggctgcgctatggactattggggccagggaacaagcgtgaccgtgtctagtacgcgtgcctctacaaagggaccctccgtgtttcctctggctcccagcagcaagtctacaagcggaggaacagccgctctgggctgcctggtcaaggattactttcccgagcctgtgaccgtgtcctggaatagcggagcactgacaagcggcgtgcacacctttccagccgtgctgcaaagcagcggcctgtactctctgagcagcgtggtcacagtgcctagctctagcctgggcacccagacctacatctgcaatgtgaaccacaagcctagcaacaccaaggtggacaagagagtggaacccaagagctgtggtaccaacaaaattcttgtgaagcagtccccaatgctcgtcgcctatgataatgccgtgaatctgtcctgcaaatactcctacaatctgtttagccgcgagtttagggcctcactgcacaagggccttgacagcgccgtggaagtctgtgtggtctatggaaattactcccagcaactgcaagtgtactctaagacggggttcaactgtgatggaaaactgggaaacgagtccgtgacgttttacctccaaaatctctatgtcaatcaaacggacatctatttctgcaaaattgaagtcatgtatcctccgccgtacctcgataacgagaaaagcaatgggacgatcattcacgtcaagggaaaacatctctgccccagtcctctgttccctgggccttccaaaccattttgggttctcgtcgtcgtcggcggagtcctggcttgttattctctgcttgtgacagtcgcctttatcatattctgggtccgctccaagagaagcagactgctccactccgattatatgaatatgacacccaggcggccagggcctacacggaaacactatcaaccctacgctccacctcgggatttcgctgcctacagatcacgcgccaagagaagcggatctggcgtgaagcagaccctgaatttcgacctgctgaagctggctggcgacgtggaatccaacccaggcccttctagaggccatatgaccgagtacaagcccacggtgcgcctcgccacccgcgacgacgtccccagggccgtacgcaccctcgccgccgcgttcgccgactaccccgccacgcgccacaccgtcgatccggaccgccacatcgagcgggtcaccgagctgcaagaactcttcctcacgcgcgtcgggctcgacatcggcaaggtgtgggtcgcggacgacggcgccgcggtggcggtctggaccacgccggagagcgtcgaagcgggggcggtgttcgccgagatcggcccgcgcatggccgagttgagcggttcccggctggccgcgcagcaacagatggaaggcctcctggcgccgcaccggcccaaggagcccgcgtggttcctggccaccgtcggcgtctcgcccgaccaccagggcaagggtctgggcagcgccgtcgtgctccccggagtggaggcggccgagcgcgccggggtgcccgccttcctggagacctccgcgccccgcaacctccccttctacgagcggctcggcttcaccgtcaccgccgacgtcgaggtgcccgaaggaccgcgcacctggtgcatgacccgcaagcccggtgcctga

SEQ ID NO: 5552 - DNA, 3984 bp, Artificial Sequence
  Synthetic Polynucleotide
atggccttaccagtgaccgccttgctcctgccgctggccttgctgctccacgccgccaggccggaagtgcagctggttgaatctggcggaggactggttcaggctggcggatctctgagactgtcttgtgccgccagcggcagaacctttagcatgggctggtttagacaggcccctggcaaagagagagagttcgtcgccgccatcacatactctggcggcagcccttactacgccgactctgtgaagggcagattcaccatcagccgggacaacgccaagaacaccgtgtacctccagatgaacagcctgaagcctgaggacaccgccgtgtactactgcgccgccaatccaacatacggcagcgactggaacgccgagaattggggccagggaacccaagtgacagtgtctagcggtaccggcggaggcggatctggcggcggaggtagcggtggcggaggatctgaattcgacatccagatgacacagagccctagcagcctgtctgccagcgtgggagacagagtgaccatcacatgcaaggccagcgaccacatcaacaactggctggcctggtatcagcagaagcctggacaggcccctaagctgctgatctacggcgctaccacactggaaacaggcgtgcccagcagattttctggcagcggctctggcaccgactacaccctgacaatatccagcctccagcctgaggacttcgccacctactactgtcagcagagctggaacaccccttggacattcggccagggcaccaagctggaaatcaagagactcgagggacagcctaaggccaatcctaccgtgacactgttccctccaagcagcgaagaactccaggccaacaaggccacacttgtgtgcctgatctccgacttctaccctggggctgtgacagtggcttggaaggccgatggatctcctgtgaaagccggcgtggaaaccaccaagccatccaagcagagcaacaacaaatacgccgccagctcctacctgagcctgacacctgagcagtggaagtcccacagatcctacagctgccaagtgacccacgaaggcagcaccgtggaaaagacagtggcccctacagagtgcagcggatccggcatgcggactgaagacctcccaaaggctgtggtgttcctggagcctcaatggtacagggtgctggagaaggacagtgtgactctgaagtgccagggagcctactcccctgaggacaattccacacagtggtttcacaatgagagcctcatctcaagccaggcctccagctacttcattgacgctgccacagtggacgacagtggagagtacaggtgccagacaaacctctccaccctcagtgacccggtgcagctagaagtccatatcggctggctgttgctccaggcccctcggtgggtgttcaaggaggaagaccctattcacctgaggtgtcacagctggaagaacactgctctgcataaggtcacatatttacagaatggcaaaggcaggaagtattttcatcataattctgacttctacattccaaaagccacactcaaagacagcggctcctacttctgcagggggcttgttgggagtaaaaatgtgtcttcagagactgtgaacatcaccatcactcaaggtttggcagtgtcaaccatctcatcattctttccacctggctaccaagtgtccttctgcctggtcatggtgctgctgttcgccgtggataccggcctgtacttcagcgtcaagaccaacatccggtccagcaccagagactggaaggaccacaagttcaagtggcggaaggaccctcaggacaagagggccaagcgatctggatctggagcaacaaacttctcactactcaaacaagcaggtgacgtggaggagaatcccgggcctactagtatggactggatttggcgcatccttttccttgtcggcgctgctaccggcgcgcattccttcgaacaagttcagcttcaacagcctggcgctgagctggtcaaacctggcgcttctgtgaagatgagctgcaaagccagcggctacgccttcagcagctactggatcaactggatgaagcagaaacccggccagggactcgaatggatcggccaaatctatcccggcgacggcgacaccaactacaacggcaagttcaagggcagagccacactgaccgccgatacctctagcagcacagcctacatgcagctgagcagcctgaccagcgaagatagcgccgtgtacttctgtgcccggtccatcacaacagtcgtgggctgcgctatggactattggggccagggaacaagcgtgaccgtgtctagtacgcgtgcctctacaaagggaccctccgtgtttcctctggctcccagcagcaagtctacaagcggaggaacagccgctctgggctgcctggtcaaggattactttcccgagcctgtgaccgtgtcctggaatagcggagcactgacaagcggcgtgcacacctttccagccgtgctgcaaagcagcggcctgtactctctgagcagcgtggtcacagtgcctagctctagcctgggcacccagacctacatctgcaatgtgaaccacaagcctagcaacaccaaggtggacaagagagtggaacccaagagctgtggtaccaacaaaattcttgtgaagcagtccccaatgctcgtcgcctatgataatgccgtgaatctgtcctgcaaatactcctacaatctgtttagccgcgagtttagggcctcactgcacaagggccttgacagcgccgtggaagtctgtgtggtctatggaaattactcccagcaactgcaagtgtactctaagacggggttcaactgtgatggaaaactgggaaacgagtccgtgacgttttacctccaaaatctctatgtcaatcaaacggacatctatttctgcaaaattgaagtcatgtatcctccgccgtacctcgataacgagaaaagcaatgggacgatcattcacgtcaagggaaaacatctctgccccagtcctctgttccctgggccttccaaaccattttgggttctcgtcgtcgtcggcggagtcctggcttgttattctctgcttgtgacagtcgcctttatcatattctgggtccgctccaagagaagcagactgctccactccgattatatgaatatgacacccaggcggccagggcctacacggaaacactatcaaccctacgctccacctcgggatttcgctgcctacagatcacgcgccaagagaagcggatctggcgtgaagcagaccctgaatttcgacctgctgaagctggctggcgacgtggaatccaacccaggcccttctagaggccatatgaccgagtacaagcccacggtgcgcctcgccacccgcgacgacgtccccagggccgtacgcaccctcgccgccgcgttcgccgactaccccgccacgcgccacaccgtcgatccggaccgccacatcgagcgggtcaccgagctgcaagaactcttcctcacgcgcgtcgggctcgacatcggcaaggtgtgggtcgcggacgacggcgccgcggtggcggtctggaccacgccggagagcgtcgaagcgggggcggtgttcgccgagatcggcccgcgcatggccgagttgagcggttcccggctggccgcgcagcaacagatggaaggcctcctggcgccgcaccggcccaaggagcccgcgtggttcctggccaccgtcggcgtctcgcccgaccaccagggcaagggtctgggcagcgccgtcgtgctccccggagtggaggcggccgagcgcgccggggtgcccgccttcctggagacctccgcgccccgcaacctccccttctacgagcggctcggcttcaccgtcaccgccgacgtcgaggtgcccgaaggaccgcgcacctggtgcatgacccgcaagcccggtgcctga

SEQ ID NO: 5553 - DNA, 4395 bp, Artificial Sequence
  Synthetic Polynucleotide
atggccttaccagtgaccgccttgctcctgccgctggccttgctgctccacgccgccaggccggaagtgcagctggttgaatctggcggaggactggttcaggctggcggatctctgagactgtcttgtgccgccagcggcagaacctttagcatgggctggtttagacaggcccctggcaaagagagagagttcgtcgccgccatcacatactctggcggcagcccttactacgccgactctgtgaagggcagattcaccatcagccgggacaacgccaagaacaccgtgtacctccagatgaacagcctgaagcctgaggacaccgccgtgtactactgcgccgccaatccaacatacggcagcgactggaacgccgagaattggggccagggaacccaagtgacagtgtctagcggtaccggcggaggcggatctggcggcggaggtagcggtggcggaggatctgaattcgacatccagatgacacagagccctagcagcctgtctgccagcgtgggagacagagtgaccatcacatgcaaggccagcgaccacatcaacaactggctggcctggtatcagcagaagcctggacaggcccctaagctgctgatctacggcgctaccacactggaaacaggcgtgcccagcagattttctggcagcggctctggcaccgactacaccctgacaatatccagcctccagcctgaggacttcgccacctactactgtcagcagagctggaacaccccttggacattcggccagggcaccaagctggaaatcaagagactcgagggacagcctaaggccaatcctaccgtgacactgttccctccaagcagcgaagaactccaggccaacaaggccacacttgtgtgcctgatctccgacttctaccctggggctgtgacagtggcttggaaggccgatggatctcctgtgaaagccggcgtggaaaccaccaagccatccaagcagagcaacaacaaatacgccgccagctcctacctgagcctgacacctgagcagtggaagtcccacagatcctacagctgccaagtgacccacgaaggcagcaccgtggaaaagacagtggcccctacagagtgcagcggatccggcatgcggactgaagacctcccaaaggctgtggtgttcctggagcctcaatggtacagggtgctggagaaggacagtgtgactctgaagtgccagggagcctactcccctgaggacaattccacacagtggtttcacaatgagagcctcatctcaagccaggcctccagctacttcattgacgctgccacagtggacgacagtggagagtacaggtgccagacaaacctctccaccctcagtgacccggtgcagctagaagtccatatcggctggctgttgctccaggcccctcggtgggtgttcaaggaggaagaccctattcacctgaggtgtcacagctggaagaacactgctctgcataaggtcacatatttacagaatggcaaaggcaggaagtattttcatcataattctgacttctacattccaaaagccacactcaaagacagcggctcctacttctgcagggggcttgttgggagtaaaaatgtgtcttcagagactgtgaacatcaccatcactcaaggtttggcagtgtcaaccatctcatcattctttccacctggctaccaagtgtccttctgcctggtcatggtgctgctgttcgccgtggataccggcctgtacttcagcgtcaagaccaacatccggtccagcaccagagactggaaggaccacaagttcaagtggcggaaggaccctcaggacaagagggccaagcgatctggatctggagcaacaaacttctcactactcaaacaagcaggtgacgtggaggagaatcccgggcctactagtatggactggatttggcgcatccttttccttgtcggcgctgctaccggcgcgcattccgggcccgaagtgcaactggttgaatccggtggcggcctggtgcaagcaggcggatctctcagacttagctgtgccgcctccggcagaaccttcacaatgggatggtttaggcaggctccagggaaagagagagagttcgtcgccgccatctctctgtctcccacactggcctactacgccgactctgtgaaaggccggttcaccatctccagagataatgccaagaacaccgtggtgctgcaaatgaactctctgaaacccgaggatacagccctgtactattgtgccgctgaccggaagtccgtgatgagcatcagacccgattactggggacagggcacacaagtcacagtgtcctctggatccggcggcggaggatctggcggaggcggatctgggggcggaggctctttcgaacaagttcagcttcaacagcctggcgctgagctggtcaaacctggcgcttctgtgaagatgagctgcaaagccagcggctacgccttcagcagctactggatcaactggatgaagcagaaacccggccagggactcgaatggatcggccaaatctatcccggcgacggcgacaccaactacaacggcaagttcaagggcagagccacactgaccgccgatacctctagcagcacagcctacatgcagctgagcagcctgaccagcgaagatagcgccgtgtacttctgtgcccggtccatcacaacagtcgtgggctgcgctatggactattggggccagggaacaagcgtgaccgtgtctagtacgcgtgcctctacaaagggaccctccgtgtttcctctggctcccagcagcaagtctacaagcggaggaacagccgctctgggctgcctggtcaaggattactttcccgagcctgtgaccgtgtcctggaatagcggagcactgacaagcggcgtgcacacctttccagccgtgctgcaaagcagcggcctgtactctctgagcagcgtggtcacagtgcctagctctagcctgggcacccagacctacatctgcaatgtgaaccacaagcctagcaacaccaaggtggacaagagagtggaacccaagagctgtggtaccaacaaaattcttgtgaagcagtccccaatgctcgtcgcctatgataatgccgtgaatctgtcctgcaaatactcctacaatctgtttagccgcgagtttagggcctcactgcacaagggccttgacagcgccgtggaagtctgtgtggtctatggaaattactcccagcaactgcaagtgtactctaagacggggttcaactgtgatggaaaactgggaaacgagtccgtgacgttttacctccaaaatctctatgtcaatcaaacggacatctatttctgcaaaattgaagtcatgtatcctccgccgtacctcgataacgagaaaagcaatgggacgatcattcacgtcaagggaaaacatctctgccccagtcctctgttccctgggccttccaaaccattttgggttctcgtcgtcgtcggcggagtcctggcttgttattctctgcttgtgacagtcgcctttatcatattctgggtccgctccaagagaagcagactgctccactccgattatatgaatatgacacccaggcggccagggcctacacggaaacactatcaaccctacgctccacctcgggatttcgctgcctacagatcacgcgccaagagaagcggatctggcgtgaagcagaccctgaatttcgacctgctgaagctggctggcgacgtggaatccaacccaggcccttctagaggccatatgaccgagtacaagcccacggtgcgcctcgccacccgcgacgacgtccccagggccgtacgcaccctcgccgccgcgttcgccgactaccccgccacgcgccacaccgtcgatccggaccgccacatcgagcgggtcaccgagctgcaagaactcttcctcacgcgcgtcgggctcgacatcggcaaggtgtgggtcgcggacgacggcgccgcggtggcggtctggaccacgccggagagcgtcgaagcgggggcggtgttcgccgagatcggcccgcgcatggccgagttgagcggttcccggctggccgcgcagcaacagatggaaggcctcctggcgccgcaccggcccaaggagcccgcgtggttcctggccaccgtcggcgtctcgcccgaccaccagggcaagggtctgggcagcgccgtcgtgctccccggagtggaggcggccgagcgcgccggggtgcccgccttcctggagacctccgcgccccgcaacctccccttctacgagcggctcggcttcaccgtcaccgccgacgtcgaggtgcccgaaggaccgcgcacctggtgcatgacccgcaagcccggtgcctga

SEQ ID NO: 5554 - DNA, 3594 bp, Artificial Sequence
  Synthetic Polynucleotide
atggccttaccagtgaccgccttgctcctgccgctggccttgctgctccacgccgccaggccggaagtgcagctggttgaatctggcggaggactggttcaggctggcggatctctgagactgtcttgtgccgccagcggcagaacctttagcatgggctggtttagacaggcccctggcaaagagagagagttcgtcgccgccatcacatactctggcggcagcccttactacgccgactctgtgaagggcagattcaccatcagccgggacaacgccaagaacaccgtgtacctccagatgaacagcctgaagcctgaggacaccgccgtgtactactgcgccgccaatccaacatacggcagcgactggaacgccgagaattggggccagggaacccaagtgacagtgtctagcctcgagggacagcctaaggccaatcctaccgtgacactgttccctccaagcagcgaagaactccaggccaacaaggccacacttgtgtgcctgatctccgacttctaccctggggctgtgacagtggcttggaaggccgatggatctcctgtgaaagccggcgtggaaaccaccaagccatccaagcagagcaacaacaaatacgccgccagctcctacctgagcctgacacctgagcagtggaagtcccacagatcctacagctgccaagtgacccacgaaggcagcaccgtggaaaagacagtggcccctacagagtgcagcggatccggcatgcggactgaagacctcccaaaggctgtggtgttcctggagcctcaatggtacagggtgctggagaaggacagtgtgactctgaagtgccagggagcctactcccctgaggacaattccacacagtggtttcacaatgagagcctcatctcaagccaggcctccagctacttcattgacgctgccacagtggacgacagtggagagtacaggtgccagacaaacctctccaccctcagtgacccggtgcagctagaagtccatatcggctggctgttgctccaggcccctcggtgggtgttcaaggaggaagaccctattcacctgaggtgtcacagctggaagaacactgctctgcataaggtcacatatttacagaatggcaaaggcaggaagtattttcatcataattctgacttctacattccaaaagccacactcaaagacagcggctcctacttctgcagggggcttgttgggagtaaaaatgtgtcttcagagactgtgaacatcaccatcactcaaggtttggcagtgtcaaccatctcatcattctttccacctggctaccaagtgtccttctgcctggtcatggtgctgctgttcgccgtggataccggcctgtacttcagcgtcaagaccaacatccggtccagcaccagagactggaaggaccacaagttcaagtggcggaaggaccctcaggacaagagggccaagcgatctggatctggagcaacaaacttctcactactcaaacaagcaggtgacgtggaggagaatcccgggcctactagtatggactggatttggcgcatccttttccttgtcggcgctgctaccggcgcgcattccgggcccgaagtgcaactggttgaatccggtggcggcctggtgcaagcaggcggatctctcagacttagctgtgccgcctccggcagaaccttcacaatgggatggtttaggcaggctccagggaaagagagagagttcgtcgccgccatctctctgtctcccacactggcctactacgccgactctgtgaaaggccggttcaccatctccagagataatgccaagaacaccgtggtgctgcaaatgaactctctgaaacccgaggatacagccctgtactattgtgccgctgaccggaagtccgtgatgagcatcagacccgattactggggacagggcacacaagtcacagtgtcctctacgcgtgcctctacaaagggaccctccgtgtttcctctggctcccagcagcaagtctacaagcggaggaacagccgctctgggctgcctggtcaaggattactttcccgagcctgtgaccgtgtcctggaatagcggagcactgacaagcggcgtgcacacctttccagccgtgctgcaaagcagcggcctgtactctctgagcagcgtggtcacagtgcctagctctagcctgggcacccagacctacatctgcaatgtgaaccacaagcctagcaacaccaaggtggacaagagagtggaacccaagagctgtggtaccaacaaaattcttgtgaagcagtccccaatgctcgtcgcctatgataatgccgtgaatctgtcctgcaaatactcctacaatctgtttagccgcgagtttagggcctcactgcacaagggccttgacagcgccgtggaagtctgtgtggtctatggaaattactcccagcaactgcaagtgtactctaagacggggttcaactgtgatggaaaactgggaaacgagtccgtgacgttttacctccaaaatctctatgtcaatcaaacggacatctatttctgcaaaattgaagtcatgtatcctccgccgtacctcgataacgagaaaagcaatgggacgatcattcacgtcaagggaaaacatctctgccccagtcctctgttccctgggccttccaaaccattttgggttctcgtcgtcgtcggcggagtcctggcttgttattctctgcttgtgacagtcgcctttatcatattctgggtccgctccaagagaagcagactgctccactccgattatatgaatatgacacccaggcggccagggcctacacggaaacactatcaaccctacgctccacctcgggatttcgctgcctacagatcacgcgccaagagaagcggatctggcgtgaagcagaccctgaatttcgacctgctgaagctggctggcgacgtggaatccaacccaggcccttctagaggccatatgaccgagtacaagcccacggtgcgcctcgccacccgcgacgacgtccccagggccgtacgcaccctcgccgccgcgttcgccgactaccccgccacgcgccacaccgtcgatccggaccgccacatcgagcgggtcaccgagctgcaagaactcttcctcacgcgcgtcgggctcgacatcggcaaggtgtgggtcgcggacgacggcgccgcggtggcggtctggaccacgccggagagcgtcgaagcgggggcggtgttcgccgagatcggcccgcgcatggccgagttgagcggttcccggctggccgcgcagcaacagatggaaggcctcctggcgccgcaccggcccaaggagcccgcgtggttcctggccaccgtcggcgtctcgcccgaccaccagggcaagggtctgggcagcgccgtcgtgctccccggagtggaggcggccgagcgcgccggggtgcccgccttcctggagacctccgcgccccgcaacctccccttctacgagcggctcggcttcaccgtcaccgccgacgtcgaggtgcccgaaggaccgcgcacctggtgcatgacccgcaagcccggtgcctga

SEQ ID NO: 5555 - DNA, 3618 bp, Artificial Sequence
  Synthetic Polynucleotide
atggccttaccagtgaccgccttgctcctgccgctggccttgctgctccacgccgccaggccggacatccagatgacacagagccctagcagcctgtctgccagcgtgggagacagagtgaccatcacatgcaaggccagcgaccacatcaacaactggctggcctggtatcagcagaagcctggacaggcccctaagctgctgatctacggcgctaccacactggaaacaggcgtgcccagcagattttctggcagcggctctggcaccgactacaccctgacaatatccagcctccagcctgaggacttcgccacctactactgtcagcagagctggaacaccccttggacattcggccagggcaccaagctggaaatcaagagactcgaggacctgaagaacgtgttcccacctgaggtggccgtgttcgagcctagcgaggccgagatcagccacacccagaaagccaccctcgtgtgcctggctaccggcttctaccccgaccatgtggaactgtcttggtgggtcaacggcaaagaggtgcacagcggcgtgtctaccgacccccagccactgaaagaacagcccgccctgaacgacagccggtactgcctgagcagcagactgagagtgtccgccaccttctggcagaacccccggaaccacttcagatgccaggtgcagttctacggcctgagcgagaacgacgagtggacccaggacagagccaagcccgtgacccagatcgtgtctgccgaagcctggggcagagccgattgcggatccggcatgcggactgaagacctcccaaaggctgtggtgttcctggagcctcaatggtacagggtgctggagaaggacagtgtgactctgaagtgccagggagcctactcccctgaggacaattccacacagtggtttcacaatgagagcctcatctcaagccaggcctccagctacttcattgacgctgccacagtggacgacagtggagagtacaggtgccagacaaacctctccaccctcagtgacccggtgcagctagaagtccatatcggctggctgttgctccaggcccctcggtgggtgttcaaggaggaagaccctattcacctgaggtgtcacagctggaagaacactgctctgcataaggtcacatatttacagaatggcaaaggcaggaagtattttcatcataattctgacttctacattccaaaagccacactcaaagacagcggctcctacttctgcagggggcttgttgggagtaaaaatgtgtcttcagagactgtgaacatcaccatcactcaaggtttggcagtgtcaaccatctcatcattctttccacctggctaccaagtgtccttctgcctggtcatggtgctgctgttcgccgtggataccggcctgtacttcagcgtcaagaccaacatccggtccagcaccagagactggaaggaccacaagttcaagtggcggaaggaccctcaggacaagagggccaagcgatctggatctggagcaacaaacttctcactactcaaacaagcaggtgacgtggaggagaatcccgggcctactagtatggactggatttggcgcatccttttccttgtcggcgctgctaccggcgcgcattccttcgaacaagttcagcttcaacagcctggcgctgagctggtcaaacctggcgcttctgtgaagatgagctgcaaagccagcggctacgccttcagcagctactggatcaactggatgaagcagaaacccggccagggactcgaatggatcggccaaatctatcccggcgacggcgacaccaactacaacggcaagttcaagggcagagccacactgaccgccgatacctctagcagcacagcctacatgcagctgagcagcctgaccagcgaagatagcgccgtgtacttctgtgcccggtccatcacaacagtcgtgggctgcgctatggactattggggccagggaacaagcgtgaccgtgtctagtacgcgtatccagaaccctgatcctgccgtgtaccagctgcgggatagcaagagcagcgacaagagcgtgtgtctgttcaccgacttcgacagccagaccaacgtgtcccagagcaaggactccgacgtgtacatcaccgataagaccgtgctggacatgcggagcatggacttcaagagcaactccgccgtggcctggtccaacaagtccgatttcgcctgcgccaacgccttcaacaacagcattatccccgaggacacattcttcccaagccccgagagcagctgcggtaccaacaaaattcttgtgaagcagtccccaatgctcgtcgcctatgataatgccgtgaatctgtcctgcaaatactcctacaatctgtttagccgcgagtttagggcctcactgcacaagggccttgacagcgccgtggaagtctgtgtggtctatggaaattactcccagcaactgcaagtgtactctaagacggggttcaactgtgatggaaaactgggaaacgagtccgtgacgttttacctccaaaatctctatgtcaatcaaacggacatctatttctgcaaaattgaagtcatgtatcctccgccgtacctcgataacgagaaaagcaatgggacgatcattcacgtcaagggaaaacatctctgccccagtcctctgttccctgggccttccaaaccattttgggttctcgtcgtcgtcggcggagtcctggcttgttattctctgcttgtgacagtcgcctttatcatattctgggtccgctccaagagaagcagactgctccactccgattatatgaatatgacacccaggcggccagggcctacacggaaacactatcaaccctacgctccacctcgggatttcgctgcctacagatcacgcgccaagagaagcggatctggcgtgaagcagaccctgaatttcgacctgctgaagctggctggcgacgtggaatccaacccaggcccttctagaggccatatgaccgagtacaagcccacggtgcgcctcgccacccgcgacgacgtccccagggccgtacgcaccctcgccgccgcgttcgccgactaccccgccacgcgccacaccgtcgatccggaccgccacatcgagcgggtcaccgagctgcaagaactcttcctcacgcgcgtcgggctcgacatcggcaaggtgtgggtcgcggacgacggcgccgcggtggcggtctggaccacgccggagagcgtcgaagcgggggcggtgttcgccgagatcggcccgcgcatggccgagttgagcggttcccggctggccgcgcagcaacagatggaaggcctcctggcgccgcaccggcccaaggagcccgcgtggttcctggccaccgtcggcgtctcgcccgaccaccagggcaagggtctgggcagcgccgtcgtgctccccggagtggaggcggccgagcgcgccggggtgcccgccttcctggagacctccgcgccccgcaacctccccttctacgagcggctcggcttcaccgtcaccgccgacgtcgaggtgcccgaaggaccgcgcacctggtgcatgacccgcaagcccggtgcctga

SEQ ID NO: 5556 - DNA, 4029 bp, Artificial Sequence
  Synthetic Polynucleotide
atggccttaccagtgaccgccttgctcctgccgctggccttgctgctccacgccgccaggccggaagtgcagctggttgaatctggcggaggactggttcaggctggcggatctctgagactgtcttgtgccgccagcggcagaacctttagcatgggctggtttagacaggcccctggcaaagagagagagttcgtcgccgccatcacatactctggcggcagcccttactacgccgactctgtgaagggcagattcaccatcagccgggacaacgccaagaacaccgtgtacctccagatgaacagcctgaagcctgaggacaccgccgtgtactactgcgccgccaatccaacatacggcagcgactggaacgccgagaattggggccagggaacccaagtgacagtgtctagcggtaccggcggaggcggatctggcggcggaggtagcggtggcggaggatctgaattcgacatccagatgacacagagccctagcagcctgtctgccagcgtgggagacagagtgaccatcacatgcaaggccagcgaccacatcaacaactggctggcctggtatcagcagaagcctggacaggcccctaagctgctgatctacggcgctaccacactggaaacaggcgtgcccagcagattttctggcagcggctctggcaccgactacaccctgacaatatccagcctccagcctgaggacttcgccacctactactgtcagcagagctggaacaccccttggacattcggccagggcaccaagctggaaatcaagagactcgaggacctgaagaacgtgttcccacctgaggtggccgtgttcgagcctagcgaggccgagatcagccacacccagaaagccaccctcgtgtgcctggctaccggcttctaccccgaccatgtggaactgtcttggtgggtcaacggcaaagaggtgcacagcggcgtgtctaccgacccccagccactgaaagaacagcccgccctgaacgacagccggtactgcctgagcagcagactgagagtgtccgccaccttctggcagaacccccggaaccacttcagatgccaggtgcagttctacggcctgagcgagaacgacgagtggacccaggacagagccaagcccgtgacccagatcgtgtctgccgaagcctggggcagagccgattgcggatccggcatgcggactgaagacctcccaaaggctgtggtgttcctggagcctcaatggtacagggtgctggagaaggacagtgtgactctgaagtgccagggagcctactcccctgaggacaattccacacagtggtttcacaatgagagcctcatctcaagccaggcctccagctacttcattgacgctgccacagtggacgacagtggagagtacaggtgccagacaaacctctccaccctcagtgacccggtgcagctagaagtccatatcggctggctgttgctccaggcccctcggtgggtgttcaaggaggaagaccctattcacctgaggtgtcacagctggaagaacactgctctgcataaggtcacatatttacagaatggcaaaggcaggaagtattttcatcataattctgacttctacattccaaaagccacactcaaagacagcggctcctacttctgcagggggcttgttgggagtaaaaatgtgtcttcagagactgtgaacatcaccatcactcaaggtttggcagtgtcaaccatctcatcattctttccacctggctaccaagtgtccttctgcctggtcatggtgctgctgttcgccgtggataccggcctgtacttcagcgtcaagaccaacatccggtccagcaccagagactggaaggaccacaagttcaagtggcggaaggaccctcaggacaagagggccaagcgatctggatctggagcaacaaacttctcactactcaaacaagcaggtgacgtggaggagaatcccgggcctactagtatggactggatttggcgcatccttttccttgtcggcgctgctaccggcgcgcattccttcgaacaagttcagcttcaacagcctggcgctgagctggtcaaacctggcgcttctgtgaagatgagctgcaaagccagcggctacgccttcagcagctactggatcaactggatgaagcagaaacccggccagggactcgaatggatcggccaaatctatcccggcgacggcgacaccaactacaacggcaagttcaagggcagagccacactgaccgccgatacctctagcagcacagcctacatgcagctgagcagcctgaccagcgaagatagcgccgtgtacttctgtgcccggtccatcacaacagtcgtgggctgcgctatggactattggggccagggaacaagcgtgaccgtgtctagtacgcgtatccagaaccctgatcctgccgtgtaccagctgcgggatagcaagagcagcgacaagagcgtgtgtctgttcaccgacttcgacagccagaccaacgtgtcccagagcaaggactccgacgtgtacatcaccgataagaccgtgctggacatgcggagcatggacttcaagagcaactccgccgtggcctggtccaacaagtccgatttcgcctgcgccaacgccttcaacaacagcattatccccgaggacacattcttcccaagccccgagagcagctgcggtaccaacaaaattcttgtgaagcagtccccaatgctcgtcgcctatgataatgccgtgaatctgtcctgcaaatactcctacaatctgtttagccgcgagtttagggcctcactgcacaagggccttgacagcgccgtggaagtctgtgtggtctatggaaattactcccagcaactgcaagtgtactctaagacggggttcaactgtgatggaaaactgggaaacgagtccgtgacgttttacctccaaaatctctatgtcaatcaaacggacatctatttctgcaaaattgaagtcatgtatcctccgccgtacctcgataacgagaaaagcaatgggacgatcattcacgtcaagggaaaacatctctgccccagtcctctgttccctgggccttccaaaccattttgggttctcgtcgtcgtcggcggagtcctggcttgttattctctgcttgtgacagtcgcctttatcatattctgggtccgctccaagagaagcagactgctccactccgattatatgaatatgacacccaggcggccagggcctacacggaaacactatcaaccctacgctccacctcgggatttcgctgcctacagatcacgcgccaagagaagcggatctggcgtgaagcagaccctgaatttcgacctgctgaagctggctggcgacgtggaatccaacccaggcccttctagaggccatatgaccgagtacaagcccacggtgcgcctcgccacccgcgacgacgtccccagggccgtacgcaccctcgccgccgcgttcgccgactaccccgccacgcgccacaccgtcgatccggaccgccacatcgagcgggtcaccgagctgcaagaactcttcctcacgcgcgtcgggctcgacatcggcaaggtgtgggtcgcggacgacggcgccgcggtggcggtctggaccacgccggagagcgtcgaagcgggggcggtgttcgccgagatcggcccgcgcatggccgagttgagcggttcccggctggccgcgcagcaacagatggaaggcctcctggcgccgcaccggcccaaggagcccgcgtggttcctggccaccgtcggcgtctcgcccgaccaccagggcaagggtctgggcagcgccgtcgtgctccccggagtggaggcggccgagcgcgccggggtgcccgccttcctggagacctccgcgccccgcaacctccccttctacgagcggctcggcttcaccgtcaccgccgacgtcgaggtgcccgaaggaccgcgcacctggtgcatgacccgcaagcccggtgcctga

SEQ ID NO: 5557 - DNA, 4440 bp, Artificial Sequence
  Synthetic Polynucleotide
atggccttaccagtgaccgccttgctcctgccgctggccttgctgctccacgccgccaggccggaagtgcagctggttgaatctggcggaggactggttcaggctggcggatctctgagactgtcttgtgccgccagcggcagaacctttagcatgggctggtttagacaggcccctggcaaagagagagagttcgtcgccgccatcacatactctggcggcagcccttactacgccgactctgtgaagggcagattcaccatcagccgggacaacgccaagaacaccgtgtacctccagatgaacagcctgaagcctgaggacaccgccgtgtactactgcgccgccaatccaacatacggcagcgactggaacgccgagaattggggccagggaacccaagtgacagtgtctagcggtaccggcggaggcggatctggcggcggaggtagcggtggcggaggatctgaattcgacatccagatgacacagagccctagcagcctgtctgccagcgtgggagacagagtgaccatcacatgcaaggccagcgaccacatcaacaactggctggcctggtatcagcagaagcctggacaggcccctaagctgctgatctacggcgctaccacactggaaacaggcgtgcccagcagattttctggcagcggctctggcaccgactacaccctgacaatatccagcctccagcctgaggacttcgccacctactactgtcagcagagctggaacaccccttggacattcggccagggcaccaagctggaaatcaagagactcgaggacctgaagaacgtgttcccacctgaggtggccgtgttcgagcctagcgaggccgagatcagccacacccagaaagccaccctcgtgtgcctggctaccggcttctaccccgaccatgtggaactgtcttggtgggtcaacggcaaagaggtgcacagcggcgtgtctaccgacccccagccactgaaagaacagcccgccctgaacgacagccggtactgcctgagcagcagactgagagtgtccgccaccttctggcagaacccccggaaccacttcagatgccaggtgcagttctacggcctgagcgagaacgacgagtggacccaggacagagccaagcccgtgacccagatcgtgtctgccgaagcctggggcagagccgattgcggatccggcatgcggactgaagacctcccaaaggctgtggtgttcctggagcctcaatggtacagggtgctggagaaggacagtgtgactctgaagtgccagggagcctactcccctgaggacaattccacacagtggtttcacaatgagagcctcatctcaagccaggcctccagctacttcattgacgctgccacagtggacgacagtggagagtacaggtgccagacaaacctctccaccctcagtgacccggtgcagctagaagtccatatcggctggctgttgctccaggcccctcggtgggtgttcaaggaggaagaccctattcacctgaggtgtcacagctggaagaacactgctctgcataaggtcacatatttacagaatggcaaaggcaggaagtattttcatcataattctgacttctacattccaaaagccacactcaaagacagcggctcctacttctgcagggggcttgttgggagtaaaaatgtgtcttcagagactgtgaacatcaccatcactcaaggtttggcagtgtcaaccatctcatcattctttccacctggctaccaagtgtccttctgcctggtcatggtgctgctgttcgccgtggataccggcctgtacttcagcgtcaagaccaacatccggtccagcaccagagactggaaggaccacaagttcaagtggcggaaggaccctcaggacaagagggccaagcgatctggatctggagcaacaaacttctcactactcaaacaagcaggtgacgtggaggagaatcccgggcctactagtatggactggatttggcgcatccttttccttgtcggcgctgctaccggcgcgcattccgggcccgaagtgcaactggttgaatccggtggcggcctggtgcaagcaggcggatctctcagacttagctgtgccgcctccggcagaaccttcacaatgggatggtttaggcaggctccagggaaagagagagagttcgtcgccgccatctctctgtctcccacactggcctactacgccgactctgtgaaaggccggttcaccatctccagagataatgccaagaacaccgtggtgctgcaaatgaactctctgaaacccgaggatacagccctgtactattgtgccgctgaccggaagtccgtgatgagcatcagacccgattactggggacagggcacacaagtcacagtgtcctctggatccggcggcggaggatctggcggaggcggatctgggggcggaggctctttcgaacaagttcagcttcaacagcctggcgctgagctggtcaaacctggcgcttctgtgaagatgagctgcaaagccagcggctacgccttcagcagctactggatcaactggatgaagcagaaacccggccagggactcgaatggatcggccaaatctatcccggcgacggcgacaccaactacaacggcaagttcaagggcagagccacactgaccgccgatacctctagcagcacagcctacatgcagctgagcagcctgaccagcgaagatagcgccgtgtacttctgtgcccggtccatcacaacagtcgtgggctgcgctatggactattggggccagggaacaagcgtgaccgtgtctagtacgcgtatccagaaccctgatcctgccgtgtaccagctgcgggatagcaagagcagcgacaagagcgtgtgtctgttcaccgacttcgacagccagaccaacgtgtcccagagcaaggactccgacgtgtacatcaccgataagaccgtgctggacatgcggagcatggacttcaagagcaactccgccgtggcctggtccaacaagtccgatttcgcctgcgccaacgccttcaacaacagcattatccccgaggacacattcttcccaagccccgagagcagctgcggtaccaacaaaattcttgtgaagcagtccccaatgctcgtcgcctatgataatgccgtgaatctgtcctgcaaatactcctacaatctgtttagccgcgagtttagggcctcactgcacaagggccttgacagcgccgtggaagtctgtgtggtctatggaaattactcccagcaactgcaagtgtactctaagacggggttcaactgtgatggaaaactgggaaacgagtccgtgacgttttacctccaaaatctctatgtcaatcaaacggacatctatttctgcaaaattgaagtcatgtatcctccgccgtacctcgataacgagaaaagcaatgggacgatcattcacgtcaagggaaaacatctctgccccagtcctctgttccctgggccttccaaaccattttgggttctcgtcgtcgtcggcggagtcctggcttgttattctctgcttgtgacagtcgcctttatcatattctgggtccgctccaagagaagcagactgctccactccgattatatgaatatgacacccaggcggccagggcctacacggaaacactatcaaccctacgctccacctcgggatttcgctgcctacagatcacgcgccaagagaagcggatctggcgtgaagcagaccctgaatttcgacctgctgaagctggctggcgacgtggaatccaacccaggcccttctagaggccatatgaccgagtacaagcccacggtgcgcctcgccacccgcgacgacgtccccagggccgtacgcaccctcgccgccgcgttcgccgactaccccgccacgcgccacaccgtcgatccggaccgccacatcgagcgggtcaccgagctgcaagaactcttcctcacgcgcgtcgggctcgacatcggcaaggtgtgggtcgcggacgacggcgccgcggtggcggtctggaccacgccggagagcgtcgaagcgggggcggtgttcgccgagatcggcccgcgcatggccgagttgagcggttcccggctggccgcgcagcaacagatggaaggcctcctggcgccgcaccggcccaaggagcccgcgtggttcctggccaccgtcggcgtctcgcccgaccaccagggcaagggtctgggcagcgccgtcgtgctccccggagtggaggcggccgagcgcgccggggtgcccgccttcctggagacctccgcgccccgcaacctccccttctacgagcggctcggcttcaccgtcaccgccgacgtcgaggtgcccgaaggaccgcgcacctggtgcatgacccgcaagcccggtgcctga

SEQ ID NO: 5558 - DNA, 3639 bp, Artificial Sequence
  Synthetic Polynucleotide
atggccttaccagtgaccgccttgctcctgccgctggccttgctgctccacgccgccaggccggaagtgcagctggttgaatctggcggaggactggttcaggctggcggatctctgagactgtcttgtgccgccagcggcagaacctttagcatgggctggtttagacaggcccctggcaaagagagagagttcgtcgccgccatcacatactctggcggcagcccttactacgccgactctgtgaagggcagattcaccatcagccgggacaacgccaagaacaccgtgtacctccagatgaacagcctgaagcctgaggacaccgccgtgtactactgcgccgccaatccaacatacggcagcgactggaacgccgagaattggggccagggaacccaagtgacagtgtctagcctcgaggacctgaagaacgtgttcccacctgaggtggccgtgttcgagcctagcgaggccgagatcagccacacccagaaagccaccctcgtgtgcctggctaccggcttctaccccgaccatgtggaactgtcttggtgggtcaacggcaaagaggtgcacagcggcgtgtctaccgacccccagccactgaaagaacagcccgccctgaacgacagccggtactgcctgagcagcagactgagagtgtccgccaccttctggcagaacccccggaaccacttcagatgccaggtgcagttctacggcctgagcgagaacgacgagtggacccaggacagagccaagcccgtgacccagatcgtgtctgccgaagcctggggcagagccgattgcggatccggcatgcggactgaagacctcccaaaggctgtggtgttcctggagcctcaatggtacagggtgctggagaaggacagtgtgactctgaagtgccagggagcctactcccctgaggacaattccacacagtggtttcacaatgagagcctcatctcaagccaggcctccagctacttcattgacgctgccacagtggacgacagtggagagtacaggtgccagacaaacctctccaccctcagtgacccggtgcagctagaagtccatatcggctggctgttgctccaggcccctcggtgggtgttcaaggaggaagaccctattcacctgaggtgtcacagctggaagaacactgctctgcataaggtcacatatttacagaatggcaaaggcaggaagtattttcatcataattctgacttctacattccaaaagccacactcaaagacagcggctcctacttctgcagggggcttgttgggagtaaaaatgtgtcttcagagactgtgaacatcaccatcactcaaggtttggcagtgtcaaccatctcatcattctttccacctggctaccaagtgtccttctgcctggtcatggtgctgctgttcgccgtggataccggcctgtacttcagcgtcaagaccaacatccggtccagcaccagagactggaaggaccacaagttcaagtggcggaaggaccctcaggacaagagggccaagcgatctggatctggagcaacaaacttctcactactcaaacaagcaggtgacgtggaggagaatcccgggcctactagtatggactggatttggcgcatccttttccttgtcggcgctgctaccggcgcgcattccgggcccgaagtgcaactggttgaatccggtggcggcctggtgcaagcaggcggatctctcagacttagctgtgccgcctccggcagaaccttcacaatgggatggtttaggcaggctccagggaaagagagagagttcgtcgccgccatctctctgtctcccacactggcctactacgccgactctgtgaaaggccggttcaccatctccagagataatgccaagaacaccgtggtgctgcaaatgaactctctgaaacccgaggatacagccctgtactattgtgccgctgaccggaagtccgtgatgagcatcagacccgattactggggacagggcacacaagtcacagtgtcctctacgcgtatccagaaccctgatcctgccgtgtaccagctgcgggatagcaagagcagcgacaagagcgtgtgtctgttcaccgacttcgacagccagaccaacgtgtcccagagcaaggactccgacgtgtacatcaccgataagaccgtgctggacatgcggagcatggacttcaagagcaactccgccgtggcctggtccaacaagtccgatttcgcctgcgccaacgccttcaacaacagcattatccccgaggacacattcttcccaagccccgagagcagctgcggtaccaacaaaattcttgtgaagcagtccccaatgctcgtcgcctatgataatgccgtgaatctgtcctgcaaatactcctacaatctgtttagccgcgagtttagggcctcactgcacaagggccttgacagcgccgtggaagtctgtgtggtctatggaaattactcccagcaactgcaagtgtactctaagacggggttcaactgtgatggaaaactgggaaacgagtccgtgacgttttacctccaaaatctctatgtcaatcaaacggacatctatttctgcaaaattgaagtcatgtatcctccgccgtacctcgataacgagaaaagcaatgggacgatcattcacgtcaagggaaaacatctctgccccagtcctctgttccctgggccttccaaaccattttgggttctcgtcgtcgtcggcggagtcctggcttgttattctctgcttgtgacagtcgcctttatcatattctgggtccgctccaagagaagcagactgctccactccgattatatgaatatgacacccaggcggccagggcctacacggaaacactatcaaccctacgctccacctcgggatttcgctgcctacagatcacgcgccaagagaagcggatctggcgtgaagcagaccctgaatttcgacctgctgaagctggctggcgacgtggaatccaacccaggcccttctagaggccatatgaccgagtacaagcccacggtgcgcctcgccacccgcgacgacgtccccagggccgtacgcaccctcgccgccgcgttcgccgactaccccgccacgcgccacaccgtcgatccggaccgccacatcgagcgggtcaccgagctgcaagaactcttcctcacgcgcgtcgggctcgacatcggcaaggtgtgggtcgcggacgacggcgccgcggtggcggtctggaccacgccggagagcgtcgaagcgggggcggtgttcgccgagatcggcccgcgcatggccgagttgagcggttcccggctggccgcgcagcaacagatggaaggcctcctggcgccgcaccggcccaaggagcccgcgtggttcctggccaccgtcggcgtctcgcccgaccaccagggcaagggtctgggcagcgccgtcgtgctccccggagtggaggcggccgagcgcgccggggtgcccgccttcctggagacctccgcgccccgcaacctccccttctacgagcggctcggcttcaccgtcaccgccgacgtcgaggtgcccgaaggaccgcgcacctggtgcatgacccgcaagcccggtgcctga

SEQ ID NO: 5559 - DNA, 1902 bp, Artificial Sequence; identical to SEQ ID NO: 1638
  Synthetic Polynucleotide

SEQ ID NO: 5560 - DNA, 1407 bp, Artificial Sequence
  Synthetic Polynucleotide
atggccttaccagtgaccgccttgctcctgccgctggccttgctgctccacgccgccaggccggacatccagatgacacagagccctagcagcctgtctgccagcgtgggagacagagtgaccatcacatgcaaggccagcgaccacatcaacaactggctggcctggtatcagcagaagcctggacaggcccctaagctgctgatctacggcgctaccacactggaaacaggcgtgcccagcagattttctggcagcggctctggcaccgactacaccctgacaatatccagcctccagcctgaggacttcgccacctactactgtcagcagagctggaacaccccttggacattcggccagggcaccaagctggaaatcaagagaggcggaggcggaagtggaggcggaggatctggcggcggaggctctcaagttcagcttcaacagcctggcgctgagctggtcaaacctggcgcttctgtgaagatgagctgcaaagccagcggctacgccttcagcagctactggatcaactggatgaagcagaaacccggccagggactcgaatggatcggccaaatctatcccggcgacggcgacaccaactacaacggcaagttcaagggcagagccacactgaccgccgatacctctagcagcacagcctacatgcagctgagcagcctgaccagcgaagatagcgccgtgtacttctgtgcccggtccatcacaacagtcgtgggctgcgctatggactattggggccagggaacaagcgtgaccgtgtctagtacgcgtaacaaaattcttgtgaagcagtccccaatgctcgtcgcctatgataatgccgtgaatctgtcctgcaaatactcctacaatctgtttagccgcgagtttagggcctcactgcacaagggccttgacagcgccgtggaagtctgtgtggtctatggaaattactcccagcaactgcaagtgtactctaagacggggttcaactgtgatggaaaactgggaaacgagtccgtgacgttttacctccaaaatctctatgtcaatcaaacggacatctatttctgcaaaattgaagtcatgtatcctccgccgtacctcgataacgagaaaagcaatgggacgatcattcacgtcaagggaaaacatctctgccccagtcctctgttccctgggccttccaaaccattttgggttctcgtcgtcgtcggcggagtcctggcttgttattctctgcttgtgacagtcgcctttatcatattctgggtccgctccaagagaagcagactgctccactccgattatatgaatatgacacccaggcggccagggcctacacggaaacactatcaaccctacgctccacctcgggatttcgctgcctacagatca

SEQ ID NO: 5561 - DNA, 1407 bp, Artificial Sequence
  Synthetic Polynucleotide
atggccttaccagtgaccgccttgctcctgccgctggccttgctgctccacgccgccaggccggagatcgtgctgacacagagccctgccaccctgtctctgagccctggcgaaagagccaccctgagctgtagagccagccagagcgtgtccagctacctggcctggtatcagcagaagcccggccaggctccccggctgctgatctacgatgccagcaatagagccaccggcatccccgccagattttccggctctggcagcggcaccgacttcaccctgaccatcagctccctggaacccgaggacttcgccgtgtactactgccagcagcggagcaactggcccatcacattcggccagggcacccggctggaaatcaaaggcggaggcggaagtggaggcggaggatctggcggcggaggctctgaagtgcagctggtggaatcaggcggcggactggtgcagcctggcagaagcctgagactgagctgtgccgccagcggcttcaccttcaacgactacgccatgcactgggtgcgccaggcccctggaaaaggactggaatgggtgtccacaatcagctggaacagcggcagcatcggctacgccgatagcgtgaagggccggttcaccatcagccgggacaacgccaagaagtccctgtacctccagatgaacagcctgcgggccgaggacacagccctgtactattgcgccaaggacatccagtacggcaactactactacggcatggacgtgtggggccagggaaccaccgtgaccgtgtcatctacgcgtaacaaaattcttgtgaagcagtccccaatgctcgtcgcctatgataatgccgtgaatctgtcctgcaaatactcctacaatctgtttagccgcgagtttagggcctcactgcacaagggccttgacagcgccgtggaagtctgtgtggtctatggaaattactcccagcaactgcaagtgtactctaagacggggttcaactgtgatggaaaactgggaaacgagtccgtgacgttttacctccaaaatctctatgtcaatcaaacggacatctatttctgcaaaattgaagtcatgtatcctccgccgtacctcgataacgagaaaagcaatgggacgatcattcacgtcaagggaaaacatctctgccccagtcctctgttccctgggccttccaaaccattttgggttctcgtcgtcgtcggcggagtcctggcttgttattctctgcttgtgacagtcgcctttatcatattctgggtccgctccaagagaagcagactgctccactccgattatatgaatatgacacccaggcggccagggcctacacggaaacactatcaaccctacgctccacctcgggatttcgctgcctacagatca

SEQ ID NO: 5562 - DNA, 1029 bp, Artificial Sequence
  Synthetic Polynucleotide
atggccttaccagtgaccgccttgctcctgccgctggccttgctgctccacgccgccaggccggaagtgcagctggttgaatctggcggaggactggttcaggctggcggatctctgagactgtcttgtgccgccagcggcagaacctttagcatgggctggtttagacaggcccctggcaaagagagagagttcgtcgccgccatcacatactctggcggcagcccttactacgccgactctgtgaagggcagattcaccatcagccgggacaacgccaagaacaccgtgtacctccagatgaacagcctgaagcctgaggacaccgccgtgtactactgcgccgccaatccaacatacggcagcgactggaacgccgagaattggggccagggaacccaagtgacagtgtctagcacgcgtaacaaaattcttgtgaagcagtccccaatgctcgtcgcctatgataatgccgtgaatctgtcctgcaaatactcctacaatctgtttagccgcgagtttagggcctcactgcacaagggccttgacagcgccgtggaagtctgtgtggtctatggaaattactcccagcaactgcaagtgtactctaagacggggttcaactgtgatggaaaactgggaaacgagtccgtgacgttttacctccaaaatctctatgtcaatcaaacggacatctatttctgcaaaattgaagtcatgtatcctccgccgtacctcgataacgagaaaagcaatgggacgatcattcacgtcaagggaaaacatctctgccccagtcctctgttccctgggccttccaaaccattttgggttctcgtcgtcgtcggcggagtcctggcttgttattctctgcttgtgacagtcgcctttatcatattctgggtccgctccaagagaagcagactgctccactccgattatatgaatatgacacccaggcggccagggcctacacggaaacactatcaaccctacgctccacctcgggatttcgctgcctacagatca

SEQ ID NO: 5563 - DNA, 1029 bp, Artificial Sequence
  Synthetic Polynucleotide
atggccttaccagtgaccgccttgctcctgccgctggccttgctgctccacgccgccaggccgcagctccagttgcaagagagcggccctggcttggtaaaaccttccgagacccttagcctcacatgcacggttagtgggggcagcatttcctcaggtgattactattggggatggattcggcaacccccgggtaaaggattggagtggattggtcatatttattatagtggagcgacgtactacaacccaagtctcaaatccagggttacaatatccgtcgatacgagcaggaaccaattcagcttgaaactttctagtgtcaccgcagcagacacagccgtctattactgtacgcgggatgactccagtaattggcggtcccgagggcaagggacactggtcacggtctcctcaacgcgtaacaaaattcttgtgaagcagtccccaatgctcgtcgcctatgataatgccgtgaatctgtcctgcaaatactcctacaatctgtttagccgcgagtttagggcctcactgcacaagggccttgacagcgccgtggaagtctgtgtggtctatggaaattactcccagcaactgcaagtgtactctaagacggggttcaactgtgatggaaaactgggaaacgagtccgtgacgttttacctccaaaatctctatgtcaatcaaacggacatctatttctgcaaaattgaagtcatgtatcctccgccgtacctcgataacgagaaaagcaatgggacgatcattcacgtcaagggaaaacatctctgccccagtcctctgttccctgggccttccaaaccattttgggttctcgtcgtcgtcggcggagtcctggcttgttattctctgcttgtgacagtcgcctttatcatattctgggtccgctccaagagaagcagactgctccactccgattatatgaatatgacacccaggcggccagggcctacacggaaacactatcaaccctacgctccacctcgggatttcgctgcctacagatca

SEQ ID NO: 5564 - DNA, 1029 bp, Artificial Sequence
  Synthetic Polynucleotide
atggccttaccagtgaccgccttgctcctgccgctggccttgctgctccacgccgccaggccgcagctccagctgcaagagtctggacctggcctggtcaagcctagcgagacactgagcctgacctgtaccgtgtccggcgatagcatcagcagcggcgattactactggggctggatcagacagcctcctggcaaaggactggaatggatcggccacatctactacagcggcgtgacctactacaaccccagcctgaagtccagagtgaccatcagcgtggacaccagccggaaccagttctccctgaagctgtctagcgtgacagccgccgataccgccgtgtactactgcaccagagaggacagcagcaactggcggagtagaggccagggaacactggtcacagttagctctacgcgtaacaaaattcttgtgaagcagtccccaatgctcgtcgcctatgataatgccgtgaatctgtcctgcaaatactcctacaatctgtttagccgcgagtttagggcctcactgcacaagggccttgacagcgccgtggaagtctgtgtggtctatggaaattactcccagcaactgcaagtgtactctaagacggggttcaactgtgatggaaaactgggaaacgagtccgtgacgttttacctccaaaatctctatgtcaatcaaacggacatctatttctgcaaaattgaagtcatgtatcctccgccgtacctcgataacgagaaaagcaatgggacgatcattcacgtcaagggaaaacatctctgccccagtcctctgttccctgggccttccaaaccattttgggttctcgtcgtcgtcggcggagtcctggcttgttattctctgcttgtgacagtcgcctttatcatattctgggtccgctccaagagaagcagactgctccactccgattatatgaatatgacacccaggcggccagggcctacacggaaacactatcaaccctacgctccacctcgggatttcgctgcctacagatca

SEQ ID NO: 5565 - DNA, 1035 bp, Artificial Sequence
  Synthetic Polynucleotide
atggccttaccagtgaccgccttgctcctgccgctggccttgctgctccacgccgccaggccggaagttcagctgcaagagtctggcggaggactggttcaacctggcggaagcctgagactgtcttgtgccgcctctggcagaaccttcagcagcctgttcatgggctggttcagacaggcccctggcaaagagagagaactggtcgccgccatcagccggtacagcctgtacacctactacgccgacagcgtgaagggcagattcaccatcagcgccgacaacgccaagaacgccgtgtacctccagatgaacagcctgaagccagaggacacagccgtgtactactgcgccagcaaacttgagtacaccagcaacgactacgacagctggggccagggaacccaagtgacagtctcttctacgcgtaacaaaattcttgtgaagcagtccccaatgctcgtcgcctatgataatgccgtgaatctgtcctgcaaatactcctacaatctgtttagccgcgagtttagggcctcactgcacaagggccttgacagcgccgtggaagtctgtgtggtctatggaaattactcccagcaactgcaagtgtactctaagacggggttcaactgtgatggaaaactgggaaacgagtccgtgacgttttacctccaaaatctctatgtcaatcaaacggacatctatttctgcaaaattgaagtcatgtatcctccgccgtacctcgataacgagaaaagcaatgggacgatcattcacgtcaagggaaaacatctctgccccagtcctctgttccctgggccttccaaaccattttgggttctcgtcgtcgtcggcggagtcctggcttgttattctctgcttgtgacagtcgcctttatcatattctgggtccgctccaagagaagcagactgctccactccgattatatgaatatgacacccaggcggccagggcctacacggaaacactatcaaccctacgctccacctcgggatttcgctgcctacagatca

SEQ ID NO: 5566 - DNA, 1059 bp, Artificial Sequence
  Synthetic Polynucleotide
atggccttaccagtgaccgccttgctcctgccgctggccttgctgctccacgccgccaggccggaagtgcagctggttgaatctggcggaggactggttcagcctggcggatctctgagactgtcttgtgccgcctctggcttcgccagcgactactatatcatcggctggttcagacaggcccctggcaaagagagagagggcgtcagctgtatcagcagcagatacgccaacaccaactacgccgacagcgtgaagggcagattcaccatcagccgggacaacgccaagaacaccgtgtacctccagatgaacagcctgaagcctgaggacaccgccgtgtactactgtgccgccgacaccagaagatacacctgtcctgacattgccaccatgcaccggaacttcgattcttggggccagggcacactggtcaccgtttcttctacgcgtaacaaaattcttgtgaagcagtccccaatgctcgtcgcctatgataatgccgtgaatctgtcctgcaaatactcctacaatctgtttagccgcgagtttagggcctcactgcacaagggccttgacagcgccgtggaagtctgtgtggtctatggaaattactcccagcaactgcaagtgtactctaagacggggttcaactgtgatggaaaactgggaaacgagtccgtgacgttttacctccaaaatctctatgtcaatcaaacggacatctatttctgcaaaattgaagtcatgtatcctccgccgtacctcgataacgagaaaagcaatgggacgatcattcacgtcaagggaaaacatctctgccccagtcctctgttccctgggccttccaaaccattttgggttctcgtcgtcgtcggcggagtcctggcttgttattctctgcttgtgacagtcgcctttatcatattctgggtccgctccaagagaagcagactgctccactccgattatatgaatatgacacccaggcggccagggcctacacggaaacactatcaaccctacgctccacctcgggatttcgctgcctacagatca

SEQ ID NO: 5567 - DNA, 1047 bp, Artificial Sequence
  Synthetic Polynucleotide
atggccttaccagtgaccgccttgctcctgccgctggccttgctgctccacgccgccaggccggaagtgcaactggtggaatctggaggctctctggtgcagccagggggaagcctgagactgtcttgtgccgcttccggcttcaccttcgacgactacgccatgagctgggtgcgccaggtgccaggcaaaggcctggaatgggtgtccagcatcaactggagcggcacccacaccgattacgccgactccgtgaaaggcagattcacaatcagcagaaacaacgccaacaataccctgtacctgcagatgaactccctgaagtctgaggatacagcagtgtattattgcgccaagaactggcgggacgccggcaccacttggtttgagaaaagcggctctgccggacagggaacccaagtgacagtgtcctccacgcgtaacaaaattcttgtgaagcagtccccaatgctcgtcgcctatgataatgccgtgaatctgtcctgcaaatactcctacaatctgtttagccgcgagtttagggcctcactgcacaagggccttgacagcgccgtggaagtctgtgtggtctatggaaattactcccagcaactgcaagtgtactctaagacggggttcaactgtgatggaaaactgggaaacgagtccgtgacgttttacctccaaaatctctatgtcaatcaaacggacatctatttctgcaaaattgaagtcatgtatcctccgccgtacctcgataacgagaaaagcaatgggacgatcattcacgtcaagggaaaacatctctgccccagtcctctgttccctgggccttccaaaccattttgggttctcgtcgtcgtcggcggagtcctggcttgttattctctgcttgtgacagtcgcctttatcatattctgggtccgctccaagagaagcagactgctccactccgattatatgaatatgacacccaggcggccagggcctacacggaaacactatcaaccctacgctccacctcgggatttcgctgcctacagatca

SEQ ID NO: 5568 - DNA, 1032 bp, Artificial Sequence
  Synthetic Polynucleotide
atggccttaccagtgaccgccttgctcctgccgctggccttgctgctccacgccgccaggccggaggtgcagctggttgaatctggcggaggactggttcagcctggcggatctctgagactgtcttgtgccgccagcggcttcaacatcaaggatacctgtatcggctgggttcgcagagcccctggcaaagaggaagaactggtcgccaaaatctgcaagtacagcggccacaccagatacgccgacagcgtgaagggcagattcaccatcagcgccgacaccagcaagaacaccgcctacctccagatgaacagcctgagagccgaggacaccgccgtgtactattgtgccgctgtgtccgtcagagatgggcactacaattactggggccagggcaccaccgtgaccgtttcttcaacgcgtaacaaaattcttgtgaagcagtccccaatgctcgtcgcctatgataatgccgtgaatctgtcctgcaaatactcctacaatctgtttagccgcgagtttagggcctcactgcacaagggccttgacagcgccgtggaagtctgtgtggtctatggaaattactcccagcaactgcaagtgtactctaagacggggttcaactgtgatggaaaactgggaaacgagtccgtgacgttttacctccaaaatctctatgtcaatcaaacggacatctatttctgcaaaattgaagtcatgtatcctccgccgtacctcgataacgagaaaagcaatgggacgatcattcacgtcaagggaaaacatctctgccccagtcctctgttccctgggccttccaaaccattttgggttctcgtcgtcgtcggcggagtcctggcttgttattctctgcttgtgacagtcgcctttatcatattctgggtccgctccaagagaagcagactgctccactccgattatatgaatatgacacccaggcggccagggcctacacggaaacactatcaaccctacgctccacctcgggatttcgctgcctacagatca

SEQ ID NO: 5569 - DNA, 1047 bp, Artificial Sequence
  Synthetic Polynucleotide
atggccttaccagtgaccgccttgctcctgccgctggccttgctgctccacgccgccaggccgggctctgacctgggcatcaagctgctgttcgccgctgccaagggccaggacgacgaagtgcggattctgctggctgctggggccgacgtgaacgccaaggatttcgagggctacacccccctgcacgtggccgcctatgatggacacctggaaatcgtggaagtgctgctgaaggctggcgctgatgtgaatgccaaagacagccagggccggacccctctgcatgaagccgcctacagcggccatctggaaattgtggaagtgctgctgaaagccggggcagacgtgaacgctcaggacgacgctggcgagacaccagccgatctggctgcagcttggggccacgaagatatcgccgaggtgctgcagaagacgcgtaacaaaattcttgtgaagcagtccccaatgctcgtcgcctatgataatgccgtgaatctgtcctgcaaatactcctacaatctgtttagccgcgagtttagggcctcactgcacaagggccttgacagcgccgtggaagtctgtgtggtctatggaaattactcccagcaactgcaagtgtactctaagacggggttcaactgtgatggaaaactgggaaacgagtccgtgacgttttacctccaaaatctctatgtcaatcaaacggacatctatttctgcaaaattgaagtcatgtatcctccgccgtacctcgataacgagaaaagcaatgggacgatcattcacgtcaagggaaaacatctctgccccagtcctctgttccctgggccttccaaaccattttgggttctcgtcgtcgtcggcggagtcctggcttgttattctctgcttgtgacagtcgcctttatcatattctgggtccgctccaagagaagcagactgctccactccgattatatgaatatgacacccaggcggccagggcctacacggaaacactatcaaccctacgctccacctcgggatttcgctgcctacagatca

SEQ ID NO: 5570 - DNA, 849 bp, Artificial Sequence
  Synthetic Polynucleotide
atggccttaccagtgaccgccttgctcctgccgctggccttgctgctccacgccgccaggccggtggacaacaagttcaacaaagagcggtacagcgcctactacgagatttggcaactgcccaacctgaacgtgcggcagaaggccgccttcatcggatctctgcaggacgaccctagccagagcgccaatctgctggccgaggccaagaagctgaacgacgcccaggcccctaaaacgcgtaacaaaattcttgtgaagcagtccccaatgctcgtcgcctatgataatgccgtgaatctgtcctgcaaatactcctacaatctgtttagccgcgagtttagggcctcactgcacaagggccttgacagcgccgtggaagtctgtgtggtctatggaaattactcccagcaactgcaagtgtactctaagacggggttcaactgtgatggaaaactgggaaacgagtccgtgacgttttacctccaaaatctctatgtcaatcaaacggacatctatttctgcaaaattgaagtcatgtatcctccgccgtacctcgataacgagaaaagcaatgggacgatcattcacgtcaagggaaaacatctctgccccagtcctctgttccctgggccttccaaaccattttgggttctcgtcgtcgtcggcggagtcctggcttgttattctctgcttgtgacagtcgcctttatcatattctgggtccgctccaagagaagcagactgctccactccgattatatgaatatgacacccaggcggccagggcctacacggaaacactatcaaccctacgctccacctcgggatttcgctgcctacagatca

SEQ ID NO: 5571 - DNA, 942 bp, Artificial Sequence
  Synthetic Polynucleotide
atggccttaccagtgaccgccttgctcctgccgctggccttgctgctccacgccgccaggccgctgccagccccgaagaatttggtcgtttcccgtgtcactgaggactctgcacgtctgagctggaccgcaccggacgcggcgttcgacagctttgcaatcggctactgggagtgggatgatgacggcgaggccattgtgctgaccgttccgggtagcgagcgcagctacgatctgaccggtctgaagccgggtacggaatatccggtgtatattgcgggcgtgaagggtggccagtggagcttcccgctgagcgcgatctttaccaccacgcgtaacaaaattcttgtgaagcagtccccaatgctcgtcgcctatgataatgccgtgaatctgtcctgcaaatactcctacaatctgtttagccgcgagtttagggcctcactgcacaagggccttgacagcgccgtggaagtctgtgtggtctatggaaattactcccagcaactgcaagtgtactctaagacggggttcaactgtgatggaaaactgggaaacgagtccgtgacgttttacctccaaaatctctatgtcaatcaaacggacatctatttctgcaaaattgaagtcatgtatcctccgccgtacctcgataacgagaaaagcaatgggacgatcattcacgtcaagggaaaacatctctgccccagtcctctgttccctgggccttccaaaccattttgggttctcgtcgtcgtcggcggagtcctggcttgttattctctgcttgtgacagtcgcctttatcatattctgggtccgctccaagagaagcagactgctccactccgattatatgaatatgacacccaggcggccagggcctacacggaaacactatcaaccctacgctccacctcgggatttcgctgcctacagatca

SEQ ID NO: 5572 - DNA, 945 bp, Artificial Sequence
  Synthetic Polynucleotide
atggccttaccagtgaccgccttgctcctgccgctggccttgctgctccacgccgccaggccgatgctgcccgctcctaagaatctggtggtgtccagaatcaccgaggacagcgccagactgtcttggacagctcctgatgccgccttcgacagcttccccatccggtacatcgagacactgatctggggcgaagccatctggctggatgtgcctggaagcgagagaagctacgacctgaccggactgaagcctggcacagagtatgccgtggtcatcaccggcgtgaaaggcggcagattctctagccctctggtggcctctttcaccaccacgcgtaacaaaattcttgtgaagcagtccccaatgctcgtcgcctatgataatgccgtgaatctgtcctgcaaatactcctacaatctgtttagccgcgagtttagggcctcactgcacaagggccttgacagcgccgtggaagtctgtgtggtctatggaaattactcccagcaactgcaagtgtactctaagacggggttcaactgtgatggaaaactgggaaacgagtccgtgacgttttacctccaaaatctctatgtcaatcaaacggacatctatttctgcaaaattgaagtcatgtatcctccgccgtacctcgataacgagaaaagcaatgggacgatcattcacgtcaagggaaaacatctctgccccagtcctctgttccctgggccttccaaaccattttgggttctcgtcgtcgtcggcggagtcctggcttgttattctctgcttgtgacagtcgcctttatcatattctgggtccgctccaagagaagcagactgctccactccgattatatgaatatgacacccaggcggccagggcctacacggaaacactatcaaccctacgctccacctcgggatttcgctgcctacagatca

SEQ ID NO: 5573 - DNA, 1596 bp, Artificial Sequence
  Synthetic Polynucleotide
atggccttaccagtgaccgccttgctcctgccgctggccttgctgctccacgccgccaggccgatggccttaccagtgaccgccttgctcctgccgctggccttgctgctccacgccgccaggccgctgttcaatcaagaggtgcagatccctctgaccgagagctactgtggcccctgtcctaagaactggatctgctacaagaacaactgctaccagttcttcgacgagagcaagaattggtacgagagccaggccagctgcatgagccagaatgccagcctgctgaaggtgtacagcaaagaggaccaggacctgctgaaactggtcaagagctaccactggatgggccttgtgcacatccccaccaatggctcttggcagtgggaggacggcagcattctgagccctaacctgctgaccatcatcgagatgcagaagggcgactgcgccctgtacgccagcagctttaagggctacatcgagaattgcagcaccccgaacacctacatctgtatgcagagaaccgttggcggaggcggaagtggaggcggaggatctggcggcggaggctctgacctctttaatcaagaagtccagattccactcaccgaatcctactgcggaccttgtccaaaaaattggatttgttataagaacaactgttatcaattctttgatgagtctaaaaattggtatgagtcccaggcttcctgcatgtctcagaacgcttctctgctgaaagtctactctaaagaagatcaggatctcctgaagctcgtcaagtcttatcattggatggggctcgtccacattcctaccaacggaagctggcaatgggaagatggctccatcctgtctccaaatctgctcacgattattgaaatgcagaaaggggattgtgctctctacgccagctccttcaagggatatattgagaactgtagcacgcccaatacttatatctgtatgcaacggaccgtgacgcgtaacaaaattcttgtgaagcagtccccaatgctcgtcgcctatgataatgccgtgaatctgtcctgcaaatactcctacaatctgtttagccgcgagtttagggcctcactgcacaagggccttgacagcgccgtggaagtctgtgtggtctatggaaattactcccagcaactgcaagtgtactctaagacggggttcaactgtgatggaaaactgggaaacgagtccgtgacgttttacctccaaaatctctatgtcaatcaaacggacatctatttctgcaaaattgaagtcatgtatcctccgccgtacctcgataacgagaaaagcaatgggacgatcattcacgtcaagggaaaacatctctgccccagtcctctgttccctgggccttccaaaccattttgggttctcgtcgtcgtcggcggagtcctggcttgttattctctgcttgtgacagtcgcctttatcatattctgggtccgctccaagagaagcagactgctccactccgattatatgaatatgacacccaggcggccagggcctacacggaaacactatcaaccctacgctccacctcgggatttcgctgcctacagatca

SEQ ID NO: 5574 - DNA, 1236 bp, Artificial Sequence
  Synthetic Polynucleotide
atggccttaccagtgaccgccttgctcctgccgctggccttgctgctccacgccgccaggccgatggagctgactgatttgctcctggcggccatgcttcttgcagtggcaagactaactctgtccagccccgtagctcctgcctgtgaccccagactcctaaataaactgctgcgtgactcccacctccttcacagccgactgagtcagtgtcccgacgtggaccctttgtctatccctgttctgctgcctgctgtggactttagcctgggagaatggaaaacccagacggaacagagcaaggcacaggacattctaggggcagtgtcccttctactggagggagtgatggcagcacgaggacagttggaaccctcctgcctctcatccctcctgggacagctttctgggcaggttcgcctcctcttgggggccctgcagggcctcctaggaacccagcttcctctacagggcaggaccacagctcacaaggaccccaatgccctcttcttgagcttgcaacaactgcttcggggaaaggtgcgcttcctgcttctggtagaaggtcccaccctctgtgtcagacggaccctgccaaccacagctgtcccaagcagtacttctacgcgtaacaaaattcttgtgaagcagtccccaatgctcgtcgcctatgataatgccgtgaatctgtcctgcaaatactcctacaatctgtttagccgcgagtttagggcctcactgcacaagggccttgacagcgccgtggaagtctgtgtggtctatggaaattactcccagcaactgcaagtgtactctaagacggggttcaactgtgatggaaaactgggaaacgagtccgtgacgttttacctccaaaatctctatgtcaatcaaacggacatctatttctgcaaaattgaagtcatgtatcctccgccgtacctcgataacgagaaaagcaatgggacgatcattcacgtcaagggaaaacatctctgccccagtcctctgttccctgggccttccaaaccattttgggttctcgtcgtcgtcggcggagtcctggcttgttattctctgcttgtgacagtcgcctttatcatattctgggtccgctccaagagaagcagactgctccactccgattatatgaatatgacacccaggcggccagggcctacacggaaacactatcaaccctacgctccacctcgggatttcgctgcctacagatca

SEQ ID NO: 5575 - DNA, 834 bp, Artificial Sequence
  Synthetic Polynucleotide
atggccttaccagtgaccgccttgctcctgccgctggccttgctgctccacgccgccaggccgatggaccccgacctggaaatcagagccgccttcctgcggcagagaaacacagccctgagaacagaggtggccgagctggaacaagaggtgcagcggctggaaaacgaggtgtcccagtacgagacaagatacggccctctcggaggcggaaaaacgcgtacgcgtaacaaaattcttgtgaagcagtccccaatgctcgtcgcctatgataatgccgtgaatctgtcctgcaaatactcctacaatctgtttagccgcgagtttagggcctcactgcacaagggccttgacagcgccgtggaagtctgtgtggtctatggaaattactcccagcaactgcaagtgtactctaagacggggttcaactgtgatggaaaactgggaaacgagtccgtgacgttttacctccaaaatctctatgtcaatcaaacggacatctatttctgcaaaattgaagtcatgtatcctccgccgtacctcgataacgagaaaagcaatgggacgatcattcacgtcaagggaaaacatctctgccccagtcctctgttccctgggccttccaaaccattttgggttctcgtcgtcgtcggcggagtcctggcttgttattctctgcttgtgacagtcgcctttatcatattctgggtccgctccaagagaagcagactgctccactccgattatatgaatatgacacccaggcggccagggcctacacggaaacactatcaaccctacgctccacctcgggatttcgctgcctacagatca

SEQ ID NO: 5576 - DNA, 759 bp, Artificial Sequence
  Synthetic Polynucleotide
atggccttaccagtgaccgccttgctcctgccgctggccttgctgctccacgccgccaggccggaagttgctgccctcgagaaggaggtagcagctttggaaaaagaagtcgcagcccttgagaaagaagttgcggctctggagaagacgcgtaacaaaattcttgtgaagcagtccccaatgctcgtcgcctatgataatgccgtgaatctgtcctgcaaatactcctacaatctgtttagccgcgagtttagggcctcactgcacaagggccttgacagcgccgtggaagtctgtgtggtctatggaaattactcccagcaactgcaagtgtactctaagacggggttcaactgtgatggaaaactgggaaacgagtccgtgacgttttacctccaaaatctctatgtcaatcaaacggacatctatttctgcaaaattgaagtcatgtatcctccgccgtacctcgataacgagaaaagcaatgggacgatcattcacgtcaagggaaaacatctctgccccagtcctctgttccctgggccttccaaaccattttgggttctcgtcgtcgtcggcggagtcctggcttgttattctctgcttgtgacagtcgcctttatcatattctgggtccgctccaagagaagcagactgctccactccgattatatgaatatgacacccaggcggccagggcctacacggaaacactatcaaccctacgctccacctcgggatttcgctgcctacagatca

SEQ ID NO: 5577 - DNA, 1533 bp, Artificial Sequence
  Synthetic Polynucleotide
atggccttaccagtgaccgccttgctcctgccgctggccttgctgctccacgccgccaggccgctgttcaatcaagaggtgcagatccctctgaccgagagctactgtggcccctgtcctaagaactggatctgctacaagaacaactgctaccagttcttcgacgagagcaagaattggtacgagagccaggccagctgcatgagccagaatgccagcctgctgaaggtgtacagcaaagaggaccaggacctgctgaaactggtcaagagcgcccactggatgggccttgtgcacatccccaccaatggctcttggcagtgggaggacggcagcattctgagccctaacctgctgaccatcatcgagatgcagaagggcgactgcgccctgtacgccagcagctttaagggcttcatcgagaattgcagcaccccgaacacctacatctgtatgcagagaaccgttggcggaggcggaagtggaggcggaggatctggcggcggaggctctgacctctttaatcaagaagtccagattccactcaccgaatcctactgcggaccttgtccaaaaaattggatttgttataagaacaactgttatcaattctttgatgagtctaaaaattggtatgagtcccaggcttcctgcatgtctcagaacgcttctctgctgaaagtctactctaaagaagatcaggatctcctgaagctcgtcaagtctgcccattggatggggctcgtccacattcctaccaacggaagctggcaatgggaagatggctccatcctgtctccaaatctgctcacgattattgaaatgcagaaaggggattgtgctctctacgccagctccttcaagggatttattgagaactgtagcacgcccaatacttatatctgtatgcaacggaccgtgacgcgtaacaaaattcttgtgaagcagtccccaatgctcgtcgcctatgataatgccgtgaatctgtcctgcaaatactcctacaatctgtttagccgcgagtttagggcctcactgcacaagggccttgacagcgccgtggaagtctgtgtggtctatggaaattactcccagcaactgcaagtgtactctaagacggggttcaactgtgatggaaaactgggaaacgagtccgtgacgttttacctccaaaatctctatgtcaatcaaacggacatctatttctgcaaaattgaagtcatgtatcctccgccgtacctcgataacgagaaaagcaatgggacgatcattcacgtcaagggaaaacatctctgccccagtcctctgttccctgggccttccaaaccattttgggttctcgtcgtcgtcggcggagtcctggcttgttattctctgcttgtgacagtcgcctttatcatattctgggtccgctccaagagaagcagactgctccactccgattatatgaatatgacacccaggcggccagggcctacacggaaacactatcaaccctacgctccacctcgggatttcgctgcctacagatca

SEQ ID NO: 5578 - DNA, 1533 bp, Artificial Sequence
  Synthetic Polynucleotide
atggccttaccagtgaccgccttgctcctgccgctggccttgctgctccacgccgccaggccgctgttcaatcaagaggtgcagatccctctgaccgagagctactgtggcccctgtcctaagaactggatctgctacaagaacaactgctaccagttcttcgacgagagcaagaattggtacgagagccaggccagctgcatgagccagaatgccagcctgctgaaggtgtacagcaaagaggaccaggacctgctgaaactggtcaagagcgcccactggatgggccttgtgcacatccccaccaatggctcttggcagtgggaggacggcagcattctgagccctaacctgctgaccatcatcgagatgcagaagggcgactgcgccctgtacgccagcagctttaagggctacatcgagaattgcagcaccccgaacacctacatctgtatgcagagaaccgtttctggcggaggcggctctggaggaggcggaagtggcggcggaggcgacctctttaatcaagaagtccagattccactcaccgaatcctactgcggaccttgtccaaaaaattggatttgttataagaacaactgttatcaattctttgatgagtctaaaaattggtatgagtcccaggcttcctgcatgtctcagaacgcttctctgctgaaagtctactctaaagaagatcaggatctcctgaagctcgtcaagtctgcccattggatggggctcgtccacattcctaccaacggaagctggcaatgggaagatggctccatcctgtctccaaatctgctcacgattattgaaatgcagaaaggggattgtgctctctacgccagctccttcaagggatatattgagaactgtagcacgcccaatacttatatctgtatgcaacggaccgtgacgcgtaacaaaattcttgtgaagcagtccccaatgctcgtcgcctatgataatgccgtgaatctgtcctgcaaatactcctacaatctgtttagccgcgagtttagggcctcactgcacaagggccttgacagcgccgtggaagtctgtgtggtctatggaaattactcccagcaactgcaagtgtactctaagacggggttcaactgtgatggaaaactgggaaacgagtccgtgacgttttacctccaaaatctctatgtcaatcaaacggacatctatttctgcaaaattgaagtcatgtatcctccgccgtacctcgataacgagaaaagcaatgggacgatcattcacgtcaagggaaaacatctctgccccagtcctctgttccctgggccttccaaaccattttgggttctcgtcgtcgtcggcggagtcctggcttgttattctctgcttgtgacagtcgcctttatcatattctgggtccgctccaagagaagcagactgctccactccgattatatgaatatgacacccaggcggccagggcctacacggaaacactatcaaccctacgctccacctcgggatttcgctgcctacagatca

SEQ ID NO: 5579 - DNA, 2826 bp, Artificial Sequence
  Synthetic Polynucleotide
atggccttaccagtgaccgccttgctcctgccgctggccttgctgctccacgccgccaggccggacatccagatgacacagagccctagcagcctgtctgccagcgtgggagacagagtgaccatcacatgcaaggccagcgaccacatcaacaactggctggcctggtatcagcagaagcctggacaggcccctaagctgctgatctacggcgctaccacactggaaacaggcgtgcccagcagattttctggcagcggctctggcaccgactacaccctgacaatatccagcctccagcctgaggacttcgccacctactactgtcagcagagctggaacaccccttggacattcggccagggcaccaagctggaaatcaagagactcgagaacaagatcctggtcaagcagagccctatgctggtggcctacgacaacgccgtgaacctgagctgcaagtacagctacaacctgttcagcagagagttccgggccagcctgcacaaaggactggattctgctgtggaagtgtgcgtggtgtacggcaactacagccagcagctccaggtgtacagcaagaccggcttcaactgcgacggcaagctgggcaatgagagcgtgaccttctacctgcaaaacctgtacgtgaaccagaccgacatctatttctgcaagatcgaagtgatgtacccgcctccttacctggacaacgagaagtccaacggcaccatcatccacgtgaagggcaagcacctgtgtccttctccactgttccccggacctagcaagcctttctgggtgctcgttgttgttggcggcgtgctggcctgttatagcctgctggttaccgtggccttcatcatcttttgggtccgaagcaagcggagccggctgctgcacagcgactacatgaacatgacccctagacggcccggaccaaccagaaagcactaccagccttacgctcctcctagagacttcgccgcctatagaagtagggccaagcgatctggatctggagcaacaaacttctcactactcaaacaagcaggtgacgtggaggagaatcccgggcctactagtatggactggatttggcgcatccttttccttgtcggcgctgctaccggcgcgcattccttcgaacaagttcagcttcaacagcctggcgctgagctggtcaaacctggcgcttctgtgaagatgagctgcaaagccagcggctacgccttcagcagctactggatcaactggatgaagcagaaacccggccagggactcgaatggatcggccaaatctatcccggcgacggcgacaccaactacaacggcaagttcaagggcagagccacactgaccgccgatacctctagcagcacagcctacatgcagctgagcagcctgaccagcgaagatagcgccgtgtacttctgtgcccggtccatcacaacagtcgtgggctgcgctatggactattggggccagggaacaagcgtgaccgtgtctagtacgcgtaacaaaattcttgtgaagcagtccccaatgctcgtcgcctatgataatgccgtgaatctgtcctgcaaatactcctacaatctgtttagccgcgagtttagggcctcactgcacaagggccttgacagcgccgtggaagtctgtgtggtctatggaaattactcccagcaactgcaagtgtactctaagacggggttcaactgtgatggaaaactgggaaacgagtccgtgacgttttacctccaaaatctctatgtcaatcaaacggacatctatttctgcaaaattgaagtcatgtatcctccgccgtacctcgataacgagaaaagcaatgggacgatcattcacgtcaagggaaaacatctctgccccagtcctctgttccctgggccttccaaaccattttgggttctcgtcgtcgtcggcggagtcctggcttgttattctctgcttgtgacagtcgcctttatcatattctgggtccgctccaagagaagcagactgctccactccgattatatgaatatgacacccaggcggccagggcctacacggaaacactatcaaccctacgctccacctcgggatttcgctgcctacagatcacgcgccaagagaagcggatctggcgtgaagcagaccctgaatttcgacctgctgaagctggctggcgacgtggaatccaacccaggcccttctagaggccatatgaccgagtacaagcccacggtgcgcctcgccacccgcgacgacgtccccagggccgtacgcaccctcgccgccgcgttcgccgactaccccgccacgcgccacaccgtcgatccggaccgccacatcgagcgggtcaccgagctgcaagaactcttcctcacgcgcgtcgggctcgacatcggcaaggtgtgggtcgcggacgacggcgccgcggtggcggtctggaccacgccggagagcgtcgaagcgggggcggtgttcgccgagatcggcccgcgcatggccgagttgagcggttcccggctggccgcgcagcaacagatggaaggcctcctggcgccgcaccggcccaaggagcccgcgtggttcctggccaccgtcggcgtctcgcccgaccaccagggcaagggtctgggcagcgccgtcgtgctccccggagtggaggcggccgagcgcgccggggtgcccgccttcctggagacctccgcgccccgcaacctccccttctacgagcggctcggcttcaccgtcaccgccgacgtcgaggtgcccgaaggaccgcgcacctggtgcatgacccgcaagcccggtgcctga

SEQ ID NO: 5580 - DNA, 2988 bp, Artificial Sequence
  Synthetic Polynucleotide
atggccttaccagtgaccgccttgctcctgccgctggccttgctgctccacgccgccaggccggcatgcgaagtgcagctgcttgaaagtggcggcggactgattcagcctggcggatctctgagactgagctgtgccgccagcggcttcaccttttctagccacgccatgacctgggtccgacaggcacctggaaaagggcttgaatgggtgtccgccatcagcggctctggcgattacacacactacgccgacagcgtgaagggcagattcaccatcagcagagacaacagcaagaacaccgtgtacctccagatgaacagcctgagagccgaggacagcgccgtgtattattgcgccaaggatgaggatggcggcagcctgcttggacacagaggacaaggcaccctggtcaccgtttcttccggtaccggcggaggcggatctggcggcggaggtagcggtggcggaggatctgaattcggatctctcgagaacaagatcctggtcaagcagagccctatgctggtggcctacgacaacgccgtgaacctgagctgcaagtacagctacaacctgttcagcagagagttccgggccagcctgcacaaaggactggattctgctgtggaagtgtgcgtggtgtacggcaactacagccagcagctccaggtgtacagcaagaccggcttcaactgcgacggcaagctgggcaatgagagcgtgaccttctacctgcaaaacctgtacgtgaaccagaccgacatctatttctgcaagatcgaagtgatgtacccgcctccttacctggacaacgagaagtccaacggcaccatcatccacgtgaagggcaagcacctgtgtccttctccactgttccccggacctagcaagcctttctgggtgctcgttgttgttggcggcgtgctggcctgttatagcctgctggttaccgtggccttcatcatcttttgggtccgaagcaagcggagccggctgctgcacagcgactacatgaacatgacccctagacggcccggaccaaccagaaagcactaccagccttacgctcctcctagagacttcgccgcctatagaagtagggccaagcgatctggatctggagcaacaaacttctcactactcaaacaagcaggtgacgtggaggagaatcccgggcctactagtgccaccatggactggatttggcgcatccttttccttgtcggcgctgctaccggcgcccattccgggcccgaagtgcagctggttgaatctggcggaggactggttcaggctggcggatctctgagactgtcttgtgccgccagcggcagaacctttagcatgggctggtttagacaggcccctggcaaagagagagagttcgtcgccgccatcacatactctggcggcagcccttactacgccgactctgtgaagggcagattcaccatcagccgggacaacgccaagaacaccgtgtacctccagatgaacagcctgaagcctgaggacaccgccgtgtactactgcgccgccaatccaacatacggcagcgactggaacgccgagaattggggccagggaacccaagtgacagtgtctagcggatccggcggcggaggatctggcggaggcggatctgggggcggaggctctttcgaaggcagcacgcgtaacaaaattcttgtgaagcagtccccaatgctcgtcgcctatgataatgccgtgaatctgtcctgcaaatactcctacaatctgtttagccgcgagtttagggcctcactgcacaagggccttgacagcgccgtggaagtctgtgtggtctatggaaattactcccagcaactgcaagtgtactctaagacggggttcaactgtgatggaaaactgggaaacgagtccgtgacgttttacctccaaaatctctatgtcaatcaaacggacatctatttctgcaaaattgaagtcatgtatcctccgccgtacctcgataacgagaaaagcaatgggacgatcattcacgtcaagggaaaacatctctgccccagtcctctgttccctgggccttccaaaccattttgggttctcgtcgtcgtcggcggagtcctggcttgttattctctgcttgtgacagtcgcctttatcatattctgggtccgctccaagagaagcagactgctccactccgattatatgaatatgacacccaggcggccagggcctacacggaaacactatcaaccctacgctccacctcgggatttcgctgcctacagatcacgcgccaagagaagcggatctggcgtgaagcagaccctgaatttcgacctgctgaagctggctggcgacgtggaatccaacccaggcccttctagaggccatatgaccgagtacaagcccacggtgcgcctcgccacccgcgacgacgtccccagggccgtacgcaccctcgccgccgcgttcgccgactaccccgccacgcgccacaccgtcgatccggaccgccacatcgagcgggtcaccgagctgcaagaactcttcctcacgcgcgtcgggctcgacatcggcaaggtgtgggtcgcggacgacggcgccgcggtggcggtctggaccacgccggagagcgtcgaagcgggggcggtgttcgccgagatcggcccgcgcatggccgagttgagcggttcccggctggccgcgcagcaacagatggaaggcctcctggcgccgcaccggcccaaggagcccgcgtggttcctggccaccgtcggcgtctcgcccgaccaccagggcaagggtctgggcagcgccgtcgtgctccccggagtggaggcggccgagcgcgccggggtgcccgccttcctggagacctccgcgccccgcaacctccccttctacgagcggctcggcttcaccgtcaccgccgacgtcgaggtgcccgaaggaccgcgcacctggtgcatgacccgcaagcccggtgcctga

SEQ ID NO: 5581 - DNA, 3438 bp, Artificial Sequence
  Synthetic Polynucleotide
atggccttaccagtgaccgccttgctcctgccgctggccttgctgctccacgccgccaggccggacatccagatgacacagagccctagcagcctgtctgccagcgtgggagacagagtgaccatcacatgcaaggccagcgaccacatcaacaactggctggcctggtatcagcagaagcctggacaggcccctaagctgctgatctacggcgctaccacactggaaacaggcgtgcccagcagattttctggcagcggctctggcaccgactacaccctgacaatatccagcctccagcctgaggacttcgccacctactactgtcagcagagctggaacaccccttggacattcggccagggcaccaagctggaaatcaagagactcgagggacagcctaaggccaatcctaccgtgacactgttccctccaagcagcgaagaactccaggccaacaaggccacacttgtgtgcctgatctccgacttctaccctggggctgtgacagtggcttggaaggccgatggatctcctgtgaaagccggcgtggaaaccaccaagccatccaagcagagcaacaacaaatacgccgccagctcctacctgagcctgacacctgagcagtggaagtcccacagatcctacagctgccaagtgacccacgaaggcagcaccgtggaaaagacagtggcccctacagagtgcagcggatccaacaagatcctggtcaagcagagccctatgctggtggcctacgacaacgccgtgaacctgagctgcaagtacagctacaacctgttcagcagagagttccgggccagcctgcacaaaggactggattctgctgtggaagtgtgcgtggtgtacggcaactacagccagcagctccaggtgtacagcaagaccggcttcaactgcgacggcaagctgggcaatgagagcgtgaccttctacctgcaaaacctgtacgtgaaccagaccgacatctatttctgcaagatcgaagtgatgtacccgcctccttacctggacaacgagaagtccaacggcaccatcatccacgtgaagggcaagcacctgtgtccttctccactgttccccggacctagcaagcctttctgggtgctcgttgttgttggcggcgtgctggcctgttatagcctgctggttaccgtggccttcatcatcttttgggtccgaagcaagcggagccggctgctgcacagcgactacatgaacatgacccctagacggcccggaccaaccagaaagcactaccagccttacgctcctcctagagacttcgccgcctatagaagtagggccaagcgatctggatctggagcaacaaacttctcactactcaaacaagcaggtgacgtggaggagaatcccgggcctactagtatggactggatttggcgcatccttttccttgtcggcgctgctaccggcgcgcattccttcgaacaagttcagcttcaacagcctggcgctgagctggtcaaacctggcgcttctgtgaagatgagctgcaaagccagcggctacgccttcagcagctactggatcaactggatgaagcagaaacccggccagggactcgaatggatcggccaaatctatcccggcgacggcgacaccaactacaacggcaagttcaagggcagagccacactgaccgccgatacctctagcagcacagcctacatgcagctgagcagcctgaccagcgaagatagcgccgtgtacttctgtgcccggtccatcacaacagtcgtgggctgcgctatggactattggggccagggaacaagcgtgaccgtgtctagtacgcgtgcctctacaaagggaccctccgtgtttcctctggctcccagcagcaagtctacaagcggaggaacagccgctctgggctgcctggtcaaggattactttcccgagcctgtgaccgtgtcctggaatagcggagcactgacaagcggcgtgcacacctttccagccgtgctgcaaagcagcggcctgtactctctgagcagcgtggtcacagtgcctagctctagcctgggcacccagacctacatctgcaatgtgaaccacaagcctagcaacaccaaggtggacaagagagtggaacccaagagctgtggtaccaacaaaattcttgtgaagcagtccccaatgctcgtcgcctatgataatgccgtgaatctgtcctgcaaatactcctacaatctgtttagccgcgagtttagggcctcactgcacaagggccttgacagcgccgtggaagtctgtgtggtctatggaaattactcccagcaactgcaagtgtactctaagacggggttcaactgtgatggaaaactgggaaacgagtccgtgacgttttacctccaaaatctctatgtcaatcaaacggacatctatttctgcaaaattgaagtcatgtatcctccgccgtacctcgataacgagaaaagcaatgggacgatcattcacgtcaagggaaaacatctctgccccagtcctctgttccctgggccttccaaaccattttgggttctcgtcgtcgtcggcggagtcctggcttgttattctctgcttgtgacagtcgcctttatcatattctgggtccgctccaagagaagcagactgctccactccgattatatgaatatgacacccaggcggccagggcctacacggaaacactatcaaccctacgctccacctcgggatttcgctgcctacagatcacgcgccaagagaagcggatctggcgtgaagcagaccctgaatttcgacctgctgaagctggctggcgacgtggaatccaacccaggcccttctagaggcgggatccacaccatggctacctacgaggtgctgtgcgaggtggcaagaaagctgggcaccgacgacagagaagtggtgctgttcctgctgaacgtgttcatccctcagcctacactggcccagctgatcggtgcactgagagccctgaaagaggaaggccggctgacctttcctctgctggccgaatgcctgttcagagccggaagaagggatctgctgcgggacctgctgcatctggaccccagatttctggaaagacacctggccggcaccatgagctacttcagcccttaccagctgaccgtgctgcacgttgacggcgaactgtgcgccagagatattcggagcctgatcttcctgagcaaggacaccatcggcagccggtctacccctcagacatttctgcactgggtgtactgcatggaaaacctggacctgctcggccccacagatgtggatgccctgatgtccatgctgagaagcctgagcagagtggacctccagagacaggtgcagacactgatgggactgcacctgagcggacctagccacagccagcactacagacacacccct

SEQ ID NO: 5582 - DNA, 3597 bp, Artificial Sequence
  Synthetic Polynucleotide
atggccttaccagtgaccgccttgctcctgccgctggccttgctgctccacgccgccaggccggacatccagatgacacagagccctagcagcctgtctgccagcgtgggagacagagtgaccatcacatgcaaggccagcgaccacatcaacaactggctggcctggtatcagcagaagcctggacaggcccctaagctgctgatctacggcgctaccacactggaaacaggcgtgcccagcagattttctggcagcggctctggcaccgactacaccctgacaatatccagcctccagcctgaggacttcgccacctactactgtcagcagagctggaacaccccttggacattcggccagggcaccaagctggaaatcaagagactcgagggacagcctaaggccaatcctaccgtgacactgttccctccaagcagcgaagaactccaggccaacaaggccacacttgtgtgcctgatctccgacttctaccctggggctgtgacagtggcttggaaggccgatggatctcctgtgaaagccggcgtggaaaccaccaagccatccaagcagagcaacaacaaatacgccgccagctcctacctgagcctgacacctgagcagtggaagtcccacagatcctacagctgccaagtgacccacgaaggcagcaccgtggaaaagacagtggcccctacagagtgcagcggatccaacaagatcctggtcaagcagagccctatgctggtggcctacgacaacgccgtgaacctgagctgcaagtacagctacaacctgttcagcagagagttccgggccagcctgcacaaaggactggattctgctgtggaagtgtgcgtggtgtacggcaactacagccagcagctccaggtgtacagcaagaccggcttcaactgcgacggcaagctgggcaatgagagcgtgaccttctacctgcaaaacctgtacgtgaaccagaccgacatctatttctgcaagatcgaagtgatgtacccgcctccttacctggacaacgagaagtccaacggcaccatcatccacgtgaagggcaagcacctgtgtccttctccactgttccccggacctagcaagcctttctgggtgctcgttgttgttggcggcgtgctggcctgttatagcctgctggttaccgtggccttcatcatcttttgggtccgaagcaagcggagccggctgctgcacagcgactacatgaacatgacccctagacggcccggaccaaccagaaagcactaccagccttacgctcctcctagagacttcgccgcctatagaagtagggccaagcgatctggatctggagcaacaaacttctcactactcaaacaagcaggtgacgtggaggagaatcccgggcctactagtatggactggatttggcgcatccttttccttgtcggcgctgctaccggcgcgcattccttcgaacaagttcagcttcaacagcctggcgctgagctggtcaaacctggcgcttctgtgaagatgagctgcaaagccagcggctacgccttcagcagctactggatcaactggatgaagcagaaacccggccagggactcgaatggatcggccaaatctatcccggcgacggcgacaccaactacaacggcaagttcaagggcagagccacactgaccgccgatacctctagcagcacagcctacatgcagctgagcagcctgaccagcgaagatagcgccgtgtacttctgtgcccggtccatcacaacagtcgtgggctgcgctatggactattggggccagggaacaagcgtgaccgtgtctagtacgcgtgcctctacaaagggaccctccgtgtttcctctggctcccagcagcaagtctacaagcggaggaacagccgctctgggctgcctggtcaaggattactttcccgagcctgtgaccgtgtcctggaatagcggagcactgacaagcggcgtgcacacctttccagccgtgctgcaaagcagcggcctgtactctctgagcagcgtggtcacagtgcctagctctagcctgggcacccagacctacatctgcaatgtgaaccacaagcctagcaacaccaaggtggacaagagagtggaacccaagagctgtggtaccaacaaaattcttgtgaagcagtccccaatgctcgtcgcctatgataatgccgtgaatctgtcctgcaaatactcctacaatctgtttagccgcgagtttagggcctcactgcacaagggccttgacagcgccgtggaagtctgtgtggtctatggaaattactcccagcaactgcaagtgtactctaagacggggttcaactgtgatggaaaactgggaaacgagtccgtgacgttttacctccaaaatctctatgtcaatcaaacggacatctatttctgcaaaattgaagtcatgtatcctccgccgtacctcgataacgagaaaagcaatgggacgatcattcacgtcaagggaaaacatctctgccccagtcctctgttccctgggccttccaaaccattttgggttctcgtcgtcgtcggcggagtcctggcttgttattctctgcttgtgacagtcgcctttatcatattctgggtccgctccaagagaagcagactgctccactccgattatatgaatatgacacccaggcggccagggcctacacggaaacactatcaaccctacgctccacctcgggatttcgctgcctacagatcacgcgccaagagaagcggatctggcgtgaagcagaccctgaatttcgacctgctgaagctggctggcgacgtggaatccaacccaggcccttctagaggcgggatccacaccatgtccgactccaaggaggtccctagccttccatttttgcgacacttgctcgaagagttggacagccatgaggacagcttgctgctgtttctgtgtcacgacgcggccccgggctgcacgacggtcacgcaagctttgtgctcgcttagccaacagcgcaagctgaccctcgcggctctggtcgagatgctctacgtgctgcagcgtatggatcttctcaagagccgcttcgggctcagcaaggagggggccgagcaattgctgggcacaagctttctcacgcgctaccgcaagctcatggtttgcgtgggtgaggagctcgactcgagcgagctacgcgctctacgcttgttcgcgtgcaacctgaatccgagcctgagcacggcgctttctgagagcagccgctttgtcgagcttgtactcgcgcttgaaaacgtaggactcgtctcgccatcgagtgtttccgtgcttgcggacatgttgcgcactcttcggcgcctcgatttgtgccagcagcttgttgagtacgaacaacaagagcaagccaggtaccgttactgttacgcggcctcgccctcattgccagttcgtacgttacgtcgggggcacggcgcgagtgaacacgagcagctgtgcatgcccgtgcaagaatcctctgacagccccgagctgctgcgcacgcccgtacaagaatcctccagcgacagccccgagcaaacgact

SEQ ID NO: 5583 - DNA, 3465 bp, Artificial Sequence
  Synthetic Polynucleotide
atggccttaccagtgaccgccttgctcctgccgctggccttgctgctccacgccgccaggccggacatccagatgacacagagccctagcagcctgtctgccagcgtgggagacagagtgaccatcacatgcaaggccagcgaccacatcaacaactggctggcctggtatcagcagaagcctggacaggcccctaagctgctgatctacggcgctaccacactggaaacaggcgtgcccagcagattttctggcagcggctctggcaccgactacaccctgacaatatccagcctccagcctgaggacttcgccacctactactgtcagcagagctggaacaccccttggacattcggccagggcaccaagctggaaatcaagagactcgagggacagcctaaggccaatcctaccgtgacactgttccctccaagcagcgaagaactccaggccaacaaggccacacttgtgtgcctgatctccgacttctaccctggggctgtgacagtggcttggaaggccgatggatctcctgtgaaagccggcgtggaaaccaccaagccatccaagcagagcaacaacaaatacgccgccagctcctacctgagcctgacacctgagcagtggaagtcccacagatcctacagctgccaagtgacccacgaaggcagcaccgtggaaaagacagtggcccctacagagtgcagcggatccaacaagatcctggtcaagcagagccctatgctggtggcctacgacaacgccgtgaacctgagctgcaagtacagctacaacctgttcagcagagagttccgggccagcctgcacaaaggactggattctgctgtggaagtgtgcgtggtgtacggcaactacagccagcagctccaggtgtacagcaagaccggcttcaactgcgacggcaagctgggcaatgagagcgtgaccttctacctgcaaaacctgtacgtgaaccagaccgacatctatttctgcaagatcgaagtgatgtacccgcctccttacctggacaacgagaagtccaacggcaccatcatccacgtgaagggcaagcacctgtgtccttctccactgttccccggacctagcaagcctttctgggtgctcgttgttgttggcggcgtgctggcctgttatagcctgctggttaccgtggccttcatcatcttttgggtccgaagcaagcggagccggctgctgcacagcgactacatgaacatgacccctagacggcccggaccaaccagaaagcactaccagccttacgctcctcctagagacttcgccgcctatagaagtagggccaagcgatctggatctggagcaacaaacttctcactactcaaacaagcaggtgacgtggaggagaatcccgggcctactagtatggactggatttggcgcatccttttccttgtcggcgctgctaccggcgcgcattccttcgaacaagttcagcttcaacagcctggcgctgagctggtcaaacctggcgcttctgtgaagatgagctgcaaagccagcggctacgccttcagcagctactggatcaactggatgaagcagaaacccggccagggactcgaatggatcggccaaatctatcccggcgacggcgacaccaactacaacggcaagttcaagggcagagccacactgaccgccgatacctctagcagcacagcctacatgcagctgagcagcctgaccagcgaagatagcgccgtgtacttctgtgcccggtccatcacaacagtcgtgggctgcgctatggactattggggccagggaacaagcgtgaccgtgtctagtacgcgtgcctctacaaagggaccctccgtgtttcctctggctcccagcagcaagtctacaagcggaggaacagccgctctgggctgcctggtcaaggattactttcccgagcctgtgaccgtgtcctggaatagcggagcactgacaagcggcgtgcacacctttccagccgtgctgcaaagcagcggcctgtactctctgagcagcgtggtcacagtgcctagctctagcctgggcacccagacctacatctgcaatgtgaaccacaagcctagcaacaccaaggtggacaagagagtggaacccaagagctgtggtaccaacaaaattcttgtgaagcagtccccaatgctcgtcgcctatgataatgccgtgaatctgtcctgcaaatactcctacaatctgtttagccgcgagtttagggcctcactgcacaagggccttgacagcgccgtggaagtctgtgtggtctatggaaattactcccagcaactgcaagtgtactctaagacggggttcaactgtgatggaaaactgggaaacgagtccgtgacgttttacctccaaaatctctatgtcaatcaaacggacatctatttctgcaaaattgaagtcatgtatcctccgccgtacctcgataacgagaaaagcaatgggacgatcattcacgtcaagggaaaacatctctgccccagtcctctgttccctgggccttccaaaccattttgggttctcgtcgtcgtcggcggagtcctggcttgttattctctgcttgtgacagtcgcctttatcatattctgggtccgctccaagagaagcagactgctccactccgattatatgaatatgacacccaggcggccagggcctacacggaaacactatcaaccctacgctccacctcgggatttcgctgcctacagatcacgcgccaagagaagcggatctggcgtgaagcagaccctgaatttcgacctgctgaagctggctggcgacgtggaatccaacccaggcccttctagaggccatatgaccgagtacaagcccacggtgcgcctcgccacccgcgacgacgtccccagggccgtacgcaccctcgccgccgcgttcgccgactaccccgccacgcgccacaccgtcgatccggaccgccacatcgagcgggtcaccgagctgcaagaactcttcctcacgcgcgtcgggctcgacatcggcaaggtgtgggtcgcggacgacggcgccgcggtggcggtctggaccacgccggagagcgtcgaagcgggggcggtgttcgccgagatcggcccgcgcatggccgagttgagcggttcccggctggccgcgcagcaacagatggaaggcctcctggcgccgcaccggcccaaggagcccgcgtggttcctggccaccgtcggcgtctcgcccgaccaccagggcaagggtctgggcagcgccgtcgtgctccccggagtggaggcggccgagcgcgccggggtgcccgccttcctggagacctccgcgccccgcaacctccccttctacgagcggctcggcttcaccgtcaccgccgacgtcgaggtgcccgaaggaccgcgcacctggtgcatgacccgcaagcccggtgcctga

SEQ ID NO: 5584 - DNA, 3876 bp, Artificial Sequence
  Synthetic Polynucleotide
atggccttaccagtgaccgccttgctcctgccgctggccttgctgctccacgccgccaggccggaagtgcagctggttgaatctggcggaggactggttcaggctggcggatctctgagactgtcttgtgccgccagcggcagaacctttagcatgggctggtttagacaggcccctggcaaagagagagagttcgtcgccgccatcacatactctggcggcagcccttactacgccgactctgtgaagggcagattcaccatcagccgggacaacgccaagaacaccgtgtacctccagatgaacagcctgaagcctgaggacaccgccgtgtactactgcgccgccaatccaacatacggcagcgactggaacgccgagaattggggccagggaacccaagtgacagtgtctagcggtaccggcggaggcggatctggcggcggaggtagcggtggcggaggatctgaattcgacatccagatgacacagagccctagcagcctgtctgccagcgtgggagacagagtgaccatcacatgcaaggccagcgaccacatcaacaactggctggcctggtatcagcagaagcctggacaggcccctaagctgctgatctacggcgctaccacactggaaacaggcgtgcccagcagattttctggcagcggctctggcaccgactacaccctgacaatatccagcctccagcctgaggacttcgccacctactactgtcagcagagctggaacaccccttggacattcggccagggcaccaagctggaaatcaagagactcgagggacagcctaaggccaatcctaccgtgacactgttccctccaagcagcgaagaactccaggccaacaaggccacacttgtgtgcctgatctccgacttctaccctggggctgtgacagtggcttggaaggccgatggatctcctgtgaaagccggcgtggaaaccaccaagccatccaagcagagcaacaacaaatacgccgccagctcctacctgagcctgacacctgagcagtggaagtcccacagatcctacagctgccaagtgacccacgaaggcagcaccgtggaaaagacagtggcccctacagagtgcagcggatccaacaagatcctggtcaagcagagccctatgctggtggcctacgacaacgccgtgaacctgagctgcaagtacagctacaacctgttcagcagagagttccgggccagcctgcacaaaggactggattctgctgtggaagtgtgcgtggtgtacggcaactacagccagcagctccaggtgtacagcaagaccggcttcaactgcgacggcaagctgggcaatgagagcgtgaccttctacctgcaaaacctgtacgtgaaccagaccgacatctatttctgcaagatcgaagtgatgtacccgcctccttacctggacaacgagaagtccaacggcaccatcatccacgtgaagggcaagcacctgtgtccttctccactgttccccggacctagcaagcctttctgggtgctcgttgttgttggcggcgtgctggcctgttatagcctgctggttaccgtggccttcatcatcttttgggtccgaagcaagcggagccggctgctgcacagcgactacatgaacatgacccctagacggcccggaccaaccagaaagcactaccagccttacgctcctcctagagacttcgccgcctatagaagtagggccaagcgatctggatctggagcaacaaacttctcactactcaaacaagcaggtgacgtggaggagaatcccgggcctactagtatggactggatttggcgcatccttttccttgtcggcgctgctaccggcgcgcattccttcgaacaagttcagcttcaacagcctggcgctgagctggtcaaacctggcgcttctgtgaagatgagctgcaaagccagcggctacgccttcagcagctactggatcaactggatgaagcagaaacccggccagggactcgaatggatcggccaaatctatcccggcgacggcgacaccaactacaacggcaagttcaagggcagagccacactgaccgccgatacctctagcagcacagcctacatgcagctgagcagcctgaccagcgaagatagcgccgtgtacttctgtgcccggtccatcacaacagtcgtgggctgcgctatggactattggggccagggaacaagcgtgaccgtgtctagtacgcgtgcctctacaaagggaccctccgtgtttcctctggctcccagcagcaagtctacaagcggaggaacagccgctctgggctgcctggtcaaggattactttcccgagcctgtgaccgtgtcctggaatagcggagcactgacaagcggcgtgcacacctttccagccgtgctgcaaagcagcggcctgtactctctgagcagcgtggtcacagtgcctagctctagcctgggcacccagacctacatctgcaatgtgaaccacaagcctagcaacaccaaggtggacaagagagtggaacccaagagctgtggtaccaacaaaattcttgtgaagcagtccccaatgctcgtcgcctatgataatgccgtgaatctgtcctgcaaatactcctacaatctgtttagccgcgagtttagggcctcactgcacaagggccttgacagcgccgtggaagtctgtgtggtctatggaaattactcccagcaactgcaagtgtactctaagacggggttcaactgtgatggaaaactgggaaacgagtccgtgacgttttacctccaaaatctctatgtcaatcaaacggacatctatttctgcaaaattgaagtcatgtatcctccgccgtacctcgataacgagaaaagcaatgggacgatcattcacgtcaagggaaaacatctctgccccagtcctctgttccctgggccttccaaaccattttgggttctcgtcgtcgtcggcggagtcctggcttgttattctctgcttgtgacagtcgcctttatcatattctgggtccgctccaagagaagcagactgctccactccgattatatgaatatgacacccaggcggccagggcctacacggaaacactatcaaccctacgctccacctcgggatttcgctgcctacagatcacgcgccaagagaagcggatctggcgtgaagcagaccctgaatttcgacctgctgaagctggctggcgacgtggaatccaacccaggcccttctagaggccatatgaccgagtacaagcccacggtgcgcctcgccacccgcgacgacgtccccagggccgtacgcaccctcgccgccgcgttcgccgactaccccgccacgcgccacaccgtcgatccggaccgccacatcgagcgggtcaccgagctgcaagaactcttcctcacgcgcgtcgggctcgacatcggcaaggtgtgggtcgcggacgacggcgccgcggtggcggtctggaccacgccggagagcgtcgaagcgggggcggtgttcgccgagatcggcccgcgcatggccgagttgagcggttcccggctggccgcgcagcaacagatggaaggcctcctggcgccgcaccggcccaaggagcccgcgtggttcctggccaccgtcggcgtctcgcccgaccaccagggcaagggtctgggcagcgccgtcgtgctccccggagtggaggcggccgagcgcgccggggtgcccgccttcctggagacctccgcgccccgcaacctccccttctacgagcggctcggcttcaccgtcaccgccgacgtcgaggtgcccgaaggaccgcgcacctggtgcatgacccgcaagcccggtgcctga

SEQ ID NO: 5585 - DNA, 4287 bp, Artificial Sequence
  Synthetic Polynucleotide
atggccttaccagtgaccgccttgctcctgccgctggccttgctgctccacgccgccaggccggaagtgcagctggttgaatctggcggaggactggttcaggctggcggatctctgagactgtcttgtgccgccagcggcagaacctttagcatgggctggtttagacaggcccctggcaaagagagagagttcgtcgccgccatcacatactctggcggcagcccttactacgccgactctgtgaagggcagattcaccatcagccgggacaacgccaagaacaccgtgtacctccagatgaacagcctgaagcctgaggacaccgccgtgtactactgcgccgccaatccaacatacggcagcgactggaacgccgagaattggggccagggaacccaagtgacagtgtctagcggtaccggcggaggcggatctggcggcggaggtagcggtggcggaggatctgaattcgacatccagatgacacagagccctagcagcctgtctgccagcgtgggagacagagtgaccatcacatgcaaggccagcgaccacatcaacaactggctggcctggtatcagcagaagcctggacaggcccctaagctgctgatctacggcgctaccacactggaaacaggcgtgcccagcagattttctggcagcggctctggcaccgactacaccctgacaatatccagcctccagcctgaggacttcgccacctactactgtcagcagagctggaacaccccttggacattcggccagggcaccaagctggaaatcaagagactcgagggacagcctaaggccaatcctaccgtgacactgttccctccaagcagcgaagaactccaggccaacaaggccacacttgtgtgcctgatctccgacttctaccctggggctgtgacagtggcttggaaggccgatggatctcctgtgaaagccggcgtggaaaccaccaagccatccaagcagagcaacaacaaatacgccgccagctcctacctgagcctgacacctgagcagtggaagtcccacagatcctacagctgccaagtgacccacgaaggcagcaccgtggaaaagacagtggcccctacagagtgcagcggatccaacaagatcctggtcaagcagagccctatgctggtggcctacgacaacgccgtgaacctgagctgcaagtacagctacaacctgttcagcagagagttccgggccagcctgcacaaaggactggattctgctgtggaagtgtgcgtggtgtacggcaactacagccagcagctccaggtgtacagcaagaccggcttcaactgcgacggcaagctgggcaatgagagcgtgaccttctacctgcaaaacctgtacgtgaaccagaccgacatctatttctgcaagatcgaagtgatgtacccgcctccttacctggacaacgagaagtccaacggcaccatcatccacgtgaagggcaagcacctgtgtccttctccactgttccccggacctagcaagcctttctgggtgctcgttgttgttggcggcgtgctggcctgttatagcctgctggttaccgtggccttcatcatcttttgggtccgaagcaagcggagccggctgctgcacagcgactacatgaacatgacccctagacggcccggaccaaccagaaagcactaccagccttacgctcctcctagagacttcgccgcctatagaagtagggccaagcgatctggatctggagcaacaaacttctcactactcaaacaagcaggtgacgtggaggagaatcccgggcctactagtatggactggatttggcgcatccttttccttgtcggcgctgctaccggcgcgcattccgggcccgaagtgcaactggttgaatccggtggcggcctggtgcaagcaggcggatctctcagacttagctgtgccgcctccggcagaaccttcacaatgggatggtttaggcaggctccagggaaagagagagagttcgtcgccgccatctctctgtctcccacactggcctactacgccgactctgtgaaaggccggttcaccatctccagagataatgccaagaacaccgtggtgctgcaaatgaactctctgaaacccgaggatacagccctgtactattgtgccgctgaccggaagtccgtgatgagcatcagacccgattactggggacagggcacacaagtcacagtgtcctctggatccggcggcggaggatctggcggaggcggatctgggggcggaggctctttcgaacaagttcagcttcaacagcctggcgctgagctggtcaaacctggcgcttctgtgaagatgagctgcaaagccagcggctacgccttcagcagctactggatcaactggatgaagcagaaacccggccagggactcgaatggatcggccaaatctatcccggcgacggcgacaccaactacaacggcaagttcaagggcagagccacactgaccgccgatacctctagcagcacagcctacatgcagctgagcagcctgaccagcgaagatagcgccgtgtacttctgtgcccggtccatcacaacagtcgtgggctgcgctatggactattggggccagggaacaagcgtgaccgtgtctagtacgcgtgcctctacaaagggaccctccgtgtttcctctggctcccagcagcaagtctacaagcggaggaacagccgctctgggctgcctggtcaaggattactttcccgagcctgtgaccgtgtcctggaatagcggagcactgacaagcggcgtgcacacctttccagccgtgctgcaaagcagcggcctgtactctctgagcagcgtggtcacagtgcctagctctagcctgggcacccagacctacatctgcaatgtgaaccacaagcctagcaacaccaaggtggacaagagagtggaacccaagagctgtggtaccaacaaaattcttgtgaagcagtccccaatgctcgtcgcctatgataatgccgtgaatctgtcctgcaaatactcctacaatctgtttagccgcgagtttagggcctcactgcacaagggccttgacagcgccgtggaagtctgtgtggtctatggaaattactcccagcaactgcaagtgtactctaagacggggttcaactgtgatggaaaactgggaaacgagtccgtgacgttttacctccaaaatctctatgtcaatcaaacggacatctatttctgcaaaattgaagtcatgtatcctccgccgtacctcgataacgagaaaagcaatgggacgatcattcacgtcaagggaaaacatctctgccccagtcctctgttccctgggccttccaaaccattttgggttctcgtcgtcgtcggcggagtcctggcttgttattctctgcttgtgacagtcgcctttatcatattctgggtccgctccaagagaagcagactgctccactccgattatatgaatatgacacccaggcggccagggcctacacggaaacactatcaaccctacgctccacctcgggatttcgctgcctacagatcacgcgccaagagaagcggatctggcgtgaagcagaccctgaatttcgacctgctgaagctggctggcgacgtggaatccaacccaggcccttctagaggccatatgaccgagtacaagcccacggtgcgcctcgccacccgcgacgacgtccccagggccgtacgcaccctcgccgccgcgttcgccgactaccccgccacgcgccacaccgtcgatccggaccgccacatcgagcgggtcaccgagctgcaagaactcttcctcacgcgcgtcgggctcgacatcggcaaggtgtgggtcgcggacgacggcgccgcggtggcggtctggaccacgccggagagcgtcgaagcgggggcggtgttcgccgagatcggcccgcgcatggccgagttgagcggttcccggctggccgcgcagcaacagatggaaggcctcctggcgccgcaccggcccaaggagcccgcgtggttcctggccaccgtcggcgtctcgcccgaccaccagggcaagggtctgggcagcgccgtcgtgctccccggagtggaggcggccgagcgcgccggggtgcccgccttcctggagacctccgcgccccgcaacctccccttctacgagcggctcggcttcaccgtcaccgccgacgtcgaggtgcccgaaggaccgcgcacctggtgcatgacccgcaagcccggtgcctga

SEQ ID NO: 5586 - DNA, 3486 bp, Artificial Sequence
  Synthetic Polynucleotide
atggccttaccagtgaccgccttgctcctgccgctggccttgctgctccacgccgccaggccggaagtgcagctggttgaatctggcggaggactggttcaggctggcggatctctgagactgtcttgtgccgccagcggcagaacctttagcatgggctggtttagacaggcccctggcaaagagagagagttcgtcgccgccatcacatactctggcggcagcccttactacgccgactctgtgaagggcagattcaccatcagccgggacaacgccaagaacaccgtgtacctccagatgaacagcctgaagcctgaggacaccgccgtgtactactgcgccgccaatccaacatacggcagcgactggaacgccgagaattggggccagggaacccaagtgacagtgtctagcctcgagggacagcctaaggccaatcctaccgtgacactgttccctccaagcagcgaagaactccaggccaacaaggccacacttgtgtgcctgatctccgacttctaccctggggctgtgacagtggcttggaaggccgatggatctcctgtgaaagccggcgtggaaaccaccaagccatccaagcagagcaacaacaaatacgccgccagctcctacctgagcctgacacctgagcagtggaagtcccacagatcctacagctgccaagtgacccacgaaggcagcaccgtggaaaagacagtggcccctacagagtgcagcggatccaacaagatcctggtcaagcagagccctatgctggtggcctacgacaacgccgtgaacctgagctgcaagtacagctacaacctgttcagcagagagttccgggccagcctgcacaaaggactggattctgctgtggaagtgtgcgtggtgtacggcaactacagccagcagctccaggtgtacagcaagaccggcttcaactgcgacggcaagctgggcaatgagagcgtgaccttctacctgcaaaacctgtacgtgaaccagaccgacatctatttctgcaagatcgaagtgatgtacccgcctccttacctggacaacgagaagtccaacggcaccatcatccacgtgaagggcaagcacctgtgtccttctccactgttccccggacctagcaagcctttctgggtgctcgttgttgttggcggcgtgctggcctgttatagcctgctggttaccgtggccttcatcatcttttgggtccgaagcaagcggagccggctgctgcacagcgactacatgaacatgacccctagacggcccggaccaaccagaaagcactaccagccttacgctcctcctagagacttcgccgcctatagaagtagggccaagcgatctggatctggagcaacaaacttctcactactcaaacaagcaggtgacgtggaggagaatcccgggcctactagtatggactggatttggcgcatccttttccttgtcggcgctgctaccggcgcgcattccgggcccgaagtgcaactggttgaatccggtggcggcctggtgcaagcaggcggatctctcagacttagctgtgccgcctccggcagaaccttcacaatgggatggtttaggcaggctccagggaaagagagagagttcgtcgccgccatctctctgtctcccacactggcctactacgccgactctgtgaaaggccggttcaccatctccagagataatgccaagaacaccgtggtgctgcaaatgaactctctgaaacccgaggatacagccctgtactattgtgccgctgaccggaagtccgtgatgagcatcagacccgattactggggacagggcacacaagtcacagtgtcctctacgcgtgcctctacaaagggaccctccgtgtttcctctggctcccagcagcaagtctacaagcggaggaacagccgctctgggctgcctggtcaaggattactttcccgagcctgtgaccgtgtcctggaatagcggagcactgacaagcggcgtgcacacctttccagccgtgctgcaaagcagcggcctgtactctctgagcagcgtggtcacagtgcctagctctagcctgggcacccagacctacatctgcaatgtgaaccacaagcctagcaacaccaaggtggacaagagagtggaacccaagagctgtggtaccaacaaaattcttgtgaagcagtccccaatgctcgtcgcctatgataatgccgtgaatctgtcctgcaaatactcctacaatctgtttagccgcgagtttagggcctcactgcacaagggccttgacagcgccgtggaagtctgtgtggtctatggaaattactcccagcaactgcaagtgtactctaagacggggttcaactgtgatggaaaactgggaaacgagtccgtgacgttttacctccaaaatctctatgtcaatcaaacggacatctatttctgcaaaattgaagtcatgtatcctccgccgtacctcgataacgagaaaagcaatgggacgatcattcacgtcaagggaaaacatctctgccccagtcctctgttccctgggccttccaaaccattttgggttctcgtcgtcgtcggcggagtcctggcttgttattctctgcttgtgacagtcgcctttatcatattctgggtccgctccaagagaagcagactgctccactccgattatatgaatatgacacccaggcggccagggcctacacggaaacactatcaaccctacgctccacctcgggatttcgctgcctacagatcacgcgccaagagaagcggatctggcgtgaagcagaccctgaatttcgacctgctgaagctggctggcgacgtggaatccaacccaggcccttctagaggccatatgaccgagtacaagcccacggtgcgcctcgccacccgcgacgacgtccccagggccgtacgcaccctcgccgccgcgttcgccgactaccccgccacgcgccacaccgtcgatccggaccgccacatcgagcgggtcaccgagctgcaagaactcttcctcacgcgcgtcgggctcgacatcggcaaggtgtgggtcgcggacgacggcgccgcggtggcggtctggaccacgccggagagcgtcgaagcgggggcggtgttcgccgagatcggcccgcgcatggccgagttgagcggttcccggctggccgcgcagcaacagatggaaggcctcctggcgccgcaccggcccaaggagcccgcgtggttcctggccaccgtcggcgtctcgcccgaccaccagggcaagggtctgggcagcgccgtcgtgctccccggagtggaggcggccgagcgcgccggggtgcccgccttcctggagacctccgcgccccgcaacctccccttctacgagcggctcggcttcaccgtcaccgccgacgtcgaggtgcccgaaggaccgcgcacctggtgcatgacccgcaagcccggtgcctga

SEQ ID NO: 5587 - DNA, 3510 bp, Artificial Sequence
  Synthetic Polynucleotide
atggccttaccagtgaccgccttgctcctgccgctggccttgctgctccacgccgccaggccggacatccagatgacacagagccctagcagcctgtctgccagcgtgggagacagagtgaccatcacatgcaaggccagcgaccacatcaacaactggctggcctggtatcagcagaagcctggacaggcccctaagctgctgatctacggcgctaccacactggaaacaggcgtgcccagcagattttctggcagcggctctggcaccgactacaccctgacaatatccagcctccagcctgaggacttcgccacctactactgtcagcagagctggaacaccccttggacattcggccagggcaccaagctggaaatcaagagactcgaggacctgaagaacgtgttcccacctgaggtggccgtgttcgagcctagcgaggccgagatcagccacacccagaaagccaccctcgtgtgcctggctaccggcttctaccccgaccatgtggaactgtcttggtgggtcaacggcaaagaggtgcacagcggcgtgtctaccgacccccagccactgaaagaacagcccgccctgaacgacagccggtactgcctgagcagcagactgagagtgtccgccaccttctggcagaacccccggaaccacttcagatgccaggtgcagttctacggcctgagcgagaacgacgagtggacccaggacagagccaagcccgtgacccagatcgtgtctgccgaagcctggggcagagccgattgcggatccaacaagatcctggtcaagcagagccctatgctggtggcctacgacaacgccgtgaacctgagctgcaagtacagctacaacctgttcagcagagagttccgggccagcctgcacaaaggactggattctgctgtggaagtgtgcgtggtgtacggcaactacagccagcagctccaggtgtacagcaagaccggcttcaactgcgacggcaagctgggcaatgagagcgtgaccttctacctgcaaaacctgtacgtgaaccagaccgacatctatttctgcaagatcgaagtgatgtacccgcctccttacctggacaacgagaagtccaacggcaccatcatccacgtgaagggcaagcacctgtgtccttctccactgttccccggacctagcaagcctttctgggtgctcgttgttgttggcggcgtgctggcctgttatagcctgctggttaccgtggccttcatcatcttttgggtccgaagcaagcggagccggctgctgcacagcgactacatgaacatgacccctagacggcccggaccaaccagaaagcactaccagccttacgctcctcctagagacttcgccgcctatagaagtagggccaagcgatctggatctggagcaacaaacttctcactactcaaacaagcaggtgacgtggaggagaatcccgggcctactagtatggactggatttggcgcatccttttccttgtcggcgctgctaccggcgcgcattccttcgaacaagttcagcttcaacagcctggcgctgagctggtcaaacctggcgcttctgtgaagatgagctgcaaagccagcggctacgccttcagcagctactggatcaactggatgaagcagaaacccggccagggactcgaatggatcggccaaatctatcccggcgacggcgacaccaactacaacggcaagttcaagggcagagccacactgaccgccgatacctctagcagcacagcctacatgcagctgagcagcctgaccagcgaagatagcgccgtgtacttctgtgcccggtccatcacaacagtcgtgggctgcgctatggactattggggccagggaacaagcgtgaccgtgtctagtacgcgtatccagaaccctgatcctgccgtgtaccagctgcgggatagcaagagcagcgacaagagcgtgtgtctgttcaccgacttcgacagccagaccaacgtgtcccagagcaaggactccgacgtgtacatcaccgataagaccgtgctggacatgcggagcatggacttcaagagcaactccgccgtggcctggtccaacaagtccgatttcgcctgcgccaacgccttcaacaacagcattatccccgaggacacattcttcccaagccccgagagcagctgcggtaccaacaaaattcttgtgaagcagtccccaatgctcgtcgcctatgataatgccgtgaatctgtcctgcaaatactcctacaatctgtttagccgcgagtttagggcctcactgcacaagggccttgacagcgccgtggaagtctgtgtggtctatggaaattactcccagcaactgcaagtgtactctaagacggggttcaactgtgatggaaaactgggaaacgagtccgtgacgttttacctccaaaatctctatgtcaatcaaacggacatctatttctgcaaaattgaagtcatgtatcctccgccgtacctcgataacgagaaaagcaatgggacgatcattcacgtcaagggaaaacatctctgccccagtcctctgttccctgggccttccaaaccattttgggttctcgtcgtcgtcggcggagtcctggcttgttattctctgcttgtgacagtcgcctttatcatattctgggtccgctccaagagaagcagactgctccactccgattatatgaatatgacacccaggcggccagggcctacacggaaacactatcaaccctacgctccacctcgggatttcgctgcctacagatcacgcgccaagagaagcggatctggcgtgaagcagaccctgaatttcgacctgctgaagctggctggcgacgtggaatccaacccaggcccttctagaggccatatgaccgagtacaagcccacggtgcgcctcgccacccgcgacgacgtccccagggccgtacgcaccctcgccgccgcgttcgccgactaccccgccacgcgccacaccgtcgatccggaccgccacatcgagcgggtcaccgagctgcaagaactcttcctcacgcgcgtcgggctcgacatcggcaaggtgtgggtcgcggacgacggcgccgcggtggcggtctggaccacgccggagagcgtcgaagcgggggcggtgttcgccgagatcggcccgcgcatggccgagttgagcggttcccggctggccgcgcagcaacagatggaaggcctcctggcgccgcaccggcccaaggagcccgcgtggttcctggccaccgtcggcgtctcgcccgaccaccagggcaagggtctgggcagcgccgtcgtgctccccggagtggaggcggccgagcgcgccggggtgcccgccttcctggagacctccgcgccccgcaacctccccttctacgagcggctcggcttcaccgtcaccgccgacgtcgaggtgcccgaaggaccgcgcacctggtgcatgacccgcaagcccggtgcctga

SEQ ID NO: 5588 - DNA, 3921 bp, Artificial Sequence
  Synthetic Polynucleotide
atggccttaccagtgaccgccttgctcctgccgctggccttgctgctccacgccgccaggccggaagtgcagctggttgaatctggcggaggactggttcaggctggcggatctctgagactgtcttgtgccgccagcggcagaacctttagcatgggctggtttagacaggcccctggcaaagagagagagttcgtcgccgccatcacatactctggcggcagcccttactacgccgactctgtgaagggcagattcaccatcagccgggacaacgccaagaacaccgtgtacctccagatgaacagcctgaagcctgaggacaccgccgtgtactactgcgccgccaatccaacatacggcagcgactggaacgccgagaattggggccagggaacccaagtgacagtgtctagcggtaccggcggaggcggatctggcggcggaggtagcggtggcggaggatctgaattcgacatccagatgacacagagccctagcagcctgtctgccagcgtgggagacagagtgaccatcacatgcaaggccagcgaccacatcaacaactggctggcctggtatcagcagaagcctggacaggcccctaagctgctgatctacggcgctaccacactggaaacaggcgtgcccagcagattttctggcagcggctctggcaccgactacaccctgacaatatccagcctccagcctgaggacttcgccacctactactgtcagcagagctggaacaccccttggacattcggccagggcaccaagctggaaatcaagagactcgaggacctgaagaacgtgttcccacctgaggtggccgtgttcgagcctagcgaggccgagatcagccacacccagaaagccaccctcgtgtgcctggctaccggcttctaccccgaccatgtggaactgtcttggtgggtcaacggcaaagaggtgcacagcggcgtgtctaccgacccccagccactgaaagaacagcccgccctgaacgacagccggtactgcctgagcagcagactgagagtgtccgccaccttctggcagaacccccggaaccacttcagatgccaggtgcagttctacggcctgagcgagaacgacgagtggacccaggacagagccaagcccgtgacccagatcgtgtctgccgaagcctggggcagagccgattgcggatccaacaagatcctggtcaagcagagccctatgctggtggcctacgacaacgccgtgaacctgagctgcaagtacagctacaacctgttcagcagagagttccgggccagcctgcacaaaggactggattctgctgtggaagtgtgcgtggtgtacggcaactacagccagcagctccaggtgtacagcaagaccggcttcaactgcgacggcaagctgggcaatgagagcgtgaccttctacctgcaaaacctgtacgtgaaccagaccgacatctatttctgcaagatcgaagtgatgtacccgcctccttacctggacaacgagaagtccaacggcaccatcatccacgtgaagggcaagcacctgtgtccttctccactgttccccggacctagcaagcctttctgggtgctcgttgttgttggcggcgtgctggcctgttatagcctgctggttaccgtggccttcatcatcttttgggtccgaagcaagcggagccggctgctgcacagcgactacatgaacatgacccctagacggcccggaccaaccagaaagcactaccagccttacgctcctcctagagacttcgccgcctatagaagtagggccaagcgatctggatctggagcaacaaacttctcactactcaaacaagcaggtgacgtggaggagaatcccgggcctactagtatggactggatttggcgcatccttttccttgtcggcgctgctaccggcgcgcattccttcgaacaagttcagcttcaacagcctggcgctgagctggtcaaacctggcgcttctgtgaagatgagctgcaaagccagcggctacgccttcagcagctactggatcaactggatgaagcagaaacccggccagggactcgaatggatcggccaaatctatcccggcgacggcgacaccaactacaacggcaagttcaagggcagagccacactgaccgccgatacctctagcagcacagcctacatgcagctgagcagcctgaccagcgaagatagcgccgtgtacttctgtgcccggtccatcacaacagtcgtgggctgcgctatggactattggggccagggaacaagcgtgaccgtgtctagtacgcgtatccagaaccctgatcctgccgtgtaccagctgcgggatagcaagagcagcgacaagagcgtgtgtctgttcaccgacttcgacagccagaccaacgtgtcccagagcaaggactccgacgtgtacatcaccgataagaccgtgctggacatgcggagcatggacttcaagagcaactccgccgtggcctggtccaacaagtccgatttcgcctgcgccaacgccttcaacaacagcattatccccgaggacacattcttcccaagccccgagagcagctgcggtaccaacaaaattcttgtgaagcagtccccaatgctcgtcgcctatgataatgccgtgaatctgtcctgcaaatactcctacaatctgtttagccgcgagtttagggcctcactgcacaagggccttgacagcgccgtggaagtctgtgtggtctatggaaattactcccagcaactgcaagtgtactctaagacggggttcaactgtgatggaaaactgggaaacgagtccgtgacgttttacctccaaaatctctatgtcaatcaaacggacatctatttctgcaaaattgaagtcatgtatcctccgccgtacctcgataacgagaaaagcaatgggacgatcattcacgtcaagggaaaacatctctgccccagtcctctgttccctgggccttccaaaccattttgggttctcgtcgtcgtcggcggagtcctggcttgttattctctgcttgtgacagtcgcctttatcatattctgggtccgctccaagagaagcagactgctccactccgattatatgaatatgacacccaggcggccagggcctacacggaaacactatcaaccctacgctccacctcgggatttcgctgcctacagatcacgcgccaagagaagcggatctggcgtgaagcagaccctgaatttcgacctgctgaagctggctggcgacgtggaatccaacccaggcccttctagaggccatatgaccgagtacaagcccacggtgcgcctcgccacccgcgacgacgtccccagggccgtacgcaccctcgccgccgcgttcgccgactaccccgccacgcgccacaccgtcgatccggaccgccacatcgagcgggtcaccgagctgcaagaactcttcctcacgcgcgtcgggctcgacatcggcaaggtgtgggtcgcggacgacggcgccgcggtggcggtctggaccacgccggagagcgtcgaagcgggggcggtgttcgccgagatcggcccgcgcatggccgagttgagcggttcccggctggccgcgcagcaacagatggaaggcctcctggcgccgcaccggcccaaggagcccgcgtggttcctggccaccgtcggcgtctcgcccgaccaccagggcaagggtctgggcagcgccgtcgtgctccccggagtggaggcggccgagcgcgccggggtgcccgccttcctggagacctccgcgccccgcaacctccccttctacgagcggctcggcttcaccgtcaccgccgacgtcgaggtgcccgaaggaccgcgcacctggtgcatgacccgcaagcccggtgcctga

SEQ ID NO: 5589 - DNA, 4332 bp, Artificial Sequence
  Synthetic Polynucleotide
atggccttaccagtgaccgccttgctcctgccgctggccttgctgctccacgccgccaggccggaagtgcagctggttgaatctggcggaggactggttcaggctggcggatctctgagactgtcttgtgccgccagcggcagaacctttagcatgggctggtttagacaggcccctggcaaagagagagagttcgtcgccgccatcacatactctggcggcagcccttactacgccgactctgtgaagggcagattcaccatcagccgggacaacgccaagaacaccgtgtacctccagatgaacagcctgaagcctgaggacaccgccgtgtactactgcgccgccaatccaacatacggcagcgactggaacgccgagaattggggccagggaacccaagtgacagtgtctagcggtaccggcggaggcggatctggcggcggaggtagcggtggcggaggatctgaattcgacatccagatgacacagagccctagcagcctgtctgccagcgtgggagacagagtgaccatcacatgcaaggccagcgaccacatcaacaactggctggcctggtatcagcagaagcctggacaggcccctaagctgctgatctacggcgctaccacactggaaacaggcgtgcccagcagattttctggcagcggctctggcaccgactacaccctgacaatatccagcctccagcctgaggacttcgccacctactactgtcagcagagctggaacaccccttggacattcggccagggcaccaagctggaaatcaagagactcgaggacctgaagaacgtgttcccacctgaggtggccgtgttcgagcctagcgaggccgagatcagccacacccagaaagccaccctcgtgtgcctggctaccggcttctaccccgaccatgtggaactgtcttggtgggtcaacggcaaagaggtgcacagcggcgtgtctaccgacccccagccactgaaagaacagcccgccctgaacgacagccggtactgcctgagcagcagactgagagtgtccgccaccttctggcagaacccccggaaccacttcagatgccaggtgcagttctacggcctgagcgagaacgacgagtggacccaggacagagccaagcccgtgacccagatcgtgtctgccgaagcctggggcagagccgattgcggatccaacaagatcctggtcaagcagagccctatgctggtggcctacgacaacgccgtgaacctgagctgcaagtacagctacaacctgttcagcagagagttccgggccagcctgcacaaaggactggattctgctgtggaagtgtgcgtggtgtacggcaactacagccagcagctccaggtgtacagcaagaccggcttcaactgcgacggcaagctgggcaatgagagcgtgaccttctacctgcaaaacctgtacgtgaaccagaccgacatctatttctgcaagatcgaagtgatgtacccgcctccttacctggacaacgagaagtccaacggcaccatcatccacgtgaagggcaagcacctgtgtccttctccactgttccccggacctagcaagcctttctgggtgctcgttgttgttggcggcgtgctggcctgttatagcctgctggttaccgtggccttcatcatcttttgggtccgaagcaagcggagccggctgctgcacagcgactacatgaacatgacccctagacggcccggaccaaccagaaagcactaccagccttacgctcctcctagagacttcgccgcctatagaagtagggccaagcgatctggatctggagcaacaaacttctcactactcaaacaagcaggtgacgtggaggagaatcccgggcctactagtatggactggatttggcgcatccttttccttgtcggcgctgctaccggcgcgcattccgggcccgaagtgcaactggttgaatccggtggcggcctggtgcaagcaggcggatctctcagacttagctgtgccgcctccggcagaaccttcacaatgggatggtttaggcaggctccagggaaagagagagagttcgtcgccgccatctctctgtctcccacactggcctactacgccgactctgtgaaaggccggttcaccatctccagagataatgccaagaacaccgtggtgctgcaaatgaactctctgaaacccgaggatacagccctgtactattgtgccgctgaccggaagtccgtgatgagcatcagacccgattactggggacagggcacacaagtcacagtgtcctctggatccggcggcggaggatctggcggaggcggatctgggggcggaggctctttcgaacaagttcagcttcaacagcctggcgctgagctggtcaaacctggcgcttctgtgaagatgagctgcaaagccagcggctacgccttcagcagctactggatcaactggatgaagcagaaacccggccagggactcgaatggatcggccaaatctatcccggcgacggcgacaccaactacaacggcaagttcaagggcagagccacactgaccgccgatacctctagcagcacagcctacatgcagctgagcagcctgaccagcgaagatagcgccgtgtacttctgtgcccggtccatcacaacagtcgtgggctgcgctatggactattggggccagggaacaagcgtgaccgtgtctagtacgcgtatccagaaccctgatcctgccgtgtaccagctgcgggatagcaagagcagcgacaagagcgtgtgtctgttcaccgacttcgacagccagaccaacgtgtcccagagcaaggactccgacgtgtacatcaccgataagaccgtgctggacatgcggagcatggacttcaagagcaactccgccgtggcctggtccaacaagtccgatttcgcctgcgccaacgccttcaacaacagcattatccccgaggacacattcttcccaagccccgagagcagctgcggtaccaacaaaattcttgtgaagcagtccccaatgctcgtcgcctatgataatgccgtgaatctgtcctgcaaatactcctacaatctgtttagccgcgagtttagggcctcactgcacaagggccttgacagcgccgtggaagtctgtgtggtctatggaaattactcccagcaactgcaagtgtactctaagacggggttcaactgtgatggaaaactgggaaacgagtccgtgacgttttacctccaaaatctctatgtcaatcaaacggacatctatttctgcaaaattgaagtcatgtatcctccgccgtacctcgataacgagaaaagcaatgggacgatcattcacgtcaagggaaaacatctctgccccagtcctctgttccctgggccttccaaaccattttgggttctcgtcgtcgtcggcggagtcctggcttgttattctctgcttgtgacagtcgcctttatcatattctgggtccgctccaagagaagcagactgctccactccgattatatgaatatgacacccaggcggccagggcctacacggaaacactatcaaccctacgctccacctcgggatttcgctgcctacagatcacgcgccaagagaagcggatctggcgtgaagcagaccctgaatttcgacctgctgaagctggctggcgacgtggaatccaacccaggcccttctagaggccatatgaccgagtacaagcccacggtgcgcctcgccacccgcgacgacgtccccagggccgtacgcaccctcgccgccgcgttcgccgactaccccgccacgcgccacaccgtcgatccggaccgccacatcgagcgggtcaccgagctgcaagaactcttcctcacgcgcgtcgggctcgacatcggcaaggtgtgggtcgcggacgacggcgccgcggtggcggtctggaccacgccggagagcgtcgaagcgggggcggtgttcgccgagatcggcccgcgcatggccgagttgagcggttcccggctggccgcgcagcaacagatggaaggcctcctggcgccgcaccggcccaaggagcccgcgtggttcctggccaccgtcggcgtctcgcccgaccaccagggcaagggtctgggcagcgccgtcgtgctccccggagtggaggcggccgagcgcgccggggtgcccgccttcctggagacctccgcgccccgcaacctccccttctacgagcggctcggcttcaccgtcaccgccgacgtcgaggtgcccgaaggaccgcgcacctggtgcatgacccgcaagcccggtgcctga

SEQ ID NO: 5590 - DNA, 3531 bp, Artificial Sequence
  Synthetic Polynucleotide
atggccttaccagtgaccgccttgctcctgccgctggccttgctgctccacgccgccaggccggaagtgcagctggttgaatctggcggaggactggttcaggctggcggatctctgagactgtcttgtgccgccagcggcagaacctttagcatgggctggtttagacaggcccctggcaaagagagagagttcgtcgccgccatcacatactctggcggcagcccttactacgccgactctgtgaagggcagattcaccatcagccgggacaacgccaagaacaccgtgtacctccagatgaacagcctgaagcctgaggacaccgccgtgtactactgcgccgccaatccaacatacggcagcgactggaacgccgagaattggggccagggaacccaagtgacagtgtctagcctcgaggacctgaagaacgtgttcccacctgaggtggccgtgttcgagcctagcgaggccgagatcagccacacccagaaagccaccctcgtgtgcctggctaccggcttctaccccgaccatgtggaactgtcttggtgggtcaacggcaaagaggtgcacagcggcgtgtctaccgacccccagccactgaaagaacagcccgccctgaacgacagccggtactgcctgagcagcagactgagagtgtccgccaccttctggcagaacccccggaaccacttcagatgccaggtgcagttctacggcctgagcgagaacgacgagtggacccaggacagagccaagcccgtgacccagatcgtgtctgccgaagcctggggcagagccgattgcggatccaacaagatcctggtcaagcagagccctatgctggtggcctacgacaacgccgtgaacctgagctgcaagtacagctacaacctgttcagcagagagttccgggccagcctgcacaaaggactggattctgctgtggaagtgtgcgtggtgtacggcaactacagccagcagctccaggtgtacagcaagaccggcttcaactgcgacggcaagctgggcaatgagagcgtgaccttctacctgcaaaacctgtacgtgaaccagaccgacatctatttctgcaagatcgaagtgatgtacccgcctccttacctggacaacgagaagtccaacggcaccatcatccacgtgaagggcaagcacctgtgtccttctccactgttccccggacctagcaagcctttctgggtgctcgttgttgttggcggcgtgctggcctgttatagcctgctggttaccgtggccttcatcatcttttgggtccgaagcaagcggagccggctgctgcacagcgactacatgaacatgacccctagacggcccggaccaaccagaaagcactaccagccttacgctcctcctagagacttcgccgcctatagaagtagggccaagcgatctggatctggagcaacaaacttctcactactcaaacaagcaggtgacgtggaggagaatcccgggcctactagtatggactggatttggcgcatccttttccttgtcggcgctgctaccggcgcgcattccgggcccgaagtgcaactggttgaatccggtggcggcctggtgcaagcaggcggatctctcagacttagctgtgccgcctccggcagaaccttcacaatgggatggtttaggcaggctccagggaaagagagagagttcgtcgccgccatctctctgtctcccacactggcctactacgccgactctgtgaaaggccggttcaccatctccagagataatgccaagaacaccgtggtgctgcaaatgaactctctgaaacccgaggatacagccctgtactattgtgccgctgaccggaagtccgtgatgagcatcagacccgattactggggacagggcacacaagtcacagtgtcctctacgcgtatccagaaccctgatcctgccgtgtaccagctgcgggatagcaagagcagcgacaagagcgtgtgtctgttcaccgacttcgacagccagaccaacgtgtcccagagcaaggactccgacgtgtacatcaccgataagaccgtgctggacatgcggagcatggacttcaagagcaactccgccgtggcctggtccaacaagtccgatttcgcctgcgccaacgccttcaacaacagcattatccccgaggacacattcttcccaagccccgagagcagctgcggtaccaacaaaattcttgtgaagcagtccccaatgctcgtcgcctatgataatgccgtgaatctgtcctgcaaatactcctacaatctgtttagccgcgagtttagggcctcactgcacaagggccttgacagcgccgtggaagtctgtgtggtctatggaaattactcccagcaactgcaagtgtactctaagacggggttcaactgtgatggaaaactgggaaacgagtccgtgacgttttacctccaaaatctctatgtcaatcaaacggacatctatttctgcaaaattgaagtcatgtatcctccgccgtacctcgataacgagaaaagcaatgggacgatcattcacgtcaagggaaaacatctctgccccagtcctctgttccctgggccttccaaaccattttgggttctcgtcgtcgtcggcggagtcctggcttgttattctctgcttgtgacagtcgcctttatcatattctgggtccgctccaagagaagcagactgctccactccgattatatgaatatgacacccaggcggccagggcctacacggaaacactatcaaccctacgctccacctcgggatttcgctgcctacagatcacgcgccaagagaagcggatctggcgtgaagcagaccctgaatttcgacctgctgaagctggctggcgacgtggaatccaacccaggcccttctagaggccatatgaccgagtacaagcccacggtgcgcctcgccacccgcgacgacgtccccagggccgtacgcaccctcgccgccgcgttcgccgactaccccgccacgcgccacaccgtcgatccggaccgccacatcgagcgggtcaccgagctgcaagaactcttcctcacgcgcgtcgggctcgacatcggcaaggtgtgggtcgcggacgacggcgccgcggtggcggtctggaccacgccggagagcgtcgaagcgggggcggtgttcgccgagatcggcccgcgcatggccgagttgagcggttcccggctggccgcgcagcaacagatggaaggcctcctggcgccgcaccggcccaaggagcccgcgtggttcctggccaccgtcggcgtctcgcccgaccaccagggcaagggtctgggcagcgccgtcgtgctccccggagtggaggcggccgagcgcgccggggtgcccgccttcctggagacctccgcgccccgcaacctccccttctacgagcggctcggcttcaccgtcaccgccgacgtcgaggtgcccgaaggaccgcgcacctggtgcatgacccgcaagcccggtgcctga

SEQ ID NO: 5591 - DNA, 1794 bp, Artificial Sequence
  Synthetic Polynucleotide
atggccttaccagtgaccgccttgctcctgccgctggccttgctgctccacgccgccaggccggcatgcgaagtgcagctgcttgaaagtggcggcggactgattcagcctggcggatctctgagactgagctgtgccgccagcggcttcaccttttctagccacgccatgacctgggtccgacaggcacctggaaaagggcttgaatgggtgtccgccatcagcggctctggcgattacacacactacgccgacagcgtgaagggcagattcaccatcagcagagacaacagcaagaacaccgtgtacctccagatgaacagcctgagagccgaggacagcgccgtgtattattgcgccaaggatgaggatggcggcagcctgcttggacacagaggacaaggcaccctggtcaccgtttcttccggtaccggcggaggcggatctggcggcggaggtagcggtggcggaggatctgaattcggatctctcgagaacaagatcctggtcaagcagagccctatgctggtggcctacgacaacgccgtgaacctgagctgcaagtacagctacaacctgttcagcagagagttccgggccagcctgcacaaaggactggattctgctgtggaagtgtgcgtggtgtacggcaactacagccagcagctccaggtgtacagcaagaccggcttcaactgcgacggcaagctgggcaatgagagcgtgaccttctacctgcaaaacctgtacgtgaaccagaccgacatctatttctgcaagatcgaagtgatgtacccgcctccttacctggacaacgagaagtccaacggcaccatcatccacgtgaagggcaagcacctgtgtccttctccactgttccccggacctagcaagcctttctgggtgctcgttgttgttggcggcgtgctggcctgttatagcctgctggttaccgtggccttcatcatcttttgggtccgaagcaagcggagccggctgctgcacagcgactacatgaacatgacccctagacggcccggaccaaccagaaagcactaccagccttacgctcctcctagagacttcgccgcctatagaagtagggccaagcgatctggatctggagcaacaaacttctcactactcaaacaagcaggtgacgtggaggagaatcccgggcctactagaggccatatgaccgagtacaagcccacggtgcgcctcgccacccgcgacgacgtccccagggccgtacgcaccctcgccgccgcgttcgccgactaccccgccacgcgccacaccgtcgatccggaccgccacatcgagcgggtcaccgagctgcaagaactcttcctcacgcgcgtcgggctcgacatcggcaaggtgtgggtcgcggacgacggcgccgcggtggcggtctggaccacgccggagagcgtcgaagcgggggcggtgttcgccgagatcggcccgcgcatggccgagttgagcggttcccggctggccgcgcagcaacagatggaaggcctcctggcgccgcaccggcccaaggagcccgcgtggttcctggccaccgtcggcgtctcgcccgaccaccagggcaagggtctgggcagcgccgtcgtgctccccggagtggaggcggccgagcgcgccggggtgcccgccttcctggagacctccgcgccccgcaacctccccttctacgagcggctcggcttcaccgtcaccgccgacgtcgaggtgcccgaaggaccgcgcacctggtgcatgacccgcaagcccggtgcctga

SEQ ID NO: 5592 - DNA, 1407 bp, Artificial Sequence; identical to SEQ ID NO: 5560
  Synthetic Polynucleotide

SEQ ID NO: 5593 - DNA, 1407 bp, Artificial Sequence; identical to SEQ ID NO: 5561
  Synthetic Polynucleotide

SEQ ID NO: 5594 - DNA, 1029 bp, Artificial Sequence; identical to SEQ ID NO: 5562
  Synthetic Polynucleotide

SEQ ID NO: 5595 - DNA, 1029 bp, Artificial Sequence; identical to SEQ ID NO: 5563
  Synthetic Polynucleotide

SEQ ID NO: 5596 - DNA, 1029 bp, Artificial Sequence; identical to SEQ ID NO: 5564
  Synthetic Polynucleotide

SEQ ID NO: 5597 - DNA, 1035 bp, Artificial Sequence; identical to SEQ ID NO: 5565
  Synthetic Polynucleotide

SEQ ID NO: 5598 - DNA, 1059 bp, Artificial Sequence; identical to SEQ ID NO: 5566
  Synthetic Polynucleotide

SEQ ID NO: 5599 - DNA, 1047 bp, Artificial Sequence; identical to SEQ ID NO: 5567
  Synthetic Polynucleotide

SEQ ID NO: 5600 - DNA, 1032 bp, Artificial Sequence; identical to SEQ ID NO: 5568
  Synthetic Polynucleotide

SEQ ID NO: 5601 - DNA, 1047 bp, Artificial Sequence; identical to SEQ ID NO: 5569
  Synthetic Polynucleotide

SEQ ID NO: 5602 - DNA, 849 bp, Artificial Sequence; identical to SEQ ID NO: 5570
  Synthetic Polynucleotide

SEQ ID NO: 5603 - DNA, 942 bp, Artificial Sequence; identical to SEQ ID NO: 5571
  Synthetic Polynucleotide

SEQ ID NO: 5604 - DNA, 945 bp, Artificial Sequence; identical to SEQ ID NO: 5572
  Synthetic Polynucleotide

SEQ ID NO: 5605 - DNA, 1596 bp, Artificial Sequence; identical to SEQ ID NO: 5573
  Synthetic Polynucleotide

SEQ ID NO: 5606 - DNA, 1236 bp, Artificial Sequence; identical to SEQ ID NO: 5574
  Synthetic Polynucleotide

SEQ ID NO: 5607 - DNA, 834 bp, Artificial Sequence; identical to SEQ ID NO: 5575
  Synthetic Polynucleotide

SEQ ID NO: 5608 - DNA, 759 bp, Artificial Sequence; identical to SEQ ID NO: 5576
  Synthetic Polynucleotide

SEQ ID NO: 5609 - DNA, 1533 bp, Artificial Sequence; identical to SEQ ID NO: 5577
  Synthetic Polynucleotide

SEQ ID NO: 5610 - DNA, 1533 bp, Artificial Sequence; identical to SEQ ID NO: 5578
  Synthetic Polynucleotide

SEQ ID NO: 5611 - DNA, 3075 bp, Artificial Sequence
  Synthetic Polynucleotide
atggccttaccagtgaccgccttgctcctgccgctggccttgctgctccacgccgccaggccggacatccagatgacacagagccctagcagcctgtctgccagcgtgggagacagagtgaccatcacatgcaaggccagcgaccacatcaacaactggctggcctggtatcagcagaagcctggacaggcccctaagctgctgatctacggcgctaccacactggaaacaggcgtgcccagcagattttctggcagcggctctggcaccgactacaccctgacaatatccagcctccagcctgaggacttcgccacctactactgtcagcagagctggaacaccccttggacattcggccagggcaccaagctggaaatcaagagactcgagggcatgcggactgaagacctcccaaaggctgtggtgttcctggagcctcaatggtacagggtgctggagaaggacagtgtgactctgaagtgccagggagcctactcccctgaggacaattccacacagtggtttcacaatgagagcctcatctcaagccaggcctccagctacttcattgacgctgccacagtggacgacagtggagagtacaggtgccagacaaacctctccaccctcagtgacccggtgcagctagaagtccatatcggctggctgttgctccaggcccctcggtgggtgttcaaggaggaagaccctattcacctgaggtgtcacagctggaagaacactgctctgcataaggtcacatatttacagaatggcaaaggcaggaagtattttcatcataattctgacttctacattccaaaagccacactcaaagacagcggctcctacttctgcagggggcttgttgggagtaaaaatgtgtcttcagagactgtgaacatcaccatcactcaaggtttggcagtgtcaaccatctcatcattctttccacctggctaccaagtgtccttctgcctggtcatggtgctgctgttcgccgtggataccggcctgtacttcagcgtcaagaccaacatccggtccagcaccagagactggaaggaccacaagttcaagtggcggaaggaccctcaggacaagagggccaagcgatctggatctggagcaacaaacttctcactactcaaacaagcaggtgacgtggaggagaatcccgggcctactagtatggactggatttggcgcatccttttccttgtcggcgctgctaccggcgcgcattccttcgaacaagttcagcttcaacagcctggcgctgagctggtcaaacctggcgcttctgtgaagatgagctgcaaagccagcggctacgccttcagcagctactggatcaactggatgaagcagaaacccggccagggactcgaatggatcggccaaatctatcccggcgacggcgacaccaactacaacggcaagttcaagggcagagccacactgaccgccgatacctctagcagcacagcctacatgcagctgagcagcctgaccagcgaagatagcgccgtgtacttctgtgcccggtccatcacaacagtcgtgggctgcgctatggactattggggccagggaacaagcgtgaccgtgtctagtacgcgtctgcactgtgtcggcgacacctatccatccaacgatcggtgctgccatgagtgccggcctggcaacggaatggtgtctcgatgttctcggagtcagaataccgtctgtaggccatgcggacccggcttttacaatgatgtcgtgtcctccaaaccttgcaagccatgtacttggtgcaatctgcggagcggctctgagcggaaacagctgtgcactgctacccaggacacagtgtgtagatgcagagccggaactcagcccctggactcttataagcccggcgttgactgcgctccatgtccaccagggcacttttccccaggcgacaatcaagcctgtaaaccgtggacaaattgcacactggccgggaaacacaccttgcagccagccagcaattcctccgatgccatctgtgaagatcgggacccaccagccactcagcctcaagaaactcaggggcctcctgctaggcccattacagtgcaacctaccgaggcttggccccggacatctcagggaccttctacaaggccagtggaagtgccaggcggtagagctgtggctgctatccttggattgggcctcgttctcggactgttgggaccacttgcaatcctgctggctctctatctgctgcggcgggatcagagactccctccagatgctcataagccacctggcggcggatctttcaggaccccaattcaagaagaacaagccgacgctcactctaccctggctaagatccgcgccaagagaagcggatctggcgtgaagcagaccctgaatttcgacctgctgaagctggctggcgacgtggaatccaacccaggcccttctagaggccatatgaccgagtacaagcccacggtgcgcctcgccacccgcgacgacgtccccagggccgtacgcaccctcgccgccgcgttcgccgactaccccgccacgcgccacaccgtcgatccggaccgccacatcgagcgggtcaccgagctgcaagaactcttcctcacgcgcgtcgggctcgacatcggcaaggtgtgggtcgcggacgacggcgccgcggtggcggtctggaccacgccggagagcgtcgaagcgggggcggtgttcgccgagatcggcccgcgcatggccgagttgagcggttcccggctggccgcgcagcaacagatggaaggcctcctggcgccgcaccggcccaaggagcccgcgtggttcctggccaccgtcggcgtctcgcccgaccaccagggcaagggtctgggcagcgccgtcgtgctccccggagtggaggcggccgagcgcgccggggtgcccgccttcctggagacctccgcgccccgcaacctccccttctacgagcggctcggcttcaccgtcaccgccgacgtcgaggtgcccgaaggaccgcgcacctggtgcatgacccgcaagcccggtgcctga

SEQ ID NO: 5612 - DNA, 3237 bp, Artificial Sequence
  Synthetic Polynucleotide
atggccttaccagtgaccgccttgctcctgccgctggccttgctgctccacgccgccaggccggcatgcgaagtgcagctgcttgaaagtggcggcggactgattcagcctggcggatctctgagactgagctgtgccgccagcggcttcaccttttctagccacgccatgacctgggtccgacaggcacctggaaaagggcttgaatgggtgtccgccatcagcggctctggcgattacacacactacgccgacagcgtgaagggcagattcaccatcagcagagacaacagcaagaacaccgtgtacctccagatgaacagcctgagagccgaggacagcgccgtgtattattgcgccaaggatgaggatggcggcagcctgcttggacacagaggacaaggcaccctggtcaccgtttcttccggtaccggcggaggcggatctggcggcggaggtagcggtggcggaggatctgaattcggatctctcgagggcatgcggactgaagacctcccaaaggctgtggtgttcctggagcctcaatggtacagggtgctggagaaggacagtgtgactctgaagtgccagggagcctactcccctgaggacaattccacacagtggtttcacaatgagagcctcatctcaagccaggcctccagctacttcattgacgctgccacagtggacgacagtggagagtacaggtgccagacaaacctctccaccctcagtgacccggtgcagctagaagtccatatcggctggctgttgctccaggcccctcggtgggtgttcaaggaggaagaccctattcacctgaggtgtcacagctggaagaacactgctctgcataaggtcacatatttacagaatggcaaaggcaggaagtattttcatcataattctgacttctacattccaaaagccacactcaaagacagcggctcctacttctgcagggggcttgttgggagtaaaaatgtgtcttcagagactgtgaacatcaccatcactcaaggtttggcagtgtcaaccatctcatcattctttccacctggctaccaagtgtccttctgcctggtcatggtgctgctgttcgccgtggataccggcctgtacttcagcgtcaagaccaacatccggtccagcaccagagactggaaggaccacaagttcaagtggcggaaggaccctcaggacaagagggccaagcgatctggatctggagcaacaaacttctcactactcaaacaagcaggtgacgtggaggagaatcccgggcctactagtgccaccatggactggatttggcgcatccttttccttgtcggcgctgctaccggcgcccattccgggcccgaagtgcagctggttgaatctggcggaggactggttcaggctggcggatctctgagactgtcttgtgccgccagcggcagaacctttagcatgggctggtttagacaggcccctggcaaagagagagagttcgtcgccgccatcacatactctggcggcagcccttactacgccgactctgtgaagggcagattcaccatcagccgggacaacgccaagaacaccgtgtacctccagatgaacagcctgaagcctgaggacaccgccgtgtactactgcgccgccaatccaacatacggcagcgactggaacgccgagaattggggccagggaacccaagtgacagtgtctagcggatccggcggcggaggatctggcggaggcggatctgggggcggaggctctttcgaaggcagcacgcgtctgcactgtgtcggcgacacctatccatccaacgatcggtgctgccatgagtgccggcctggcaacggaatggtgtctcgatgttctcggagtcagaataccgtctgtaggccatgcggacccggcttttacaatgatgtcgtgtcctccaaaccttgcaagccatgtacttggtgcaatctgcggagcggctctgagcggaaacagctgtgcactgctacccaggacacagtgtgtagatgcagagccggaactcagcccctggactcttataagcccggcgttgactgcgctccatgtccaccagggcacttttccccaggcgacaatcaagcctgtaaaccgtggacaaattgcacactggccgggaaacacaccttgcagccagccagcaattcctccgatgccatctgtgaagatcgggacccaccagccactcagcctcaagaaactcaggggcctcctgctaggcccattacagtgcaacctaccgaggcttggccccggacatctcagggaccttctacaaggccagtggaagtgccaggcggtagagctgtggctgctatccttggattgggcctcgttctcggactgttgggaccacttgcaatcctgctggctctctatctgctgcggcgggatcagagactccctccagatgctcataagccacctggcggcggatctttcaggaccccaattcaagaagaacaagccgacgctcactctaccctggctaagatccgcgccaagagaagcggatctggcgtgaagcagaccctgaatttcgacctgctgaagctggctggcgacgtggaatccaacccaggcccttctagaggccatatgaccgagtacaagcccacggtgcgcctcgccacccgcgacgacgtccccagggccgtacgcaccctcgccgccgcgttcgccgactaccccgccacgcgccacaccgtcgatccggaccgccacatcgagcgggtcaccgagctgcaagaactcttcctcacgcgcgtcgggctcgacatcggcaaggtgtgggtcgcggacgacggcgccgcggtggcggtctggaccacgccggagagcgtcgaagcgggggcggtgttcgccgagatcggcccgcgcatggccgagttgagcggttcccggctggccgcgcagcaacagatggaaggcctcctggcgccgcaccggcccaaggagcccgcgtggttcctggccaccgtcggcgtctcgcccgaccaccagggcaagggtctgggcagcgccgtcgtgctccccggagtggaggcggccgagcgcgccggggtgcccgccttcctggagacctccgcgccccgcaacctccccttctacgagcggctcggcttcaccgtcaccgccgacgtcgaggtgcccgaaggaccgcgcacctggtgcatgacccgcaagcccggtgcctga

SEQ ID NO: 5613 - DNA, 3687 bp, Artificial Sequence
  Synthetic Polynucleotide
atggccttaccagtgaccgccttgctcctgccgctggccttgctgctccacgccgccaggccggacatccagatgacacagagccctagcagcctgtctgccagcgtgggagacagagtgaccatcacatgcaaggccagcgaccacatcaacaactggctggcctggtatcagcagaagcctggacaggcccctaagctgctgatctacggcgctaccacactggaaacaggcgtgcccagcagattttctggcagcggctctggcaccgactacaccctgacaatatccagcctccagcctgaggacttcgccacctactactgtcagcagagctggaacaccccttggacattcggccagggcaccaagctggaaatcaagagactcgagggacagcctaaggccaatcctaccgtgacactgttccctccaagcagcgaagaactccaggccaacaaggccacacttgtgtgcctgatctccgacttctaccctggggctgtgacagtggcttggaaggccgatggatctcctgtgaaagccggcgtggaaaccaccaagccatccaagcagagcaacaacaaatacgccgccagctcctacctgagcctgacacctgagcagtggaagtcccacagatcctacagctgccaagtgacccacgaaggcagcaccgtggaaaagacagtggcccctacagagtgcagcggatccggcatgcggactgaagacctcccaaaggctgtggtgttcctggagcctcaatggtacagggtgctggagaaggacagtgtgactctgaagtgccagggagcctactcccctgaggacaattccacacagtggtttcacaatgagagcctcatctcaagccaggcctccagctacttcattgacgctgccacagtggacgacagtggagagtacaggtgccagacaaacctctccaccctcagtgacccggtgcagctagaagtccatatcggctggctgttgctccaggcccctcggtgggtgttcaaggaggaagaccctattcacctgaggtgtcacagctggaagaacactgctctgcataaggtcacatatttacagaatggcaaaggcaggaagtattttcatcataattctgacttctacattccaaaagccacactcaaagacagcggctcctacttctgcagggggcttgttgggagtaaaaatgtgtcttcagagactgtgaacatcaccatcactcaaggtttggcagtgtcaaccatctcatcattctttccacctggctaccaagtgtccttctgcctggtcatggtgctgctgttcgccgtggataccggcctgtacttcagcgtcaagaccaacatccggtccagcaccagagactggaaggaccacaagttcaagtggcggaaggaccctcaggacaagagggccaagcgatctggatctggagcaacaaacttctcactactcaaacaagcaggtgacgtggaggagaatcccgggcctactagtatggactggatttggcgcatccttttccttgtcggcgctgctaccggcgcgcattccttcgaacaagttcagcttcaacagcctggcgctgagctggtcaaacctggcgcttctgtgaagatgagctgcaaagccagcggctacgccttcagcagctactggatcaactggatgaagcagaaacccggccagggactcgaatggatcggccaaatctatcccggcgacggcgacaccaactacaacggcaagttcaagggcagagccacactgaccgccgatacctctagcagcacagcctacatgcagctgagcagcctgaccagcgaagatagcgccgtgtacttctgtgcccggtccatcacaacagtcgtgggctgcgctatggactattggggccagggaacaagcgtgaccgtgtctagtacgcgtgcctctacaaagggaccctccgtgtttcctctggctcccagcagcaagtctacaagcggaggaacagccgctctgggctgcctggtcaaggattactttcccgagcctgtgaccgtgtcctggaatagcggagcactgacaagcggcgtgcacacctttccagccgtgctgcaaagcagcggcctgtactctctgagcagcgtggtcacagtgcctagctctagcctgggcacccagacctacatctgcaatgtgaaccacaagcctagcaacaccaaggtggacaagagagtggaacccaagagctgtggtaccctgcactgtgtcggcgacacctatccatccaacgatcggtgctgccatgagtgccggcctggcaacggaatggtgtctcgatgttctcggagtcagaataccgtctgtaggccatgcggacccggcttttacaatgatgtcgtgtcctccaaaccttgcaagccatgtacttggtgcaatctgcggagcggctctgagcggaaacagctgtgcactgctacccaggacacagtgtgtagatgcagagccggaactcagcccctggactcttataagcccggcgttgactgcgctccatgtccaccagggcacttttccccaggcgacaatcaagcctgtaaaccgtggacaaattgcacactggccgggaaacacaccttgcagccagccagcaattcctccgatgccatctgtgaagatcgggacccaccagccactcagcctcaagaaactcaggggcctcctgctaggcccattacagtgcaacctaccgaggcttggccccggacatctcagggaccttctacaaggccagtggaagtgccaggcggtagagctgtggctgctatccttggattgggcctcgttctcggactgttgggaccacttgcaatcctgctggctctctatctgctgcggcgggatcagagactccctccagatgctcataagccacctggcggcggatctttcaggaccccaattcaagaagaacaagccgacgctcactctaccctggctaagatccgcgccaagagaagcggatctggcgtgaagcagaccctgaatttcgacctgctgaagctggctggcgacgtggaatccaacccaggcccttctagaggcgggatccacaccatggctacctacgaggtgctgtgcgaggtggcaagaaagctgggcaccgacgacagagaagtggtgctgttcctgctgaacgtgttcatccctcagcctacactggcccagctgatcggtgcactgagagccctgaaagaggaaggccggctgacctttcctctgctggccgaatgcctgttcagagccggaagaagggatctgctgcgggacctgctgcatctggaccccagatttctggaaagacacctggccggcaccatgagctacttcagcccttaccagctgaccgtgctgcacgttgacggcgaactgtgcgccagagatattcggagcctgatcttcctgagcaaggacaccatcggcagccggtctacccctcagacatttctgcactgggtgtactgcatggaaaacctggacctgctcggccccacagatgtggatgccctgatgtccatgctgagaagcctgagcagagtggacctccagagacaggtgcagacactgatgggactgcacctgagcggacctagccacagccagcactacagacacacccct

SEQ ID NO: 5614 - DNA, 3846 bp, Artificial Sequence
  Synthetic Polynucleotide
atggccttaccagtgaccgccttgctcctgccgctggccttgctgctccacgccgccaggccggacatccagatgacacagagccctagcagcctgtctgccagcgtgggagacagagtgaccatcacatgcaaggccagcgaccacatcaacaactggctggcctggtatcagcagaagcctggacaggcccctaagctgctgatctacggcgctaccacactggaaacaggcgtgcccagcagattttctggcagcggctctggcaccgactacaccctgacaatatccagcctccagcctgaggacttcgccacctactactgtcagcagagctggaacaccccttggacattcggccagggcaccaagctggaaatcaagagactcgagggacagcctaaggccaatcctaccgtgacactgttccctccaagcagcgaagaactccaggccaacaaggccacacttgtgtgcctgatctccgacttctaccctggggctgtgacagtggcttggaaggccgatggatctcctgtgaaagccggcgtggaaaccaccaagccatccaagcagagcaacaacaaatacgccgccagctcctacctgagcctgacacctgagcagtggaagtcccacagatcctacagctgccaagtgacccacgaaggcagcaccgtggaaaagacagtggcccctacagagtgcagcggatccggcatgcggactgaagacctcccaaaggctgtggtgttcctggagcctcaatggtacagggtgctggagaaggacagtgtgactctgaagtgccagggagcctactcccctgaggacaattccacacagtggtttcacaatgagagcctcatctcaagccaggcctccagctacttcattgacgctgccacagtggacgacagtggagagtacaggtgccagacaaacctctccaccctcagtgacccggtgcagctagaagtccatatcggctggctgttgctccaggcccctcggtgggtgttcaaggaggaagaccctattcacctgaggtgtcacagctggaagaacactgctctgcataaggtcacatatttacagaatggcaaaggcaggaagtattttcatcataattctgacttctacattccaaaagccacactcaaagacagcggctcctacttctgcagggggcttgttgggagtaaaaatgtgtcttcagagactgtgaacatcaccatcactcaaggtttggcagtgtcaaccatctcatcattctttccacctggctaccaagtgtccttctgcctggtcatggtgctgctgttcgccgtggataccggcctgtacttcagcgtcaagaccaacatccggtccagcaccagagactggaaggaccacaagttcaagtggcggaaggaccctcaggacaagagggccaagcgatctggatctggagcaacaaacttctcactactcaaacaagcaggtgacgtggaggagaatcccgggcctactagtatggactggatttggcgcatccttttccttgtcggcgctgctaccggcgcgcattccttcgaacaagttcagcttcaacagcctggcgctgagctggtcaaacctggcgcttctgtgaagatgagctgcaaagccagcggctacgccttcagcagctactggatcaactggatgaagcagaaacccggccagggactcgaatggatcggccaaatctatcccggcgacggcgacaccaactacaacggcaagttcaagggcagagccacactgaccgccgatacctctagcagcacagcctacatgcagctgagcagcctgaccagcgaagatagcgccgtgtacttctgtgcccggtccatcacaacagtcgtgggctgcgctatggactattggggccagggaacaagcgtgaccgtgtctagtacgcgtgcctctacaaagggaccctccgtgtttcctctggctcccagcagcaagtctacaagcggaggaacagccgctctgggctgcctggtcaaggattactttcccgagcctgtgaccgtgtcctggaatagcggagcactgacaagcggcgtgcacacctttccagccgtgctgcaaagcagcggcctgtactctctgagcagcgtggtcacagtgcctagctctagcctgggcacccagacctacatctgcaatgtgaaccacaagcctagcaacaccaaggtggacaagagagtggaacccaagagctgtggtaccctgcactgtgtcggcgacacctatccatccaacgatcggtgctgccatgagtgccggcctggcaacggaatggtgtctcgatgttctcggagtcagaataccgtctgtaggccatgcggacccggcttttacaatgatgtcgtgtcctccaaaccttgcaagccatgtacttggtgcaatctgcggagcggctctgagcggaaacagctgtgcactgctacccaggacacagtgtgtagatgcagagccggaactcagcccctggactcttataagcccggcgttgactgcgctccatgtccaccagggcacttttccccaggcgacaatcaagcctgtaaaccgtggacaaattgcacactggccgggaaacacaccttgcagccagccagcaattcctccgatgccatctgtgaagatcgggacccaccagccactcagcctcaagaaactcaggggcctcctgctaggcccattacagtgcaacctaccgaggcttggccccggacatctcagggaccttctacaaggccagtggaagtgccaggcggtagagctgtggctgctatccttggattgggcctcgttctcggactgttgggaccacttgcaatcctgctggctctctatctgctgcggcgggatcagagactccctccagatgctcataagccacctggcggcggatctttcaggaccccaattcaagaagaacaagccgacgctcactctaccctggctaagatccgcgccaagagaagcggatctggcgtgaagcagaccctgaatttcgacctgctgaagctggctggcgacgtggaatccaacccaggcccttctagaggcgggatccacaccatgtccgactccaaggaggtccctagccttccatttttgcgacacttgctcgaagagttggacagccatgaggacagcttgctgctgtttctgtgtcacgacgcggccccgggctgcacgacggtcacgcaagctttgtgctcgcttagccaacagcgcaagctgaccctcgcggctctggtcgagatgctctacgtgctgcagcgtatggatcttctcaagagccgcttcgggctcagcaaggagggggccgagcaattgctgggcacaagctttctcacgcgctaccgcaagctcatggtttgcgtgggtgaggagctcgactcgagcgagctacgcgctctacgcttgttcgcgtgcaacctgaatccgagcctgagcacggcgctttctgagagcagccgctttgtcgagcttgtactcgcgcttgaaaacgtaggactcgtctcgccatcgagtgtttccgtgcttgcggacatgttgcgcactcttcggcgcctcgatttgtgccagcagcttgttgagtacgaacaacaagagcaagccaggtaccgttactgttacgcggcctcgccctcattgccagttcgtacgttacgtcgggggcacggcgcgagtgaacacgagcagctgtgcatgcccgtgcaagaatcctctgacagccccgagctgctgcgcacgcccgtacaagaatcctccagcgacagccccgagcaaacgact

SEQ ID NO: 5615 - DNA, 3714 bp, Artificial Sequence
  Synthetic Polynucleotide
atggccttaccagtgaccgccttgctcctgccgctggccttgctgctccacgccgccaggccggacatccagatgacacagagccctagcagcctgtctgccagcgtgggagacagagtgaccatcacatgcaaggccagcgaccacatcaacaactggctggcctggtatcagcagaagcctggacaggcccctaagctgctgatctacggcgctaccacactggaaacaggcgtgcccagcagattttctggcagcggctctggcaccgactacaccctgacaatatccagcctccagcctgaggacttcgccacctactactgtcagcagagctggaacaccccttggacattcggccagggcaccaagctggaaatcaagagactcgagggacagcctaaggccaatcctaccgtgacactgttccctccaagcagcgaagaactccaggccaacaaggccacacttgtgtgcctgatctccgacttctaccctggggctgtgacagtggcttggaaggccgatggatctcctgtgaaagccggcgtggaaaccaccaagccatccaagcagagcaacaacaaatacgccgccagctcctacctgagcctgacacctgagcagtggaagtcccacagatcctacagctgccaagtgacccacgaaggcagcaccgtggaaaagacagtggcccctacagagtgcagcggatccggcatgcggactgaagacctcccaaaggctgtggtgttcctggagcctcaatggtacagggtgctggagaaggacagtgtgactctgaagtgccagggagcctactcccctgaggacaattccacacagtggtttcacaatgagagcctcatctcaagccaggcctccagctacttcattgacgctgccacagtggacgacagtggagagtacaggtgccagacaaacctctccaccctcagtgacccggtgcagctagaagtccatatcggctggctgttgctccaggcccctcggtgggtgttcaaggaggaagaccctattcacctgaggtgtcacagctggaagaacactgctctgcataaggtcacatatttacagaatggcaaaggcaggaagtattttcatcataattctgacttctacattccaaaagccacactcaaagacagcggctcctacttctgcagggggcttgttgggagtaaaaatgtgtcttcagagactgtgaacatcaccatcactcaaggtttggcagtgtcaaccatctcatcattctttccacctggctaccaagtgtccttctgcctggtcatggtgctgctgttcgccgtggataccggcctgtacttcagcgtcaagaccaacatccggtccagcaccagagactggaaggaccacaagttcaagtggcggaaggaccctcaggacaagagggccaagcgatctggatctggagcaacaaacttctcactactcaaacaagcaggtgacgtggaggagaatcccgggcctactagtatggactggatttggcgcatccttttccttgtcggcgctgctaccggcgcgcattccttcgaacaagttcagcttcaacagcctggcgctgagctggtcaaacctggcgcttctgtgaagatgagctgcaaagccagcggctacgccttcagcagctactggatcaactggatgaagcagaaacccggccagggactcgaatggatcggccaaatctatcccggcgacggcgacaccaactacaacggcaagttcaagggcagagccacactgaccgccgatacctctagcagcacagcctacatgcagctgagcagcctgaccagcgaagatagcgccgtgtacttctgtgcccggtccatcacaacagtcgtgggctgcgctatggactattggggccagggaacaagcgtgaccgtgtctagtacgcgtgcctctacaaagggaccctccgtgtttcctctggctcccagcagcaagtctacaagcggaggaacagccgctctgggctgcctggtcaaggattactttcccgagcctgtgaccgtgtcctggaatagcggagcactgacaagcggcgtgcacacctttccagccgtgctgcaaagcagcggcctgtactctctgagcagcgtggtcacagtgcctagctctagcctgggcacccagacctacatctgcaatgtgaaccacaagcctagcaacaccaaggtggacaagagagtggaacccaagagctgtggtaccctgcactgtgtcggcgacacctatccatccaacgatcggtgctgccatgagtgccggcctggcaacggaatggtgtctcgatgttctcggagtcagaataccgtctgtaggccatgcggacccggcttttacaatgatgtcgtgtcctccaaaccttgcaagccatgtacttggtgcaatctgcggagcggctctgagcggaaacagctgtgcactgctacccaggacacagtgtgtagatgcagagccggaactcagcccctggactcttataagcccggcgttgactgcgctccatgtccaccagggcacttttccccaggcgacaatcaagcctgtaaaccgtggacaaattgcacactggccgggaaacacaccttgcagccagccagcaattcctccgatgccatctgtgaagatcgggacccaccagccactcagcctcaagaaactcaggggcctcctgctaggcccattacagtgcaacctaccgaggcttggccccggacatctcagggaccttctacaaggccagtggaagtgccaggcggtagagctgtggctgctatccttggattgggcctcgttctcggactgttgggaccacttgcaatcctgctggctctctatctgctgcggcgggatcagagactccctccagatgctcataagccacctggcggcggatctttcaggaccccaattcaagaagaacaagccgacgctcactctaccctggctaagatccgcgccaagagaagcggatctggcgtgaagcagaccctgaatttcgacctgctgaagctggctggcgacgtggaatccaacccaggcccttctagaggccatatgaccgagtacaagcccacggtgcgcctcgccacccgcgacgacgtccccagggccgtacgcaccctcgccgccgcgttcgccgactaccccgccacgcgccacaccgtcgatccggaccgccacatcgagcgggtcaccgagctgcaagaactcttcctcacgcgcgtcgggctcgacatcggcaaggtgtgggtcgcggacgacggcgccgcggtggcggtctggaccacgccggagagcgtcgaagcgggggcggtgttcgccgagatcggcccgcgcatggccgagttgagcggttcccggctggccgcgcagcaacagatggaaggcctcctggcgccgcaccggcccaaggagcccgcgtggttcctggccaccgtcggcgtctcgcccgaccaccagggcaagggtctgggcagcgccgtcgtgctccccggagtggaggcggccgagcgcgccggggtgcccgccttcctggagacctccgcgccccgcaacctccccttctacgagcggctcggcttcaccgtcaccgccgacgtcgaggtgcccgaaggaccgcgcacctggtgcatgacccgcaagcccggtgcctga

SEQ ID NO: 5616 - DNA, 4125 bp, Artificial Sequence
  Synthetic Polynucleotide
atggccttaccagtgaccgccttgctcctgccgctggccttgctgctccacgccgccaggccggaagtgcagctggttgaatctggcggaggactggttcaggctggcggatctctgagactgtcttgtgccgccagcggcagaacctttagcatgggctggtttagacaggcccctggcaaagagagagagttcgtcgccgccatcacatactctggcggcagcccttactacgccgactctgtgaagggcagattcaccatcagccgggacaacgccaagaacaccgtgtacctccagatgaacagcctgaagcctgaggacaccgccgtgtactactgcgccgccaatccaacatacggcagcgactggaacgccgagaattggggccagggaacccaagtgacagtgtctagcggtaccggcggaggcggatctggcggcggaggtagcggtggcggaggatctgaattcgacatccagatgacacagagccctagcagcctgtctgccagcgtgggagacagagtgaccatcacatgcaaggccagcgaccacatcaacaactggctggcctggtatcagcagaagcctggacaggcccctaagctgctgatctacggcgctaccacactggaaacaggcgtgcccagcagattttctggcagcggctctggcaccgactacaccctgacaatatccagcctccagcctgaggacttcgccacctactactgtcagcagagctggaacaccccttggacattcggccagggcaccaagctggaaatcaagagactcgagggacagcctaaggccaatcctaccgtgacactgttccctccaagcagcgaagaactccaggccaacaaggccacacttgtgtgcctgatctccgacttctaccctggggctgtgacagtggcttggaaggccgatggatctcctgtgaaagccggcgtggaaaccaccaagccatccaagcagagcaacaacaaatacgccgccagctcctacctgagcctgacacctgagcagtggaagtcccacagatcctacagctgccaagtgacccacgaaggcagcaccgtggaaaagacagtggcccctacagagtgcagcggatccggcatgcggactgaagacctcccaaaggctgtggtgttcctggagcctcaatggtacagggtgctggagaaggacagtgtgactctgaagtgccagggagcctactcccctgaggacaattccacacagtggtttcacaatgagagcctcatctcaagccaggcctccagctacttcattgacgctgccacagtggacgacagtggagagtacaggtgccagacaaacctctccaccctcagtgacccggtgcagctagaagtccatatcggctggctgttgctccaggcccctcggtgggtgttcaaggaggaagaccctattcacctgaggtgtcacagctggaagaacactgctctgcataaggtcacatatttacagaatggcaaaggcaggaagtattttcatcataattctgacttctacattccaaaagccacactcaaagacagcggctcctacttctgcagggggcttgttgggagtaaaaatgtgtcttcagagactgtgaacatcaccatcactcaaggtttggcagtgtcaaccatctcatcattctttccacctggctaccaagtgtccttctgcctggtcatggtgctgctgttcgccgtggataccggcctgtacttcagcgtcaagaccaacatccggtccagcaccagagactggaaggaccacaagttcaagtggcggaaggaccctcaggacaagagggccaagcgatctggatctggagcaacaaacttctcactactcaaacaagcaggtgacgtggaggagaatcccgggcctactagtatggactggatttggcgcatccttttccttgtcggcgctgctaccggcgcgcattccttcgaacaagttcagcttcaacagcctggcgctgagctggtcaaacctggcgcttctgtgaagatgagctgcaaagccagcggctacgccttcagcagctactggatcaactggatgaagcagaaacccggccagggactcgaatggatcggccaaatctatcccggcgacggcgacaccaactacaacggcaagttcaagggcagagccacactgaccgccgatacctctagcagcacagcctacatgcagctgagcagcctgaccagcgaagatagcgccgtgtacttctgtgcccggtccatcacaacagtcgtgggctgcgctatggactattggggccagggaacaagcgtgaccgtgtctagtacgcgtgcctctacaaagggaccctccgtgtttcctctggctcccagcagcaagtctacaagcggaggaacagccgctctgggctgcctggtcaaggattactttcccgagcctgtgaccgtgtcctggaatagcggagcactgacaagcggcgtgcacacctttccagccgtgctgcaaagcagcggcctgtactctctgagcagcgtggtcacagtgcctagctctagcctgggcacccagacctacatctgcaatgtgaaccacaagcctagcaacaccaaggtggacaagagagtggaacccaagagctgtggtaccctgcactgtgtcggcgacacctatccatccaacgatcggtgctgccatgagtgccggcctggcaacggaatggtgtctcgatgttctcggagtcagaataccgtctgtaggccatgcggacccggcttttacaatgatgtcgtgtcctccaaaccttgcaagccatgtacttggtgcaatctgcggagcggctctgagcggaaacagctgtgcactgctacccaggacacagtgtgtagatgcagagccggaactcagcccctggactcttataagcccggcgttgactgcgctccatgtccaccagggcacttttccccaggcgacaatcaagcctgtaaaccgtggacaaattgcacactggccgggaaacacaccttgcagccagccagcaattcctccgatgccatctgtgaagatcgggacccaccagccactcagcctcaagaaactcaggggcctcctgctaggcccattacagtgcaacctaccgaggcttggccccggacatctcagggaccttctacaaggccagtggaagtgccaggcggtagagctgtggctgctatccttggattgggcctcgttctcggactgttgggaccacttgcaatcctgctggctctctatctgctgcggcgggatcagagactccctccagatgctcataagccacctggcggcggatctttcaggaccccaattcaagaagaacaagccgacgctcactctaccctggctaagatccgcgccaagagaagcggatctggcgtgaagcagaccctgaatttcgacctgctgaagctggctggcgacgtggaatccaacccaggcccttctagaggccatatgaccgagtacaagcccacggtgcgcctcgccacccgcgacgacgtccccagggccgtacgcaccctcgccgccgcgttcgccgactaccccgccacgcgccacaccgtcgatccggaccgccacatcgagcgggtcaccgagctgcaagaactcttcctcacgcgcgtcgggctcgacatcggcaaggtgtgggtcgcggacgacggcgccgcggtggcggtctggaccacgccggagagcgtcgaagcgggggcggtgttcgccgagatcggcccgcgcatggccgagttgagcggttcccggctggccgcgcagcaacagatggaaggcctcctggcgccgcaccggcccaaggagcccgcgtggttcctggccaccgtcggcgtctcgcccgaccaccagggcaagggtctgggcagcgccgtcgtgctccccggagtggaggcggccgagcgcgccggggtgcccgccttcctggagacctccgcgccccgcaacctccccttctacgagcggctcggcttcaccgtcaccgccgacgtcgaggtgcccgaaggaccgcgcacctggtgcatgacccgcaagcccggtgcctga

SEQ ID NO: 5617 - DNA, 4536 bp, Artificial Sequence
  Synthetic Polynucleotide
atggccttaccagtgaccgccttgctcctgccgctggccttgctgctccacgccgccaggccggaagtgcagctggttgaatctggcggaggactggttcaggctggcggatctctgagactgtcttgtgccgccagcggcagaacctttagcatgggctggtttagacaggcccctggcaaagagagagagttcgtcgccgccatcacatactctggcggcagcccttactacgccgactctgtgaagggcagattcaccatcagccgggacaacgccaagaacaccgtgtacctccagatgaacagcctgaagcctgaggacaccgccgtgtactactgcgccgccaatccaacatacggcagcgactggaacgccgagaattggggccagggaacccaagtgacagtgtctagcggtaccggcggaggcggatctggcggcggaggtagcggtggcggaggatctgaattcgacatccagatgacacagagccctagcagcctgtctgccagcgtgggagacagagtgaccatcacatgcaaggccagcgaccacatcaacaactggctggcctggtatcagcagaagcctggacaggcccctaagctgctgatctacggcgctaccacactggaaacaggcgtgcccagcagattttctggcagcggctctggcaccgactacaccctgacaatatccagcctccagcctgaggacttcgccacctactactgtcagcagagctggaacaccccttggacattcggccagggcaccaagctggaaatcaagagactcgagggacagcctaaggccaatcctaccgtgacactgttccctccaagcagcgaagaactccaggccaacaaggccacacttgtgtgcctgatctccgacttctaccctggggctgtgacagtggcttggaaggccgatggatctcctgtgaaagccggcgtggaaaccaccaagccatccaagcagagcaacaacaaatacgccgccagctcctacctgagcctgacacctgagcagtggaagtcccacagatcctacagctgccaagtgacccacgaaggcagcaccgtggaaaagacagtggcccctacagagtgcagcggatccggcatgcggactgaagacctcccaaaggctgtggtgttcctggagcctcaatggtacagggtgctggagaaggacagtgtgactctgaagtgccagggagcctactcccctgaggacaattccacacagtggtttcacaatgagagcctcatctcaagccaggcctccagctacttcattgacgctgccacagtggacgacagtggagagtacaggtgccagacaaacctctccaccctcagtgacccggtgcagctagaagtccatatcggctggctgttgctccaggcccctcggtgggtgttcaaggaggaagaccctattcacctgaggtgtcacagctggaagaacactgctctgcataaggtcacatatttacagaatggcaaaggcaggaagtattttcatcataattctgacttctacattccaaaagccacactcaaagacagcggctcctacttctgcagggggcttgttgggagtaaaaatgtgtcttcagagactgtgaacatcaccatcactcaaggtttggcagtgtcaaccatctcatcattctttccacctggctaccaagtgtccttctgcctggtcatggtgctgctgttcgccgtggataccggcctgtacttcagcgtcaagaccaacatccggtccagcaccagagactggaaggaccacaagttcaagtggcggaaggaccctcaggacaagagggccaagcgatctggatctggagcaacaaacttctcactactcaaacaagcaggtgacgtggaggagaatcccgggcctactagtatggactggatttggcgcatccttttccttgtcggcgctgctaccggcgcgcattccgggcccgaagtgcaactggttgaatccggtggcggcctggtgcaagcaggcggatctctcagacttagctgtgccgcctccggcagaaccttcacaatgggatggtttaggcaggctccagggaaagagagagagttcgtcgccgccatctctctgtctcccacactggcctactacgccgactctgtgaaaggccggttcaccatctccagagataatgccaagaacaccgtggtgctgcaaatgaactctctgaaacccgaggatacagccctgtactattgtgccgctgaccggaagtccgtgatgagcatcagacccgattactggggacagggcacacaagtcacagtgtcctctggatccggcggcggaggatctggcggaggcggatctgggggcggaggctctttcgaacaagttcagcttcaacagcctggcgctgagctggtcaaacctggcgcttctgtgaagatgagctgcaaagccagcggctacgccttcagcagctactggatcaactggatgaagcagaaacccggccagggactcgaatggatcggccaaatctatcccggcgacggcgacaccaactacaacggcaagttcaagggcagagccacactgaccgccgatacctctagcagcacagcctacatgcagctgagcagcctgaccagcgaagatagcgccgtgtacttctgtgcccggtccatcacaacagtcgtgggctgcgctatggactattggggccagggaacaagcgtgaccgtgtctagtacgcgtgcctctacaaagggaccctccgtgtttcctctggctcccagcagcaagtctacaagcggaggaacagccgctctgggctgcctggtcaaggattactttcccgagcctgtgaccgtgtcctggaatagcggagcactgacaagcggcgtgcacacctttccagccgtgctgcaaagcagcggcctgtactctctgagcagcgtggtcacagtgcctagctctagcctgggcacccagacctacatctgcaatgtgaaccacaagcctagcaacaccaaggtggacaagagagtggaacccaagagctgtggtaccctgcactgtgtcggcgacacctatccatccaacgatcggtgctgccatgagtgccggcctggcaacggaatggtgtctcgatgttctcggagtcagaataccgtctgtaggccatgcggacccggcttttacaatgatgtcgtgtcctccaaaccttgcaagccatgtacttggtgcaatctgcggagcggctctgagcggaaacagctgtgcactgctacccaggacacagtgtgtagatgcagagccggaactcagcccctggactcttataagcccggcgttgactgcgctccatgtccaccagggcacttttccccaggcgacaatcaagcctgtaaaccgtggacaaattgcacactggccgggaaacacaccttgcagccagccagcaattcctccgatgccatctgtgaagatcgggacccaccagccactcagcctcaagaaactcaggggcctcctgctaggcccattacagtgcaacctaccgaggcttggccccggacatctcagggaccttctacaaggccagtggaagtgccaggcggtagagctgtggctgctatccttggattgggcctcgttctcggactgttgggaccacttgcaatcctgctggctctctatctgctgcggcgggatcagagactccctccagatgctcataagccacctggcggcggatctttcaggaccccaattcaagaagaacaagccgacgctcactctaccctggctaagatccgcgccaagagaagcggatctggcgtgaagcagaccctgaatttcgacctgctgaagctggctggcgacgtggaatccaacccaggcccttctagaggccatatgaccgagtacaagcccacggtgcgcctcgccacccgcgacgacgtccccagggccgtacgcaccctcgccgccgcgttcgccgactaccccgccacgcgccacaccgtcgatccggaccgccacatcgagcgggtcaccgagctgcaagaactcttcctcacgcgcgtcgggctcgacatcggcaaggtgtgggtcgcggacgacggcgccgcggtggcggtctggaccacgccggagagcgtcgaagcgggggcggtgttcgccgagatcggcccgcgcatggccgagttgagcggttcccggctggccgcgcagcaacagatggaaggcctcctggcgccgcaccggcccaaggagcccgcgtggttcctggccaccgtcggcgtctcgcccgaccaccagggcaagggtctgggcagcgccgtcgtgctccccggagtggaggcggccgagcgcgccggggtgcccgccttcctggagacctccgcgccccgcaacctccccttctacgagcggctcggcttcaccgtcaccgccgacgtcgaggtgcccgaaggaccgcgcacctggtgcatgacccgcaagcccggtgcctga

SEQ ID NO: 5618 - DNA, 3735 bp, Artificial Sequence
  Synthetic Polynucleotide
atggccttaccagtgaccgccttgctcctgccgctggccttgctgctccacgccgccaggccggaagtgcagctggttgaatctggcggaggactggttcaggctggcggatctctgagactgtcttgtgccgccagcggcagaacctttagcatgggctggtttagacaggcccctggcaaagagagagagttcgtcgccgccatcacatactctggcggcagcccttactacgccgactctgtgaagggcagattcaccatcagccgggacaacgccaagaacaccgtgtacctccagatgaacagcctgaagcctgaggacaccgccgtgtactactgcgccgccaatccaacatacggcagcgactggaacgccgagaattggggccagggaacccaagtgacagtgtctagcctcgagggacagcctaaggccaatcctaccgtgacactgttccctccaagcagcgaagaactccaggccaacaaggccacacttgtgtgcctgatctccgacttctaccctggggctgtgacagtggcttggaaggccgatggatctcctgtgaaagccggcgtggaaaccaccaagccatccaagcagagcaacaacaaatacgccgccagctcctacctgagcctgacacctgagcagtggaagtcccacagatcctacagctgccaagtgacccacgaaggcagcaccgtggaaaagacagtggcccctacagagtgcagcggatccggcatgcggactgaagacctcccaaaggctgtggtgttcctggagcctcaatggtacagggtgctggagaaggacagtgtgactctgaagtgccagggagcctactcccctgaggacaattccacacagtggtttcacaatgagagcctcatctcaagccaggcctccagctacttcattgacgctgccacagtggacgacagtggagagtacaggtgccagacaaacctctccaccctcagtgacccggtgcagctagaagtccatatcggctggctgttgctccaggcccctcggtgggtgttcaaggaggaagaccctattcacctgaggtgtcacagctggaagaacactgctctgcataaggtcacatatttacagaatggcaaaggcaggaagtattttcatcataattctgacttctacattccaaaagccacactcaaagacagcggctcctacttctgcagggggcttgttgggagtaaaaatgtgtcttcagagactgtgaacatcaccatcactcaaggtttggcagtgtcaaccatctcatcattctttccacctggctaccaagtgtccttctgcctggtcatggtgctgctgttcgccgtggataccggcctgtacttcagcgtcaagaccaacatccggtccagcaccagagactggaaggaccacaagttcaagtggcggaaggaccctcaggacaagagggccaagcgatctggatctggagcaacaaacttctcactactcaaacaagcaggtgacgtggaggagaatcccgggcctactagtatggactggatttggcgcatccttttccttgtcggcgctgctaccggcgcgcattccgggcccgaagtgcaactggttgaatccggtggcggcctggtgcaagcaggcggatctctcagacttagctgtgccgcctccggcagaaccttcacaatgggatggtttaggcaggctccagggaaagagagagagttcgtcgccgccatctctctgtctcccacactggcctactacgccgactctgtgaaaggccggttcaccatctccagagataatgccaagaacaccgtggtgctgcaaatgaactctctgaaacccgaggatacagccctgtactattgtgccgctgaccggaagtccgtgatgagcatcagacccgattactggggacagggcacacaagtcacagtgtcctctacgcgtgcctctacaaagggaccctccgtgtttcctctggctcccagcagcaagtctacaagcggaggaacagccgctctgggctgcctggtcaaggattactttcccgagcctgtgaccgtgtcctggaatagcggagcactgacaagcggcgtgcacacctttccagccgtgctgcaaagcagcggcctgtactctctgagcagcgtggtcacagtgcctagctctagcctgggcacccagacctacatctgcaatgtgaaccacaagcctagcaacaccaaggtggacaagagagtggaacccaagagctgtggtaccctgcactgtgtcggcgacacctatccatccaacgatcggtgctgccatgagtgccggcctggcaacggaatggtgtctcgatgttctcggagtcagaataccgtctgtaggccatgcggacccggcttttacaatgatgtcgtgtcctccaaaccttgcaagccatgtacttggtgcaatctgcggagcggctctgagcggaaacagctgtgcactgctacccaggacacagtgtgtagatgcagagccggaactcagcccctggactcttataagcccggcgttgactgcgctccatgtccaccagggcacttttccccaggcgacaatcaagcctgtaaaccgtggacaaattgcacactggccgggaaacacaccttgcagccagccagcaattcctccgatgccatctgtgaagatcgggacccaccagccactcagcctcaagaaactcaggggcctcctgctaggcccattacagtgcaacctaccgaggcttggccccggacatctcagggaccttctacaaggccagtggaagtgccaggcggtagagctgtggctgctatccttggattgggcctcgttctcggactgttgggaccacttgcaatcctgctggctctctatctgctgcggcgggatcagagactccctccagatgctcataagccacctggcggcggatctttcaggaccccaattcaagaagaacaagccgacgctcactctaccctggctaagatccgcgccaagagaagcggatctggcgtgaagcagaccctgaatttcgacctgctgaagctggctggcgacgtggaatccaacccaggcccttctagaggccatatgaccgagtacaagcccacggtgcgcctcgccacccgcgacgacgtccccagggccgtacgcaccctcgccgccgcgttcgccgactaccccgccacgcgccacaccgtcgatccggaccgccacatcgagcgggtcaccgagctgcaagaactcttcctcacgcgcgtcgggctcgacatcggcaaggtgtgggtcgcggacgacggcgccgcggtggcggtctggaccacgccggagagcgtcgaagcgggggcggtgttcgccgagatcggcccgcgcatggccgagttgagcggttcccggctggccgcgcagcaacagatggaaggcctcctggcgccgcaccggcccaaggagcccgcgtggttcctggccaccgtcggcgtctcgcccgaccaccagggcaagggtctgggcagcgccgtcgtgctccccggagtggaggcggccgagcgcgccggggtgcccgccttcctggagacctccgcgccccgcaacctccccttctacgagcggctcggcttcaccgtcaccgccgacgtcgaggtgcccgaaggaccgcgcacctggtgcatgacccgcaagcccggtgcctga

SEQ ID NO: 5619 - DNA, 3759 bp, Artificial Sequence
  Synthetic Polynucleotide
atggccttaccagtgaccgccttgctcctgccgctggccttgctgctccacgccgccaggccggacatccagatgacacagagccctagcagcctgtctgccagcgtgggagacagagtgaccatcacatgcaaggccagcgaccacatcaacaactggctggcctggtatcagcagaagcctggacaggcccctaagctgctgatctacggcgctaccacactggaaacaggcgtgcccagcagattttctggcagcggctctggcaccgactacaccctgacaatatccagcctccagcctgaggacttcgccacctactactgtcagcagagctggaacaccccttggacattcggccagggcaccaagctggaaatcaagagactcgaggacctgaagaacgtgttcccacctgaggtggccgtgttcgagcctagcgaggccgagatcagccacacccagaaagccaccctcgtgtgcctggctaccggcttctaccccgaccatgtggaactgtcttggtgggtcaacggcaaagaggtgcacagcggcgtgtctaccgacccccagccactgaaagaacagcccgccctgaacgacagccggtactgcctgagcagcagactgagagtgtccgccaccttctggcagaacccccggaaccacttcagatgccaggtgcagttctacggcctgagcgagaacgacgagtggacccaggacagagccaagcccgtgacccagatcgtgtctgccgaagcctggggcagagccgattgcggatccggcatgcggactgaagacctcccaaaggctgtggtgttcctggagcctcaatggtacagggtgctggagaaggacagtgtgactctgaagtgccagggagcctactcccctgaggacaattccacacagtggtttcacaatgagagcctcatctcaagccaggcctccagctacttcattgacgctgccacagtggacgacagtggagagtacaggtgccagacaaacctctccaccctcagtgacccggtgcagctagaagtccatatcggctggctgttgctccaggcccctcggtgggtgttcaaggaggaagaccctattcacctgaggtgtcacagctggaagaacactgctctgcataaggtcacatatttacagaatggcaaaggcaggaagtattttcatcataattctgacttctacattccaaaagccacactcaaagacagcggctcctacttctgcagggggcttgttgggagtaaaaatgtgtcttcagagactgtgaacatcaccatcactcaaggtttggcagtgtcaaccatctcatcattctttccacctggctaccaagtgtccttctgcctggtcatggtgctgctgttcgccgtggataccggcctgtacttcagcgtcaagaccaacatccggtccagcaccagagactggaaggaccacaagttcaagtggcggaaggaccctcaggacaagagggccaagcgatctggatctggagcaacaaacttctcactactcaaacaagcaggtgacgtggaggagaatcccgggcctactagtatggactggatttggcgcatccttttccttgtcggcgctgctaccggcgcgcattccttcgaacaagttcagcttcaacagcctggcgctgagctggtcaaacctggcgcttctgtgaagatgagctgcaaagccagcggctacgccttcagcagctactggatcaactggatgaagcagaaacccggccagggactcgaatggatcggccaaatctatcccggcgacggcgacaccaactacaacggcaagttcaagggcagagccacactgaccgccgatacctctagcagcacagcctacatgcagctgagcagcctgaccagcgaagatagcgccgtgtacttctgtgcccggtccatcacaacagtcgtgggctgcgctatggactattggggccagggaacaagcgtgaccgtgtctagtacgcgtatccagaaccctgatcctgccgtgtaccagctgcgggatagcaagagcagcgacaagagcgtgtgtctgttcaccgacttcgacagccagaccaacgtgtcccagagcaaggactccgacgtgtacatcaccgataagaccgtgctggacatgcggagcatggacttcaagagcaactccgccgtggcctggtccaacaagtccgatttcgcctgcgccaacgccttcaacaacagcattatccccgaggacacattcttcccaagccccgagagcagctgcggtaccctgcactgtgtcggcgacacctatccatccaacgatcggtgctgccatgagtgccggcctggcaacggaatggtgtctcgatgttctcggagtcagaataccgtctgtaggccatgcggacccggcttttacaatgatgtcgtgtcctccaaaccttgcaagccatgtacttggtgcaatctgcggagcggctctgagcggaaacagctgtgcactgctacccaggacacagtgtgtagatgcagagccggaactcagcccctggactcttataagcccggcgttgactgcgctccatgtccaccagggcacttttccccaggcgacaatcaagcctgtaaaccgtggacaaattgcacactggccgggaaacacaccttgcagccagccagcaattcctccgatgccatctgtgaagatcgggacccaccagccactcagcctcaagaaactcaggggcctcctgctaggcccattacagtgcaacctaccgaggcttggccccggacatctcagggaccttctacaaggccagtggaagtgccaggcggtagagctgtggctgctatccttggattgggcctcgttctcggactgttgggaccacttgcaatcctgctggctctctatctgctgcggcgggatcagagactccctccagatgctcataagccacctggcggcggatctttcaggaccccaattcaagaagaacaagccgacgctcactctaccctggctaagatccgcgccaagagaagcggatctggcgtgaagcagaccctgaatttcgacctgctgaagctggctggcgacgtggaatccaacccaggcccttctagaggccatatgaccgagtacaagcccacggtgcgcctcgccacccgcgacgacgtccccagggccgtacgcaccctcgccgccgcgttcgccgactaccccgccacgcgccacaccgtcgatccggaccgccacatcgagcgggtcaccgagctgcaagaactcttcctcacgcgcgtcgggctcgacatcggcaaggtgtgggtcgcggacgacggcgccgcggtggcggtctggaccacgccggagagcgtcgaagcgggggcggtgttcgccgagatcggcccgcgcatggccgagttgagcggttcccggctggccgcgcagcaacagatggaaggcctcctggcgccgcaccggcccaaggagcccgcgtggttcctggccaccgtcggcgtctcgcccgaccaccagggcaagggtctgggcagcgccgtcgtgctccccggagtggaggcggccgagcgcgccggggtgcccgccttcctggagacctccgcgccccgcaacctccccttctacgagcggctcggcttcaccgtcaccgccgacgtcgaggtgcccgaaggaccgcgcacctggtgcatgacccgcaagcccggtgcctga

SEQ ID NO: 5620 - DNA, 4170 bp, Artificial Sequence
  Synthetic Polynucleotide
atggccttaccagtgaccgccttgctcctgccgctggccttgctgctccacgccgccaggccggaagtgcagctggttgaatctggcggaggactggttcaggctggcggatctctgagactgtcttgtgccgccagcggcagaacctttagcatgggctggtttagacaggcccctggcaaagagagagagttcgtcgccgccatcacatactctggcggcagcccttactacgccgactctgtgaagggcagattcaccatcagccgggacaacgccaagaacaccgtgtacctccagatgaacagcctgaagcctgaggacaccgccgtgtactactgcgccgccaatccaacatacggcagcgactggaacgccgagaattggggccagggaacccaagtgacagtgtctagcggtaccggcggaggcggatctggcggcggaggtagcggtggcggaggatctgaattcgacatccagatgacacagagccctagcagcctgtctgccagcgtgggagacagagtgaccatcacatgcaaggccagcgaccacatcaacaactggctggcctggtatcagcagaagcctggacaggcccctaagctgctgatctacggcgctaccacactggaaacaggcgtgcccagcagattttctggcagcggctctggcaccgactacaccctgacaatatccagcctccagcctgaggacttcgccacctactactgtcagcagagctggaacaccccttggacattcggccagggcaccaagctggaaatcaagagactcgaggacctgaagaacgtgttcccacctgaggtggccgtgttcgagcctagcgaggccgagatcagccacacccagaaagccaccctcgtgtgcctggctaccggcttctaccccgaccatgtggaactgtcttggtgggtcaacggcaaagaggtgcacagcggcgtgtctaccgacccccagccactgaaagaacagcccgccctgaacgacagccggtactgcctgagcagcagactgagagtgtccgccaccttctggcagaacccccggaaccacttcagatgccaggtgcagttctacggcctgagcgagaacgacgagtggacccaggacagagccaagcccgtgacccagatcgtgtctgccgaagcctggggcagagccgattgcggatccggcatgcggactgaagacctcccaaaggctgtggtgttcctggagcctcaatggtacagggtgctggagaaggacagtgtgactctgaagtgccagggagcctactcccctgaggacaattccacacagtggtttcacaatgagagcctcatctcaagccaggcctccagctacttcattgacgctgccacagtggacgacagtggagagtacaggtgccagacaaacctctccaccctcagtgacccggtgcagctagaagtccatatcggctggctgttgctccaggcccctcggtgggtgttcaaggaggaagaccctattcacctgaggtgtcacagctggaagaacactgctctgcataaggtcacatatttacagaatggcaaaggcaggaagtattttcatcataattctgacttctacattccaaaagccacactcaaagacagcggctcctacttctgcagggggcttgttgggagtaaaaatgtgtcttcagagactgtgaacatcaccatcactcaaggtttggcagtgtcaaccatctcatcattctttccacctggctaccaagtgtccttctgcctggtcatggtgctgctgttcgccgtggataccggcctgtacttcagcgtcaagaccaacatccggtccagcaccagagactggaaggaccacaagttcaagtggcggaaggaccctcaggacaagagggccaagcgatctggatctggagcaacaaacttctcactactcaaacaagcaggtgacgtggaggagaatcccgggcctactagtatggactggatttggcgcatccttttccttgtcggcgctgctaccggcgcgcattccttcgaacaagttcagcttcaacagcctggcgctgagctggtcaaacctggcgcttctgtgaagatgagctgcaaagccagcggctacgccttcagcagctactggatcaactggatgaagcagaaacccggccagggactcgaatggatcggccaaatctatcccggcgacggcgacaccaactacaacggcaagttcaagggcagagccacactgaccgccgatacctctagcagcacagcctacatgcagctgagcagcctgaccagcgaagatagcgccgtgtacttctgtgcccggtccatcacaacagtcgtgggctgcgctatggactattggggccagggaacaagcgtgaccgtgtctagtacgcgtatccagaaccctgatcctgccgtgtaccagctgcgggatagcaagagcagcgacaagagcgtgtgtctgttcaccgacttcgacagccagaccaacgtgtcccagagcaaggactccgacgtgtacatcaccgataagaccgtgctggacatgcggagcatggacttcaagagcaactccgccgtggcctggtccaacaagtccgatttcgcctgcgccaacgccttcaacaacagcattatccccgaggacacattcttcccaagccccgagagcagctgcggtaccctgcactgtgtcggcgacacctatccatccaacgatcggtgctgccatgagtgccggcctggcaacggaatggtgtctcgatgttctcggagtcagaataccgtctgtaggccatgcggacccggcttttacaatgatgtcgtgtcctccaaaccttgcaagccatgtacttggtgcaatctgcggagcggctctgagcggaaacagctgtgcactgctacccaggacacagtgtgtagatgcagagccggaactcagcccctggactcttataagcccggcgttgactgcgctccatgtccaccagggcacttttccccaggcgacaatcaagcctgtaaaccgtggacaaattgcacactggccgggaaacacaccttgcagccagccagcaattcctccgatgccatctgtgaagatcgggacccaccagccactcagcctcaagaaactcaggggcctcctgctaggcccattacagtgcaacctaccgaggcttggccccggacatctcagggaccttctacaaggccagtggaagtgccaggcggtagagctgtggctgctatccttggattgggcctcgttctcggactgttgggaccacttgcaatcctgctggctctctatctgctgcggcgggatcagagactccctccagatgctcataagccacctggcggcggatctttcaggaccccaattcaagaagaacaagccgacgctcactctaccctggctaagatccgcgccaagagaagcggatctggcgtgaagcagaccctgaatttcgacctgctgaagctggctggcgacgtggaatccaacccaggcccttctagaggccatatgaccgagtacaagcccacggtgcgcctcgccacccgcgacgacgtccccagggccgtacgcaccctcgccgccgcgttcgccgactaccccgccacgcgccacaccgtcgatccggaccgccacatcgagcgggtcaccgagctgcaagaactcttcctcacgcgcgtcgggctcgacatcggcaaggtgtgggtcgcggacgacggcgccgcggtggcggtctggaccacgccggagagcgtcgaagcgggggcggtgttcgccgagatcggcccgcgcatggccgagttgagcggttcccggctggccgcgcagcaacagatggaaggcctcctggcgccgcaccggcccaaggagcccgcgtggttcctggccaccgtcggcgtctcgcccgaccaccagggcaagggtctgggcagcgccgtcgtgctccccggagtggaggcggccgagcgcgccggggtgcccgccttcctggagacctccgcgccccgcaacctccccttctacgagcggctcggcttcaccgtcaccgccgacgtcgaggtgcccgaaggaccgcgcacctggtgcatgacccgcaagcccggtgcctga

SEQ ID NO: 5621 - DNA, 4581 bp, Artificial Sequence
  Synthetic Polynucleotide
atggccttaccagtgaccgccttgctcctgccgctggccttgctgctccacgccgccaggccggaagtgcagctggttgaatctggcggaggactggttcaggctggcggatctctgagactgtcttgtgccgccagcggcagaacctttagcatgggctggtttagacaggcccctggcaaagagagagagttcgtcgccgccatcacatactctggcggcagcccttactacgccgactctgtgaagggcagattcaccatcagccgggacaacgccaagaacaccgtgtacctccagatgaacagcctgaagcctgaggacaccgccgtgtactactgcgccgccaatccaacatacggcagcgactggaacgccgagaattggggccagggaacccaagtgacagtgtctagcggtaccggcggaggcggatctggcggcggaggtagcggtggcggaggatctgaattcgacatccagatgacacagagccctagcagcctgtctgccagcgtgggagacagagtgaccatcacatgcaaggccagcgaccacatcaacaactggctggcctggtatcagcagaagcctggacaggcccctaagctgctgatctacggcgctaccacactggaaacaggcgtgcccagcagattttctggcagcggctctggcaccgactacaccctgacaatatccagcctccagcctgaggacttcgccacctactactgtcagcagagctggaacaccccttggacattcggccagggcaccaagctggaaatcaagagactcgaggacctgaagaacgtgttcccacctgaggtggccgtgttcgagcctagcgaggccgagatcagccacacccagaaagccaccctcgtgtgcctggctaccggcttctaccccgaccatgtggaactgtcttggtgggtcaacggcaaagaggtgcacagcggcgtgtctaccgacccccagccactgaaagaacagcccgccctgaacgacagccggtactgcctgagcagcagactgagagtgtccgccaccttctggcagaacccccggaaccacttcagatgccaggtgcagttctacggcctgagcgagaacgacgagtggacccaggacagagccaagcccgtgacccagatcgtgtctgccgaagcctggggcagagccgattgcggatccggcatgcggactgaagacctcccaaaggctgtggtgttcctggagcctcaatggtacagggtgctggagaaggacagtgtgactctgaagtgccagggagcctactcccctgaggacaattccacacagtggtttcacaatgagagcctcatctcaagccaggcctccagctacttcattgacgctgccacagtggacgacagtggagagtacaggtgccagacaaacctctccaccctcagtgacccggtgcagctagaagtccatatcggctggctgttgctccaggcccctcggtgggtgttcaaggaggaagaccctattcacctgaggtgtcacagctggaagaacactgctctgcataaggtcacatatttacagaatggcaaaggcaggaagtattttcatcataattctgacttctacattccaaaagccacactcaaagacagcggctcctacttctgcagggggcttgttgggagtaaaaatgtgtcttcagagactgtgaacatcaccatcactcaaggtttggcagtgtcaaccatctcatcattctttccacctggctaccaagtgtccttctgcctggtcatggtgctgctgttcgccgtggataccggcctgtacttcagcgtcaagaccaacatccggtccagcaccagagactggaaggaccacaagttcaagtggcggaaggaccctcaggacaagagggccaagcgatctggatctggagcaacaaacttctcactactcaaacaagcaggtgacgtggaggagaatcccgggcctactagtatggactggatttggcgcatccttttccttgtcggcgctgctaccggcgcgcattccgggcccgaagtgcaactggttgaatccggtggcggcctggtgcaagcaggcggatctctcagacttagctgtgccgcctccggcagaaccttcacaatgggatggtttaggcaggctccagggaaagagagagagttcgtcgccgccatctctctgtctcccacactggcctactacgccgactctgtgaaaggccggttcaccatctccagagataatgccaagaacaccgtggtgctgcaaatgaactctctgaaacccgaggatacagccctgtactattgtgccgctgaccggaagtccgtgatgagcatcagacccgattactggggacagggcacacaagtcacagtgtcctctggatccggcggcggaggatctggcggaggcggatctgggggcggaggctctttcgaacaagttcagcttcaacagcctggcgctgagctggtcaaacctggcgcttctgtgaagatgagctgcaaagccagcggctacgccttcagcagctactggatcaactggatgaagcagaaacccggccagggactcgaatggatcggccaaatctatcccggcgacggcgacaccaactacaacggcaagttcaagggcagagccacactgaccgccgatacctctagcagcacagcctacatgcagctgagcagcctgaccagcgaagatagcgccgtgtacttctgtgcccggtccatcacaacagtcgtgggctgcgctatggactattggggccagggaacaagcgtgaccgtgtctagtacgcgtatccagaaccctgatcctgccgtgtaccagctgcgggatagcaagagcagcgacaagagcgtgtgtctgttcaccgacttcgacagccagaccaacgtgtcccagagcaaggactccgacgtgtacatcaccgataagaccgtgctggacatgcggagcatggacttcaagagcaactccgccgtggcctggtccaacaagtccgatttcgcctgcgccaacgccttcaacaacagcattatccccgaggacacattcttcccaagccccgagagcagctgcggtaccctgcactgtgtcggcgacacctatccatccaacgatcggtgctgccatgagtgccggcctggcaacggaatggtgtctcgatgttctcggagtcagaataccgtctgtaggccatgcggacccggcttttacaatgatgtcgtgtcctccaaaccttgcaagccatgtacttggtgcaatctgcggagcggctctgagcggaaacagctgtgcactgctacccaggacacagtgtgtagatgcagagccggaactcagcccctggactcttataagcccggcgttgactgcgctccatgtccaccagggcacttttccccaggcgacaatcaagcctgtaaaccgtggacaaattgcacactggccgggaaacacaccttgcagccagccagcaattcctccgatgccatctgtgaagatcgggacccaccagccactcagcctcaagaaactcaggggcctcctgctaggcccattacagtgcaacctaccgaggcttggccccggacatctcagggaccttctacaaggccagtggaagtgccaggcggtagagctgtggctgctatccttggattgggcctcgttctcggactgttgggaccacttgcaatcctgctggctctctatctgctgcggcgggatcagagactccctccagatgctcataagccacctggcggcggatctttcaggaccccaattcaagaagaacaagccgacgctcactctaccctggctaagatccgcgccaagagaagcggatctggcgtgaagcagaccctgaatttcgacctgctgaagctggctggcgacgtggaatccaacccaggcccttctagaggccatatgaccgagtacaagcccacggtgcgcctcgccacccgcgacgacgtccccagggccgtacgcaccctcgccgccgcgttcgccgactaccccgccacgcgccacaccgtcgatccggaccgccacatcgagcgggtcaccgagctgcaagaactcttcctcacgcgcgtcgggctcgacatcggcaaggtgtgggtcgcggacgacggcgccgcggtggcggtctggaccacgccggagagcgtcgaagcgggggcggtgttcgccgagatcggcccgcgcatggccgagttgagcggttcccggctggccgcgcagcaacagatggaaggcctcctggcgccgcaccggcccaaggagcccgcgtggttcctggccaccgtcggcgtctcgcccgaccaccagggcaagggtctgggcagcgccgtcgtgctccccggagtggaggcggccgagcgcgccggggtgcccgccttcctggagacctccgcgccccgcaacctccccttctacgagcggctcggcttcaccgtcaccgccgacgtcgaggtgcccgaaggaccgcgcacctggtgcatgacccgcaagcccggtgcctga

SEQ ID NO: 5622 - DNA, 3780 bp, Artificial Sequence
  Synthetic Polynucleotide
atggccttaccagtgaccgccttgctcctgccgctggccttgctgctccacgccgccaggccggaagtgcagctggttgaatctggcggaggactggttcaggctggcggatctctgagactgtcttgtgccgccagcggcagaacctttagcatgggctggtttagacaggcccctggcaaagagagagagttcgtcgccgccatcacatactctggcggcagcccttactacgccgactctgtgaagggcagattcaccatcagccgggacaacgccaagaacaccgtgtacctccagatgaacagcctgaagcctgaggacaccgccgtgtactactgcgccgccaatccaacatacggcagcgactggaacgccgagaattggggccagggaacccaagtgacagtgtctagcctcgaggacctgaagaacgtgttcccacctgaggtggccgtgttcgagcctagcgaggccgagatcagccacacccagaaagccaccctcgtgtgcctggctaccggcttctaccccgaccatgtggaactgtcttggtgggtcaacggcaaagaggtgcacagcggcgtgtctaccgacccccagccactgaaagaacagcccgccctgaacgacagccggtactgcctgagcagcagactgagagtgtccgccaccttctggcagaacccccggaaccacttcagatgccaggtgcagttctacggcctgagcgagaacgacgagtggacccaggacagagccaagcccgtgacccagatcgtgtctgccgaagcctggggcagagccgattgcggatccggcatgcggactgaagacctcccaaaggctgtggtgttcctggagcctcaatggtacagggtgctggagaaggacagtgtgactctgaagtgccagggagcctactcccctgaggacaattccacacagtggtttcacaatgagagcctcatctcaagccaggcctccagctacttcattgacgctgccacagtggacgacagtggagagtacaggtgccagacaaacctctccaccctcagtgacccggtgcagctagaagtccatatcggctggctgttgctccaggcccctcggtgggtgttcaaggaggaagaccctattcacctgaggtgtcacagctggaagaacactgctctgcataaggtcacatatttacagaatggcaaaggcaggaagtattttcatcataattctgacttctacattccaaaagccacactcaaagacagcggctcctacttctgcagggggcttgttgggagtaaaaatgtgtcttcagagactgtgaacatcaccatcactcaaggtttggcagtgtcaaccatctcatcattctttccacctggctaccaagtgtccttctgcctggtcatggtgctgctgttcgccgtggataccggcctgtacttcagcgtcaagaccaacatccggtccagcaccagagactggaaggaccacaagttcaagtggcggaaggaccctcaggacaagagggccaagcgatctggatctggagcaacaaacttctcactactcaaacaagcaggtgacgtggaggagaatcccgggcctactagtatggactggatttggcgcatccttttccttgtcggcgctgctaccggcgcgcattccgggcccgaagtgcaactggttgaatccggtggcggcctggtgcaagcaggcggatctctcagacttagctgtgccgcctccggcagaaccttcacaatgggatggtttaggcaggctccagggaaagagagagagttcgtcgccgccatctctctgtctcccacactggcctactacgccgactctgtgaaaggccggttcaccatctccagagataatgccaagaacaccgtggtgctgcaaatgaactctctgaaacccgaggatacagccctgtactattgtgccgctgaccggaagtccgtgatgagcatcagacccgattactggggacagggcacacaagtcacagtgtcctctacgcgtatccagaaccctgatcctgccgtgtaccagctgcgggatagcaagagcagcgacaagagcgtgtgtctgttcaccgacttcgacagccagaccaacgtgtcccagagcaaggactccgacgtgtacatcaccgataagaccgtgctggacatgcggagcatggacttcaagagcaactccgccgtggcctggtccaacaagtccgatttcgcctgcgccaacgccttcaacaacagcattatccccgaggacacattcttcccaagccccgagagcagctgcggtaccctgcactgtgtcggcgacacctatccatccaacgatcggtgctgccatgagtgccggcctggcaacggaatggtgtctcgatgttctcggagtcagaataccgtctgtaggccatgcggacccggcttttacaatgatgtcgtgtcctccaaaccttgcaagccatgtacttggtgcaatctgcggagcggctctgagcggaaacagctgtgcactgctacccaggacacagtgtgtagatgcagagccggaactcagcccctggactcttataagcccggcgttgactgcgctccatgtccaccagggcacttttccccaggcgacaatcaagcctgtaaaccgtggacaaattgcacactggccgggaaacacaccttgcagccagccagcaattcctccgatgccatctgtgaagatcgggacccaccagccactcagcctcaagaaactcaggggcctcctgctaggcccattacagtgcaacctaccgaggcttggccccggacatctcagggaccttctacaaggccagtggaagtgccaggcggtagagctgtggctgctatccttggattgggcctcgttctcggactgttgggaccacttgcaatcctgctggctctctatctgctgcggcgggatcagagactccctccagatgctcataagccacctggcggcggatctttcaggaccccaattcaagaagaacaagccgacgctcactctaccctggctaagatccgcgccaagagaagcggatctggcgtgaagcagaccctgaatttcgacctgctgaagctggctggcgacgtggaatccaacccaggcccttctagaggccatatgaccgagtacaagcccacggtgcgcctcgccacccgcgacgacgtccccagggccgtacgcaccctcgccgccgcgttcgccgactaccccgccacgcgccacaccgtcgatccggaccgccacatcgagcgggtcaccgagctgcaagaactcttcctcacgcgcgtcgggctcgacatcggcaaggtgtgggtcgcggacgacggcgccgcggtggcggtctggaccacgccggagagcgtcgaagcgggggcggtgttcgccgagatcggcccgcgcatggccgagttgagcggttcccggctggccgcgcagcaacagatggaaggcctcctggcgccgcaccggcccaaggagcccgcgtggttcctggccaccgtcggcgtctcgcccgaccaccagggcaagggtctgggcagcgccgtcgtgctccccggagtggaggcggccgagcgcgccggggtgcccgccttcctggagacctccgcgccccgcaacctccccttctacgagcggctcggcttcaccgtcaccgccgacgtcgaggtgcccgaaggaccgcgcacctggtgcatgacccgcaagcccggtgcctga

SEQ ID NO: 5623 - DNA, 1902 bp, Artificial Sequence; identical to SEQ ID NO: 1638
  Synthetic Polynucleotide

SEQ ID NO: 5624 - DNA, 1548 bp, Artificial Sequence
  Synthetic Polynucleotide
atggccttaccagtgaccgccttgctcctgccgctggccttgctgctccacgccgccaggccggacatccagatgacacagagccctagcagcctgtctgccagcgtgggagacagagtgaccatcacatgcaaggccagcgaccacatcaacaactggctggcctggtatcagcagaagcctggacaggcccctaagctgctgatctacggcgctaccacactggaaacaggcgtgcccagcagattttctggcagcggctctggcaccgactacaccctgacaatatccagcctccagcctgaggacttcgccacctactactgtcagcagagctggaacaccccttggacattcggccagggcaccaagctggaaatcaagagaggcggaggcggaagtggaggcggaggatctggcggcggaggctctcaagttcagcttcaacagcctggcgctgagctggtcaaacctggcgcttctgtgaagatgagctgcaaagccagcggctacgccttcagcagctactggatcaactggatgaagcagaaacccggccagggactcgaatggatcggccaaatctatcccggcgacggcgacaccaactacaacggcaagttcaagggcagagccacactgaccgccgatacctctagcagcacagcctacatgcagctgagcagcctgaccagcgaagatagcgccgtgtacttctgtgcccggtccatcacaacagtcgtgggctgcgctatggactattggggccagggaacaagcgtgaccgtgtctagtacgcgtctgcactgtgtcggcgacacctatccatccaacgatcggtgctgccatgagtgccggcctggcaacggaatggtgtctcgatgttctcggagtcagaataccgtctgtaggccatgcggacccggcttttacaatgatgtcgtgtcctccaaaccttgcaagccatgtacttggtgcaatctgcggagcggctctgagcggaaacagctgtgcactgctacccaggacacagtgtgtagatgcagagccggaactcagcccctggactcttataagcccggcgttgactgcgctccatgtccaccagggcacttttccccaggcgacaatcaagcctgtaaaccgtggacaaattgcacactggccgggaaacacaccttgcagccagccagcaattcctccgatgccatctgtgaagatcgggacccaccagccactcagcctcaagaaactcaggggcctcctgctaggcccattacagtgcaacctaccgaggcttggccccggacatctcagggaccttctacaaggccagtggaagtgccaggcggtagagctgtggctgctatccttggattgggcctcgttctcggactgttgggaccacttgcaatcctgctggctctctatctgctgcggcgggatcagagactccctccagatgctcataagccacctggcggcggatctttcaggaccccaattcaagaagaacaagccgacgctcactctaccctggctaagatc

SEQ ID NO: 5625 - DNA, 1548 bp, Artificial Sequence
  Synthetic Polynucleotide
atggccttaccagtgaccgccttgctcctgccgctggccttgctgctccacgccgccaggccggagatcgtgctgacacagagccctgccaccctgtctctgagccctggcgaaagagccaccctgagctgtagagccagccagagcgtgtccagctacctggcctggtatcagcagaagcccggccaggctccccggctgctgatctacgatgccagcaatagagccaccggcatccccgccagattttccggctctggcagcggcaccgacttcaccctgaccatcagctccctggaacccgaggacttcgccgtgtactactgccagcagcggagcaactggcccatcacattcggccagggcacccggctggaaatcaaaggcggaggcggaagtggaggcggaggatctggcggcggaggctctgaagtgcagctggtggaatcaggcggcggactggtgcagcctggcagaagcctgagactgagctgtgccgccagcggcttcaccttcaacgactacgccatgcactgggtgcgccaggcccctggaaaaggactggaatgggtgtccacaatcagctggaacagcggcagcatcggctacgccgatagcgtgaagggccggttcaccatcagccgggacaacgccaagaagtccctgtacctccagatgaacagcctgcgggccgaggacacagccctgtactattgcgccaaggacatccagtacggcaactactactacggcatggacgtgtggggccagggaaccaccgtgaccgtgtcatctacgcgtctgcactgtgtcggcgacacctatccatccaacgatcggtgctgccatgagtgccggcctggcaacggaatggtgtctcgatgttctcggagtcagaataccgtctgtaggccatgcggacccggcttttacaatgatgtcgtgtcctccaaaccttgcaagccatgtacttggtgcaatctgcggagcggctctgagcggaaacagctgtgcactgctacccaggacacagtgtgtagatgcagagccggaactcagcccctggactcttataagcccggcgttgactgcgctccatgtccaccagggcacttttccccaggcgacaatcaagcctgtaaaccgtggacaaattgcacactggccgggaaacacaccttgcagccagccagcaattcctccgatgccatctgtgaagatcgggacccaccagccactcagcctcaagaaactcaggggcctcctgctaggcccattacagtgcaacctaccgaggcttggccccggacatctcagggaccttctacaaggccagtggaagtgccaggcggtagagctgtggctgctatccttggattgggcctcgttctcggactgttgggaccacttgcaatcctgctggctctctatctgctgcggcgggatcagagactccctccagatgctcataagccacctggcggcggatctttcaggaccccaattcaagaagaacaagccgacgctcactctaccctggctaagatc

SEQ ID NO: 5626 - DNA, 1170 bp, Artificial Sequence
  Synthetic Polynucleotide
atggccttaccagtgaccgccttgctcctgccgctggccttgctgctccacgccgccaggccggaagtgcagctggttgaatctggcggaggactggttcaggctggcggatctctgagactgtcttgtgccgccagcggcagaacctttagcatgggctggtttagacaggcccctggcaaagagagagagttcgtcgccgccatcacatactctggcggcagcccttactacgccgactctgtgaagggcagattcaccatcagccgggacaacgccaagaacaccgtgtacctccagatgaacagcctgaagcctgaggacaccgccgtgtactactgcgccgccaatccaacatacggcagcgactggaacgccgagaattggggccagggaacccaagtgacagtgtctagcacgcgtctgcactgtgtcggcgacacctatccatccaacgatcggtgctgccatgagtgccggcctggcaacggaatggtgtctcgatgttctcggagtcagaataccgtctgtaggccatgcggacccggcttttacaatgatgtcgtgtcctccaaaccttgcaagccatgtacttggtgcaatctgcggagcggctctgagcggaaacagctgtgcactgctacccaggacacagtgtgtagatgcagagccggaactcagcccctggactcttataagcccggcgttgactgcgctccatgtccaccagggcacttttccccaggcgacaatcaagcctgtaaaccgtggacaaattgcacactggccgggaaacacaccttgcagccagccagcaattcctccgatgccatctgtgaagatcgggacccaccagccactcagcctcaagaaactcaggggcctcctgctaggcccattacagtgcaacctaccgaggcttggccccggacatctcagggaccttctacaaggccagtggaagtgccaggcggtagagctgtggctgctatccttggattgggcctcgttctcggactgttgggaccacttgcaatcctgctggctctctatctgctgcggcgggatcagagactccctccagatgctcataagccacctggcggcggatctttcaggaccccaattcaagaagaacaagccgacgctcactctaccctggctaagatc

SEQ ID NO: 5627 - DNA, 1170 bp, Artificial Sequence
  Synthetic Polynucleotide
atggccttaccagtgaccgccttgctcctgccgctggccttgctgctccacgccgccaggccgcagctccagttgcaagagagcggccctggcttggtaaaaccttccgagacccttagcctcacatgcacggttagtgggggcagcatttcctcaggtgattactattggggatggattcggcaacccccgggtaaaggattggagtggattggtcatatttattatagtggagcgacgtactacaacccaagtctcaaatccagggttacaatatccgtcgatacgagcaggaaccaattcagcttgaaactttctagtgtcaccgcagcagacacagccgtctattactgtacgcgggatgactccagtaattggcggtcccgagggcaagggacactggtcacggtctcctcaacgcgtctgcactgtgtcggcgacacctatccatccaacgatcggtgctgccatgagtgccggcctggcaacggaatggtgtctcgatgttctcggagtcagaataccgtctgtaggccatgcggacccggcttttacaatgatgtcgtgtcctccaaaccttgcaagccatgtacttggtgcaatctgcggagcggctctgagcggaaacagctgtgcactgctacccaggacacagtgtgtagatgcagagccggaactcagcccctggactcttataagcccggcgttgactgcgctccatgtccaccagggcacttttccccaggcgacaatcaagcctgtaaaccgtggacaaattgcacactggccgggaaacacaccttgcagccagccagcaattcctccgatgccatctgtgaagatcgggacccaccagccactcagcctcaagaaactcaggggcctcctgctaggcccattacagtgcaacctaccgaggcttggccccggacatctcagggaccttctacaaggccagtggaagtgccaggcggtagagctgtggctgctatccttggattgggcctcgttctcggactgttgggaccacttgcaatcctgctggctctctatctgctgcggcgggatcagagactccctccagatgctcataagccacctggcggcggatctttcaggaccccaattcaagaagaacaagccgacgctcactctaccctggctaagatc

SEQ ID NO: 5628 - DNA, 1170 bp, Artificial Sequence
  Synthetic Polynucleotide
atggccttaccagtgaccgccttgctcctgccgctggccttgctgctccacgccgccaggccgcagctccagctgcaagagtctggacctggcctggtcaagcctagcgagacactgagcctgacctgtaccgtgtccggcgatagcatcagcagcggcgattactactggggctggatcagacagcctcctggcaaaggactggaatggatcggccacatctactacagcggcgtgacctactacaaccccagcctgaagtccagagtgaccatcagcgtggacaccagccggaaccagttctccctgaagctgtctagcgtgacagccgccgataccgccgtgtactactgcaccagagaggacagcagcaactggcggagtagaggccagggaacactggtcacagttagctctacgcgtctgcactgtgtcggcgacacctatccatccaacgatcggtgctgccatgagtgccggcctggcaacggaatggtgtctcgatgttctcggagtcagaataccgtctgtaggccatgcggacccggcttttacaatgatgtcgtgtcctccaaaccttgcaagccatgtacttggtgcaatctgcggagcggctctgagcggaaacagctgtgcactgctacccaggacacagtgtgtagatgcagagccggaactcagcccctggactcttataagcccggcgttgactgcgctccatgtccaccagggcacttttccccaggcgacaatcaagcctgtaaaccgtggacaaattgcacactggccgggaaacacaccttgcagccagccagcaattcctccgatgccatctgtgaagatcgggacccaccagccactcagcctcaagaaactcaggggcctcctgctaggcccattacagtgcaacctaccgaggcttggccccggacatctcagggaccttctacaaggccagtggaagtgccaggcggtagagctgtggctgctatccttggattgggcctcgttctcggactgttgggaccacttgcaatcctgctggctctctatctgctgcggcgggatcagagactccctccagatgctcataagccacctggcggcggatctttcaggaccccaattcaagaagaacaagccgacgctcactctaccctggctaagatc

SEQ ID NO: 5629 - DNA, 1176 bp, Artificial Sequence
  Synthetic Polynucleotide
atggccttaccagtgaccgccttgctcctgccgctggccttgctgctccacgccgccaggccggaagttcagctgcaagagtctggcggaggactggttcaacctggcggaagcctgagactgtcttgtgccgcctctggcagaaccttcagcagcctgttcatgggctggttcagacaggcccctggcaaagagagagaactggtcgccgccatcagccggtacagcctgtacacctactacgccgacagcgtgaagggcagattcaccatcagcgccgacaacgccaagaacgccgtgtacctccagatgaacagcctgaagccagaggacacagccgtgtactactgcgccagcaaacttgagtacaccagcaacgactacgacagctggggccagggaacccaagtgacagtctcttctacgcgtctgcactgtgtcggcgacacctatccatccaacgatcggtgctgccatgagtgccggcctggcaacggaatggtgtctcgatgttctcggagtcagaataccgtctgtaggccatgcggacccggcttttacaatgatgtcgtgtcctccaaaccttgcaagccatgtacttggtgcaatctgcggagcggctctgagcggaaacagctgtgcactgctacccaggacacagtgtgtagatgcagagccggaactcagcccctggactcttataagcccggcgttgactgcgctccatgtccaccagggcacttttccccaggcgacaatcaagcctgtaaaccgtggacaaattgcacactggccgggaaacacaccttgcagccagccagcaattcctccgatgccatctgtgaagatcgggacccaccagccactcagcctcaagaaactcaggggcctcctgctaggcccattacagtgcaacctaccgaggcttggccccggacatctcagggaccttctacaaggccagtggaagtgccaggcggtagagctgtggctgctatccttggattgggcctcgttctcggactgttgggaccacttgcaatcctgctggctctctatctgctgcggcgggatcagagactccctccagatgctcataagccacctggcggcggatctttcaggaccccaattcaagaagaacaagccgacgctcactctaccctggctaagatc

SEQ ID NO: 5630 - DNA, 1200 bp, Artificial Sequence
  Synthetic Polynucleotide
atggccttaccagtgaccgccttgctcctgccgctggccttgctgctccacgccgccaggccggaagtgcagctggttgaatctggcggaggactggttcagcctggcggatctctgagactgtcttgtgccgcctctggcttcgccagcgactactatatcatcggctggttcagacaggcccctggcaaagagagagagggcgtcagctgtatcagcagcagatacgccaacaccaactacgccgacagcgtgaagggcagattcaccatcagccgggacaacgccaagaacaccgtgtacctccagatgaacagcctgaagcctgaggacaccgccgtgtactactgtgccgccgacaccagaagatacacctgtcctgacattgccaccatgcaccggaacttcgattcttggggccagggcacactggtcaccgtttcttctacgcgtctgcactgtgtcggcgacacctatccatccaacgatcggtgctgccatgagtgccggcctggcaacggaatggtgtctcgatgttctcggagtcagaataccgtctgtaggccatgcggacccggcttttacaatgatgtcgtgtcctccaaaccttgcaagccatgtacttggtgcaatctgcggagcggctctgagcggaaacagctgtgcactgctacccaggacacagtgtgtagatgcagagccggaactcagcccctggactcttataagcccggcgttgactgcgctccatgtccaccagggcacttttccccaggcgacaatcaagcctgtaaaccgtggacaaattgcacactggccgggaaacacaccttgcagccagccagcaattcctccgatgccatctgtgaagatcgggacccaccagccactcagcctcaagaaactcaggggcctcctgctaggcccattacagtgcaacctaccgaggcttggccccggacatctcagggaccttctacaaggccagtggaagtgccaggcggtagagctgtggctgctatccttggattgggcctcgttctcggactgttgggaccacttgcaatcctgctggctctctatctgctgcggcgggatcagagactccctccagatgctcataagccacctggcggcggatctttcaggaccccaattcaagaagaacaagccgacgctcactctaccctggctaagatc

SEQ ID NO: 5631 - DNA, 1188 bp, Artificial Sequence
  Synthetic Polynucleotide
atggccttaccagtgaccgccttgctcctgccgctggccttgctgctccacgccgccaggccggaagtgcaactggtggaatctggaggctctctggtgcagccagggggaagcctgagactgtcttgtgccgcttccggcttcaccttcgacgactacgccatgagctgggtgcgccaggtgccaggcaaaggcctggaatgggtgtccagcatcaactggagcggcacccacaccgattacgccgactccgtgaaaggcagattcacaatcagcagaaacaacgccaacaataccctgtacctgcagatgaactccctgaagtctgaggatacagcagtgtattattgcgccaagaactggcgggacgccggcaccacttggtttgagaaaagcggctctgccggacagggaacccaagtgacagtgtcctccacgcgtctgcactgtgtcggcgacacctatccatccaacgatcggtgctgccatgagtgccggcctggcaacggaatggtgtctcgatgttctcggagtcagaataccgtctgtaggccatgcggacccggcttttacaatgatgtcgtgtcctccaaaccttgcaagccatgtacttggtgcaatctgcggagcggctctgagcggaaacagctgtgcactgctacccaggacacagtgtgtagatgcagagccggaactcagcccctggactcttataagcccggcgttgactgcgctccatgtccaccagggcacttttccccaggcgacaatcaagcctgtaaaccgtggacaaattgcacactggccgggaaacacaccttgcagccagccagcaattcctccgatgccatctgtgaagatcgggacccaccagccactcagcctcaagaaactcaggggcctcctgctaggcccattacagtgcaacctaccgaggcttggccccggacatctcagggaccttctacaaggccagtggaagtgccaggcggtagagctgtggctgctatccttggattgggcctcgttctcggactgttgggaccacttgcaatcctgctggctctctatctgctgcggcgggatcagagactccctccagatgctcataagccacctggcggcggatctttcaggaccccaattcaagaagaacaagccgacgctcactctaccctggctaagatc

SEQ ID NO: 5632 - DNA, 1173 bp, Artificial Sequence
  Synthetic Polynucleotide
atggccttaccagtgaccgccttgctcctgccgctggccttgctgctccacgccgccaggccggaggtgcagctggttgaatctggcggaggactggttcagcctggcggatctctgagactgtcttgtgccgccagcggcttcaacatcaaggatacctgtatcggctgggttcgcagagcccctggcaaagaggaagaactggtcgccaaaatctgcaagtacagcggccacaccagatacgccgacagcgtgaagggcagattcaccatcagcgccgacaccagcaagaacaccgcctacctccagatgaacagcctgagagccgaggacaccgccgtgtactattgtgccgctgtgtccgtcagagatgggcactacaattactggggccagggcaccaccgtgaccgtttcttcaacgcgtctgcactgtgtcggcgacacctatccatccaacgatcggtgctgccatgagtgccggcctggcaacggaatggtgtctcgatgttctcggagtcagaataccgtctgtaggccatgcggacccggcttttacaatgatgtcgtgtcctccaaaccttgcaagccatgtacttggtgcaatctgcggagcggctctgagcggaaacagctgtgcactgctacccaggacacagtgtgtagatgcagagccggaactcagcccctggactcttataagcccggcgttgactgcgctccatgtccaccagggcacttttccccaggcgacaatcaagcctgtaaaccgtggacaaattgcacactggccgggaaacacaccttgcagccagccagcaattcctccgatgccatctgtgaagatcgggacccaccagccactcagcctcaagaaactcaggggcctcctgctaggcccattacagtgcaacctaccgaggcttggccccggacatctcagggaccttctacaaggccagtggaagtgccaggcggtagagctgtggctgctatccttggattgggcctcgttctcggactgttgggaccacttgcaatcctgctggctctctatctgctgcggcgggatcagagactccctccagatgctcataagccacctggcggcggatctttcaggaccccaattcaagaagaacaagccgacgctcactctaccctggctaagatc

SEQ ID NO: 5633 - DNA, 1188 bp, Artificial Sequence
  Synthetic Polynucleotide
atggccttaccagtgaccgccttgctcctgccgctggccttgctgctccacgccgccaggccgggctctgacctgggcatcaagctgctgttcgccgctgccaagggccaggacgacgaagtgcggattctgctggctgctggggccgacgtgaacgccaaggatttcgagggctacacccccctgcacgtggccgcctatgatggacacctggaaatcgtggaagtgctgctgaaggctggcgctgatgtgaatgccaaagacagccagggccggacccctctgcatgaagccgcctacagcggccatctggaaattgtggaagtgctgctgaaagccggggcagacgtgaacgctcaggacgacgctggcgagacaccagccgatctggctgcagcttggggccacgaagatatcgccgaggtgctgcagaagacgcgtctgcactgtgtcggcgacacctatccatccaacgatcggtgctgccatgagtgccggcctggcaacggaatggtgtctcgatgttctcggagtcagaataccgtctgtaggccatgcggacccggcttttacaatgatgtcgtgtcctccaaaccttgcaagccatgtacttggtgcaatctgcggagcggctctgagcggaaacagctgtgcactgctacccaggacacagtgtgtagatgcagagccggaactcagcccctggactcttataagcccggcgttgactgcgctccatgtccaccagggcacttttccccaggcgacaatcaagcctgtaaaccgtggacaaattgcacactggccgggaaacacaccttgcagccagccagcaattcctccgatgccatctgtgaagatcgggacccaccagccactcagcctcaagaaactcaggggcctcctgctaggcccattacagtgcaacctaccgaggcttggccccggacatctcagggaccttctacaaggccagtggaagtgccaggcggtagagctgtggctgctatccttggattgggcctcgttctcggactgttgggaccacttgcaatcctgctggctctctatctgctgcggcgggatcagagactccctccagatgctcataagccacctggcggcggatctttcaggaccccaattcaagaagaacaagccgacgctcactctaccctggctaagatc

SEQ ID NO: 5634 - DNA, 990 bp, Artificial Sequence
  Synthetic Polynucleotide
atggccttaccagtgaccgccttgctcctgccgctggccttgctgctccacgccgccaggccggtggacaacaagttcaacaaagagcggtacagcgcctactacgagatttggcaactgcccaacctgaacgtgcggcagaaggccgccttcatcggatctctgcaggacgaccctagccagagcgccaatctgctggccgaggccaagaagctgaacgacgcccaggcccctaaaacgcgtctgcactgtgtcggcgacacctatccatccaacgatcggtgctgccatgagtgccggcctggcaacggaatggtgtctcgatgttctcggagtcagaataccgtctgtaggccatgcggacccggcttttacaatgatgtcgtgtcctccaaaccttgcaagccatgtacttggtgcaatctgcggagcggctctgagcggaaacagctgtgcactgctacccaggacacagtgtgtagatgcagagccggaactcagcccctggactcttataagcccggcgttgactgcgctccatgtccaccagggcacttttccccaggcgacaatcaagcctgtaaaccgtggacaaattgcacactggccgggaaacacaccttgcagccagccagcaattcctccgatgccatctgtgaagatcgggacccaccagccactcagcctcaagaaactcaggggcctcctgctaggcccattacagtgcaacctaccgaggcttggccccggacatctcagggaccttctacaaggccagtggaagtgccaggcggtagagctgtggctgctatccttggattgggcctcgttctcggactgttgggaccacttgcaatcctgctggctctctatctgctgcggcgggatcagagactccctccagatgctcataagccacctggcggcggatctttcaggaccccaattcaagaagaacaagccgacgctcactctaccctggctaagatc

SEQ ID NO: 5635 - DNA, 1083 bp, Artificial Sequence
  Synthetic Polynucleotide
atggccttaccagtgaccgccttgctcctgccgctggccttgctgctccacgccgccaggccgctgccagccccgaagaatttggtcgtttcccgtgtcactgaggactctgcacgtctgagctggaccgcaccggacgcggcgttcgacagctttgcaatcggctactgggagtgggatgatgacggcgaggccattgtgctgaccgttccgggtagcgagcgcagctacgatctgaccggtctgaagccgggtacggaatatccggtgtatattgcgggcgtgaagggtggccagtggagcttcccgctgagcgcgatctttaccaccacgcgtctgcactgtgtcggcgacacctatccatccaacgatcggtgctgccatgagtgccggcctggcaacggaatggtgtctcgatgttctcggagtcagaataccgtctgtaggccatgcggacccggcttttacaatgatgtcgtgtcctccaaaccttgcaagccatgtacttggtgcaatctgcggagcggctctgagcggaaacagctgtgcactgctacccaggacacagtgtgtagatgcagagccggaactcagcccctggactcttataagcccggcgttgactgcgctccatgtccaccagggcacttttccccaggcgacaatcaagcctgtaaaccgtggacaaattgcacactggccgggaaacacaccttgcagccagccagcaattcctccgatgccatctgtgaagatcgggacccaccagccactcagcctcaagaaactcaggggcctcctgctaggcccattacagtgcaacctaccgaggcttggccccggacatctcagggaccttctacaaggccagtggaagtgccaggcggtagagctgtggctgctatccttggattgggcctcgttctcggactgttgggaccacttgcaatcctgctggctctctatctgctgcggcgggatcagagactccctccagatgctcataagccacctggcggcggatctttcaggaccccaattcaagaagaacaagccgacgctcactctaccctggctaagatc

SEQ ID NO: 5636 - DNA, 1086 bp, Artificial Sequence
  Synthetic Polynucleotide
atggccttaccagtgaccgccttgctcctgccgctggccttgctgctccacgccgccaggccgatgctgcccgctcctaagaatctggtggtgtccagaatcaccgaggacagcgccagactgtcttggacagctcctgatgccgccttcgacagcttccccatccggtacatcgagacactgatctggggcgaagccatctggctggatgtgcctggaagcgagagaagctacgacctgaccggactgaagcctggcacagagtatgccgtggtcatcaccggcgtgaaaggcggcagattctctagccctctggtggcctctttcaccaccacgcgtctgcactgtgtcggcgacacctatccatccaacgatcggtgctgccatgagtgccggcctggcaacggaatggtgtctcgatgttctcggagtcagaataccgtctgtaggccatgcggacccggcttttacaatgatgtcgtgtcctccaaaccttgcaagccatgtacttggtgcaatctgcggagcggctctgagcggaaacagctgtgcactgctacccaggacacagtgtgtagatgcagagccggaactcagcccctggactcttataagcccggcgttgactgcgctccatgtccaccagggcacttttccccaggcgacaatcaagcctgtaaaccgtggacaaattgcacactggccgggaaacacaccttgcagccagccagcaattcctccgatgccatctgtgaagatcgggacccaccagccactcagcctcaagaaactcaggggcctcctgctaggcccattacagtgcaacctaccgaggcttggccccggacatctcagggaccttctacaaggccagtggaagtgccaggcggtagagctgtggctgctatccttggattgggcctcgttctcggactgttgggaccacttgcaatcctgctggctctctatctgctgcggcgggatcagagactccctccagatgctcataagccacctggcggcggatctttcaggaccccaattcaagaagaacaagccgacgctcactctaccctggctaagatc

SEQ ID NO: 5637 - DNA, 1737 bp, Artificial Sequence
  Synthetic Polynucleotide
atggccttaccagtgaccgccttgctcctgccgctggccttgctgctccacgccgccaggccgatggccttaccagtgaccgccttgctcctgccgctggccttgctgctccacgccgccaggccgctgttcaatcaagaggtgcagatccctctgaccgagagctactgtggcccctgtcctaagaactggatctgctacaagaacaactgctaccagttcttcgacgagagcaagaattggtacgagagccaggccagctgcatgagccagaatgccagcctgctgaaggtgtacagcaaagaggaccaggacctgctgaaactggtcaagagctaccactggatgggccttgtgcacatccccaccaatggctcttggcagtgggaggacggcagcattctgagccctaacctgctgaccatcatcgagatgcagaagggcgactgcgccctgtacgccagcagctttaagggctacatcgagaattgcagcaccccgaacacctacatctgtatgcagagaaccgttggcggaggcggaagtggaggcggaggatctggcggcggaggctctgacctctttaatcaagaagtccagattccactcaccgaatcctactgcggaccttgtccaaaaaattggatttgttataagaacaactgttatcaattctttgatgagtctaaaaattggtatgagtcccaggcttcctgcatgtctcagaacgcttctctgctgaaagtctactctaaagaagatcaggatctcctgaagctcgtcaagtcttatcattggatggggctcgtccacattcctaccaacggaagctggcaatgggaagatggctccatcctgtctccaaatctgctcacgattattgaaatgcagaaaggggattgtgctctctacgccagctccttcaagggatatattgagaactgtagcacgcccaatacttatatctgtatgcaacggaccgtgacgcgtctgcactgtgtcggcgacacctatccatccaacgatcggtgctgccatgagtgccggcctggcaacggaatggtgtctcgatgttctcggagtcagaataccgtctgtaggccatgcggacccggcttttacaatgatgtcgtgtcctccaaaccttgcaagccatgtacttggtgcaatctgcggagcggctctgagcggaaacagctgtgcactgctacccaggacacagtgtgtagatgcagagccggaactcagcccctggactcttataagcccggcgttgactgcgctccatgtccaccagggcacttttccccaggcgacaatcaagcctgtaaaccgtggacaaattgcacactggccgggaaacacaccttgcagccagccagcaattcctccgatgccatctgtgaagatcgggacccaccagccactcagcctcaagaaactcaggggcctcctgctaggcccattacagtgcaacctaccgaggcttggccccggacatctcagggaccttctacaaggccagtggaagtgccaggcggtagagctgtggctgctatccttggattgggcctcgttctcggactgttgggaccacttgcaatcctgctggctctctatctgctgcggcgggatcagagactccctccagatgctcataagccacctggcggcggatctttcaggaccccaattcaagaagaacaagccgacgctcactctaccctggctaagatc

SEQ ID NO: 5638 - DNA, 1377 bp, Artificial Sequence
  Synthetic Polynucleotide
atggccttaccagtgaccgccttgctcctgccgctggccttgctgctccacgccgccaggccgatggagctgactgatttgctcctggcggccatgcttcttgcagtggcaagactaactctgtccagccccgtagctcctgcctgtgaccccagactcctaaataaactgctgcgtgactcccacctccttcacagccgactgagtcagtgtcccgacgtggaccctttgtctatccctgttctgctgcctgctgtggactttagcctgggagaatggaaaacccagacggaacagagcaaggcacaggacattctaggggcagtgtcccttctactggagggagtgatggcagcacgaggacagttggaaccctcctgcctctcatccctcctgggacagctttctgggcaggttcgcctcctcttgggggccctgcagggcctcctaggaacccagcttcctctacagggcaggaccacagctcacaaggaccccaatgccctcttcttgagcttgcaacaactgcttcggggaaaggtgcgcttcctgcttctggtagaaggtcccaccctctgtgtcagacggaccctgccaaccacagctgtcccaagcagtacttctacgcgtctgcactgtgtcggcgacacctatccatccaacgatcggtgctgccatgagtgccggcctggcaacggaatggtgtctcgatgttctcggagtcagaataccgtctgtaggccatgcggacccggcttttacaatgatgtcgtgtcctccaaaccttgcaagccatgtacttggtgcaatctgcggagcggctctgagcggaaacagctgtgcactgctacccaggacacagtgtgtagatgcagagccggaactcagcccctggactcttataagcccggcgttgactgcgctccatgtccaccagggcacttttccccaggcgacaatcaagcctgtaaaccgtggacaaattgcacactggccgggaaacacaccttgcagccagccagcaattcctccgatgccatctgtgaagatcgggacccaccagccactcagcctcaagaaactcaggggcctcctgctaggcccattacagtgcaacctaccgaggcttggccccggacatctcagggaccttctacaaggccagtggaagtgccaggcggtagagctgtggctgctatccttggattgggcctcgttctcggactgttgggaccacttgcaatcctgctggctctctatctgctgcggcgggatcagagactccctccagatgctcataagccacctggcggcggatctttcaggaccccaattcaagaagaacaagccgacgctcactctaccctggctaagatc

SEQ ID NO: 5639 - DNA, 975 bp, Artificial Sequence
  Synthetic Polynucleotide
atggccttaccagtgaccgccttgctcctgccgctggccttgctgctccacgccgccaggccgatggaccccgacctggaaatcagagccgccttcctgcggcagagaaacacagccctgagaacagaggtggccgagctggaacaagaggtgcagcggctggaaaacgaggtgtcccagtacgagacaagatacggccctctcggaggcggaaaaacgcgtacgcgtctgcactgtgtcggcgacacctatccatccaacgatcggtgctgccatgagtgccggcctggcaacggaatggtgtctcgatgttctcggagtcagaataccgtctgtaggccatgcggacccggcttttacaatgatgtcgtgtcctccaaaccttgcaagccatgtacttggtgcaatctgcggagcggctctgagcggaaacagctgtgcactgctacccaggacacagtgtgtagatgcagagccggaactcagcccctggactcttataagcccggcgttgactgcgctccatgtccaccagggcacttttccccaggcgacaatcaagcctgtaaaccgtggacaaattgcacactggccgggaaacacaccttgcagccagccagcaattcctccgatgccatctgtgaagatcgggacccaccagccactcagcctcaagaaactcaggggcctcctgctaggcccattacagtgcaacctaccgaggcttggccccggacatctcagggaccttctacaaggccagtggaagtgccaggcggtagagctgtggctgctatccttggattgggcctcgttctcggactgttgggaccacttgcaatcctgctggctctctatctgctgcggcgggatcagagactccctccagatgctcataagccacctggcggcggatctttcaggaccccaattcaagaagaacaagccgacgctcactctaccctggctaagatc

SEQ ID NO: 5640 - DNA, 900 bp, Artificial Sequence
  Synthetic Polynucleotide
atggccttaccagtgaccgccttgctcctgccgctggccttgctgctccacgccgccaggccggaagttgctgccctcgagaaggaggtagcagctttggaaaaagaagtcgcagcccttgagaaagaagttgcggctctggagaagacgcgtctgcactgtgtcggcgacacctatccatccaacgatcggtgctgccatgagtgccggcctggcaacggaatggtgtctcgatgttctcggagtcagaataccgtctgtaggccatgcggacccggcttttacaatgatgtcgtgtcctccaaaccttgcaagccatgtacttggtgcaatctgcggagcggctctgagcggaaacagctgtgcactgctacccaggacacagtgtgtagatgcagagccggaactcagcccctggactcttataagcccggcgttgactgcgctccatgtccaccagggcacttttccccaggcgacaatcaagcctgtaaaccgtggacaaattgcacactggccgggaaacacaccttgcagccagccagcaattcctccgatgccatctgtgaagatcgggacccaccagccactcagcctcaagaaactcaggggcctcctgctaggcccattacagtgcaacctaccgaggcttggccccggacatctcagggaccttctacaaggccagtggaagtgccaggcggtagagctgtggctgctatccttggattgggcctcgttctcggactgttgggaccacttgcaatcctgctggctctctatctgctgcggcgggatcagagactccctccagatgctcataagccacctggcggcggatctttcaggaccccaattcaagaagaacaagccgacgctcactctaccctggctaagatc

SEQ ID NO: 5641 - DNA, 1674 bp, Artificial Sequence
  Synthetic Polynucleotide
atggccttaccagtgaccgccttgctcctgccgctggccttgctgctccacgccgccaggccgctgttcaatcaagaggtgcagatccctctgaccgagagctactgtggcccctgtcctaagaactggatctgctacaagaacaactgctaccagttcttcgacgagagcaagaattggtacgagagccaggccagctgcatgagccagaatgccagcctgctgaaggtgtacagcaaagaggaccaggacctgctgaaactggtcaagagcgcccactggatgggccttgtgcacatccccaccaatggctcttggcagtgggaggacggcagcattctgagccctaacctgctgaccatcatcgagatgcagaagggcgactgcgccctgtacgccagcagctttaagggcttcatcgagaattgcagcaccccgaacacctacatctgtatgcagagaaccgttggcggaggcggaagtggaggcggaggatctggcggcggaggctctgacctctttaatcaagaagtccagattccactcaccgaatcctactgcggaccttgtccaaaaaattggatttgttataagaacaactgttatcaattctttgatgagtctaaaaattggtatgagtcccaggcttcctgcatgtctcagaacgcttctctgctgaaagtctactctaaagaagatcaggatctcctgaagctcgtcaagtctgcccattggatggggctcgtccacattcctaccaacggaagctggcaatgggaagatggctccatcctgtctccaaatctgctcacgattattgaaatgcagaaaggggattgtgctctctacgccagctccttcaagggatttattgagaactgtagcacgcccaatacttatatctgtatgcaacggaccgtgacgcgtctgcactgtgtcggcgacacctatccatccaacgatcggtgctgccatgagtgccggcctggcaacggaatggtgtctcgatgttctcggagtcagaataccgtctgtaggccatgcggacccggcttttacaatgatgtcgtgtcctccaaaccttgcaagccatgtacttggtgcaatctgcggagcggctctgagcggaaacagctgtgcactgctacccaggacacagtgtgtagatgcagagccggaactcagcccctggactcttataagcccggcgttgactgcgctccatgtccaccagggcacttttccccaggcgacaatcaagcctgtaaaccgtggacaaattgcacactggccgggaaacacaccttgcagccagccagcaattcctccgatgccatctgtgaagatcgggacccaccagccactcagcctcaagaaactcaggggcctcctgctaggcccattacagtgcaacctaccgaggcttggccccggacatctcagggaccttctacaaggccagtggaagtgccaggcggtagagctgtggctgctatccttggattgggcctcgttctcggactgttgggaccacttgcaatcctgctggctctctatctgctgcggcgggatcagagactccctccagatgctcataagccacctggcggcggatctttcaggaccccaattcaagaagaacaagccgacgctcactctaccctggctaagatc

SEQ ID NO: 5642 - DNA, 1674 bp, Artificial Sequence
  Synthetic Polynucleotide
atggccttaccagtgaccgccttgctcctgccgctggccttgctgctccacgccgccaggccgctgttcaatcaagaggtgcagatccctctgaccgagagctactgtggcccctgtcctaagaactggatctgctacaagaacaactgctaccagttcttcgacgagagcaagaattggtacgagagccaggccagctgcatgagccagaatgccagcctgctgaaggtgtacagcaaagaggaccaggacctgctgaaactggtcaagagcgcccactggatgggccttgtgcacatccccaccaatggctcttggcagtgggaggacggcagcattctgagccctaacctgctgaccatcatcgagatgcagaagggcgactgcgccctgtacgccagcagctttaagggctacatcgagaattgcagcaccccgaacacctacatctgtatgcagagaaccgtttctggcggaggcggctctggaggaggcggaagtggcggcggaggcgacctctttaatcaagaagtccagattccactcaccgaatcctactgcggaccttgtccaaaaaattggatttgttataagaacaactgttatcaattctttgatgagtctaaaaattggtatgagtcccaggcttcctgcatgtctcagaacgcttctctgctgaaagtctactctaaagaagatcaggatctcctgaagctcgtcaagtctgcccattggatggggctcgtccacattcctaccaacggaagctggcaatgggaagatggctccatcctgtctccaaatctgctcacgattattgaaatgcagaaaggggattgtgctctctacgccagctccttcaagggatatattgagaactgtagcacgcccaatacttatatctgtatgcaacggaccgtgacgcgtctgcactgtgtcggcgacacctatccatccaacgatcggtgctgccatgagtgccggcctggcaacggaatggtgtctcgatgttctcggagtcagaataccgtctgtaggccatgcggacccggcttttacaatgatgtcgtgtcctccaaaccttgcaagccatgtacttggtgcaatctgcggagcggctctgagcggaaacagctgtgcactgctacccaggacacagtgtgtagatgcagagccggaactcagcccctggactcttataagcccggcgttgactgcgctccatgtccaccagggcacttttccccaggcgacaatcaagcctgtaaaccgtggacaaattgcacactggccgggaaacacaccttgcagccagccagcaattcctccgatgccatctgtgaagatcgggacccaccagccactcagcctcaagaaactcaggggcctcctgctaggcccattacagtgcaacctaccgaggcttggccccggacatctcagggaccttctacaaggccagtggaagtgccaggcggtagagctgtggctgctatccttggattgggcctcgttctcggactgttgggaccacttgcaatcctgctggctctctatctgctgcggcgggatcagagactccctccagatgctcataagccacctggcggcggatctttcaggaccccaattcaagaagaacaagccgacgctcactctaccctggctaagatc

SEQ ID NO: 5643 - DNA, 3108 bp, Artificial Sequence
  Synthetic Polynucleotide
atggccttaccagtgaccgccttgctcctgccgctggccttgctgctccacgccgccaggccggacatccagatgacacagagccctagcagcctgtctgccagcgtgggagacagagtgaccatcacatgcaaggccagcgaccacatcaacaactggctggcctggtatcagcagaagcctggacaggcccctaagctgctgatctacggcgctaccacactggaaacaggcgtgcccagcagattttctggcagcggctctggcaccgactacaccctgacaatatccagcctccagcctgaggacttcgccacctactactgtcagcagagctggaacaccccttggacattcggccagggcaccaagctggaaatcaagagactcgagctgcattgcgtgggcgacacataccccagcaacgacagatgctgccacgaatgcagacccggcaatggcatggtgtccagatgcagcagatcccagaacaccgtgtgcagaccttgcggccctggcttctacaacgacgtggtgtctagcaagccctgcaagccttgcacctggtgtaacctgagaagcggcagcgagagaaagcagctgtgtaccgccacacaggataccgtgtgccggtgtagagctggcacacagcctctggacagctacaaacctggcgtggactgtgccccttgtcctcctggacactttagccctggcgacaaccaggcttgcaaaccctggaccaactgtaccctggccggcaagcacacactgcaacctgccagcaatagcagcgacgccatctgcgaggacagagatcctcctgccacacagccccaagagacacaaggacctccagccagacctatcaccgtgcagcctacagaagcctggcctagaacaagccagggacctagcaccagacctgtggaagttcctggtggcagagccgtggccgccattcttggtcttggactggtgctgggactgctcggacctctggctattctgctggccctgtacctgctgagaagggaccaaagactgcctcctgacgctcacaaacctccaggcggaggcagcttcagaacccctatccaagaggaacaggctgacgcccacagcaccctggcaaaaattagggccaagcgatctggatctggagcaacaaacttctcactactcaaacaagcaggtgacgtggaggagaatcccgggcctactagtatggactggatttggcgcatccttttccttgtcggcgctgctaccggcgcgcattccttcgaacaagttcagcttcaacagcctggcgctgagctggtcaaacctggcgcttctgtgaagatgagctgcaaagccagcggctacgccttcagcagctactggatcaactggatgaagcagaaacccggccagggactcgaatggatcggccaaatctatcccggcgacggcgacaccaactacaacggcaagttcaagggcagagccacactgaccgccgatacctctagcagcacagcctacatgcagctgagcagcctgaccagcgaagatagcgccgtgtacttctgtgcccggtccatcacaacagtcgtgggctgcgctatggactattggggccagggaacaagcgtgaccgtgtctagtacgcgtctgcactgtgtcggcgacacctatccatccaacgatcggtgctgccatgagtgccggcctggcaacggaatggtgtctcgatgttctcggagtcagaataccgtctgtaggccatgcggacccggcttttacaatgatgtcgtgtcctccaaaccttgcaagccatgtacttggtgcaatctgcggagcggctctgagcggaaacagctgtgcactgctacccaggacacagtgtgtagatgcagagccggaactcagcccctggactcttataagcccggcgttgactgcgctccatgtccaccagggcacttttccccaggcgacaatcaagcctgtaaaccgtggacaaattgcacactggccgggaaacacaccttgcagccagccagcaattcctccgatgccatctgtgaagatcgggacccaccagccactcagcctcaagaaactcaggggcctcctgctaggcccattacagtgcaacctaccgaggcttggccccggacatctcagggaccttctacaaggccagtggaagtgccaggcggtagagctgtggctgctatccttggattgggcctcgttctcggactgttgggaccacttgcaatcctgctggctctctatctgctgcggcgggatcagagactccctccagatgctcataagccacctggcggcggatctttcaggaccccaattcaagaagaacaagccgacgctcactctaccctggctaagatccgcgccaagagaagcggatctggcgtgaagcagaccctgaatttcgacctgctgaagctggctggcgacgtggaatccaacccaggcccttctagaggccatatgaccgagtacaagcccacggtgcgcctcgccacccgcgacgacgtccccagggccgtacgcaccctcgccgccgcgttcgccgactaccccgccacgcgccacaccgtcgatccggaccgccacatcgagcgggtcaccgagctgcaagaactcttcctcacgcgcgtcgggctcgacatcggcaaggtgtgggtcgcggacgacggcgccgcggtggcggtctggaccacgccggagagcgtcgaagcgggggcggtgttcgccgagatcggcccgcgcatggccgagttgagcggttcccggctggccgcgcagcaacagatggaaggcctcctggcgccgcaccggcccaaggagcccgcgtggttcctggccaccgtcggcgtctcgcccgaccaccagggcaagggtctgggcagcgccgtcgtgctccccggagtggaggcggccgagcgcgccggggtgcccgccttcctggagacctccgcgccccgcaacctccccttctacgagcggctcggcttcaccgtcaccgccgacgtcgaggtgcccgaaggaccgcgcacctggtgcatgacccgcaagcccggtgcctga

SEQ ID NO: 5644 - DNA, 3270 bp, Artificial Sequence
  Synthetic Polynucleotide
atggccttaccagtgaccgccttgctcctgccgctggccttgctgctccacgccgccaggccggcatgcgaagtgcagctgcttgaaagtggcggcggactgattcagcctggcggatctctgagactgagctgtgccgccagcggcttcaccttttctagccacgccatgacctgggtccgacaggcacctggaaaagggcttgaatgggtgtccgccatcagcggctctggcgattacacacactacgccgacagcgtgaagggcagattcaccatcagcagagacaacagcaagaacaccgtgtacctccagatgaacagcctgagagccgaggacagcgccgtgtattattgcgccaaggatgaggatggcggcagcctgcttggacacagaggacaaggcaccctggtcaccgtttcttccggtaccggcggaggcggatctggcggcggaggtagcggtggcggaggatctgaattcggatctctcgagctgcattgcgtgggcgacacataccccagcaacgacagatgctgccacgaatgcagacccggcaatggcatggtgtccagatgcagcagatcccagaacaccgtgtgcagaccttgcggccctggcttctacaacgacgtggtgtctagcaagccctgcaagccttgcacctggtgtaacctgagaagcggcagcgagagaaagcagctgtgtaccgccacacaggataccgtgtgccggtgtagagctggcacacagcctctggacagctacaaacctggcgtggactgtgccccttgtcctcctggacactttagccctggcgacaaccaggcttgcaaaccctggaccaactgtaccctggccggcaagcacacactgcaacctgccagcaatagcagcgacgccatctgcgaggacagagatcctcctgccacacagccccaagagacacaaggacctccagccagacctatcaccgtgcagcctacagaagcctggcctagaacaagccagggacctagcaccagacctgtggaagttcctggtggcagagccgtggccgccattcttggtcttggactggtgctgggactgctcggacctctggctattctgctggccctgtacctgctgagaagggaccaaagactgcctcctgacgctcacaaacctccaggcggaggcagcttcagaacccctatccaagaggaacaggctgacgcccacagcaccctggcaaaaattagggccaagcgatctggatctggagcaacaaacttctcactactcaaacaagcaggtgacgtggaggagaatcccgggcctactagtgccaccatggactggatttggcgcatccttttccttgtcggcgctgctaccggcgcccattccgggcccgaagtgcagctggttgaatctggcggaggactggttcaggctggcggatctctgagactgtcttgtgccgccagcggcagaacctttagcatgggctggtttagacaggcccctggcaaagagagagagttcgtcgccgccatcacatactctggcggcagcccttactacgccgactctgtgaagggcagattcaccatcagccgggacaacgccaagaacaccgtgtacctccagatgaacagcctgaagcctgaggacaccgccgtgtactactgcgccgccaatccaacatacggcagcgactggaacgccgagaattggggccagggaacccaagtgacagtgtctagcggatccggcggcggaggatctggcggaggcggatctgggggcggaggctctttcgaaggcagcacgcgtctgcactgtgtcggcgacacctatccatccaacgatcggtgctgccatgagtgccggcctggcaacggaatggtgtctcgatgttctcggagtcagaataccgtctgtaggccatgcggacccggcttttacaatgatgtcgtgtcctccaaaccttgcaagccatgtacttggtgcaatctgcggagcggctctgagcggaaacagctgtgcactgctacccaggacacagtgtgtagatgcagagccggaactcagcccctggactcttataagcccggcgttgactgcgctccatgtccaccagggcacttttccccaggcgacaatcaagcctgtaaaccgtggacaaattgcacactggccgggaaacacaccttgcagccagccagcaattcctccgatgccatctgtgaagatcgggacccaccagccactcagcctcaagaaactcaggggcctcctgctaggcccattacagtgcaacctaccgaggcttggccccggacatctcagggaccttctacaaggccagtggaagtgccaggcggtagagctgtggctgctatccttggattgggcctcgttctcggactgttgggaccacttgcaatcctgctggctctctatctgctgcggcgggatcagagactccctccagatgctcataagccacctggcggcggatctttcaggaccccaattcaagaagaacaagccgacgctcactctaccctggctaagatccgcgccaagagaagcggatctggcgtgaagcagaccctgaatttcgacctgctgaagctggctggcgacgtggaatccaacccaggcccttctagaggccatatgaccgagtacaagcccacggtgcgcctcgccacccgcgacgacgtccccagggccgtacgcaccctcgccgccgcgttcgccgactaccccgccacgcgccacaccgtcgatccggaccgccacatcgagcgggtcaccgagctgcaagaactcttcctcacgcgcgtcgggctcgacatcggcaaggtgtgggtcgcggacgacggcgccgcggtggcggtctggaccacgccggagagcgtcgaagcgggggcggtgttcgccgagatcggcccgcgcatggccgagttgagcggttcccggctggccgcgcagcaacagatggaaggcctcctggcgccgcaccggcccaaggagcccgcgtggttcctggccaccgtcggcgtctcgcccgaccaccagggcaagggtctgggcagcgccgtcgtgctccccggagtggaggcggccgagcgcgccggggtgcccgccttcctggagacctccgcgccccgcaacctccccttctacgagcggctcggcttcaccgtcaccgccgacgtcgaggtgcccgaaggaccgcgcacctggtgcatgacccgcaagcccggtgcctga

SEQ ID NO: 5645 - DNA, 3720 bp, Artificial Sequence
  Synthetic Polynucleotide
atggccttaccagtgaccgccttgctcctgccgctggccttgctgctccacgccgccaggccggacatccagatgacacagagccctagcagcctgtctgccagcgtgggagacagagtgaccatcacatgcaaggccagcgaccacatcaacaactggctggcctggtatcagcagaagcctggacaggcccctaagctgctgatctacggcgctaccacactggaaacaggcgtgcccagcagattttctggcagcggctctggcaccgactacaccctgacaatatccagcctccagcctgaggacttcgccacctactactgtcagcagagctggaacaccccttggacattcggccagggcaccaagctggaaatcaagagactcgagggacagcctaaggccaatcctaccgtgacactgttccctccaagcagcgaagaactccaggccaacaaggccacacttgtgtgcctgatctccgacttctaccctggggctgtgacagtggcttggaaggccgatggatctcctgtgaaagccggcgtggaaaccaccaagccatccaagcagagcaacaacaaatacgccgccagctcctacctgagcctgacacctgagcagtggaagtcccacagatcctacagctgccaagtgacccacgaaggcagcaccgtggaaaagacagtggcccctacagagtgcagcggatccctgcattgcgtgggcgacacataccccagcaacgacagatgctgccacgaatgcagacccggcaatggcatggtgtccagatgcagcagatcccagaacaccgtgtgcagaccttgcggccctggcttctacaacgacgtggtgtctagcaagccctgcaagccttgcacctggtgtaacctgagaagcggcagcgagagaaagcagctgtgtaccgccacacaggataccgtgtgccggtgtagagctggcacacagcctctggacagctacaaacctggcgtggactgtgccccttgtcctcctggacactttagccctggcgacaaccaggcttgcaaaccctggaccaactgtaccctggccggcaagcacacactgcaacctgccagcaatagcagcgacgccatctgcgaggacagagatcctcctgccacacagccccaagagacacaaggacctccagccagacctatcaccgtgcagcctacagaagcctggcctagaacaagccagggacctagcaccagacctgtggaagttcctggtggcagagccgtggccgccattcttggtcttggactggtgctgggactgctcggacctctggctattctgctggccctgtacctgctgagaagggaccaaagactgcctcctgacgctcacaaacctccaggcggaggcagcttcagaacccctatccaagaggaacaggctgacgcccacagcaccctggcaaaaattagggccaagcgatctggatctggagcaacaaacttctcactactcaaacaagcaggtgacgtggaggagaatcccgggcctactagtatggactggatttggcgcatccttttccttgtcggcgctgctaccggcgcgcattccttcgaacaagttcagcttcaacagcctggcgctgagctggtcaaacctggcgcttctgtgaagatgagctgcaaagccagcggctacgccttcagcagctactggatcaactggatgaagcagaaacccggccagggactcgaatggatcggccaaatctatcccggcgacggcgacaccaactacaacggcaagttcaagggcagagccacactgaccgccgatacctctagcagcacagcctacatgcagctgagcagcctgaccagcgaagatagcgccgtgtacttctgtgcccggtccatcacaacagtcgtgggctgcgctatggactattggggccagggaacaagcgtgaccgtgtctagtacgcgtgcctctacaaagggaccctccgtgtttcctctggctcccagcagcaagtctacaagcggaggaacagccgctctgggctgcctggtcaaggattactttcccgagcctgtgaccgtgtcctggaatagcggagcactgacaagcggcgtgcacacctttccagccgtgctgcaaagcagcggcctgtactctctgagcagcgtggtcacagtgcctagctctagcctgggcacccagacctacatctgcaatgtgaaccacaagcctagcaacaccaaggtggacaagagagtggaacccaagagctgtggtaccctgcactgtgtcggcgacacctatccatccaacgatcggtgctgccatgagtgccggcctggcaacggaatggtgtctcgatgttctcggagtcagaataccgtctgtaggccatgcggacccggcttttacaatgatgtcgtgtcctccaaaccttgcaagccatgtacttggtgcaatctgcggagcggctctgagcggaaacagctgtgcactgctacccaggacacagtgtgtagatgcagagccggaactcagcccctggactcttataagcccggcgttgactgcgctccatgtccaccagggcacttttccccaggcgacaatcaagcctgtaaaccgtggacaaattgcacactggccgggaaacacaccttgcagccagccagcaattcctccgatgccatctgtgaagatcgggacccaccagccactcagcctcaagaaactcaggggcctcctgctaggcccattacagtgcaacctaccgaggcttggccccggacatctcagggaccttctacaaggccagtggaagtgccaggcggtagagctgtggctgctatccttggattgggcctcgttctcggactgttgggaccacttgcaatcctgctggctctctatctgctgcggcgggatcagagactccctccagatgctcataagccacctggcggcggatctttcaggaccccaattcaagaagaacaagccgacgctcactctaccctggctaagatccgcgccaagagaagcggatctggcgtgaagcagaccctgaatttcgacctgctgaagctggctggcgacgtggaatccaacccaggcccttctagaggcgggatccacaccatggctacctacgaggtgctgtgcgaggtggcaagaaagctgggcaccgacgacagagaagtggtgctgttcctgctgaacgtgttcatccctcagcctacactggcccagctgatcggtgcactgagagccctgaaagaggaaggccggctgacctttcctctgctggccgaatgcctgttcagagccggaagaagggatctgctgcgggacctgctgcatctggaccccagatttctggaaagacacctggccggcaccatgagctacttcagcccttaccagctgaccgtgctgcacgttgacggcgaactgtgcgccagagatattcggagcctgatcttcctgagcaaggacaccatcggcagccggtctacccctcagacatttctgcactgggtgtactgcatggaaaacctggacctgctcggccccacagatgtggatgccctgatgtccatgctgagaagcctgagcagagtggacctccagagacaggtgcagacactgatgggactgcacctgagcggacctagccacagccagcactacagacacacccct

SEQ ID NO: 5646 - DNA, 3879 bp, Artificial Sequence
  Synthetic Polynucleotide
atggccttaccagtgaccgccttgctcctgccgctggccttgctgctccacgccgccaggccggacatccagatgacacagagccctagcagcctgtctgccagcgtgggagacagagtgaccatcacatgcaaggccagcgaccacatcaacaactggctggcctggtatcagcagaagcctggacaggcccctaagctgctgatctacggcgctaccacactggaaacaggcgtgcccagcagattttctggcagcggctctggcaccgactacaccctgacaatatccagcctccagcctgaggacttcgccacctactactgtcagcagagctggaacaccccttggacattcggccagggcaccaagctggaaatcaagagactcgagggacagcctaaggccaatcctaccgtgacactgttccctccaagcagcgaagaactccaggccaacaaggccacacttgtgtgcctgatctccgacttctaccctggggctgtgacagtggcttggaaggccgatggatctcctgtgaaagccggcgtggaaaccaccaagccatccaagcagagcaacaacaaatacgccgccagctcctacctgagcctgacacctgagcagtggaagtcccacagatcctacagctgccaagtgacccacgaaggcagcaccgtggaaaagacagtggcccctacagagtgcagcggatccctgcattgcgtgggcgacacataccccagcaacgacagatgctgccacgaatgcagacccggcaatggcatggtgtccagatgcagcagatcccagaacaccgtgtgcagaccttgcggccctggcttctacaacgacgtggtgtctagcaagccctgcaagccttgcacctggtgtaacctgagaagcggcagcgagagaaagcagctgtgtaccgccacacaggataccgtgtgccggtgtagagctggcacacagcctctggacagctacaaacctggcgtggactgtgccccttgtcctcctggacactttagccctggcgacaaccaggcttgcaaaccctggaccaactgtaccctggccggcaagcacacactgcaacctgccagcaatagcagcgacgccatctgcgaggacagagatcctcctgccacacagccccaagagacacaaggacctccagccagacctatcaccgtgcagcctacagaagcctggcctagaacaagccagggacctagcaccagacctgtggaagttcctggtggcagagccgtggccgccattcttggtcttggactggtgctgggactgctcggacctctggctattctgctggccctgtacctgctgagaagggaccaaagactgcctcctgacgctcacaaacctccaggcggaggcagcttcagaacccctatccaagaggaacaggctgacgcccacagcaccctggcaaaaattagggccaagcgatctggatctggagcaacaaacttctcactactcaaacaagcaggtgacgtggaggagaatcccgggcctactagtatggactggatttggcgcatccttttccttgtcggcgctgctaccggcgcgcattccttcgaacaagttcagcttcaacagcctggcgctgagctggtcaaacctggcgcttctgtgaagatgagctgcaaagccagcggctacgccttcagcagctactggatcaactggatgaagcagaaacccggccagggactcgaatggatcggccaaatctatcccggcgacggcgacaccaactacaacggcaagttcaagggcagagccacactgaccgccgatacctctagcagcacagcctacatgcagctgagcagcctgaccagcgaagatagcgccgtgtacttctgtgcccggtccatcacaacagtcgtgggctgcgctatggactattggggccagggaacaagcgtgaccgtgtctagtacgcgtgcctctacaaagggaccctccgtgtttcctctggctcccagcagcaagtctacaagcggaggaacagccgctctgggctgcctggtcaaggattactttcccgagcctgtgaccgtgtcctggaatagcggagcactgacaagcggcgtgcacacctttccagccgtgctgcaaagcagcggcctgtactctctgagcagcgtggtcacagtgcctagctctagcctgggcacccagacctacatctgcaatgtgaaccacaagcctagcaacaccaaggtggacaagagagtggaacccaagagctgtggtaccctgcactgtgtcggcgacacctatccatccaacgatcggtgctgccatgagtgccggcctggcaacggaatggtgtctcgatgttctcggagtcagaataccgtctgtaggccatgcggacccggcttttacaatgatgtcgtgtcctccaaaccttgcaagccatgtacttggtgcaatctgcggagcggctctgagcggaaacagctgtgcactgctacccaggacacagtgtgtagatgcagagccggaactcagcccctggactcttataagcccggcgttgactgcgctccatgtccaccagggcacttttccccaggcgacaatcaagcctgtaaaccgtggacaaattgcacactggccgggaaacacaccttgcagccagccagcaattcctccgatgccatctgtgaagatcgggacccaccagccactcagcctcaagaaactcaggggcctcctgctaggcccattacagtgcaacctaccgaggcttggccccggacatctcagggaccttctacaaggccagtggaagtgccaggcggtagagctgtggctgctatccttggattgggcctcgttctcggactgttgggaccacttgcaatcctgctggctctctatctgctgcggcgggatcagagactccctccagatgctcataagccacctggcggcggatctttcaggaccccaattcaagaagaacaagccgacgctcactctaccctggctaagatccgcgccaagagaagcggatctggcgtgaagcagaccctgaatttcgacctgctgaagctggctggcgacgtggaatccaacccaggcccttctagaggcgggatccacaccatgtccgactccaaggaggtccctagccttccatttttgcgacacttgctcgaagagttggacagccatgaggacagcttgctgctgtttctgtgtcacgacgcggccccgggctgcacgacggtcacgcaagctttgtgctcgcttagccaacagcgcaagctgaccctcgcggctctggtcgagatgctctacgtgctgcagcgtatggatcttctcaagagccgcttcgggctcagcaaggagggggccgagcaattgctgggcacaagctttctcacgcgctaccgcaagctcatggtttgcgtgggtgaggagctcgactcgagcgagctacgcgctctacgcttgttcgcgtgcaacctgaatccgagcctgagcacggcgctttctgagagcagccgctttgtcgagcttgtactcgcgcttgaaaacgtaggactcgtctcgccatcgagtgtttccgtgcttgcggacatgttgcgcactcttcggcgcctcgatttgtgccagcagcttgttgagtacgaacaacaagagcaagccaggtaccgttactgttacgcggcctcgccctcattgccagttcgtacgttacgtcgggggcacggcgcgagtgaacacgagcagctgtgcatgcccgtgcaagaatcctctgacagccccgagctgctgcgcacgcccgtacaagaatcctccagcgacagccccgagcaaacgact

SEQ ID NO: 5647 - DNA, 3747 bp, Artificial Sequence
  Synthetic Polynucleotide
atggccttaccagtgaccgccttgctcctgccgctggccttgctgctccacgccgccaggccggacatccagatgacacagagccctagcagcctgtctgccagcgtgggagacagagtgaccatcacatgcaaggccagcgaccacatcaacaactggctggcctggtatcagcagaagcctggacaggcccctaagctgctgatctacggcgctaccacactggaaacaggcgtgcccagcagattttctggcagcggctctggcaccgactacaccctgacaatatccagcctccagcctgaggacttcgccacctactactgtcagcagagctggaacaccccttggacattcggccagggcaccaagctggaaatcaagagactcgagggacagcctaaggccaatcctaccgtgacactgttccctccaagcagcgaagaactccaggccaacaaggccacacttgtgtgcctgatctccgacttctaccctggggctgtgacagtggcttggaaggccgatggatctcctgtgaaagccggcgtggaaaccaccaagccatccaagcagagcaacaacaaatacgccgccagctcctacctgagcctgacacctgagcagtggaagtcccacagatcctacagctgccaagtgacccacgaaggcagcaccgtggaaaagacagtggcccctacagagtgcagcggatccctgcattgcgtgggcgacacataccccagcaacgacagatgctgccacgaatgcagacccggcaatggcatggtgtccagatgcagcagatcccagaacaccgtgtgcagaccttgcggccctggcttctacaacgacgtggtgtctagcaagccctgcaagccttgcacctggtgtaacctgagaagcggcagcgagagaaagcagctgtgtaccgccacacaggataccgtgtgccggtgtagagctggcacacagcctctggacagctacaaacctggcgtggactgtgccccttgtcctcctggacactttagccctggcgacaaccaggcttgcaaaccctggaccaactgtaccctggccggcaagcacacactgcaacctgccagcaatagcagcgacgccatctgcgaggacagagatcctcctgccacacagccccaagagacacaaggacctccagccagacctatcaccgtgcagcctacagaagcctggcctagaacaagccagggacctagcaccagacctgtggaagttcctggtggcagagccgtggccgccattcttggtcttggactggtgctgggactgctcggacctctggctattctgctggccctgtacctgctgagaagggaccaaagactgcctcctgacgctcacaaacctccaggcggaggcagcttcagaacccctatccaagaggaacaggctgacgcccacagcaccctggcaaaaattagggccaagcgatctggatctggagcaacaaacttctcactactcaaacaagcaggtgacgtggaggagaatcccgggcctactagtatggactggatttggcgcatccttttccttgtcggcgctgctaccggcgcgcattccttcgaacaagttcagcttcaacagcctggcgctgagctggtcaaacctggcgcttctgtgaagatgagctgcaaagccagcggctacgccttcagcagctactggatcaactggatgaagcagaaacccggccagggactcgaatggatcggccaaatctatcccggcgacggcgacaccaactacaacggcaagttcaagggcagagccacactgaccgccgatacctctagcagcacagcctacatgcagctgagcagcctgaccagcgaagatagcgccgtgtacttctgtgcccggtccatcacaacagtcgtgggctgcgctatggactattggggccagggaacaagcgtgaccgtgtctagtacgcgtgcctctacaaagggaccctccgtgtttcctctggctcccagcagcaagtctacaagcggaggaacagccgctctgggctgcctggtcaaggattactttcccgagcctgtgaccgtgtcctggaatagcggagcactgacaagcggcgtgcacacctttccagccgtgctgcaaagcagcggcctgtactctctgagcagcgtggtcacagtgcctagctctagcctgggcacccagacctacatctgcaatgtgaaccacaagcctagcaacaccaaggtggacaagagagtggaacccaagagctgtggtaccctgcactgtgtcggcgacacctatccatccaacgatcggtgctgccatgagtgccggcctggcaacggaatggtgtctcgatgttctcggagtcagaataccgtctgtaggccatgcggacccggcttttacaatgatgtcgtgtcctccaaaccttgcaagccatgtacttggtgcaatctgcggagcggctctgagcggaaacagctgtgcactgctacccaggacacagtgtgtagatgcagagccggaactcagcccctggactcttataagcccggcgttgactgcgctccatgtccaccagggcacttttccccaggcgacaatcaagcctgtaaaccgtggacaaattgcacactggccgggaaacacaccttgcagccagccagcaattcctccgatgccatctgtgaagatcgggacccaccagccactcagcctcaagaaactcaggggcctcctgctaggcccattacagtgcaacctaccgaggcttggccccggacatctcagggaccttctacaaggccagtggaagtgccaggcggtagagctgtggctgctatccttggattgggcctcgttctcggactgttgggaccacttgcaatcctgctggctctctatctgctgcggcgggatcagagactccctccagatgctcataagccacctggcggcggatctttcaggaccccaattcaagaagaacaagccgacgctcactctaccctggctaagatccgcgccaagagaagcggatctggcgtgaagcagaccctgaatttcgacctgctgaagctggctggcgacgtggaatccaacccaggcccttctagaggccatatgaccgagtacaagcccacggtgcgcctcgccacccgcgacgacgtccccagggccgtacgcaccctcgccgccgcgttcgccgactaccccgccacgcgccacaccgtcgatccggaccgccacatcgagcgggtcaccgagctgcaagaactcttcctcacgcgcgtcgggctcgacatcggcaaggtgtgggtcgcggacgacggcgccgcggtggcggtctggaccacgccggagagcgtcgaagcgggggcggtgttcgccgagatcggcccgcgcatggccgagttgagcggttcccggctggccgcgcagcaacagatggaaggcctcctggcgccgcaccggcccaaggagcccgcgtggttcctggccaccgtcggcgtctcgcccgaccaccagggcaagggtctgggcagcgccgtcgtgctccccggagtggaggcggccgagcgcgccggggtgcccgccttcctggagacctccgcgccccgcaacctccccttctacgagcggctcggcttcaccgtcaccgccgacgtcgaggtgcccgaaggaccgcgcacctggtgcatgacccgcaagcccggtgcctga

SEQ ID NO: 5648 - DNA, 4158 bp, Artificial Sequence
  Synthetic Polynucleotide
atggccttaccagtgaccgccttgctcctgccgctggccttgctgctccacgccgccaggccggaagtgcagctggttgaatctggcggaggactggttcaggctggcggatctctgagactgtcttgtgccgccagcggcagaacctttagcatgggctggtttagacaggcccctggcaaagagagagagttcgtcgccgccatcacatactctggcggcagcccttactacgccgactctgtgaagggcagattcaccatcagccgggacaacgccaagaacaccgtgtacctccagatgaacagcctgaagcctgaggacaccgccgtgtactactgcgccgccaatccaacatacggcagcgactggaacgccgagaattggggccagggaacccaagtgacagtgtctagcggtaccggcggaggcggatctggcggcggaggtagcggtggcggaggatctgaattcgacatccagatgacacagagccctagcagcctgtctgccagcgtgggagacagagtgaccatcacatgcaaggccagcgaccacatcaacaactggctggcctggtatcagcagaagcctggacaggcccctaagctgctgatctacggcgctaccacactggaaacaggcgtgcccagcagattttctggcagcggctctggcaccgactacaccctgacaatatccagcctccagcctgaggacttcgccacctactactgtcagcagagctggaacaccccttggacattcggccagggcaccaagctggaaatcaagagactcgagggacagcctaaggccaatcctaccgtgacactgttccctccaagcagcgaagaactccaggccaacaaggccacacttgtgtgcctgatctccgacttctaccctggggctgtgacagtggcttggaaggccgatggatctcctgtgaaagccggcgtggaaaccaccaagccatccaagcagagcaacaacaaatacgccgccagctcctacctgagcctgacacctgagcagtggaagtcccacagatcctacagctgccaagtgacccacgaaggcagcaccgtggaaaagacagtggcccctacagagtgcagcggatccctgcattgcgtgggcgacacataccccagcaacgacagatgctgccacgaatgcagacccggcaatggcatggtgtccagatgcagcagatcccagaacaccgtgtgcagaccttgcggccctggcttctacaacgacgtggtgtctagcaagccctgcaagccttgcacctggtgtaacctgagaagcggcagcgagagaaagcagctgtgtaccgccacacaggataccgtgtgccggtgtagagctggcacacagcctctggacagctacaaacctggcgtggactgtgccccttgtcctcctggacactttagccctggcgacaaccaggcttgcaaaccctggaccaactgtaccctggccggcaagcacacactgcaacctgccagcaatagcagcgacgccatctgcgaggacagagatcctcctgccacacagccccaagagacacaaggacctccagccagacctatcaccgtgcagcctacagaagcctggcctagaacaagccagggacctagcaccagacctgtggaagttcctggtggcagagccgtggccgccattcttggtcttggactggtgctgggactgctcggacctctggctattctgctggccctgtacctgctgagaagggaccaaagactgcctcctgacgctcacaaacctccaggcggaggcagcttcagaacccctatccaagaggaacaggctgacgcccacagcaccctggcaaaaattagggccaagcgatctggatctggagcaacaaacttctcactactcaaacaagcaggtgacgtggaggagaatcccgggcctactagtatggactggatttggcgcatccttttccttgtcggcgctgctaccggcgcgcattccttcgaacaagttcagcttcaacagcctggcgctgagctggtcaaacctggcgcttctgtgaagatgagctgcaaagccagcggctacgccttcagcagctactggatcaactggatgaagcagaaacccggccagggactcgaatggatcggccaaatctatcccggcgacggcgacaccaactacaacggcaagttcaagggcagagccacactgaccgccgatacctctagcagcacagcctacatgcagctgagcagcctgaccagcgaagatagcgccgtgtacttctgtgcccggtccatcacaacagtcgtgggctgcgctatggactattggggccagggaacaagcgtgaccgtgtctagtacgcgtgcctctacaaagggaccctccgtgtttcctctggctcccagcagcaagtctacaagcggaggaacagccgctctgggctgcctggtcaaggattactttcccgagcctgtgaccgtgtcctggaatagcggagcactgacaagcggcgtgcacacctttccagccgtgctgcaaagcagcggcctgtactctctgagcagcgtggtcacagtgcctagctctagcctgggcacccagacctacatctgcaatgtgaaccacaagcctagcaacaccaaggtggacaagagagtggaacccaagagctgtggtaccctgcactgtgtcggcgacacctatccatccaacgatcggtgctgccatgagtgccggcctggcaacggaatggtgtctcgatgttctcggagtcagaataccgtctgtaggccatgcggacccggcttttacaatgatgtcgtgtcctccaaaccttgcaagccatgtacttggtgcaatctgcggagcggctctgagcggaaacagctgtgcactgctacccaggacacagtgtgtagatgcagagccggaactcagcccctggactcttataagcccggcgttgactgcgctccatgtccaccagggcacttttccccaggcgacaatcaagcctgtaaaccgtggacaaattgcacactggccgggaaacacaccttgcagccagccagcaattcctccgatgccatctgtgaagatcgggacccaccagccactcagcctcaagaaactcaggggcctcctgctaggcccattacagtgcaacctaccgaggcttggccccggacatctcagggaccttctacaaggccagtggaagtgccaggcggtagagctgtggctgctatccttggattgggcctcgttctcggactgttgggaccacttgcaatcctgctggctctctatctgctgcggcgggatcagagactccctccagatgctcataagccacctggcggcggatctttcaggaccccaattcaagaagaacaagccgacgctcactctaccctggctaagatccgcgccaagagaagcggatctggcgtgaagcagaccctgaatttcgacctgctgaagctggctggcgacgtggaatccaacccaggcccttctagaggccatatgaccgagtacaagcccacggtgcgcctcgccacccgcgacgacgtccccagggccgtacgcaccctcgccgccgcgttcgccgactaccccgccacgcgccacaccgtcgatccggaccgccacatcgagcgggtcaccgagctgcaagaactcttcctcacgcgcgtcgggctcgacatcggcaaggtgtgggtcgcggacgacggcgccgcggtggcggtctggaccacgccggagagcgtcgaagcgggggcggtgttcgccgagatcggcccgcgcatggccgagttgagcggttcccggctggccgcgcagcaacagatggaaggcctcctggcgccgcaccggcccaaggagcccgcgtggttcctggccaccgtcggcgtctcgcccgaccaccagggcaagggtctgggcagcgccgtcgtgctccccggagtggaggcggccgagcgcgccggggtgcccgccttcctggagacctccgcgccccgcaacctccccttctacgagcggctcggcttcaccgtcaccgccgacgtcgaggtgcccgaaggaccgcgcacctggtgcatgacccgcaagcccggtgcctga

SEQ ID NO: 5649 - DNA, 4569 bp, Artificial Sequence
  Synthetic Polynucleotide
atggccttaccagtgaccgccttgctcctgccgctggccttgctgctccacgccgccaggccggaagtgcagctggttgaatctggcggaggactggttcaggctggcggatctctgagactgtcttgtgccgccagcggcagaacctttagcatgggctggtttagacaggcccctggcaaagagagagagttcgtcgccgccatcacatactctggcggcagcccttactacgccgactctgtgaagggcagattcaccatcagccgggacaacgccaagaacaccgtgtacctccagatgaacagcctgaagcctgaggacaccgccgtgtactactgcgccgccaatccaacatacggcagcgactggaacgccgagaattggggccagggaacccaagtgacagtgtctagcggtaccggcggaggcggatctggcggcggaggtagcggtggcggaggatctgaattcgacatccagatgacacagagccctagcagcctgtctgccagcgtgggagacagagtgaccatcacatgcaaggccagcgaccacatcaacaactggctggcctggtatcagcagaagcctggacaggcccctaagctgctgatctacggcgctaccacactggaaacaggcgtgcccagcagattttctggcagcggctctggcaccgactacaccctgacaatatccagcctccagcctgaggacttcgccacctactactgtcagcagagctggaacaccccttggacattcggccagggcaccaagctggaaatcaagagactcgagggacagcctaaggccaatcctaccgtgacactgttccctccaagcagcgaagaactccaggccaacaaggccacacttgtgtgcctgatctccgacttctaccctggggctgtgacagtggcttggaaggccgatggatctcctgtgaaagccggcgtggaaaccaccaagccatccaagcagagcaacaacaaatacgccgccagctcctacctgagcctgacacctgagcagtggaagtcccacagatcctacagctgccaagtgacccacgaaggcagcaccgtggaaaagacagtggcccctacagagtgcagcggatccctgcattgcgtgggcgacacataccccagcaacgacagatgctgccacgaatgcagacccggcaatggcatggtgtccagatgcagcagatcccagaacaccgtgtgcagaccttgcggccctggcttctacaacgacgtggtgtctagcaagccctgcaagccttgcacctggtgtaacctgagaagcggcagcgagagaaagcagctgtgtaccgccacacaggataccgtgtgccggtgtagagctggcacacagcctctggacagctacaaacctggcgtggactgtgccccttgtcctcctggacactttagccctggcgacaaccaggcttgcaaaccctggaccaactgtaccctggccggcaagcacacactgcaacctgccagcaatagcagcgacgccatctgcgaggacagagatcctcctgccacacagccccaagagacacaaggacctccagccagacctatcaccgtgcagcctacagaagcctggcctagaacaagccagggacctagcaccagacctgtggaagttcctggtggcagagccgtggccgccattcttggtcttggactggtgctgggactgctcggacctctggctattctgctggccctgtacctgctgagaagggaccaaagactgcctcctgacgctcacaaacctccaggcggaggcagcttcagaacccctatccaagaggaacaggctgacgcccacagcaccctggcaaaaattagggccaagcgatctggatctggagcaacaaacttctcactactcaaacaagcaggtgacgtggaggagaatcccgggcctactagtatggactggatttggcgcatccttttccttgtcggcgctgctaccggcgcgcattccgggcccgaagtgcaactggttgaatccggtggcggcctggtgcaagcaggcggatctctcagacttagctgtgccgcctccggcagaaccttcacaatgggatggtttaggcaggctccagggaaagagagagagttcgtcgccgccatctctctgtctcccacactggcctactacgccgactctgtgaaaggccggttcaccatctccagagataatgccaagaacaccgtggtgctgcaaatgaactctctgaaacccgaggatacagccctgtactattgtgccgctgaccggaagtccgtgatgagcatcagacccgattactggggacagggcacacaagtcacagtgtcctctggatccggcggcggaggatctggcggaggcggatctgggggcggaggctctttcgaacaagttcagcttcaacagcctggcgctgagctggtcaaacctggcgcttctgtgaagatgagctgcaaagccagcggctacgccttcagcagctactggatcaactggatgaagcagaaacccggccagggactcgaatggatcggccaaatctatcccggcgacggcgacaccaactacaacggcaagttcaagggcagagccacactgaccgccgatacctctagcagcacagcctacatgcagctgagcagcctgaccagcgaagatagcgccgtgtacttctgtgcccggtccatcacaacagtcgtgggctgcgctatggactattggggccagggaacaagcgtgaccgtgtctagtacgcgtgcctctacaaagggaccctccgtgtttcctctggctcccagcagcaagtctacaagcggaggaacagccgctctgggctgcctggtcaaggattactttcccgagcctgtgaccgtgtcctggaatagcggagcactgacaagcggcgtgcacacctttccagccgtgctgcaaagcagcggcctgtactctctgagcagcgtggtcacagtgcctagctctagcctgggcacccagacctacatctgcaatgtgaaccacaagcctagcaacaccaaggtggacaagagagtggaacccaagagctgtggtaccctgcactgtgtcggcgacacctatccatccaacgatcggtgctgccatgagtgccggcctggcaacggaatggtgtctcgatgttctcggagtcagaataccgtctgtaggccatgcggacccggcttttacaatgatgtcgtgtcctccaaaccttgcaagccatgtacttggtgcaatctgcggagcggctctgagcggaaacagctgtgcactgctacccaggacacagtgtgtagatgcagagccggaactcagcccctggactcttataagcccggcgttgactgcgctccatgtccaccagggcacttttccccaggcgacaatcaagcctgtaaaccgtggacaaattgcacactggccgggaaacacaccttgcagccagccagcaattcctccgatgccatctgtgaagatcgggacccaccagccactcagcctcaagaaactcaggggcctcctgctaggcccattacagtgcaacctaccgaggcttggccccggacatctcagggaccttctacaaggccagtggaagtgccaggcggtagagctgtggctgctatccttggattgggcctcgttctcggactgttgggaccacttgcaatcctgctggctctctatctgctgcggcgggatcagagactccctccagatgctcataagccacctggcggcggatctttcaggaccccaattcaagaagaacaagccgacgctcactctaccctggctaagatccgcgccaagagaagcggatctggcgtgaagcagaccctgaatttcgacctgctgaagctggctggcgacgtggaatccaacccaggcccttctagaggccatatgaccgagtacaagcccacggtgcgcctcgccacccgcgacgacgtccccagggccgtacgcaccctcgccgccgcgttcgccgactaccccgccacgcgccacaccgtcgatccggaccgccacatcgagcgggtcaccgagctgcaagaactcttcctcacgcgcgtcgggctcgacatcggcaaggtgtgggtcgcggacgacggcgccgcggtggcggtctggaccacgccggagagcgtcgaagcgggggcggtgttcgccgagatcggcccgcgcatggccgagttgagcggttcccggctggccgcgcagcaacagatggaaggcctcctggcgccgcaccggcccaaggagcccgcgtggttcctggccaccgtcggcgtctcgcccgaccaccagggcaagggtctgggcagcgccgtcgtgctccccggagtggaggcggccgagcgcgccggggtgcccgccttcctggagacctccgcgccccgcaacctccccttctacgagcggctcggcttcaccgtcaccgccgacgtcgaggtgcccgaaggaccgcgcacctggtgcatgacccgcaagcccggtgcctga

SEQ ID NO: 5650 - DNA, 3768 bp, Artificial Sequence
  Synthetic Polynucleotide
atggccttaccagtgaccgccttgctcctgccgctggccttgctgctccacgccgccaggccggaagtgcagctggttgaatctggcggaggactggttcaggctggcggatctctgagactgtcttgtgccgccagcggcagaacctttagcatgggctggtttagacaggcccctggcaaagagagagagttcgtcgccgccatcacatactctggcggcagcccttactacgccgactctgtgaagggcagattcaccatcagccgggacaacgccaagaacaccgtgtacctccagatgaacagcctgaagcctgaggacaccgccgtgtactactgcgccgccaatccaacatacggcagcgactggaacgccgagaattggggccagggaacccaagtgacagtgtctagcctcgagggacagcctaaggccaatcctaccgtgacactgttccctccaagcagcgaagaactccaggccaacaaggccacacttgtgtgcctgatctccgacttctaccctggggctgtgacagtggcttggaaggccgatggatctcctgtgaaagccggcgtggaaaccaccaagccatccaagcagagcaacaacaaatacgccgccagctcctacctgagcctgacacctgagcagtggaagtcccacagatcctacagctgccaagtgacccacgaaggcagcaccgtggaaaagacagtggcccctacagagtgcagcggatccctgcattgcgtgggcgacacataccccagcaacgacagatgctgccacgaatgcagacccggcaatggcatggtgtccagatgcagcagatcccagaacaccgtgtgcagaccttgcggccctggcttctacaacgacgtggtgtctagcaagccctgcaagccttgcacctggtgtaacctgagaagcggcagcgagagaaagcagctgtgtaccgccacacaggataccgtgtgccggtgtagagctggcacacagcctctggacagctacaaacctggcgtggactgtgccccttgtcctcctggacactttagccctggcgacaaccaggcttgcaaaccctggaccaactgtaccctggccggcaagcacacactgcaacctgccagcaatagcagcgacgccatctgcgaggacagagatcctcctgccacacagccccaagagacacaaggacctccagccagacctatcaccgtgcagcctacagaagcctggcctagaacaagccagggacctagcaccagacctgtggaagttcctggtggcagagccgtggccgccattcttggtcttggactggtgctgggactgctcggacctctggctattctgctggccctgtacctgctgagaagggaccaaagactgcctcctgacgctcacaaacctccaggcggaggcagcttcagaacccctatccaagaggaacaggctgacgcccacagcaccctggcaaaaattagggccaagcgatctggatctggagcaacaaacttctcactactcaaacaagcaggtgacgtggaggagaatcccgggcctactagtatggactggatttggcgcatccttttccttgtcggcgctgctaccggcgcgcattccgggcccgaagtgcaactggttgaatccggtggcggcctggtgcaagcaggcggatctctcagacttagctgtgccgcctccggcagaaccttcacaatgggatggtttaggcaggctccagggaaagagagagagttcgtcgccgccatctctctgtctcccacactggcctactacgccgactctgtgaaaggccggttcaccatctccagagataatgccaagaacaccgtggtgctgcaaatgaactctctgaaacccgaggatacagccctgtactattgtgccgctgaccggaagtccgtgatgagcatcagacccgattactggggacagggcacacaagtcacagtgtcctctacgcgtgcctctacaaagggaccctccgtgtttcctctggctcccagcagcaagtctacaagcggaggaacagccgctctgggctgcctggtcaaggattactttcccgagcctgtgaccgtgtcctggaatagcggagcactgacaagcggcgtgcacacctttccagccgtgctgcaaagcagcggcctgtactctctgagcagcgtggtcacagtgcctagctctagcctgggcacccagacctacatctgcaatgtgaaccacaagcctagcaacaccaaggtggacaagagagtggaacccaagagctgtggtaccctgcactgtgtcggcgacacctatccatccaacgatcggtgctgccatgagtgccggcctggcaacggaatggtgtctcgatgttctcggagtcagaataccgtctgtaggccatgcggacccggcttttacaatgatgtcgtgtcctccaaaccttgcaagccatgtacttggtgcaatctgcggagcggctctgagcggaaacagctgtgcactgctacccaggacacagtgtgtagatgcagagccggaactcagcccctggactcttataagcccggcgttgactgcgctccatgtccaccagggcacttttccccaggcgacaatcaagcctgtaaaccgtggacaaattgcacactggccgggaaacacaccttgcagccagccagcaattcctccgatgccatctgtgaagatcgggacccaccagccactcagcctcaagaaactcaggggcctcctgctaggcccattacagtgcaacctaccgaggcttggccccggacatctcagggaccttctacaaggccagtggaagtgccaggcggtagagctgtggctgctatccttggattgggcctcgttctcggactgttgggaccacttgcaatcctgctggctctctatctgctgcggcgggatcagagactccctccagatgctcataagccacctggcggcggatctttcaggaccccaattcaagaagaacaagccgacgctcactctaccctggctaagatccgcgccaagagaagcggatctggcgtgaagcagaccctgaatttcgacctgctgaagctggctggcgacgtggaatccaacccaggcccttctagaggccatatgaccgagtacaagcccacggtgcgcctcgccacccgcgacgacgtccccagggccgtacgcaccctcgccgccgcgttcgccgactaccccgccacgcgccacaccgtcgatccggaccgccacatcgagcgggtcaccgagctgcaagaactcttcctcacgcgcgtcgggctcgacatcggcaaggtgtgggtcgcggacgacggcgccgcggtggcggtctggaccacgccggagagcgtcgaagcgggggcggtgttcgccgagatcggcccgcgcatggccgagttgagcggttcccggctggccgcgcagcaacagatggaaggcctcctggcgccgcaccggcccaaggagcccgcgtggttcctggccaccgtcggcgtctcgcccgaccaccagggcaagggtctgggcagcgccgtcgtgctccccggagtggaggcggccgagcgcgccggggtgcccgccttcctggagacctccgcgccccgcaacctccccttctacgagcggctcggcttcaccgtcaccgccgacgtcgaggtgcccgaaggaccgcgcacctggtgcatgacccgcaagcccggtgcctga

SEQ ID NO: 5651 - DNA, 3792 bp, Artificial Sequence
  Synthetic Polynucleotide
atggccttaccagtgaccgccttgctcctgccgctggccttgctgctccacgccgccaggccggacatccagatgacacagagccctagcagcctgtctgccagcgtgggagacagagtgaccatcacatgcaaggccagcgaccacatcaacaactggctggcctggtatcagcagaagcctggacaggcccctaagctgctgatctacggcgctaccacactggaaacaggcgtgcccagcagattttctggcagcggctctggcaccgactacaccctgacaatatccagcctccagcctgaggacttcgccacctactactgtcagcagagctggaacaccccttggacattcggccagggcaccaagctggaaatcaagagactcgaggacctgaagaacgtgttcccacctgaggtggccgtgttcgagcctagcgaggccgagatcagccacacccagaaagccaccctcgtgtgcctggctaccggcttctaccccgaccatgtggaactgtcttggtgggtcaacggcaaagaggtgcacagcggcgtgtctaccgacccccagccactgaaagaacagcccgccctgaacgacagccggtactgcctgagcagcagactgagagtgtccgccaccttctggcagaacccccggaaccacttcagatgccaggtgcagttctacggcctgagcgagaacgacgagtggacccaggacagagccaagcccgtgacccagatcgtgtctgccgaagcctggggcagagccgattgcggatccctgcattgcgtgggcgacacataccccagcaacgacagatgctgccacgaatgcagacccggcaatggcatggtgtccagatgcagcagatcccagaacaccgtgtgcagaccttgcggccctggcttctacaacgacgtggtgtctagcaagccctgcaagccttgcacctggtgtaacctgagaagcggcagcgagagaaagcagctgtgtaccgccacacaggataccgtgtgccggtgtagagctggcacacagcctctggacagctacaaacctggcgtggactgtgccccttgtcctcctggacactttagccctggcgacaaccaggcttgcaaaccctggaccaactgtaccctggccggcaagcacacactgcaacctgccagcaatagcagcgacgccatctgcgaggacagagatcctcctgccacacagccccaagagacacaaggacctccagccagacctatcaccgtgcagcctacagaagcctggcctagaacaagccagggacctagcaccagacctgtggaagttcctggtggcagagccgtggccgccattcttggtcttggactggtgctgggactgctcggacctctggctattctgctggccctgtacctgctgagaagggaccaaagactgcctcctgacgctcacaaacctccaggcggaggcagcttcagaacccctatccaagaggaacaggctgacgcccacagcaccctggcaaaaattagggccaagcgatctggatctggagcaacaaacttctcactactcaaacaagcaggtgacgtggaggagaatcccgggcctactagtatggactggatttggcgcatccttttccttgtcggcgctgctaccggcgcgcattccttcgaacaagttcagcttcaacagcctggcgctgagctggtcaaacctggcgcttctgtgaagatgagctgcaaagccagcggctacgccttcagcagctactggatcaactggatgaagcagaaacccggccagggactcgaatggatcggccaaatctatcccggcgacggcgacaccaactacaacggcaagttcaagggcagagccacactgaccgccgatacctctagcagcacagcctacatgcagctgagcagcctgaccagcgaagatagcgccgtgtacttctgtgcccggtccatcacaacagtcgtgggctgcgctatggactattggggccagggaacaagcgtgaccgtgtctagtacgcgtatccagaaccctgatcctgccgtgtaccagctgcgggatagcaagagcagcgacaagagcgtgtgtctgttcaccgacttcgacagccagaccaacgtgtcccagagcaaggactccgacgtgtacatcaccgataagaccgtgctggacatgcggagcatggacttcaagagcaactccgccgtggcctggtccaacaagtccgatttcgcctgcgccaacgccttcaacaacagcattatccccgaggacacattcttcccaagccccgagagcagctgcggtaccctgcactgtgtcggcgacacctatccatccaacgatcggtgctgccatgagtgccggcctggcaacggaatggtgtctcgatgttctcggagtcagaataccgtctgtaggccatgcggacccggcttttacaatgatgtcgtgtcctccaaaccttgcaagccatgtacttggtgcaatctgcggagcggctctgagcggaaacagctgtgcactgctacccaggacacagtgtgtagatgcagagccggaactcagcccctggactcttataagcccggcgttgactgcgctccatgtccaccagggcacttttccccaggcgacaatcaagcctgtaaaccgtggacaaattgcacactggccgggaaacacaccttgcagccagccagcaattcctccgatgccatctgtgaagatcgggacccaccagccactcagcctcaagaaactcaggggcctcctgctaggcccattacagtgcaacctaccgaggcttggccccggacatctcagggaccttctacaaggccagtggaagtgccaggcggtagagctgtggctgctatccttggattgggcctcgttctcggactgttgggaccacttgcaatcctgctggctctctatctgctgcggcgggatcagagactccctccagatgctcataagccacctggcggcggatctttcaggaccccaattcaagaagaacaagccgacgctcactctaccctggctaagatccgcgccaagagaagcggatctggcgtgaagcagaccctgaatttcgacctgctgaagctggctggcgacgtggaatccaacccaggcccttctagaggccatatgaccgagtacaagcccacggtgcgcctcgccacccgcgacgacgtccccagggccgtacgcaccctcgccgccgcgttcgccgactaccccgccacgcgccacaccgtcgatccggaccgccacatcgagcgggtcaccgagctgcaagaactcttcctcacgcgcgtcgggctcgacatcggcaaggtgtgggtcgcggacgacggcgccgcggtggcggtctggaccacgccggagagcgtcgaagcgggggcggtgttcgccgagatcggcccgcgcatggccgagttgagcggttcccggctggccgcgcagcaacagatggaaggcctcctggcgccgcaccggcccaaggagcccgcgtggttcctggccaccgtcggcgtctcgcccgaccaccagggcaagggtctgggcagcgccgtcgtgctccccggagtggaggcggccgagcgcgccggggtgcccgccttcctggagacctccgcgccccgcaacctccccttctacgagcggctcggcttcaccgtcaccgccgacgtcgaggtgcccgaaggaccgcgcacctggtgcatgacccgcaagcccggtgcctga

SEQ ID NO: 5652 - DNA, 4203 bp, Artificial Sequence
  Synthetic Polynucleotide
atggccttaccagtgaccgccttgctcctgccgctggccttgctgctccacgccgccaggccggaagtgcagctggttgaatctggcggaggactggttcaggctggcggatctctgagactgtcttgtgccgccagcggcagaacctttagcatgggctggtttagacaggcccctggcaaagagagagagttcgtcgccgccatcacatactctggcggcagcccttactacgccgactctgtgaagggcagattcaccatcagccgggacaacgccaagaacaccgtgtacctccagatgaacagcctgaagcctgaggacaccgccgtgtactactgcgccgccaatccaacatacggcagcgactggaacgccgagaattggggccagggaacccaagtgacagtgtctagcggtaccggcggaggcggatctggcggcggaggtagcggtggcggaggatctgaattcgacatccagatgacacagagccctagcagcctgtctgccagcgtgggagacagagtgaccatcacatgcaaggccagcgaccacatcaacaactggctggcctggtatcagcagaagcctggacaggcccctaagctgctgatctacggcgctaccacactggaaacaggcgtgcccagcagattttctggcagcggctctggcaccgactacaccctgacaatatccagcctccagcctgaggacttcgccacctactactgtcagcagagctggaacaccccttggacattcggccagggcaccaagctggaaatcaagagactcgaggacctgaagaacgtgttcccacctgaggtggccgtgttcgagcctagcgaggccgagatcagccacacccagaaagccaccctcgtgtgcctggctaccggcttctaccccgaccatgtggaactgtcttggtgggtcaacggcaaagaggtgcacagcggcgtgtctaccgacccccagccactgaaagaacagcccgccctgaacgacagccggtactgcctgagcagcagactgagagtgtccgccaccttctggcagaacccccggaaccacttcagatgccaggtgcagttctacggcctgagcgagaacgacgagtggacccaggacagagccaagcccgtgacccagatcgtgtctgccgaagcctggggcagagccgattgcggatccctgcattgcgtgggcgacacataccccagcaacgacagatgctgccacgaatgcagacccggcaatggcatggtgtccagatgcagcagatcccagaacaccgtgtgcagaccttgcggccctggcttctacaacgacgtggtgtctagcaagccctgcaagccttgcacctggtgtaacctgagaagcggcagcgagagaaagcagctgtgtaccgccacacaggataccgtgtgccggtgtagagctggcacacagcctctggacagctacaaacctggcgtggactgtgccccttgtcctcctggacactttagccctggcgacaaccaggcttgcaaaccctggaccaactgtaccctggccggcaagcacacactgcaacctgccagcaatagcagcgacgccatctgcgaggacagagatcctcctgccacacagccccaagagacacaaggacctccagccagacctatcaccgtgcagcctacagaagcctggcctagaacaagccagggacctagcaccagacctgtggaagttcctggtggcagagccgtggccgccattcttggtcttggactggtgctgggactgctcggacctctggctattctgctggccctgtacctgctgagaagggaccaaagactgcctcctgacgctcacaaacctccaggcggaggcagcttcagaacccctatccaagaggaacaggctgacgcccacagcaccctggcaaaaattagggccaagcgatctggatctggagcaacaaacttctcactactcaaacaagcaggtgacgtggaggagaatcccgggcctactagtatggactggatttggcgcatccttttccttgtcggcgctgctaccggcgcgcattccttcgaacaagttcagcttcaacagcctggcgctgagctggtcaaacctggcgcttctgtgaagatgagctgcaaagccagcggctacgccttcagcagctactggatcaactggatgaagcagaaacccggccagggactcgaatggatcggccaaatctatcccggcgacggcgacaccaactacaacggcaagttcaagggcagagccacactgaccgccgatacctctagcagcacagcctacatgcagctgagcagcctgaccagcgaagatagcgccgtgtacttctgtgcccggtccatcacaacagtcgtgggctgcgctatggactattggggccagggaacaagcgtgaccgtgtctagtacgcgtatccagaaccctgatcctgccgtgtaccagctgcgggatagcaagagcagcgacaagagcgtgtgtctgttcaccgacttcgacagccagaccaacgtgtcccagagcaaggactccgacgtgtacatcaccgataagaccgtgctggacatgcggagcatggacttcaagagcaactccgccgtggcctggtccaacaagtccgatttcgcctgcgccaacgccttcaacaacagcattatccccgaggacacattcttcccaagccccgagagcagctgcggtaccctgcactgtgtcggcgacacctatccatccaacgatcggtgctgccatgagtgccggcctggcaacggaatggtgtctcgatgttctcggagtcagaataccgtctgtaggccatgcggacccggcttttacaatgatgtcgtgtcctccaaaccttgcaagccatgtacttggtgcaatctgcggagcggctctgagcggaaacagctgtgcactgctacccaggacacagtgtgtagatgcagagccggaactcagcccctggactcttataagcccggcgttgactgcgctccatgtccaccagggcacttttccccaggcgacaatcaagcctgtaaaccgtggacaaattgcacactggccgggaaacacaccttgcagccagccagcaattcctccgatgccatctgtgaagatcgggacccaccagccactcagcctcaagaaactcaggggcctcctgctaggcccattacagtgcaacctaccgaggcttggccccggacatctcagggaccttctacaaggccagtggaagtgccaggcggtagagctgtggctgctatccttggattgggcctcgttctcggactgttgggaccacttgcaatcctgctggctctctatctgctgcggcgggatcagagactccctccagatgctcataagccacctggcggcggatctttcaggaccccaattcaagaagaacaagccgacgctcactctaccctggctaagatccgcgccaagagaagcggatctggcgtgaagcagaccctgaatttcgacctgctgaagctggctggcgacgtggaatccaacccaggcccttctagaggccatatgaccgagtacaagcccacggtgcgcctcgccacccgcgacgacgtccccagggccgtacgcaccctcgccgccgcgttcgccgactaccccgccacgcgccacaccgtcgatccggaccgccacatcgagcgggtcaccgagctgcaagaactcttcctcacgcgcgtcgggctcgacatcggcaaggtgtgggtcgcggacgacggcgccgcggtggcggtctggaccacgccggagagcgtcgaagcgggggcggtgttcgccgagatcggcccgcgcatggccgagttgagcggttcccggctggccgcgcagcaacagatggaaggcctcctggcgccgcaccggcccaaggagcccgcgtggttcctggccaccgtcggcgtctcgcccgaccaccagggcaagggtctgggcagcgccgtcgtgctccccggagtggaggcggccgagcgcgccggggtgcccgccttcctggagacctccgcgccccgcaacctccccttctacgagcggctcggcttcaccgtcaccgccgacgtcgaggtgcccgaaggaccgcgcacctggtgcatgacccgcaagcccggtgcctga

SEQ ID NO: 5653 - DNA, 4614 bp, Artificial Sequence
  Synthetic Polynucleotide
atggccttaccagtgaccgccttgctcctgccgctggccttgctgctccacgccgccaggccggaagtgcagctggttgaatctggcggaggactggttcaggctggcggatctctgagactgtcttgtgccgccagcggcagaacctttagcatgggctggtttagacaggcccctggcaaagagagagagttcgtcgccgccatcacatactctggcggcagcccttactacgccgactctgtgaagggcagattcaccatcagccgggacaacgccaagaacaccgtgtacctccagatgaacagcctgaagcctgaggacaccgccgtgtactactgcgccgccaatccaacatacggcagcgactggaacgccgagaattggggccagggaacccaagtgacagtgtctagcggtaccggcggaggcggatctggcggcggaggtagcggtggcggaggatctgaattcgacatccagatgacacagagccctagcagcctgtctgccagcgtgggagacagagtgaccatcacatgcaaggccagcgaccacatcaacaactggctggcctggtatcagcagaagcctggacaggcccctaagctgctgatctacggcgctaccacactggaaacaggcgtgcccagcagattttctggcagcggctctggcaccgactacaccctgacaatatccagcctccagcctgaggacttcgccacctactactgtcagcagagctggaacaccccttggacattcggccagggcaccaagctggaaatcaagagactcgaggacctgaagaacgtgttcccacctgaggtggccgtgttcgagcctagcgaggccgagatcagccacacccagaaagccaccctcgtgtgcctggctaccggcttctaccccgaccatgtggaactgtcttggtgggtcaacggcaaagaggtgcacagcggcgtgtctaccgacccccagccactgaaagaacagcccgccctgaacgacagccggtactgcctgagcagcagactgagagtgtccgccaccttctggcagaacccccggaaccacttcagatgccaggtgcagttctacggcctgagcgagaacgacgagtggacccaggacagagccaagcccgtgacccagatcgtgtctgccgaagcctggggcagagccgattgcggatccctgcattgcgtgggcgacacataccccagcaacgacagatgctgccacgaatgcagacccggcaatggcatggtgtccagatgcagcagatcccagaacaccgtgtgcagaccttgcggccctggcttctacaacgacgtggtgtctagcaagccctgcaagccttgcacctggtgtaacctgagaagcggcagcgagagaaagcagctgtgtaccgccacacaggataccgtgtgccggtgtagagctggcacacagcctctggacagctacaaacctggcgtggactgtgccccttgtcctcctggacactttagccctggcgacaaccaggcttgcaaaccctggaccaactgtaccctggccggcaagcacacactgcaacctgccagcaatagcagcgacgccatctgcgaggacagagatcctcctgccacacagccccaagagacacaaggacctccagccagacctatcaccgtgcagcctacagaagcctggcctagaacaagccagggacctagcaccagacctgtggaagttcctggtggcagagccgtggccgccattcttggtcttggactggtgctgggactgctcggacctctggctattctgctggccctgtacctgctgagaagggaccaaagactgcctcctgacgctcacaaacctccaggcggaggcagcttcagaacccctatccaagaggaacaggctgacgcccacagcaccctggcaaaaattagggccaagcgatctggatctggagcaacaaacttctcactactcaaacaagcaggtgacgtggaggagaatcccgggcctactagtatggactggatttggcgcatccttttccttgtcggcgctgctaccggcgcgcattccgggcccgaagtgcaactggttgaatccggtggcggcctggtgcaagcaggcggatctctcagacttagctgtgccgcctccggcagaaccttcacaatgggatggtttaggcaggctccagggaaagagagagagttcgtcgccgccatctctctgtctcccacactggcctactacgccgactctgtgaaaggccggttcaccatctccagagataatgccaagaacaccgtggtgctgcaaatgaactctctgaaacccgaggatacagccctgtactattgtgccgctgaccggaagtccgtgatgagcatcagacccgattactggggacagggcacacaagtcacagtgtcctctggatccggcggcggaggatctggcggaggcggatctgggggcggaggctctttcgaacaagttcagcttcaacagcctggcgctgagctggtcaaacctggcgcttctgtgaagatgagctgcaaagccagcggctacgccttcagcagctactggatcaactggatgaagcagaaacccggccagggactcgaatggatcggccaaatctatcccggcgacggcgacaccaactacaacggcaagttcaagggcagagccacactgaccgccgatacctctagcagcacagcctacatgcagctgagcagcctgaccagcgaagatagcgccgtgtacttctgtgcccggtccatcacaacagtcgtgggctgcgctatggactattggggccagggaacaagcgtgaccgtgtctagtacgcgtatccagaaccctgatcctgccgtgtaccagctgcgggatagcaagagcagcgacaagagcgtgtgtctgttcaccgacttcgacagccagaccaacgtgtcccagagcaaggactccgacgtgtacatcaccgataagaccgtgctggacatgcggagcatggacttcaagagcaactccgccgtggcctggtccaacaagtccgatttcgcctgcgccaacgccttcaacaacagcattatccccgaggacacattcttcccaagccccgagagcagctgcggtaccctgcactgtgtcggcgacacctatccatccaacgatcggtgctgccatgagtgccggcctggcaacggaatggtgtctcgatgttctcggagtcagaataccgtctgtaggccatgcggacccggcttttacaatgatgtcgtgtcctccaaaccttgcaagccatgtacttggtgcaatctgcggagcggctctgagcggaaacagctgtgcactgctacccaggacacagtgtgtagatgcagagccggaactcagcccctggactcttataagcccggcgttgactgcgctccatgtccaccagggcacttttccccaggcgacaatcaagcctgtaaaccgtggacaaattgcacactggccgggaaacacaccttgcagccagccagcaattcctccgatgccatctgtgaagatcgggacccaccagccactcagcctcaagaaactcaggggcctcctgctaggcccattacagtgcaacctaccgaggcttggccccggacatctcagggaccttctacaaggccagtggaagtgccaggcggtagagctgtggctgctatccttggattgggcctcgttctcggactgttgggaccacttgcaatcctgctggctctctatctgctgcggcgggatcagagactccctccagatgctcataagccacctggcggcggatctttcaggaccccaattcaagaagaacaagccgacgctcactctaccctggctaagatccgcgccaagagaagcggatctggcgtgaagcagaccctgaatttcgacctgctgaagctggctggcgacgtggaatccaacccaggcccttctagaggccatatgaccgagtacaagcccacggtgcgcctcgccacccgcgacgacgtccccagggccgtacgcaccctcgccgccgcgttcgccgactaccccgccacgcgccacaccgtcgatccggaccgccacatcgagcgggtcaccgagctgcaagaactcttcctcacgcgcgtcgggctcgacatcggcaaggtgtgggtcgcggacgacggcgccgcggtggcggtctggaccacgccggagagcgtcgaagcgggggcggtgttcgccgagatcggcccgcgcatggccgagttgagcggttcccggctggccgcgcagcaacagatggaaggcctcctggcgccgcaccggcccaaggagcccgcgtggttcctggccaccgtcggcgtctcgcccgaccaccagggcaagggtctgggcagcgccgtcgtgctccccggagtggaggcggccgagcgcgccggggtgcccgccttcctggagacctccgcgccccgcaacctccccttctacgagcggctcggcttcaccgtcaccgccgacgtcgaggtgcccgaaggaccgcgcacctggtgcatgacccgcaagcccggtgcctga

SEQ ID NO: 5654 - DNA, 3813 bp, Artificial Sequence
  Synthetic Polynucleotide
atggccttaccagtgaccgccttgctcctgccgctggccttgctgctccacgccgccaggccggaagtgcagctggttgaatctggcggaggactggttcaggctggcggatctctgagactgtcttgtgccgccagcggcagaacctttagcatgggctggtttagacaggcccctggcaaagagagagagttcgtcgccgccatcacatactctggcggcagcccttactacgccgactctgtgaagggcagattcaccatcagccgggacaacgccaagaacaccgtgtacctccagatgaacagcctgaagcctgaggacaccgccgtgtactactgcgccgccaatccaacatacggcagcgactggaacgccgagaattggggccagggaacccaagtgacagtgtctagcctcgaggacctgaagaacgtgttcccacctgaggtggccgtgttcgagcctagcgaggccgagatcagccacacccagaaagccaccctcgtgtgcctggctaccggcttctaccccgaccatgtggaactgtcttggtgggtcaacggcaaagaggtgcacagcggcgtgtctaccgacccccagccactgaaagaacagcccgccctgaacgacagccggtactgcctgagcagcagactgagagtgtccgccaccttctggcagaacccccggaaccacttcagatgccaggtgcagttctacggcctgagcgagaacgacgagtggacccaggacagagccaagcccgtgacccagatcgtgtctgccgaagcctggggcagagccgattgcggatccctgcattgcgtgggcgacacataccccagcaacgacagatgctgccacgaatgcagacccggcaatggcatggtgtccagatgcagcagatcccagaacaccgtgtgcagaccttgcggccctggcttctacaacgacgtggtgtctagcaagccctgcaagccttgcacctggtgtaacctgagaagcggcagcgagagaaagcagctgtgtaccgccacacaggataccgtgtgccggtgtagagctggcacacagcctctggacagctacaaacctggcgtggactgtgccccttgtcctcctggacactttagccctggcgacaaccaggcttgcaaaccctggaccaactgtaccctggccggcaagcacacactgcaacctgccagcaatagcagcgacgccatctgcgaggacagagatcctcctgccacacagccccaagagacacaaggacctccagccagacctatcaccgtgcagcctacagaagcctggcctagaacaagccagggacctagcaccagacctgtggaagttcctggtggcagagccgtggccgccattcttggtcttggactggtgctgggactgctcggacctctggctattctgctggccctgtacctgctgagaagggaccaaagactgcctcctgacgctcacaaacctccaggcggaggcagcttcagaacccctatccaagaggaacaggctgacgcccacagcaccctggcaaaaattagggccaagcgatctggatctggagcaacaaacttctcactactcaaacaagcaggtgacgtggaggagaatcccgggcctactagtatggactggatttggcgcatccttttccttgtcggcgctgctaccggcgcgcattccgggcccgaagtgcaactggttgaatccggtggcggcctggtgcaagcaggcggatctctcagacttagctgtgccgcctccggcagaaccttcacaatgggatggtttaggcaggctccagggaaagagagagagttcgtcgccgccatctctctgtctcccacactggcctactacgccgactctgtgaaaggccggttcaccatctccagagataatgccaagaacaccgtggtgctgcaaatgaactctctgaaacccgaggatacagccctgtactattgtgccgctgaccggaagtccgtgatgagcatcagacccgattactggggacagggcacacaagtcacagtgtcctctacgcgtatccagaaccctgatcctgccgtgtaccagctgcgggatagcaagagcagcgacaagagcgtgtgtctgttcaccgacttcgacagccagaccaacgtgtcccagagcaaggactccgacgtgtacatcaccgataagaccgtgctggacatgcggagcatggacttcaagagcaactccgccgtggcctggtccaacaagtccgatttcgcctgcgccaacgccttcaacaacagcattatccccgaggacacattcttcccaagccccgagagcagctgcggtaccctgcactgtgtcggcgacacctatccatccaacgatcggtgctgccatgagtgccggcctggcaacggaatggtgtctcgatgttctcggagtcagaataccgtctgtaggccatgcggacccggcttttacaatgatgtcgtgtcctccaaaccttgcaagccatgtacttggtgcaatctgcggagcggctctgagcggaaacagctgtgcactgctacccaggacacagtgtgtagatgcagagccggaactcagcccctggactcttataagcccggcgttgactgcgctccatgtccaccagggcacttttccccaggcgacaatcaagcctgtaaaccgtggacaaattgcacactggccgggaaacacaccttgcagccagccagcaattcctccgatgccatctgtgaagatcgggacccaccagccactcagcctcaagaaactcaggggcctcctgctaggcccattacagtgcaacctaccgaggcttggccccggacatctcagggaccttctacaaggccagtggaagtgccaggcggtagagctgtggctgctatccttggattgggcctcgttctcggactgttgggaccacttgcaatcctgctggctctctatctgctgcggcgggatcagagactccctccagatgctcataagccacctggcggcggatctttcaggaccccaattcaagaagaacaagccgacgctcactctaccctggctaagatccgcgccaagagaagcggatctggcgtgaagcagaccctgaatttcgacctgctgaagctggctggcgacgtggaatccaacccaggcccttctagaggccatatgaccgagtacaagcccacggtgcgcctcgccacccgcgacgacgtccccagggccgtacgcaccctcgccgccgcgttcgccgactaccccgccacgcgccacaccgtcgatccggaccgccacatcgagcgggtcaccgagctgcaagaactcttcctcacgcgcgtcgggctcgacatcggcaaggtgtgggtcgcggacgacggcgccgcggtggcggtctggaccacgccggagagcgtcgaagcgggggcggtgttcgccgagatcggcccgcgcatggccgagttgagcggttcccggctggccgcgcagcaacagatggaaggcctcctggcgccgcaccggcccaaggagcccgcgtggttcctggccaccgtcggcgtctcgcccgaccaccagggcaagggtctgggcagcgccgtcgtgctccccggagtggaggcggccgagcgcgccggggtgcccgccttcctggagacctccgcgccccgcaacctccccttctacgagcggctcggcttcaccgtcaccgccgacgtcgaggtgcccgaaggaccgcgcacctggtgcatgacccgcaagcccggtgcctga

SEQ ID NO: 5655 - DNA, 1935 bp, Artificial Sequence
  Synthetic Polynucleotide
atggccttaccagtgaccgccttgctcctgccgctggccttgctgctccacgccgccaggccggcatgcgaagtgcagctgcttgaaagtggcggcggactgattcagcctggcggatctctgagactgagctgtgccgccagcggcttcaccttttctagccacgccatgacctgggtccgacaggcacctggaaaagggcttgaatgggtgtccgccatcagcggctctggcgattacacacactacgccgacagcgtgaagggcagattcaccatcagcagagacaacagcaagaacaccgtgtacctccagatgaacagcctgagagccgaggacagcgccgtgtattattgcgccaaggatgaggatggcggcagcctgcttggacacagaggacaaggcaccctggtcaccgtttcttccggtaccggcggaggcggatctggcggcggaggtagcggtggcggaggatctgaattcggatctctcgagctgcattgcgtgggcgacacataccccagcaacgacagatgctgccacgaatgcagacccggcaatggcatggtgtccagatgcagcagatcccagaacaccgtgtgcagaccttgcggccctggcttctacaacgacgtggtgtctagcaagccctgcaagccttgcacctggtgtaacctgagaagcggcagcgagagaaagcagctgtgtaccgccacacaggataccgtgtgccggtgtagagctggcacacagcctctggacagctacaaacctggcgtggactgtgccccttgtcctcctggacactttagccctggcgacaaccaggcttgcaaaccctggaccaactgtaccctggccggcaagcacacactgcaacctgccagcaatagcagcgacgccatctgcgaggacagagatcctcctgccacacagccccaagagacacaaggacctccagccagacctatcaccgtgcagcctacagaagcctggcctagaacaagccagggacctagcaccagacctgtggaagttcctggtggcagagccgtggccgccattcttggtcttggactggtgctgggactgctcggacctctggctattctgctggccctgtacctgctgagaagggaccaaagactgcctcctgacgctcacaaacctccaggcggaggcagcttcagaacccctatccaagaggaacaggctgacgcccacagcaccctggcaaaaattagggccaagcgatctggatctggagcaacaaacttctcactactcaaacaagcaggtgacgtggaggagaatcccgggcctactagaggccatatgaccgagtacaagcccacggtgcgcctcgccacccgcgacgacgtccccagggccgtacgcaccctcgccgccgcgttcgccgactaccccgccacgcgccacaccgtcgatccggaccgccacatcgagcgggtcaccgagctgcaagaactcttcctcacgcgcgtcgggctcgacatcggcaaggtgtgggtcgcggacgacggcgccgcggtggcggtctggaccacgccggagagcgtcgaagcgggggcggtgttcgccgagatcggcccgcgcatggccgagttgagcggttcccggctggccgcgcagcaacagatggaaggcctcctggcgccgcaccggcccaaggagcccgcgtggttcctggccaccgtcggcgtctcgcccgaccaccagggcaagggtctgggcagcgccgtcgtgctccccggagtggaggcggccgagcgcgccggggtgcccgccttcctggagacctccgcgccccgcaacctccccttctacgagcggctcggcttcaccgtcaccgccgacgtcgaggtgcccgaaggaccgcgcacctggtgcatgacccgcaagcccggtgcctga

SEQ ID NO: 5656 - DNA, 1548 bp, Artificial Sequence; identical to SEQ ID NO: 5624
  Synthetic Polynucleotide

SEQ ID NO: 5657 - DNA, 1548 bp, Artificial Sequence; identical to SEQ ID NO: 5625
  Synthetic Polynucleotide

SEQ ID NO: 5658 - DNA, 1170 bp, Artificial Sequence; identical to SEQ ID NO: 5626
  Synthetic Polynucleotide

SEQ ID NO: 5659 - DNA, 1170 bp, Artificial Sequence; identical to SEQ ID NO: 5627
  Synthetic Polynucleotide

SEQ ID NO: 5660 - DNA, 1170 bp, Artificial Sequence; identical to SEQ ID NO: 5628
  Synthetic Polynucleotide

SEQ ID NO: 5661 - DNA, 1176 bp, Artificial Sequence; identical to SEQ ID NO: 5629
  Synthetic Polynucleotide

SEQ ID NO: 5662 - DNA, 1200 bp, Artificial Sequence; identical to SEQ ID NO: 5630
  Synthetic Polynucleotide

SEQ ID NO: 5663 - DNA, 1188 bp, Artificial Sequence; identical to SEQ ID NO: 5631
  Synthetic Polynucleotide

SEQ ID NO: 5664 - DNA, 1173 bp, Artificial Sequence; identical to SEQ ID NO: 5632
  Synthetic Polynucleotide

SEQ ID NO: 5665 - DNA, 1188 bp, Artificial Sequence; identical to SEQ ID NO: 5633
  Synthetic Polynucleotide

SEQ ID NO: 5666 - DNA, 990 bp, Artificial Sequence; identical to SEQ ID NO: 5634
  Synthetic Polynucleotide

SEQ ID NO: 5667 - DNA, 1083 bp, Artificial Sequence; identical to SEQ ID NO: 5635
  Synthetic Polynucleotide

SEQ ID NO: 5668 - DNA, 1086 bp, Artificial Sequence; identical to SEQ ID NO: 5636
  Synthetic Polynucleotide

SEQ ID NO: 5669 - DNA, 1737 bp, Artificial Sequence; identical to SEQ ID NO: 5637
  Synthetic Polynucleotide

SEQ ID NO: 5670 - DNA, 1377 bp, Artificial Sequence; identical to SEQ ID NO: 5638
  Synthetic Polynucleotide

SEQ ID NO: 5671 - DNA, 975 bp, Artificial Sequence; identical to SEQ ID NO: 5639
  Synthetic Polynucleotide

SEQ ID NO: 5672 - DNA, 900 bp, Artificial Sequence; identical to SEQ ID NO: 5640
  Synthetic Polynucleotide

SEQ ID NO: 5673 - DNA, 1674 bp, Artificial Sequence; identical to SEQ ID NO: 5641
  Synthetic Polynucleotide

SEQ ID NO: 5674 - DNA, 1674 bp, Artificial Sequence; identical to SEQ ID NO: 5642
  Synthetic Polynucleotide

SEQ ID NO: 5675 - DNA, 3366 bp, Artificial Sequence
  Synthetic Polynucleotide
atggccttaccagtgaccgccttgctcctgccgctggccttgctgctccacgccgccaggccggacatccagatgacacagagccctagcagcctgtctgccagcgtgggagacagagtgaccatcacatgcaaggccagcgaccacatcaacaactggctggcctggtatcagcagaagcctggacaggcccctaagctgctgatctacggcgctaccacactggaaacaggcgtgcccagcagattttctggcagcggctctggcaccgactacaccctgacaatatccagcctccagcctgaggacttcgccacctactactgtcagcagagctggaacaccccttggacattcggccagggcaccaagctggaaatcaagagactcgagggcatgcggactgaagacctcccaaaggctgtggtgttcctggagcctcaatggtacagggtgctggagaaggacagtgtgactctgaagtgccagggagcctactcccctgaggacaattccacacagtggtttcacaatgagagcctcatctcaagccaggcctccagctacttcattgacgctgccacagtggacgacagtggagagtacaggtgccagacaaacctctccaccctcagtgacccggtgcagctagaagtccatatcggctggctgttgctccaggcccctcggtgggtgttcaaggaggaagaccctattcacctgaggtgtcacagctggaagaacactgctctgcataaggtcacatatttacagaatggcaaaggcaggaagtattttcatcataattctgacttctacattccaaaagccacactcaaagacagcggctcctacttctgcagggggcttgttgggagtaaaaatgtgtcttcagagactgtgaacatcaccatcactcaaggtttggcagtgtcaaccatctcatcattctttccacctggctaccaagtgtccttctgcctggtcatggtgctgctgttcgccgtggataccggcctgtacttcagcgtcaagaccaacatccggtccagcaccagagactggaaggaccacaagttcaagtggcggaaggaccctcaggacaagagggccaagcgatctggatctggagcaacaaacttctcactactcaaacaagcaggtgacgtggaggagaatcccgggcctactagtatggactggatttggcgcatccttttccttgtcggcgctgctaccggcgcgcattccttcgaacaagttcagcttcaacagcctggcgctgagctggtcaaacctggcgcttctgtgaagatgagctgcaaagccagcggctacgccttcagcagctactggatcaactggatgaagcagaaacccggccagggactcgaatggatcggccaaatctatcccggcgacggcgacaccaactacaacggcaagttcaagggcagagccacactgaccgccgatacctctagcagcacagcctacatgcagctgagcagcctgaccagcgaagatagcgccgtgtacttctgtgcccggtccatcacaacagtcgtgggctgcgctatggactattggggccagggaacaagcgtgaccgtgtctagtacgcgtaaaggatgccagggaagcgccgaccatgtggtgtcaatttctggcgtgcccctgcaactccagccaaactctattcagaccaaagtcgatagcattgcctggaaaaaattgctgccctctcagaacgggtttcaccacattctcaaatgggaaaatggctctctgccctccaacacctccaacgatcggtttagctttatcgtcaagaatctgtccctgctcatcaaagcagcccagcagcaagactccggcctgtattgcctcgaagtcacctccatctccgggaaagtgcagacagctacattccaagtgttcgtctttgataaggtcgagaagcctagactccaaggacaggggaagattctggacagaggacggtgtcaggtggcactgtcttgccttgtcagccgcgacggcaatgtgtcttatgcttggtatcggggctccaagctgattcaaaccgctgggaatctgacatacctcgatgaagaggttgacatcaatgggacgcacacgtatacttgcaatgtctccaatcctgtcagctgggagtctcataccctgaacctgacacaggattgtcaaaatgcacatcaagagttccggttttggccgtttcttgtgattatcgtgattctgtctgccctcttcctcggaactctggcttgcttctgtgtctggcggcgcaaacggaaagagaaacagtctgagacttccccgaaagagtttctcacgatatacgaagatgtcaaggacctcaagacccgccgcaaccatgagcaagaacagacattcccaggcggaggctccacaatctactccatgattcagtcccagtctagcgccccaacctctcaagagcctgcttataccctgtacagtctgattcagccctccagaaagtccggctctcggaagaggaaccactctcctagcttcaactccaccatatatgaagtcattggcaagtctcagcccaaagcacagaatcctgccaggctgagcagaaaagaacttgagaatttcgacgtctactcccgcgccaagagaagcggatctggcgtgaagcagaccctgaatttcgacctgctgaagctggctggcgacgtggaatccaacccaggcccttctagaggccatatgaccgagtacaagcccacggtgcgcctcgccacccgcgacgacgtccccagggccgtacgcaccctcgccgccgcgttcgccgactaccccgccacgcgccacaccgtcgatccggaccgccacatcgagcgggtcaccgagctgcaagaactcttcctcacgcgcgtcgggctcgacatcggcaaggtgtgggtcgcggacgacggcgccgcggtggcggtctggaccacgccggagagcgtcgaagcgggggcggtgttcgccgagatcggcccgcgcatggccgagttgagcggttcccggctggccgcgcagcaacagatggaaggcctcctggcgccgcaccggcccaaggagcccgcgtggttcctggccaccgtcggcgtctcgcccgaccaccagggcaagggtctgggcagcgccgtcgtgctccccggagtggaggcggccgagcgcgccggggtgcccgccttcctggagacctccgcgccccgcaacctccccttctacgagcggctcggcttcaccgtcaccgccgacgtcgaggtgcccgaaggaccgcgcacctggtgcatgacccgcaagcccggtgcctga

SEQ ID NO: 5676 - DNA, 3528 bp, Artificial Sequence
  Synthetic Polynucleotide
atggccttaccagtgaccgccttgctcctgccgctggccttgctgctccacgccgccaggccggcatgcgaagtgcagctgcttgaaagtggcggcggactgattcagcctggcggatctctgagactgagctgtgccgccagcggcttcaccttttctagccacgccatgacctgggtccgacaggcacctggaaaagggcttgaatgggtgtccgccatcagcggctctggcgattacacacactacgccgacagcgtgaagggcagattcaccatcagcagagacaacagcaagaacaccgtgtacctccagatgaacagcctgagagccgaggacagcgccgtgtattattgcgccaaggatgaggatggcggcagcctgcttggacacagaggacaaggcaccctggtcaccgtttcttccggtaccggcggaggcggatctggcggcggaggtagcggtggcggaggatctgaattcggatctctcgagggcatgcggactgaagacctcccaaaggctgtggtgttcctggagcctcaatggtacagggtgctggagaaggacagtgtgactctgaagtgccagggagcctactcccctgaggacaattccacacagtggtttcacaatgagagcctcatctcaagccaggcctccagctacttcattgacgctgccacagtggacgacagtggagagtacaggtgccagacaaacctctccaccctcagtgacccggtgcagctagaagtccatatcggctggctgttgctccaggcccctcggtgggtgttcaaggaggaagaccctattcacctgaggtgtcacagctggaagaacactgctctgcataaggtcacatatttacagaatggcaaaggcaggaagtattttcatcataattctgacttctacattccaaaagccacactcaaagacagcggctcctacttctgcagggggcttgttgggagtaaaaatgtgtcttcagagactgtgaacatcaccatcactcaaggtttggcagtgtcaaccatctcatcattctttccacctggctaccaagtgtccttctgcctggtcatggtgctgctgttcgccgtggataccggcctgtacttcagcgtcaagaccaacatccggtccagcaccagagactggaaggaccacaagttcaagtggcggaaggaccctcaggacaagagggccaagcgatctggatctggagcaacaaacttctcactactcaaacaagcaggtgacgtggaggagaatcccgggcctactagtgccaccatggactggatttggcgcatccttttccttgtcggcgctgctaccggcgcccattccgggcccgaagtgcagctggttgaatctggcggaggactggttcaggctggcggatctctgagactgtcttgtgccgccagcggcagaacctttagcatgggctggtttagacaggcccctggcaaagagagagagttcgtcgccgccatcacatactctggcggcagcccttactacgccgactctgtgaagggcagattcaccatcagccgggacaacgccaagaacaccgtgtacctccagatgaacagcctgaagcctgaggacaccgccgtgtactactgcgccgccaatccaacatacggcagcgactggaacgccgagaattggggccagggaacccaagtgacagtgtctagcggatccggcggcggaggatctggcggaggcggatctgggggcggaggctctttcgaaggcagcacgcgtaaaggatgccagggaagcgccgaccatgtggtgtcaatttctggcgtgcccctgcaactccagccaaactctattcagaccaaagtcgatagcattgcctggaaaaaattgctgccctctcagaacgggtttcaccacattctcaaatgggaaaatggctctctgccctccaacacctccaacgatcggtttagctttatcgtcaagaatctgtccctgctcatcaaagcagcccagcagcaagactccggcctgtattgcctcgaagtcacctccatctccgggaaagtgcagacagctacattccaagtgttcgtctttgataaggtcgagaagcctagactccaaggacaggggaagattctggacagaggacggtgtcaggtggcactgtcttgccttgtcagccgcgacggcaatgtgtcttatgcttggtatcggggctccaagctgattcaaaccgctgggaatctgacatacctcgatgaagaggttgacatcaatgggacgcacacgtatacttgcaatgtctccaatcctgtcagctgggagtctcataccctgaacctgacacaggattgtcaaaatgcacatcaagagttccggttttggccgtttcttgtgattatcgtgattctgtctgccctcttcctcggaactctggcttgcttctgtgtctggcggcgcaaacggaaagagaaacagtctgagacttccccgaaagagtttctcacgatatacgaagatgtcaaggacctcaagacccgccgcaaccatgagcaagaacagacattcccaggcggaggctccacaatctactccatgattcagtcccagtctagcgccccaacctctcaagagcctgcttataccctgtacagtctgattcagccctccagaaagtccggctctcggaagaggaaccactctcctagcttcaactccaccatatatgaagtcattggcaagtctcagcccaaagcacagaatcctgccaggctgagcagaaaagaacttgagaatttcgacgtctactcccgcgccaagagaagcggatctggcgtgaagcagaccctgaatttcgacctgctgaagctggctggcgacgtggaatccaacccaggcccttctagaggccatatgaccgagtacaagcccacggtgcgcctcgccacccgcgacgacgtccccagggccgtacgcaccctcgccgccgcgttcgccgactaccccgccacgcgccacaccgtcgatccggaccgccacatcgagcgggtcaccgagctgcaagaactcttcctcacgcgcgtcgggctcgacatcggcaaggtgtgggtcgcggacgacggcgccgcggtggcggtctggaccacgccggagagcgtcgaagcgggggcggtgttcgccgagatcggcccgcgcatggccgagttgagcggttcccggctggccgcgcagcaacagatggaaggcctcctggcgccgcaccggcccaaggagcccgcgtggttcctggccaccgtcggcgtctcgcccgaccaccagggcaagggtctgggcagcgccgtcgtgctccccggagtggaggcggccgagcgcgccggggtgcccgccttcctggagacctccgcgccccgcaacctccccttctacgagcggctcggcttcaccgtcaccgccgacgtcgaggtgcccgaaggaccgcgcacctggtgcatgacccgcaagcccggtgcctga

SEQ ID NO: 5677 - DNA, 3978 bp, Artificial Sequence
  Synthetic Polynucleotide
atggccttaccagtgaccgccttgctcctgccgctggccttgctgctccacgccgccaggccggacatccagatgacacagagccctagcagcctgtctgccagcgtgggagacagagtgaccatcacatgcaaggccagcgaccacatcaacaactggctggcctggtatcagcagaagcctggacaggcccctaagctgctgatctacggcgctaccacactggaaacaggcgtgcccagcagattttctggcagcggctctggcaccgactacaccctgacaatatccagcctccagcctgaggacttcgccacctactactgtcagcagagctggaacaccccttggacattcggccagggcaccaagctggaaatcaagagactcgagggacagcctaaggccaatcctaccgtgacactgttccctccaagcagcgaagaactccaggccaacaaggccacacttgtgtgcctgatctccgacttctaccctggggctgtgacagtggcttggaaggccgatggatctcctgtgaaagccggcgtggaaaccaccaagccatccaagcagagcaacaacaaatacgccgccagctcctacctgagcctgacacctgagcagtggaagtcccacagatcctacagctgccaagtgacccacgaaggcagcaccgtggaaaagacagtggcccctacagagtgcagcggatccggcatgcggactgaagacctcccaaaggctgtggtgttcctggagcctcaatggtacagggtgctggagaaggacagtgtgactctgaagtgccagggagcctactcccctgaggacaattccacacagtggtttcacaatgagagcctcatctcaagccaggcctccagctacttcattgacgctgccacagtggacgacagtggagagtacaggtgccagacaaacctctccaccctcagtgacccggtgcagctagaagtccatatcggctggctgttgctccaggcccctcggtgggtgttcaaggaggaagaccctattcacctgaggtgtcacagctggaagaacactgctctgcataaggtcacatatttacagaatggcaaaggcaggaagtattttcatcataattctgacttctacattccaaaagccacactcaaagacagcggctcctacttctgcagggggcttgttgggagtaaaaatgtgtcttcagagactgtgaacatcaccatcactcaaggtttggcagtgtcaaccatctcatcattctttccacctggctaccaagtgtccttctgcctggtcatggtgctgctgttcgccgtggataccggcctgtacttcagcgtcaagaccaacatccggtccagcaccagagactggaaggaccacaagttcaagtggcggaaggaccctcaggacaagagggccaagcgatctggatctggagcaacaaacttctcactactcaaacaagcaggtgacgtggaggagaatcccgggcctactagtatggactggatttggcgcatccttttccttgtcggcgctgctaccggcgcgcattccttcgaacaagttcagcttcaacagcctggcgctgagctggtcaaacctggcgcttctgtgaagatgagctgcaaagccagcggctacgccttcagcagctactggatcaactggatgaagcagaaacccggccagggactcgaatggatcggccaaatctatcccggcgacggcgacaccaactacaacggcaagttcaagggcagagccacactgaccgccgatacctctagcagcacagcctacatgcagctgagcagcctgaccagcgaagatagcgccgtgtacttctgtgcccggtccatcacaacagtcgtgggctgcgctatggactattggggccagggaacaagcgtgaccgtgtctagtacgcgtgcctctacaaagggaccctccgtgtttcctctggctcccagcagcaagtctacaagcggaggaacagccgctctgggctgcctggtcaaggattactttcccgagcctgtgaccgtgtcctggaatagcggagcactgacaagcggcgtgcacacctttccagccgtgctgcaaagcagcggcctgtactctctgagcagcgtggtcacagtgcctagctctagcctgggcacccagacctacatctgcaatgtgaaccacaagcctagcaacaccaaggtggacaagagagtggaacccaagagctgtggtaccaaaggatgccagggaagcgccgaccatgtggtgtcaatttctggcgtgcccctgcaactccagccaaactctattcagaccaaagtcgatagcattgcctggaaaaaattgctgccctctcagaacgggtttcaccacattctcaaatgggaaaatggctctctgccctccaacacctccaacgatcggtttagctttatcgtcaagaatctgtccctgctcatcaaagcagcccagcagcaagactccggcctgtattgcctcgaagtcacctccatctccgggaaagtgcagacagctacattccaagtgttcgtctttgataaggtcgagaagcctagactccaaggacaggggaagattctggacagaggacggtgtcaggtggcactgtcttgccttgtcagccgcgacggcaatgtgtcttatgcttggtatcggggctccaagctgattcaaaccgctgggaatctgacatacctcgatgaagaggttgacatcaatgggacgcacacgtatacttgcaatgtctccaatcctgtcagctgggagtctcataccctgaacctgacacaggattgtcaaaatgcacatcaagagttccggttttggccgtttcttgtgattatcgtgattctgtctgccctcttcctcggaactctggcttgcttctgtgtctggcggcgcaaacggaaagagaaacagtctgagacttccccgaaagagtttctcacgatatacgaagatgtcaaggacctcaagacccgccgcaaccatgagcaagaacagacattcccaggcggaggctccacaatctactccatgattcagtcccagtctagcgccccaacctctcaagagcctgcttataccctgtacagtctgattcagccctccagaaagtccggctctcggaagaggaaccactctcctagcttcaactccaccatatatgaagtcattggcaagtctcagcccaaagcacagaatcctgccaggctgagcagaaaagaacttgagaatttcgacgtctactcccgcgccaagagaagcggatctggcgtgaagcagaccctgaatttcgacctgctgaagctggctggcgacgtggaatccaacccaggcccttctagaggcgggatccacaccatggctacctacgaggtgctgtgcgaggtggcaagaaagctgggcaccgacgacagagaagtggtgctgttcctgctgaacgtgttcatccctcagcctacactggcccagctgatcggtgcactgagagccctgaaagaggaaggccggctgacctttcctctgctggccgaatgcctgttcagagccggaagaagggatctgctgcgggacctgctgcatctggaccccagatttctggaaagacacctggccggcaccatgagctacttcagcccttaccagctgaccgtgctgcacgttgacggcgaactgtgcgccagagatattcggagcctgatcttcctgagcaaggacaccatcggcagccggtctacccctcagacatttctgcactgggtgtactgcatggaaaacctggacctgctcggccccacagatgtggatgccctgatgtccatgctgagaagcctgagcagagtggacctccagagacaggtgcagacactgatgggactgcacctgagcggacctagccacagccagcactacagacacacccct

SEQ ID NO: 5678 - DNA, 4137 bp, Artificial Sequence
  Synthetic Polynucleotide
atggccttaccagtgaccgccttgctcctgccgctggccttgctgctccacgccgccaggccggacatccagatgacacagagccctagcagcctgtctgccagcgtgggagacagagtgaccatcacatgcaaggccagcgaccacatcaacaactggctggcctggtatcagcagaagcctggacaggcccctaagctgctgatctacggcgctaccacactggaaacaggcgtgcccagcagattttctggcagcggctctggcaccgactacaccctgacaatatccagcctccagcctgaggacttcgccacctactactgtcagcagagctggaacaccccttggacattcggccagggcaccaagctggaaatcaagagactcgagggacagcctaaggccaatcctaccgtgacactgttccctccaagcagcgaagaactccaggccaacaaggccacacttgtgtgcctgatctccgacttctaccctggggctgtgacagtggcttggaaggccgatggatctcctgtgaaagccggcgtggaaaccaccaagccatccaagcagagcaacaacaaatacgccgccagctcctacctgagcctgacacctgagcagtggaagtcccacagatcctacagctgccaagtgacccacgaaggcagcaccgtggaaaagacagtggcccctacagagtgcagcggatccggcatgcggactgaagacctcccaaaggctgtggtgttcctggagcctcaatggtacagggtgctggagaaggacagtgtgactctgaagtgccagggagcctactcccctgaggacaattccacacagtggtttcacaatgagagcctcatctcaagccaggcctccagctacttcattgacgctgccacagtggacgacagtggagagtacaggtgccagacaaacctctccaccctcagtgacccggtgcagctagaagtccatatcggctggctgttgctccaggcccctcggtgggtgttcaaggaggaagaccctattcacctgaggtgtcacagctggaagaacactgctctgcataaggtcacatatttacagaatggcaaaggcaggaagtattttcatcataattctgacttctacattccaaaagccacactcaaagacagcggctcctacttctgcagggggcttgttgggagtaaaaatgtgtcttcagagactgtgaacatcaccatcactcaaggtttggcagtgtcaaccatctcatcattctttccacctggctaccaagtgtccttctgcctggtcatggtgctgctgttcgccgtggataccggcctgtacttcagcgtcaagaccaacatccggtccagcaccagagactggaaggaccacaagttcaagtggcggaaggaccctcaggacaagagggccaagcgatctggatctggagcaacaaacttctcactactcaaacaagcaggtgacgtggaggagaatcccgggcctactagtatggactggatttggcgcatccttttccttgtcggcgctgctaccggcgcgcattccttcgaacaagttcagcttcaacagcctggcgctgagctggtcaaacctggcgcttctgtgaagatgagctgcaaagccagcggctacgccttcagcagctactggatcaactggatgaagcagaaacccggccagggactcgaatggatcggccaaatctatcccggcgacggcgacaccaactacaacggcaagttcaagggcagagccacactgaccgccgatacctctagcagcacagcctacatgcagctgagcagcctgaccagcgaagatagcgccgtgtacttctgtgcccggtccatcacaacagtcgtgggctgcgctatggactattggggccagggaacaagcgtgaccgtgtctagtacgcgtgcctctacaaagggaccctccgtgtttcctctggctcccagcagcaagtctacaagcggaggaacagccgctctgggctgcctggtcaaggattactttcccgagcctgtgaccgtgtcctggaatagcggagcactgacaagcggcgtgcacacctttccagccgtgctgcaaagcagcggcctgtactctctgagcagcgtggtcacagtgcctagctctagcctgggcacccagacctacatctgcaatgtgaaccacaagcctagcaacaccaaggtggacaagagagtggaacccaagagctgtggtaccaaaggatgccagggaagcgccgaccatgtggtgtcaatttctggcgtgcccctgcaactccagccaaactctattcagaccaaagtcgatagcattgcctggaaaaaattgctgccctctcagaacgggtttcaccacattctcaaatgggaaaatggctctctgccctccaacacctccaacgatcggtttagctttatcgtcaagaatctgtccctgctcatcaaagcagcccagcagcaagactccggcctgtattgcctcgaagtcacctccatctccgggaaagtgcagacagctacattccaagtgttcgtctttgataaggtcgagaagcctagactccaaggacaggggaagattctggacagaggacggtgtcaggtggcactgtcttgccttgtcagccgcgacggcaatgtgtcttatgcttggtatcggggctccaagctgattcaaaccgctgggaatctgacatacctcgatgaagaggttgacatcaatgggacgcacacgtatacttgcaatgtctccaatcctgtcagctgggagtctcataccctgaacctgacacaggattgtcaaaatgcacatcaagagttccggttttggccgtttcttgtgattatcgtgattctgtctgccctcttcctcggaactctggcttgcttctgtgtctggcggcgcaaacggaaagagaaacagtctgagacttccccgaaagagtttctcacgatatacgaagatgtcaaggacctcaagacccgccgcaaccatgagcaagaacagacattcccaggcggaggctccacaatctactccatgattcagtcccagtctagcgccccaacctctcaagagcctgcttataccctgtacagtctgattcagccctccagaaagtccggctctcggaagaggaaccactctcctagcttcaactccaccatatatgaagtcattggcaagtctcagcccaaagcacagaatcctgccaggctgagcagaaaagaacttgagaatttcgacgtctactcccgcgccaagagaagcggatctggcgtgaagcagaccctgaatttcgacctgctgaagctggctggcgacgtggaatccaacccaggcccttctagaggcgggatccacaccatgtccgactccaaggaggtccctagccttccatttttgcgacacttgctcgaagagttggacagccatgaggacagcttgctgctgtttctgtgtcacgacgcggccccgggctgcacgacggtcacgcaagctttgtgctcgcttagccaacagcgcaagctgaccctcgcggctctggtcgagatgctctacgtgctgcagcgtatggatcttctcaagagccgcttcgggctcagcaaggagggggccgagcaattgctgggcacaagctttctcacgcgctaccgcaagctcatggtttgcgtgggtgaggagctcgactcgagcgagctacgcgctctacgcttgttcgcgtgcaacctgaatccgagcctgagcacggcgctttctgagagcagccgctttgtcgagcttgtactcgcgcttgaaaacgtaggactcgtctcgccatcgagtgtttccgtgcttgcggacatgttgcgcactcttcggcgcctcgatttgtgccagcagcttgttgagtacgaacaacaagagcaagccaggtaccgttactgttacgcggcctcgccctcattgccagttcgtacgttacgtcgggggcacggcgcgagtgaacacgagcagctgtgcatgcccgtgcaagaatcctctgacagccccgagctgctgcgcacgcccgtacaagaatcctccagcgacagccccgagcaaacgact

SEQ ID NO: 5679 - DNA, 4005 bp, Artificial Sequence
  Synthetic Polynucleotide
atggccttaccagtgaccgccttgctcctgccgctggccttgctgctccacgccgccaggccggacatccagatgacacagagccctagcagcctgtctgccagcgtgggagacagagtgaccatcacatgcaaggccagcgaccacatcaacaactggctggcctggtatcagcagaagcctggacaggcccctaagctgctgatctacggcgctaccacactggaaacaggcgtgcccagcagattttctggcagcggctctggcaccgactacaccctgacaatatccagcctccagcctgaggacttcgccacctactactgtcagcagagctggaacaccccttggacattcggccagggcaccaagctggaaatcaagagactcgagggacagcctaaggccaatcctaccgtgacactgttccctccaagcagcgaagaactccaggccaacaaggccacacttgtgtgcctgatctccgacttctaccctggggctgtgacagtggcttggaaggccgatggatctcctgtgaaagccggcgtggaaaccaccaagccatccaagcagagcaacaacaaatacgccgccagctcctacctgagcctgacacctgagcagtggaagtcccacagatcctacagctgccaagtgacccacgaaggcagcaccgtggaaaagacagtggcccctacagagtgcagcggatccggcatgcggactgaagacctcccaaaggctgtggtgttcctggagcctcaatggtacagggtgctggagaaggacagtgtgactctgaagtgccagggagcctactcccctgaggacaattccacacagtggtttcacaatgagagcctcatctcaagccaggcctccagctacttcattgacgctgccacagtggacgacagtggagagtacaggtgccagacaaacctctccaccctcagtgacccggtgcagctagaagtccatatcggctggctgttgctccaggcccctcggtgggtgttcaaggaggaagaccctattcacctgaggtgtcacagctggaagaacactgctctgcataaggtcacatatttacagaatggcaaaggcaggaagtattttcatcataattctgacttctacattccaaaagccacactcaaagacagcggctcctacttctgcagggggcttgttgggagtaaaaatgtgtcttcagagactgtgaacatcaccatcactcaaggtttggcagtgtcaaccatctcatcattctttccacctggctaccaagtgtccttctgcctggtcatggtgctgctgttcgccgtggataccggcctgtacttcagcgtcaagaccaacatccggtccagcaccagagactggaaggaccacaagttcaagtggcggaaggaccctcaggacaagagggccaagcgatctggatctggagcaacaaacttctcactactcaaacaagcaggtgacgtggaggagaatcccgggcctactagtatggactggatttggcgcatccttttccttgtcggcgctgctaccggcgcgcattccttcgaacaagttcagcttcaacagcctggcgctgagctggtcaaacctggcgcttctgtgaagatgagctgcaaagccagcggctacgccttcagcagctactggatcaactggatgaagcagaaacccggccagggactcgaatggatcggccaaatctatcccggcgacggcgacaccaactacaacggcaagttcaagggcagagccacactgaccgccgatacctctagcagcacagcctacatgcagctgagcagcctgaccagcgaagatagcgccgtgtacttctgtgcccggtccatcacaacagtcgtgggctgcgctatggactattggggccagggaacaagcgtgaccgtgtctagtacgcgtgcctctacaaagggaccctccgtgtttcctctggctcccagcagcaagtctacaagcggaggaacagccgctctgggctgcctggtcaaggattactttcccgagcctgtgaccgtgtcctggaatagcggagcactgacaagcggcgtgcacacctttccagccgtgctgcaaagcagcggcctgtactctctgagcagcgtggtcacagtgcctagctctagcctgggcacccagacctacatctgcaatgtgaaccacaagcctagcaacaccaaggtggacaagagagtggaacccaagagctgtggtaccaaaggatgccagggaagcgccgaccatgtggtgtcaatttctggcgtgcccctgcaactccagccaaactctattcagaccaaagtcgatagcattgcctggaaaaaattgctgccctctcagaacgggtttcaccacattctcaaatgggaaaatggctctctgccctccaacacctccaacgatcggtttagctttatcgtcaagaatctgtccctgctcatcaaagcagcccagcagcaagactccggcctgtattgcctcgaagtcacctccatctccgggaaagtgcagacagctacattccaagtgttcgtctttgataaggtcgagaagcctagactccaaggacaggggaagattctggacagaggacggtgtcaggtggcactgtcttgccttgtcagccgcgacggcaatgtgtcttatgcttggtatcggggctccaagctgattcaaaccgctgggaatctgacatacctcgatgaagaggttgacatcaatgggacgcacacgtatacttgcaatgtctccaatcctgtcagctgggagtctcataccctgaacctgacacaggattgtcaaaatgcacatcaagagttccggttttggccgtttcttgtgattatcgtgattctgtctgccctcttcctcggaactctggcttgcttctgtgtctggcggcgcaaacggaaagagaaacagtctgagacttccccgaaagagtttctcacgatatacgaagatgtcaaggacctcaagacccgccgcaaccatgagcaagaacagacattcccaggcggaggctccacaatctactccatgattcagtcccagtctagcgccccaacctctcaagagcctgcttataccctgtacagtctgattcagccctccagaaagtccggctctcggaagaggaaccactctcctagcttcaactccaccatatatgaagtcattggcaagtctcagcccaaagcacagaatcctgccaggctgagcagaaaagaacttgagaatttcgacgtctactcccgcgccaagagaagcggatctggcgtgaagcagaccctgaatttcgacctgctgaagctggctggcgacgtggaatccaacccaggcccttctagaggccatatgaccgagtacaagcccacggtgcgcctcgccacccgcgacgacgtccccagggccgtacgcaccctcgccgccgcgttcgccgactaccccgccacgcgccacaccgtcgatccggaccgccacatcgagcgggtcaccgagctgcaagaactcttcctcacgcgcgtcgggctcgacatcggcaaggtgtgggtcgcggacgacggcgccgcggtggcggtctggaccacgccggagagcgtcgaagcgggggcggtgttcgccgagatcggcccgcgcatggccgagttgagcggttcccggctggccgcgcagcaacagatggaaggcctcctggcgccgcaccggcccaaggagcccgcgtggttcctggccaccgtcggcgtctcgcccgaccaccagggcaagggtctgggcagcgccgtcgtgctccccggagtggaggcggccgagcgcgccggggtgcccgccttcctggagacctccgcgccccgcaacctccccttctacgagcggctcggcttcaccgtcaccgccgacgtcgaggtgcccgaaggaccgcgcacctggtgcatgacccgcaagcccggtgcctga

SEQ ID NO: 5680 - DNA, 4416 bp, Artificial Sequence
  Synthetic Polynucleotide
atggccttaccagtgaccgccttgctcctgccgctggccttgctgctccacgccgccaggccggaagtgcagctggttgaatctggcggaggactggttcaggctggcggatctctgagactgtcttgtgccgccagcggcagaacctttagcatgggctggtttagacaggcccctggcaaagagagagagttcgtcgccgccatcacatactctggcggcagcccttactacgccgactctgtgaagggcagattcaccatcagccgggacaacgccaagaacaccgtgtacctccagatgaacagcctgaagcctgaggacaccgccgtgtactactgcgccgccaatccaacatacggcagcgactggaacgccgagaattggggccagggaacccaagtgacagtgtctagcggtaccggcggaggcggatctggcggcggaggtagcggtggcggaggatctgaattcgacatccagatgacacagagccctagcagcctgtctgccagcgtgggagacagagtgaccatcacatgcaaggccagcgaccacatcaacaactggctggcctggtatcagcagaagcctggacaggcccctaagctgctgatctacggcgctaccacactggaaacaggcgtgcccagcagattttctggcagcggctctggcaccgactacaccctgacaatatccagcctccagcctgaggacttcgccacctactactgtcagcagagctggaacaccccttggacattcggccagggcaccaagctggaaatcaagagactcgagggacagcctaaggccaatcctaccgtgacactgttccctccaagcagcgaagaactccaggccaacaaggccacacttgtgtgcctgatctccgacttctaccctggggctgtgacagtggcttggaaggccgatggatctcctgtgaaagccggcgtggaaaccaccaagccatccaagcagagcaacaacaaatacgccgccagctcctacctgagcctgacacctgagcagtggaagtcccacagatcctacagctgccaagtgacccacgaaggcagcaccgtggaaaagacagtggcccctacagagtgcagcggatccggcatgcggactgaagacctcccaaaggctgtggtgttcctggagcctcaatggtacagggtgctggagaaggacagtgtgactctgaagtgccagggagcctactcccctgaggacaattccacacagtggtttcacaatgagagcctcatctcaagccaggcctccagctacttcattgacgctgccacagtggacgacagtggagagtacaggtgccagacaaacctctccaccctcagtgacccggtgcagctagaagtccatatcggctggctgttgctccaggcccctcggtgggtgttcaaggaggaagaccctattcacctgaggtgtcacagctggaagaacactgctctgcataaggtcacatatttacagaatggcaaaggcaggaagtattttcatcataattctgacttctacattccaaaagccacactcaaagacagcggctcctacttctgcagggggcttgttgggagtaaaaatgtgtcttcagagactgtgaacatcaccatcactcaaggtttggcagtgtcaaccatctcatcattctttccacctggctaccaagtgtccttctgcctggtcatggtgctgctgttcgccgtggataccggcctgtacttcagcgtcaagaccaacatccggtccagcaccagagactggaaggaccacaagttcaagtggcggaaggaccctcaggacaagagggccaagcgatctggatctggagcaacaaacttctcactactcaaacaagcaggtgacgtggaggagaatcccgggcctactagtatggactggatttggcgcatccttttccttgtcggcgctgctaccggcgcgcattccttcgaacaagttcagcttcaacagcctggcgctgagctggtcaaacctggcgcttctgtgaagatgagctgcaaagccagcggctacgccttcagcagctactggatcaactggatgaagcagaaacccggccagggactcgaatggatcggccaaatctatcccggcgacggcgacaccaactacaacggcaagttcaagggcagagccacactgaccgccgatacctctagcagcacagcctacatgcagctgagcagcctgaccagcgaagatagcgccgtgtacttctgtgcccggtccatcacaacagtcgtgggctgcgctatggactattggggccagggaacaagcgtgaccgtgtctagtacgcgtgcctctacaaagggaccctccgtgtttcctctggctcccagcagcaagtctacaagcggaggaacagccgctctgggctgcctggtcaaggattactttcccgagcctgtgaccgtgtcctggaatagcggagcactgacaagcggcgtgcacacctttccagccgtgctgcaaagcagcggcctgtactctctgagcagcgtggtcacagtgcctagctctagcctgggcacccagacctacatctgcaatgtgaaccacaagcctagcaacaccaaggtggacaagagagtggaacccaagagctgtggtaccaaaggatgccagggaagcgccgaccatgtggtgtcaatttctggcgtgcccctgcaactccagccaaactctattcagaccaaagtcgatagcattgcctggaaaaaattgctgccctctcagaacgggtttcaccacattctcaaatgggaaaatggctctctgccctccaacacctccaacgatcggtttagctttatcgtcaagaatctgtccctgctcatcaaagcagcccagcagcaagactccggcctgtattgcctcgaagtcacctccatctccgggaaagtgcagacagctacattccaagtgttcgtctttgataaggtcgagaagcctagactccaaggacaggggaagattctggacagaggacggtgtcaggtggcactgtcttgccttgtcagccgcgacggcaatgtgtcttatgcttggtatcggggctccaagctgattcaaaccgctgggaatctgacatacctcgatgaagaggttgacatcaatgggacgcacacgtatacttgcaatgtctccaatcctgtcagctgggagtctcataccctgaacctgacacaggattgtcaaaatgcacatcaagagttccggttttggccgtttcttgtgattatcgtgattctgtctgccctcttcctcggaactctggcttgcttctgtgtctggcggcgcaaacggaaagagaaacagtctgagacttccccgaaagagtttctcacgatatacgaagatgtcaaggacctcaagacccgccgcaaccatgagcaagaacagacattcccaggcggaggctccacaatctactccatgattcagtcccagtctagcgccccaacctctcaagagcctgcttataccctgtacagtctgattcagccctccagaaagtccggctctcggaagaggaaccactctcctagcttcaactccaccatatatgaagtcattggcaagtctcagcccaaagcacagaatcctgccaggctgagcagaaaagaacttgagaatttcgacgtctactcccgcgccaagagaagcggatctggcgtgaagcagaccctgaatttcgacctgctgaagctggctggcgacgtggaatccaacccaggcccttctagaggccatatgaccgagtacaagcccacggtgcgcctcgccacccgcgacgacgtccccagggccgtacgcaccctcgccgccgcgttcgccgactaccccgccacgcgccacaccgtcgatccggaccgccacatcgagcgggtcaccgagctgcaagaactcttcctcacgcgcgtcgggctcgacatcggcaaggtgtgggtcgcggacgacggcgccgcggtggcggtctggaccacgccggagagcgtcgaagcgggggcggtgttcgccgagatcggcccgcgcatggccgagttgagcggttcccggctggccgcgcagcaacagatggaaggcctcctggcgccgcaccggcccaaggagcccgcgtggttcctggccaccgtcggcgtctcgcccgaccaccagggcaagggtctgggcagcgccgtcgtgctccccggagtggaggcggccgagcgcgccggggtgcccgccttcctggagacctccgcgccccgcaacctccccttctacgagcggctcggcttcaccgtcaccgccgacgtcgaggtgcccgaaggaccgcgcacctggtgcatgacccgcaagcccggtgcctga

SEQ ID NO: 5681 - DNA, 4827 bp, Artificial Sequence
  Synthetic Polynucleotide
atggccttaccagtgaccgccttgctcctgccgctggccttgctgctccacgccgccaggccggaagtgcagctggttgaatctggcggaggactggttcaggctggcggatctctgagactgtcttgtgccgccagcggcagaacctttagcatgggctggtttagacaggcccctggcaaagagagagagttcgtcgccgccatcacatactctggcggcagcccttactacgccgactctgtgaagggcagattcaccatcagccgggacaacgccaagaacaccgtgtacctccagatgaacagcctgaagcctgaggacaccgccgtgtactactgcgccgccaatccaacatacggcagcgactggaacgccgagaattggggccagggaacccaagtgacagtgtctagcggtaccggcggaggcggatctggcggcggaggtagcggtggcggaggatctgaattcgacatccagatgacacagagccctagcagcctgtctgccagcgtgggagacagagtgaccatcacatgcaaggccagcgaccacatcaacaactggctggcctggtatcagcagaagcctggacaggcccctaagctgctgatctacggcgctaccacactggaaacaggcgtgcccagcagattttctggcagcggctctggcaccgactacaccctgacaatatccagcctccagcctgaggacttcgccacctactactgtcagcagagctggaacaccccttggacattcggccagggcaccaagctggaaatcaagagactcgagggacagcctaaggccaatcctaccgtgacactgttccctccaagcagcgaagaactccaggccaacaaggccacacttgtgtgcctgatctccgacttctaccctggggctgtgacagtggcttggaaggccgatggatctcctgtgaaagccggcgtggaaaccaccaagccatccaagcagagcaacaacaaatacgccgccagctcctacctgagcctgacacctgagcagtggaagtcccacagatcctacagctgccaagtgacccacgaaggcagcaccgtggaaaagacagtggcccctacagagtgcagcggatccggcatgcggactgaagacctcccaaaggctgtggtgttcctggagcctcaatggtacagggtgctggagaaggacagtgtgactctgaagtgccagggagcctactcccctgaggacaattccacacagtggtttcacaatgagagcctcatctcaagccaggcctccagctacttcattgacgctgccacagtggacgacagtggagagtacaggtgccagacaaacctctccaccctcagtgacccggtgcagctagaagtccatatcggctggctgttgctccaggcccctcggtgggtgttcaaggaggaagaccctattcacctgaggtgtcacagctggaagaacactgctctgcataaggtcacatatttacagaatggcaaaggcaggaagtattttcatcataattctgacttctacattccaaaagccacactcaaagacagcggctcctacttctgcagggggcttgttgggagtaaaaatgtgtcttcagagactgtgaacatcaccatcactcaaggtttggcagtgtcaaccatctcatcattctttccacctggctaccaagtgtccttctgcctggtcatggtgctgctgttcgccgtggataccggcctgtacttcagcgtcaagaccaacatccggtccagcaccagagactggaaggaccacaagttcaagtggcggaaggaccctcaggacaagagggccaagcgatctggatctggagcaacaaacttctcactactcaaacaagcaggtgacgtggaggagaatcccgggcctactagtatggactggatttggcgcatccttttccttgtcggcgctgctaccggcgcgcattccgggcccgaagtgcaactggttgaatccggtggcggcctggtgcaagcaggcggatctctcagacttagctgtgccgcctccggcagaaccttcacaatgggatggtttaggcaggctccagggaaagagagagagttcgtcgccgccatctctctgtctcccacactggcctactacgccgactctgtgaaaggccggttcaccatctccagagataatgccaagaacaccgtggtgctgcaaatgaactctctgaaacccgaggatacagccctgtactattgtgccgctgaccggaagtccgtgatgagcatcagacccgattactggggacagggcacacaagtcacagtgtcctctggatccggcggcggaggatctggcggaggcggatctgggggcggaggctctttcgaacaagttcagcttcaacagcctggcgctgagctggtcaaacctggcgcttctgtgaagatgagctgcaaagccagcggctacgccttcagcagctactggatcaactggatgaagcagaaacccggccagggactcgaatggatcggccaaatctatcccggcgacggcgacaccaactacaacggcaagttcaagggcagagccacactgaccgccgatacctctagcagcacagcctacatgcagctgagcagcctgaccagcgaagatagcgccgtgtacttctgtgcccggtccatcacaacagtcgtgggctgcgctatggactattggggccagggaacaagcgtgaccgtgtctagtacgcgtgcctctacaaagggaccctccgtgtttcctctggctcccagcagcaagtctacaagcggaggaacagccgctctgggctgcctggtcaaggattactttcccgagcctgtgaccgtgtcctggaatagcggagcactgacaagcggcgtgcacacctttccagccgtgctgcaaagcagcggcctgtactctctgagcagcgtggtcacagtgcctagctctagcctgggcacccagacctacatctgcaatgtgaaccacaagcctagcaacaccaaggtggacaagagagtggaacccaagagctgtggtaccaaaggatgccagggaagcgccgaccatgtggtgtcaatttctggcgtgcccctgcaactccagccaaactctattcagaccaaagtcgatagcattgcctggaaaaaattgctgccctctcagaacgggtttcaccacattctcaaatgggaaaatggctctctgccctccaacacctccaacgatcggtttagctttatcgtcaagaatctgtccctgctcatcaaagcagcccagcagcaagactccggcctgtattgcctcgaagtcacctccatctccgggaaagtgcagacagctacattccaagtgttcgtctttgataaggtcgagaagcctagactccaaggacaggggaagattctggacagaggacggtgtcaggtggcactgtcttgccttgtcagccgcgacggcaatgtgtcttatgcttggtatcggggctccaagctgattcaaaccgctgggaatctgacatacctcgatgaagaggttgacatcaatgggacgcacacgtatacttgcaatgtctccaatcctgtcagctgggagtctcataccctgaacctgacacaggattgtcaaaatgcacatcaagagttccggttttggccgtttcttgtgattatcgtgattctgtctgccctcttcctcggaactctggcttgcttctgtgtctggcggcgcaaacggaaagagaaacagtctgagacttccccgaaagagtttctcacgatatacgaagatgtcaaggacctcaagacccgccgcaaccatgagcaagaacagacattcccaggcggaggctccacaatctactccatgattcagtcccagtctagcgccccaacctctcaagagcctgcttataccctgtacagtctgattcagccctccagaaagtccggctctcggaagaggaaccactctcctagcttcaactccaccatatatgaagtcattggcaagtctcagcccaaagcacagaatcctgccaggctgagcagaaaagaacttgagaatttcgacgtctactcccgcgccaagagaagcggatctggcgtgaagcagaccctgaatttcgacctgctgaagctggctggcgacgtggaatccaacccaggcccttctagaggccatatgaccgagtacaagcccacggtgcgcctcgccacccgcgacgacgtccccagggccgtacgcaccctcgccgccgcgttcgccgactaccccgccacgcgccacaccgtcgatccggaccgccacatcgagcgggtcaccgagctgcaagaactcttcctcacgcgcgtcgggctcgacatcggcaaggtgtgggtcgcggacgacggcgccgcggtggcggtctggaccacgccggagagcgtcgaagcgggggcggtgttcgccgagatcggcccgcgcatggccgagttgagcggttcccggctggccgcgcagcaacagatggaaggcctcctggcgccgcaccggcccaaggagcccgcgtggttcctggccaccgtcggcgtctcgcccgaccaccagggcaagggtctgggcagcgccgtcgtgctccccggagtggaggcggccgagcgcgccggggtgcccgccttcctggagacctccgcgccccgcaacctccccttctacgagcggctcggcttcaccgtcaccgccgacgtcgaggtgcccgaaggaccgcgcacctggtgcatgacccgcaagcccggtgcctga

SEQ ID NO: 5682 - DNA, 4026 bp, Artificial Sequence
  Synthetic Polynucleotide
atggccttaccagtgaccgccttgctcctgccgctggccttgctgctccacgccgccaggccggaagtgcagctggttgaatctggcggaggactggttcaggctggcggatctctgagactgtcttgtgccgccagcggcagaacctttagcatgggctggtttagacaggcccctggcaaagagagagagttcgtcgccgccatcacatactctggcggcagcccttactacgccgactctgtgaagggcagattcaccatcagccgggacaacgccaagaacaccgtgtacctccagatgaacagcctgaagcctgaggacaccgccgtgtactactgcgccgccaatccaacatacggcagcgactggaacgccgagaattggggccagggaacccaagtgacagtgtctagcctcgagggacagcctaaggccaatcctaccgtgacactgttccctccaagcagcgaagaactccaggccaacaaggccacacttgtgtgcctgatctccgacttctaccctggggctgtgacagtggcttggaaggccgatggatctcctgtgaaagccggcgtggaaaccaccaagccatccaagcagagcaacaacaaatacgccgccagctcctacctgagcctgacacctgagcagtggaagtcccacagatcctacagctgccaagtgacccacgaaggcagcaccgtggaaaagacagtggcccctacagagtgcagcggatccggcatgcggactgaagacctcccaaaggctgtggtgttcctggagcctcaatggtacagggtgctggagaaggacagtgtgactctgaagtgccagggagcctactcccctgaggacaattccacacagtggtttcacaatgagagcctcatctcaagccaggcctccagctacttcattgacgctgccacagtggacgacagtggagagtacaggtgccagacaaacctctccaccctcagtgacccggtgcagctagaagtccatatcggctggctgttgctccaggcccctcggtgggtgttcaaggaggaagaccctattcacctgaggtgtcacagctggaagaacactgctctgcataaggtcacatatttacagaatggcaaaggcaggaagtattttcatcataattctgacttctacattccaaaagccacactcaaagacagcggctcctacttctgcagggggcttgttgggagtaaaaatgtgtcttcagagactgtgaacatcaccatcactcaaggtttggcagtgtcaaccatctcatcattctttccacctggctaccaagtgtccttctgcctggtcatggtgctgctgttcgccgtggataccggcctgtacttcagcgtcaagaccaacatccggtccagcaccagagactggaaggaccacaagttcaagtggcggaaggaccctcaggacaagagggccaagcgatctggatctggagcaacaaacttctcactactcaaacaagcaggtgacgtggaggagaatcccgggcctactagtatggactggatttggcgcatccttttccttgtcggcgctgctaccggcgcgcattccgggcccgaagtgcaactggttgaatccggtggcggcctggtgcaagcaggcggatctctcagacttagctgtgccgcctccggcagaaccttcacaatgggatggtttaggcaggctccagggaaagagagagagttcgtcgccgccatctctctgtctcccacactggcctactacgccgactctgtgaaaggccggttcaccatctccagagataatgccaagaacaccgtggtgctgcaaatgaactctctgaaacccgaggatacagccctgtactattgtgccgctgaccggaagtccgtgatgagcatcagacccgattactggggacagggcacacaagtcacagtgtcctctacgcgtgcctctacaaagggaccctccgtgtttcctctggctcccagcagcaagtctacaagcggaggaacagccgctctgggctgcctggtcaaggattactttcccgagcctgtgaccgtgtcctggaatagcggagcactgacaagcggcgtgcacacctttccagccgtgctgcaaagcagcggcctgtactctctgagcagcgtggtcacagtgcctagctctagcctgggcacccagacctacatctgcaatgtgaaccacaagcctagcaacaccaaggtggacaagagagtggaacccaagagctgtggtaccaaaggatgccagggaagcgccgaccatgtggtgtcaatttctggcgtgcccctgcaactccagccaaactctattcagaccaaagtcgatagcattgcctggaaaaaattgctgccctctcagaacgggtttcaccacattctcaaatgggaaaatggctctctgccctccaacacctccaacgatcggtttagctttatcgtcaagaatctgtccctgctcatcaaagcagcccagcagcaagactccggcctgtattgcctcgaagtcacctccatctccgggaaagtgcagacagctacattccaagtgttcgtctttgataaggtcgagaagcctagactccaaggacaggggaagattctggacagaggacggtgtcaggtggcactgtcttgccttgtcagccgcgacggcaatgtgtcttatgcttggtatcggggctccaagctgattcaaaccgctgggaatctgacatacctcgatgaagaggttgacatcaatgggacgcacacgtatacttgcaatgtctccaatcctgtcagctgggagtctcataccctgaacctgacacaggattgtcaaaatgcacatcaagagttccggttttggccgtttcttgtgattatcgtgattctgtctgccctcttcctcggaactctggcttgcttctgtgtctggcggcgcaaacggaaagagaaacagtctgagacttccccgaaagagtttctcacgatatacgaagatgtcaaggacctcaagacccgccgcaaccatgagcaagaacagacattcccaggcggaggctccacaatctactccatgattcagtcccagtctagcgccccaacctctcaagagcctgcttataccctgtacagtctgattcagccctccagaaagtccggctctcggaagaggaaccactctcctagcttcaactccaccatatatgaagtcattggcaagtctcagcccaaagcacagaatcctgccaggctgagcagaaaagaacttgagaatttcgacgtctactcccgcgccaagagaagcggatctggcgtgaagcagaccctgaatttcgacctgctgaagctggctggcgacgtggaatccaacccaggcccttctagaggccatatgaccgagtacaagcccacggtgcgcctcgccacccgcgacgacgtccccagggccgtacgcaccctcgccgccgcgttcgccgactaccccgccacgcgccacaccgtcgatccggaccgccacatcgagcgggtcaccgagctgcaagaactcttcctcacgcgcgtcgggctcgacatcggcaaggtgtgggtcgcggacgacggcgccgcggtggcggtctggaccacgccggagagcgtcgaagcgggggcggtgttcgccgagatcggcccgcgcatggccgagttgagcggttcccggctggccgcgcagcaacagatggaaggcctcctggcgccgcaccggcccaaggagcccgcgtggttcctggccaccgtcggcgtctcgcccgaccaccagggcaagggtctgggcagcgccgtcgtgctccccggagtggaggcggccgagcgcgccggggtgcccgccttcctggagacctccgcgccccgcaacctccccttctacgagcggctcggcttcaccgtcaccgccgacgtcgaggtgcccgaaggaccgcgcacctggtgcatgacccgcaagcccggtgcctga

SEQ ID NO: 5683 - DNA, 4050 bp, Artificial Sequence
  Synthetic Polynucleotide
atggccttaccagtgaccgccttgctcctgccgctggccttgctgctccacgccgccaggccggacatccagatgacacagagccctagcagcctgtctgccagcgtgggagacagagtgaccatcacatgcaaggccagcgaccacatcaacaactggctggcctggtatcagcagaagcctggacaggcccctaagctgctgatctacggcgctaccacactggaaacaggcgtgcccagcagattttctggcagcggctctggcaccgactacaccctgacaatatccagcctccagcctgaggacttcgccacctactactgtcagcagagctggaacaccccttggacattcggccagggcaccaagctggaaatcaagagactcgaggacctgaagaacgtgttcccacctgaggtggccgtgttcgagcctagcgaggccgagatcagccacacccagaaagccaccctcgtgtgcctggctaccggcttctaccccgaccatgtggaactgtcttggtgggtcaacggcaaagaggtgcacagcggcgtgtctaccgacccccagccactgaaagaacagcccgccctgaacgacagccggtactgcctgagcagcagactgagagtgtccgccaccttctggcagaacccccggaaccacttcagatgccaggtgcagttctacggcctgagcgagaacgacgagtggacccaggacagagccaagcccgtgacccagatcgtgtctgccgaagcctggggcagagccgattgcggatccggcatgcggactgaagacctcccaaaggctgtggtgttcctggagcctcaatggtacagggtgctggagaaggacagtgtgactctgaagtgccagggagcctactcccctgaggacaattccacacagtggtttcacaatgagagcctcatctcaagccaggcctccagctacttcattgacgctgccacagtggacgacagtggagagtacaggtgccagacaaacctctccaccctcagtgacccggtgcagctagaagtccatatcggctggctgttgctccaggcccctcggtgggtgttcaaggaggaagaccctattcacctgaggtgtcacagctggaagaacactgctctgcataaggtcacatatttacagaatggcaaaggcaggaagtattttcatcataattctgacttctacattccaaaagccacactcaaagacagcggctcctacttctgcagggggcttgttgggagtaaaaatgtgtcttcagagactgtgaacatcaccatcactcaaggtttggcagtgtcaaccatctcatcattctttccacctggctaccaagtgtccttctgcctggtcatggtgctgctgttcgccgtggataccggcctgtacttcagcgtcaagaccaacatccggtccagcaccagagactggaaggaccacaagttcaagtggcggaaggaccctcaggacaagagggccaagcgatctggatctggagcaacaaacttctcactactcaaacaagcaggtgacgtggaggagaatcccgggcctactagtatggactggatttggcgcatccttttccttgtcggcgctgctaccggcgcgcattccttcgaacaagttcagcttcaacagcctggcgctgagctggtcaaacctggcgcttctgtgaagatgagctgcaaagccagcggctacgccttcagcagctactggatcaactggatgaagcagaaacccggccagggactcgaatggatcggccaaatctatcccggcgacggcgacaccaactacaacggcaagttcaagggcagagccacactgaccgccgatacctctagcagcacagcctacatgcagctgagcagcctgaccagcgaagatagcgccgtgtacttctgtgcccggtccatcacaacagtcgtgggctgcgctatggactattggggccagggaacaagcgtgaccgtgtctagtacgcgtatccagaaccctgatcctgccgtgtaccagctgcgggatagcaagagcagcgacaagagcgtgtgtctgttcaccgacttcgacagccagaccaacgtgtcccagagcaaggactccgacgtgtacatcaccgataagaccgtgctggacatgcggagcatggacttcaagagcaactccgccgtggcctggtccaacaagtccgatttcgcctgcgccaacgccttcaacaacagcattatccccgaggacacattcttcccaagccccgagagcagctgcggtaccaaaggatgccagggaagcgccgaccatgtggtgtcaatttctggcgtgcccctgcaactccagccaaactctattcagaccaaagtcgatagcattgcctggaaaaaattgctgccctctcagaacgggtttcaccacattctcaaatgggaaaatggctctctgccctccaacacctccaacgatcggtttagctttatcgtcaagaatctgtccctgctcatcaaagcagcccagcagcaagactccggcctgtattgcctcgaagtcacctccatctccgggaaagtgcagacagctacattccaagtgttcgtctttgataaggtcgagaagcctagactccaaggacaggggaagattctggacagaggacggtgtcaggtggcactgtcttgccttgtcagccgcgacggcaatgtgtcttatgcttggtatcggggctccaagctgattcaaaccgctgggaatctgacatacctcgatgaagaggttgacatcaatgggacgcacacgtatacttgcaatgtctccaatcctgtcagctgggagtctcataccctgaacctgacacaggattgtcaaaatgcacatcaagagttccggttttggccgtttcttgtgattatcgtgattctgtctgccctcttcctcggaactctggcttgcttctgtgtctggcggcgcaaacggaaagagaaacagtctgagacttccccgaaagagtttctcacgatatacgaagatgtcaaggacctcaagacccgccgcaaccatgagcaagaacagacattcccaggcggaggctccacaatctactccatgattcagtcccagtctagcgccccaacctctcaagagcctgcttataccctgtacagtctgattcagccctccagaaagtccggctctcggaagaggaaccactctcctagcttcaactccaccatatatgaagtcattggcaagtctcagcccaaagcacagaatcctgccaggctgagcagaaaagaacttgagaatttcgacgtctactcccgcgccaagagaagcggatctggcgtgaagcagaccctgaatttcgacctgctgaagctggctggcgacgtggaatccaacccaggcccttctagaggccatatgaccgagtacaagcccacggtgcgcctcgccacccgcgacgacgtccccagggccgtacgcaccctcgccgccgcgttcgccgactaccccgccacgcgccacaccgtcgatccggaccgccacatcgagcgggtcaccgagctgcaagaactcttcctcacgcgcgtcgggctcgacatcggcaaggtgtgggtcgcggacgacggcgccgcggtggcggtctggaccacgccggagagcgtcgaagcgggggcggtgttcgccgagatcggcccgcgcatggccgagttgagcggttcccggctggccgcgcagcaacagatggaaggcctcctggcgccgcaccggcccaaggagcccgcgtggttcctggccaccgtcggcgtctcgcccgaccaccagggcaagggtctgggcagcgccgtcgtgctccccggagtggaggcggccgagcgcgccggggtgcccgccttcctggagacctccgcgccccgcaacctccccttctacgagcggctcggcttcaccgtcaccgccgacgtcgaggtgcccgaaggaccgcgcacctggtgcatgacccgcaagcccggtgcctga

SEQ ID NO: 5684 - DNA, 4461 bp, Artificial Sequence
  Synthetic Polynucleotide
atggccttaccagtgaccgccttgctcctgccgctggccttgctgctccacgccgccaggccggaagtgcagctggttgaatctggcggaggactggttcaggctggcggatctctgagactgtcttgtgccgccagcggcagaacctttagcatgggctggtttagacaggcccctggcaaagagagagagttcgtcgccgccatcacatactctggcggcagcccttactacgccgactctgtgaagggcagattcaccatcagccgggacaacgccaagaacaccgtgtacctccagatgaacagcctgaagcctgaggacaccgccgtgtactactgcgccgccaatccaacatacggcagcgactggaacgccgagaattggggccagggaacccaagtgacagtgtctagcggtaccggcggaggcggatctggcggcggaggtagcggtggcggaggatctgaattcgacatccagatgacacagagccctagcagcctgtctgccagcgtgggagacagagtgaccatcacatgcaaggccagcgaccacatcaacaactggctggcctggtatcagcagaagcctggacaggcccctaagctgctgatctacggcgctaccacactggaaacaggcgtgcccagcagattttctggcagcggctctggcaccgactacaccctgacaatatccagcctccagcctgaggacttcgccacctactactgtcagcagagctggaacaccccttggacattcggccagggcaccaagctggaaatcaagagactcgaggacctgaagaacgtgttcccacctgaggtggccgtgttcgagcctagcgaggccgagatcagccacacccagaaagccaccctcgtgtgcctggctaccggcttctaccccgaccatgtggaactgtcttggtgggtcaacggcaaagaggtgcacagcggcgtgtctaccgacccccagccactgaaagaacagcccgccctgaacgacagccggtactgcctgagcagcagactgagagtgtccgccaccttctggcagaacccccggaaccacttcagatgccaggtgcagttctacggcctgagcgagaacgacgagtggacccaggacagagccaagcccgtgacccagatcgtgtctgccgaagcctggggcagagccgattgcggatccggcatgcggactgaagacctcccaaaggctgtggtgttcctggagcctcaatggtacagggtgctggagaaggacagtgtgactctgaagtgccagggagcctactcccctgaggacaattccacacagtggtttcacaatgagagcctcatctcaagccaggcctccagctacttcattgacgctgccacagtggacgacagtggagagtacaggtgccagacaaacctctccaccctcagtgacccggtgcagctagaagtccatatcggctggctgttgctccaggcccctcggtgggtgttcaaggaggaagaccctattcacctgaggtgtcacagctggaagaacactgctctgcataaggtcacatatttacagaatggcaaaggcaggaagtattttcatcataattctgacttctacattccaaaagccacactcaaagacagcggctcctacttctgcagggggcttgttgggagtaaaaatgtgtcttcagagactgtgaacatcaccatcactcaaggtttggcagtgtcaaccatctcatcattctttccacctggctaccaagtgtccttctgcctggtcatggtgctgctgttcgccgtggataccggcctgtacttcagcgtcaagaccaacatccggtccagcaccagagactggaaggaccacaagttcaagtggcggaaggaccctcaggacaagagggccaagcgatctggatctggagcaacaaacttctcactactcaaacaagcaggtgacgtggaggagaatcccgggcctactagtatggactggatttggcgcatccttttccttgtcggcgctgctaccggcgcgcattccttcgaacaagttcagcttcaacagcctggcgctgagctggtcaaacctggcgcttctgtgaagatgagctgcaaagccagcggctacgccttcagcagctactggatcaactggatgaagcagaaacccggccagggactcgaatggatcggccaaatctatcccggcgacggcgacaccaactacaacggcaagttcaagggcagagccacactgaccgccgatacctctagcagcacagcctacatgcagctgagcagcctgaccagcgaagatagcgccgtgtacttctgtgcccggtccatcacaacagtcgtgggctgcgctatggactattggggccagggaacaagcgtgaccgtgtctagtacgcgtatccagaaccctgatcctgccgtgtaccagctgcgggatagcaagagcagcgacaagagcgtgtgtctgttcaccgacttcgacagccagaccaacgtgtcccagagcaaggactccgacgtgtacatcaccgataagaccgtgctggacatgcggagcatggacttcaagagcaactccgccgtggcctggtccaacaagtccgatttcgcctgcgccaacgccttcaacaacagcattatccccgaggacacattcttcccaagccccgagagcagctgcggtaccaaaggatgccagggaagcgccgaccatgtggtgtcaatttctggcgtgcccctgcaactccagccaaactctattcagaccaaagtcgatagcattgcctggaaaaaattgctgccctctcagaacgggtttcaccacattctcaaatgggaaaatggctctctgccctccaacacctccaacgatcggtttagctttatcgtcaagaatctgtccctgctcatcaaagcagcccagcagcaagactccggcctgtattgcctcgaagtcacctccatctccgggaaagtgcagacagctacattccaagtgttcgtctttgataaggtcgagaagcctagactccaaggacaggggaagattctggacagaggacggtgtcaggtggcactgtcttgccttgtcagccgcgacggcaatgtgtcttatgcttggtatcggggctccaagctgattcaaaccgctgggaatctgacatacctcgatgaagaggttgacatcaatgggacgcacacgtatacttgcaatgtctccaatcctgtcagctgggagtctcataccctgaacctgacacaggattgtcaaaatgcacatcaagagttccggttttggccgtttcttgtgattatcgtgattctgtctgccctcttcctcggaactctggcttgcttctgtgtctggcggcgcaaacggaaagagaaacagtctgagacttccccgaaagagtttctcacgatatacgaagatgtcaaggacctcaagacccgccgcaaccatgagcaagaacagacattcccaggcggaggctccacaatctactccatgattcagtcccagtctagcgccccaacctctcaagagcctgcttataccctgtacagtctgattcagccctccagaaagtccggctctcggaagaggaaccactctcctagcttcaactccaccatatatgaagtcattggcaagtctcagcccaaagcacagaatcctgccaggctgagcagaaaagaacttgagaatttcgacgtctactcccgcgccaagagaagcggatctggcgtgaagcagaccctgaatttcgacctgctgaagctggctggcgacgtggaatccaacccaggcccttctagaggccatatgaccgagtacaagcccacggtgcgcctcgccacccgcgacgacgtccccagggccgtacgcaccctcgccgccgcgttcgccgactaccccgccacgcgccacaccgtcgatccggaccgccacatcgagcgggtcaccgagctgcaagaactcttcctcacgcgcgtcgggctcgacatcggcaaggtgtgggtcgcggacgacggcgccgcggtggcggtctggaccacgccggagagcgtcgaagcgggggcggtgttcgccgagatcggcccgcgcatggccgagttgagcggttcccggctggccgcgcagcaacagatggaaggcctcctggcgccgcaccggcccaaggagcccgcgtggttcctggccaccgtcggcgtctcgcccgaccaccagggcaagggtctgggcagcgccgtcgtgctccccggagtggaggcggccgagcgcgccggggtgcccgccttcctggagacctccgcgccccgcaacctccccttctacgagcggctcggcttcaccgtcaccgccgacgtcgaggtgcccgaaggaccgcgcacctggtgcatgacccgcaagcccggtgcctga

SEQ ID NO: 5685 - DNA, 4872 bp, Artificial Sequence
  Synthetic Polynucleotide
atggccttaccagtgaccgccttgctcctgccgctggccttgctgctccacgccgccaggccggaagtgcagctggttgaatctggcggaggactggttcaggctggcggatctctgagactgtcttgtgccgccagcggcagaacctttagcatgggctggtttagacaggcccctggcaaagagagagagttcgtcgccgccatcacatactctggcggcagcccttactacgccgactctgtgaagggcagattcaccatcagccgggacaacgccaagaacaccgtgtacctccagatgaacagcctgaagcctgaggacaccgccgtgtactactgcgccgccaatccaacatacggcagcgactggaacgccgagaattggggccagggaacccaagtgacagtgtctagcggtaccggcggaggcggatctggcggcggaggtagcggtggcggaggatctgaattcgacatccagatgacacagagccctagcagcctgtctgccagcgtgggagacagagtgaccatcacatgcaaggccagcgaccacatcaacaactggctggcctggtatcagcagaagcctggacaggcccctaagctgctgatctacggcgctaccacactggaaacaggcgtgcccagcagattttctggcagcggctctggcaccgactacaccctgacaatatccagcctccagcctgaggacttcgccacctactactgtcagcagagctggaacaccccttggacattcggccagggcaccaagctggaaatcaagagactcgaggacctgaagaacgtgttcccacctgaggtggccgtgttcgagcctagcgaggccgagatcagccacacccagaaagccaccctcgtgtgcctggctaccggcttctaccccgaccatgtggaactgtcttggtgggtcaacggcaaagaggtgcacagcggcgtgtctaccgacccccagccactgaaagaacagcccgccctgaacgacagccggtactgcctgagcagcagactgagagtgtccgccaccttctggcagaacccccggaaccacttcagatgccaggtgcagttctacggcctgagcgagaacgacgagtggacccaggacagagccaagcccgtgacccagatcgtgtctgccgaagcctggggcagagccgattgcggatccggcatgcggactgaagacctcccaaaggctgtggtgttcctggagcctcaatggtacagggtgctggagaaggacagtgtgactctgaagtgccagggagcctactcccctgaggacaattccacacagtggtttcacaatgagagcctcatctcaagccaggcctccagctacttcattgacgctgccacagtggacgacagtggagagtacaggtgccagacaaacctctccaccctcagtgacccggtgcagctagaagtccatatcggctggctgttgctccaggcccctcggtgggtgttcaaggaggaagaccctattcacctgaggtgtcacagctggaagaacactgctctgcataaggtcacatatttacagaatggcaaaggcaggaagtattttcatcataattctgacttctacattccaaaagccacactcaaagacagcggctcctacttctgcagggggcttgttgggagtaaaaatgtgtcttcagagactgtgaacatcaccatcactcaaggtttggcagtgtcaaccatctcatcattctttccacctggctaccaagtgtccttctgcctggtcatggtgctgctgttcgccgtggataccggcctgtacttcagcgtcaagaccaacatccggtccagcaccagagactggaaggaccacaagttcaagtggcggaaggaccctcaggacaagagggccaagcgatctggatctggagcaacaaacttctcactactcaaacaagcaggtgacgtggaggagaatcccgggcctactagtatggactggatttggcgcatccttttccttgtcggcgctgctaccggcgcgcattccgggcccgaagtgcaactggttgaatccggtggcggcctggtgcaagcaggcggatctctcagacttagctgtgccgcctccggcagaaccttcacaatgggatggtttaggcaggctccagggaaagagagagagttcgtcgccgccatctctctgtctcccacactggcctactacgccgactctgtgaaaggccggttcaccatctccagagataatgccaagaacaccgtggtgctgcaaatgaactctctgaaacccgaggatacagccctgtactattgtgccgctgaccggaagtccgtgatgagcatcagacccgattactggggacagggcacacaagtcacagtgtcctctggatccggcggcggaggatctggcggaggcggatctgggggcggaggctctttcgaacaagttcagcttcaacagcctggcgctgagctggtcaaacctggcgcttctgtgaagatgagctgcaaagccagcggctacgccttcagcagctactggatcaactggatgaagcagaaacccggccagggactcgaatggatcggccaaatctatcccggcgacggcgacaccaactacaacggcaagttcaagggcagagccacactgaccgccgatacctctagcagcacagcctacatgcagctgagcagcctgaccagcgaagatagcgccgtgtacttctgtgcccggtccatcacaacagtcgtgggctgcgctatggactattggggccagggaacaagcgtgaccgtgtctagtacgcgtatccagaaccctgatcctgccgtgtaccagctgcgggatagcaagagcagcgacaagagcgtgtgtctgttcaccgacttcgacagccagaccaacgtgtcccagagcaaggactccgacgtgtacatcaccgataagaccgtgctggacatgcggagcatggacttcaagagcaactccgccgtggcctggtccaacaagtccgatttcgcctgcgccaacgccttcaacaacagcattatccccgaggacacattcttcccaagccccgagagcagctgcggtaccaaaggatgccagggaagcgccgaccatgtggtgtcaatttctggcgtgcccctgcaactccagccaaactctattcagaccaaagtcgatagcattgcctggaaaaaattgctgccctctcagaacgggtttcaccacattctcaaatgggaaaatggctctctgccctccaacacctccaacgatcggtttagctttatcgtcaagaatctgtccctgctcatcaaagcagcccagcagcaagactccggcctgtattgcctcgaagtcacctccatctccgggaaagtgcagacagctacattccaagtgttcgtctttgataaggtcgagaagcctagactccaaggacaggggaagattctggacagaggacggtgtcaggtggcactgtcttgccttgtcagccgcgacggcaatgtgtcttatgcttggtatcggggctccaagctgattcaaaccgctgggaatctgacatacctcgatgaagaggttgacatcaatgggacgcacacgtatacttgcaatgtctccaatcctgtcagctgggagtctcataccctgaacctgacacaggattgtcaaaatgcacatcaagagttccggttttggccgtttcttgtgattatcgtgattctgtctgccctcttcctcggaactctggcttgcttctgtgtctggcggcgcaaacggaaagagaaacagtctgagacttccccgaaagagtttctcacgatatacgaagatgtcaaggacctcaagacccgccgcaaccatgagcaagaacagacattcccaggcggaggctccacaatctactccatgattcagtcccagtctagcgccccaacctctcaagagcctgcttataccctgtacagtctgattcagccctccagaaagtccggctctcggaagaggaaccactctcctagcttcaactccaccatatatgaagtcattggcaagtctcagcccaaagcacagaatcctgccaggctgagcagaaaagaacttgagaatttcgacgtctactcccgcgccaagagaagcggatctggcgtgaagcagaccctgaatttcgacctgctgaagctggctggcgacgtggaatccaacccaggcccttctagaggccatatgaccgagtacaagcccacggtgcgcctcgccacccgcgacgacgtccccagggccgtacgcaccctcgccgccgcgttcgccgactaccccgccacgcgccacaccgtcgatccggaccgccacatcgagcgggtcaccgagctgcaagaactcttcctcacgcgcgtcgggctcgacatcggcaaggtgtgggtcgcggacgacggcgccgcggtggcggtctggaccacgccggagagcgtcgaagcgggggcggtgttcgccgagatcggcccgcgcatggccgagttgagcggttcccggctggccgcgcagcaacagatggaaggcctcctggcgccgcaccggcccaaggagcccgcgtggttcctggccaccgtcggcgtctcgcccgaccaccagggcaagggtctgggcagcgccgtcgtgctccccggagtggaggcggccgagcgcgccggggtgcccgccttcctggagacctccgcgccccgcaacctccccttctacgagcggctcggcttcaccgtcaccgccgacgtcgaggtgcccgaaggaccgcgcacctggtgcatgacccgcaagcccggtgcctga

SEQ ID NO: 5686 - DNA, 4071 bp, Artificial Sequence
  Synthetic Polynucleotide
atggccttaccagtgaccgccttgctcctgccgctggccttgctgctccacgccgccaggccggaagtgcagctggttgaatctggcggaggactggttcaggctggcggatctctgagactgtcttgtgccgccagcggcagaacctttagcatgggctggtttagacaggcccctggcaaagagagagagttcgtcgccgccatcacatactctggcggcagcccttactacgccgactctgtgaagggcagattcaccatcagccgggacaacgccaagaacaccgtgtacctccagatgaacagcctgaagcctgaggacaccgccgtgtactactgcgccgccaatccaacatacggcagcgactggaacgccgagaattggggccagggaacccaagtgacagtgtctagcctcgaggacctgaagaacgtgttcccacctgaggtggccgtgttcgagcctagcgaggccgagatcagccacacccagaaagccaccctcgtgtgcctggctaccggcttctaccccgaccatgtggaactgtcttggtgggtcaacggcaaagaggtgcacagcggcgtgtctaccgacccccagccactgaaagaacagcccgccctgaacgacagccggtactgcctgagcagcagactgagagtgtccgccaccttctggcagaacccccggaaccacttcagatgccaggtgcagttctacggcctgagcgagaacgacgagtggacccaggacagagccaagcccgtgacccagatcgtgtctgccgaagcctggggcagagccgattgcggatccggcatgcggactgaagacctcccaaaggctgtggtgttcctggagcctcaatggtacagggtgctggagaaggacagtgtgactctgaagtgccagggagcctactcccctgaggacaattccacacagtggtttcacaatgagagcctcatctcaagccaggcctccagctacttcattgacgctgccacagtggacgacagtggagagtacaggtgccagacaaacctctccaccctcagtgacccggtgcagctagaagtccatatcggctggctgttgctccaggcccctcggtgggtgttcaaggaggaagaccctattcacctgaggtgtcacagctggaagaacactgctctgcataaggtcacatatttacagaatggcaaaggcaggaagtattttcatcataattctgacttctacattccaaaagccacactcaaagacagcggctcctacttctgcagggggcttgttgggagtaaaaatgtgtcttcagagactgtgaacatcaccatcactcaaggtttggcagtgtcaaccatctcatcattctttccacctggctaccaagtgtccttctgcctggtcatggtgctgctgttcgccgtggataccggcctgtacttcagcgtcaagaccaacatccggtccagcaccagagactggaaggaccacaagttcaagtggcggaaggaccctcaggacaagagggccaagcgatctggatctggagcaacaaacttctcactactcaaacaagcaggtgacgtggaggagaatcccgggcctactagtatggactggatttggcgcatccttttccttgtcggcgctgctaccggcgcgcattccgggcccgaagtgcaactggttgaatccggtggcggcctggtgcaagcaggcggatctctcagacttagctgtgccgcctccggcagaaccttcacaatgggatggtttaggcaggctccagggaaagagagagagttcgtcgccgccatctctctgtctcccacactggcctactacgccgactctgtgaaaggccggttcaccatctccagagataatgccaagaacaccgtggtgctgcaaatgaactctctgaaacccgaggatacagccctgtactattgtgccgctgaccggaagtccgtgatgagcatcagacccgattactggggacagggcacacaagtcacagtgtcctctacgcgtatccagaaccctgatcctgccgtgtaccagctgcgggatagcaagagcagcgacaagagcgtgtgtctgttcaccgacttcgacagccagaccaacgtgtcccagagcaaggactccgacgtgtacatcaccgataagaccgtgctggacatgcggagcatggacttcaagagcaactccgccgtggcctggtccaacaagtccgatttcgcctgcgccaacgccttcaacaacagcattatccccgaggacacattcttcccaagccccgagagcagctgcggtaccaaaggatgccagggaagcgccgaccatgtggtgtcaatttctggcgtgcccctgcaactccagccaaactctattcagaccaaagtcgatagcattgcctggaaaaaattgctgccctctcagaacgggtttcaccacattctcaaatgggaaaatggctctctgccctccaacacctccaacgatcggtttagctttatcgtcaagaatctgtccctgctcatcaaagcagcccagcagcaagactccggcctgtattgcctcgaagtcacctccatctccgggaaagtgcagacagctacattccaagtgttcgtctttgataaggtcgagaagcctagactccaaggacaggggaagattctggacagaggacggtgtcaggtggcactgtcttgccttgtcagccgcgacggcaatgtgtcttatgcttggtatcggggctccaagctgattcaaaccgctgggaatctgacatacctcgatgaagaggttgacatcaatgggacgcacacgtatacttgcaatgtctccaatcctgtcagctgggagtctcataccctgaacctgacacaggattgtcaaaatgcacatcaagagttccggttttggccgtttcttgtgattatcgtgattctgtctgccctcttcctcggaactctggcttgcttctgtgtctggcggcgcaaacggaaagagaaacagtctgagacttccccgaaagagtttctcacgatatacgaagatgtcaaggacctcaagacccgccgcaaccatgagcaagaacagacattcccaggcggaggctccacaatctactccatgattcagtcccagtctagcgccccaacctctcaagagcctgcttataccctgtacagtctgattcagccctccagaaagtccggctctcggaagaggaaccactctcctagcttcaactccaccatatatgaagtcattggcaagtctcagcccaaagcacagaatcctgccaggctgagcagaaaagaacttgagaatttcgacgtctactcccgcgccaagagaagcggatctggcgtgaagcagaccctgaatttcgacctgctgaagctggctggcgacgtggaatccaacccaggcccttctagaggccatatgaccgagtacaagcccacggtgcgcctcgccacccgcgacgacgtccccagggccgtacgcaccctcgccgccgcgttcgccgactaccccgccacgcgccacaccgtcgatccggaccgccacatcgagcgggtcaccgagctgcaagaactcttcctcacgcgcgtcgggctcgacatcggcaaggtgtgggtcgcggacgacggcgccgcggtggcggtctggaccacgccggagagcgtcgaagcgggggcggtgttcgccgagatcggcccgcgcatggccgagttgagcggttcccggctggccgcgcagcaacagatggaaggcctcctggcgccgcaccggcccaaggagcccgcgtggttcctggccaccgtcggcgtctcgcccgaccaccagggcaagggtctgggcagcgccgtcgtgctccccggagtggaggcggccgagcgcgccggggtgcccgccttcctggagacctccgcgccccgcaacctccccttctacgagcggctcggcttcaccgtcaccgccgacgtcgaggtgcccgaaggaccgcgcacctggtgcatgacccgcaagcccggtgcctga

SEQ ID NO: 5687 - DNA, 1902 bp, Artificial Sequence; identical to SEQ ID NO: 1638
  Synthetic Polynucleotide

SEQ ID NO: 5688 - DNA, 1839 bp, Artificial Sequence
  Synthetic Polynucleotide
atggccttaccagtgaccgccttgctcctgccgctggccttgctgctccacgccgccaggccggacatccagatgacacagagccctagcagcctgtctgccagcgtgggagacagagtgaccatcacatgcaaggccagcgaccacatcaacaactggctggcctggtatcagcagaagcctggacaggcccctaagctgctgatctacggcgctaccacactggaaacaggcgtgcccagcagattttctggcagcggctctggcaccgactacaccctgacaatatccagcctccagcctgaggacttcgccacctactactgtcagcagagctggaacaccccttggacattcggccagggcaccaagctggaaatcaagagaggcggaggcggaagtggaggcggaggatctggcggcggaggctctcaagttcagcttcaacagcctggcgctgagctggtcaaacctggcgcttctgtgaagatgagctgcaaagccagcggctacgccttcagcagctactggatcaactggatgaagcagaaacccggccagggactcgaatggatcggccaaatctatcccggcgacggcgacaccaactacaacggcaagttcaagggcagagccacactgaccgccgatacctctagcagcacagcctacatgcagctgagcagcctgaccagcgaagatagcgccgtgtacttctgtgcccggtccatcacaacagtcgtgggctgcgctatggactattggggccagggaacaagcgtgaccgtgtctagtacgcgtaaaggatgccagggaagcgccgaccatgtggtgtcaatttctggcgtgcccctgcaactccagccaaactctattcagaccaaagtcgatagcattgcctggaaaaaattgctgccctctcagaacgggtttcaccacattctcaaatgggaaaatggctctctgccctccaacacctccaacgatcggtttagctttatcgtcaagaatctgtccctgctcatcaaagcagcccagcagcaagactccggcctgtattgcctcgaagtcacctccatctccgggaaagtgcagacagctacattccaagtgttcgtctttgataaggtcgagaagcctagactccaaggacaggggaagattctggacagaggacggtgtcaggtggcactgtcttgccttgtcagccgcgacggcaatgtgtcttatgcttggtatcggggctccaagctgattcaaaccgctgggaatctgacatacctcgatgaagaggttgacatcaatgggacgcacacgtatacttgcaatgtctccaatcctgtcagctgggagtctcataccctgaacctgacacaggattgtcaaaatgcacatcaagagttccggttttggccgtttcttgtgattatcgtgattctgtctgccctcttcctcggaactctggcttgcttctgtgtctggcggcgcaaacggaaagagaaacagtctgagacttccccgaaagagtttctcacgatatacgaagatgtcaaggacctcaagacccgccgcaaccatgagcaagaacagacattcccaggcggaggctccacaatctactccatgattcagtcccagtctagcgccccaacctctcaagagcctgcttataccctgtacagtctgattcagccctccagaaagtccggctctcggaagaggaaccactctcctagcttcaactccaccatatatgaagtcattggcaagtctcagcccaaagcacagaatcctgccaggctgagcagaaaagaacttgagaatttcgacgtctactcc

SEQ ID NO: 5689 - DNA, 1839 bp, Artificial Sequence
  Synthetic Polynucleotide
atggccttaccagtgaccgccttgctcctgccgctggccttgctgctccacgccgccaggccggagatcgtgctgacacagagccctgccaccctgtctctgagccctggcgaaagagccaccctgagctgtagagccagccagagcgtgtccagctacctggcctggtatcagcagaagcccggccaggctccccggctgctgatctacgatgccagcaatagagccaccggcatccccgccagattttccggctctggcagcggcaccgacttcaccctgaccatcagctccctggaacccgaggacttcgccgtgtactactgccagcagcggagcaactggcccatcacattcggccagggcacccggctggaaatcaaaggcggaggcggaagtggaggcggaggatctggcggcggaggctctgaagtgcagctggtggaatcaggcggcggactggtgcagcctggcagaagcctgagactgagctgtgccgccagcggcttcaccttcaacgactacgccatgcactgggtgcgccaggcccctggaaaaggactggaatgggtgtccacaatcagctggaacagcggcagcatcggctacgccgatagcgtgaagggccggttcaccatcagccgggacaacgccaagaagtccctgtacctccagatgaacagcctgcgggccgaggacacagccctgtactattgcgccaaggacatccagtacggcaactactactacggcatggacgtgtggggccagggaaccaccgtgaccgtgtcatctacgcgtaaaggatgccagggaagcgccgaccatgtggtgtcaatttctggcgtgcccctgcaactccagccaaactctattcagaccaaagtcgatagcattgcctggaaaaaattgctgccctctcagaacgggtttcaccacattctcaaatgggaaaatggctctctgccctccaacacctccaacgatcggtttagctttatcgtcaagaatctgtccctgctcatcaaagcagcccagcagcaagactccggcctgtattgcctcgaagtcacctccatctccgggaaagtgcagacagctacattccaagtgttcgtctttgataaggtcgagaagcctagactccaaggacaggggaagattctggacagaggacggtgtcaggtggcactgtcttgccttgtcagccgcgacggcaatgtgtcttatgcttggtatcggggctccaagctgattcaaaccgctgggaatctgacatacctcgatgaagaggttgacatcaatgggacgcacacgtatacttgcaatgtctccaatcctgtcagctgggagtctcataccctgaacctgacacaggattgtcaaaatgcacatcaagagttccggttttggccgtttcttgtgattatcgtgattctgtctgccctcttcctcggaactctggcttgcttctgtgtctggcggcgcaaacggaaagagaaacagtctgagacttccccgaaagagtttctcacgatatacgaagatgtcaaggacctcaagacccgccgcaaccatgagcaagaacagacattcccaggcggaggctccacaatctactccatgattcagtcccagtctagcgccccaacctctcaagagcctgcttataccctgtacagtctgattcagccctccagaaagtccggctctcggaagaggaaccactctcctagcttcaactccaccatatatgaagtcattggcaagtctcagcccaaagcacagaatcctgccaggctgagcagaaaagaacttgagaatttcgacgtctactcc

SEQ ID NO: 5690 - DNA, 1461 bp, Artificial Sequence
  Synthetic Polynucleotide
atggccttaccagtgaccgccttgctcctgccgctggccttgctgctccacgccgccaggccggaagtgcagctggttgaatctggcggaggactggttcaggctggcggatctctgagactgtcttgtgccgccagcggcagaacctttagcatgggctggtttagacaggcccctggcaaagagagagagttcgtcgccgccatcacatactctggcggcagcccttactacgccgactctgtgaagggcagattcaccatcagccgggacaacgccaagaacaccgtgtacctccagatgaacagcctgaagcctgaggacaccgccgtgtactactgcgccgccaatccaacatacggcagcgactggaacgccgagaattggggccagggaacccaagtgacagtgtctagcacgcgtaaaggatgccagggaagcgccgaccatgtggtgtcaatttctggcgtgcccctgcaactccagccaaactctattcagaccaaagtcgatagcattgcctggaaaaaattgctgccctctcagaacgggtttcaccacattctcaaatgggaaaatggctctctgccctccaacacctccaacgatcggtttagctttatcgtcaagaatctgtccctgctcatcaaagcagcccagcagcaagactccggcctgtattgcctcgaagtcacctccatctccgggaaagtgcagacagctacattccaagtgttcgtctttgataaggtcgagaagcctagactccaaggacaggggaagattctggacagaggacggtgtcaggtggcactgtcttgccttgtcagccgcgacggcaatgtgtcttatgcttggtatcggggctccaagctgattcaaaccgctgggaatctgacatacctcgatgaagaggttgacatcaatgggacgcacacgtatacttgcaatgtctccaatcctgtcagctgggagtctcataccctgaacctgacacaggattgtcaaaatgcacatcaagagttccggttttggccgtttcttgtgattatcgtgattctgtctgccctcttcctcggaactctggcttgcttctgtgtctggcggcgcaaacggaaagagaaacagtctgagacttccccgaaagagtttctcacgatatacgaagatgtcaaggacctcaagacccgccgcaaccatgagcaagaacagacattcccaggcggaggctccacaatctactccatgattcagtcccagtctagcgccccaacctctcaagagcctgcttataccctgtacagtctgattcagccctccagaaagtccggctctcggaagaggaaccactctcctagcttcaactccaccatatatgaagtcattggcaagtctcagcccaaagcacagaatcctgccaggctgagcagaaaagaacttgagaatttcgacgtctactcc

SEQ ID NO: 5691 - DNA, 1461 bp, Artificial Sequence
  Synthetic Polynucleotide
atggccttaccagtgaccgccttgctcctgccgctggccttgctgctccacgccgccaggccgcagctccagttgcaagagagcggccctggcttggtaaaaccttccgagacccttagcctcacatgcacggttagtgggggcagcatttcctcaggtgattactattggggatggattcggcaacccccgggtaaaggattggagtggattggtcatatttattatagtggagcgacgtactacaacccaagtctcaaatccagggttacaatatccgtcgatacgagcaggaaccaattcagcttgaaactttctagtgtcaccgcagcagacacagccgtctattactgtacgcgggatgactccagtaattggcggtcccgagggcaagggacactggtcacggtctcctcaacgcgtaaaggatgccagggaagcgccgaccatgtggtgtcaatttctggcgtgcccctgcaactccagccaaactctattcagaccaaagtcgatagcattgcctggaaaaaattgctgccctctcagaacgggtttcaccacattctcaaatgggaaaatggctctctgccctccaacacctccaacgatcggtttagctttatcgtcaagaatctgtccctgctcatcaaagcagcccagcagcaagactccggcctgtattgcctcgaagtcacctccatctccgggaaagtgcagacagctacattccaagtgttcgtctttgataaggtcgagaagcctagactccaaggacaggggaagattctggacagaggacggtgtcaggtggcactgtcttgccttgtcagccgcgacggcaatgtgtcttatgcttggtatcggggctccaagctgattcaaaccgctgggaatctgacatacctcgatgaagaggttgacatcaatgggacgcacacgtatacttgcaatgtctccaatcctgtcagctgggagtctcataccctgaacctgacacaggattgtcaaaatgcacatcaagagttccggttttggccgtttcttgtgattatcgtgattctgtctgccctcttcctcggaactctggcttgcttctgtgtctggcggcgcaaacggaaagagaaacagtctgagacttccccgaaagagtttctcacgatatacgaagatgtcaaggacctcaagacccgccgcaaccatgagcaagaacagacattcccaggcggaggctccacaatctactccatgattcagtcccagtctagcgccccaacctctcaagagcctgcttataccctgtacagtctgattcagccctccagaaagtccggctctcggaagaggaaccactctcctagcttcaactccaccatatatgaagtcattggcaagtctcagcccaaagcacagaatcctgccaggctgagcagaaaagaacttgagaatttcgacgtctactcc

SEQ ID NO: 5692 - DNA, 1461 bp, Artificial Sequence
  Synthetic Polynucleotide
atggccttaccagtgaccgccttgctcctgccgctggccttgctgctccacgccgccaggccgcagctccagctgcaagagtctggacctggcctggtcaagcctagcgagacactgagcctgacctgtaccgtgtccggcgatagcatcagcagcggcgattactactggggctggatcagacagcctcctggcaaaggactggaatggatcggccacatctactacagcggcgtgacctactacaaccccagcctgaagtccagagtgaccatcagcgtggacaccagccggaaccagttctccctgaagctgtctagcgtgacagccgccgataccgccgtgtactactgcaccagagaggacagcagcaactggcggagtagaggccagggaacactggtcacagttagctctacgcgtaaaggatgccagggaagcgccgaccatgtggtgtcaatttctggcgtgcccctgcaactccagccaaactctattcagaccaaagtcgatagcattgcctggaaaaaattgctgccctctcagaacgggtttcaccacattctcaaatgggaaaatggctctctgccctccaacacctccaacgatcggtttagctttatcgtcaagaatctgtccctgctcatcaaagcagcccagcagcaagactccggcctgtattgcctcgaagtcacctccatctccgggaaagtgcagacagctacattccaagtgttcgtctttgataaggtcgagaagcctagactccaaggacaggggaagattctggacagaggacggtgtcaggtggcactgtcttgccttgtcagccgcgacggcaatgtgtcttatgcttggtatcggggctccaagctgattcaaaccgctgggaatctgacatacctcgatgaagaggttgacatcaatgggacgcacacgtatacttgcaatgtctccaatcctgtcagctgggagtctcataccctgaacctgacacaggattgtcaaaatgcacatcaagagttccggttttggccgtttcttgtgattatcgtgattctgtctgccctcttcctcggaactctggcttgcttctgtgtctggcggcgcaaacggaaagagaaacagtctgagacttccccgaaagagtttctcacgatatacgaagatgtcaaggacctcaagacccgccgcaaccatgagcaagaacagacattcccaggcggaggctccacaatctactccatgattcagtcccagtctagcgccccaacctctcaagagcctgcttataccctgtacagtctgattcagccctccagaaagtccggctctcggaagaggaaccactctcctagcttcaactccaccatatatgaagtcattggcaagtctcagcccaaagcacagaatcctgccaggctgagcagaaaagaacttgagaatttcgacgtctactcc

SEQ ID NO: 5693 - DNA, 1467 bp, Artificial Sequence
  Synthetic Polynucleotide
atggccttaccagtgaccgccttgctcctgccgctggccttgctgctccacgccgccaggccggaagttcagctgcaagagtctggcggaggactggttcaacctggcggaagcctgagactgtcttgtgccgcctctggcagaaccttcagcagcctgttcatgggctggttcagacaggcccctggcaaagagagagaactggtcgccgccatcagccggtacagcctgtacacctactacgccgacagcgtgaagggcagattcaccatcagcgccgacaacgccaagaacgccgtgtacctccagatgaacagcctgaagccagaggacacagccgtgtactactgcgccagcaaacttgagtacaccagcaacgactacgacagctggggccagggaacccaagtgacagtctcttctacgcgtaaaggatgccagggaagcgccgaccatgtggtgtcaatttctggcgtgcccctgcaactccagccaaactctattcagaccaaagtcgatagcattgcctggaaaaaattgctgccctctcagaacgggtttcaccacattctcaaatgggaaaatggctctctgccctccaacacctccaacgatcggtttagctttatcgtcaagaatctgtccctgctcatcaaagcagcccagcagcaagactccggcctgtattgcctcgaagtcacctccatctccgggaaagtgcagacagctacattccaagtgttcgtctttgataaggtcgagaagcctagactccaaggacaggggaagattctggacagaggacggtgtcaggtggcactgtcttgccttgtcagccgcgacggcaatgtgtcttatgcttggtatcggggctccaagctgattcaaaccgctgggaatctgacatacctcgatgaagaggttgacatcaatgggacgcacacgtatacttgcaatgtctccaatcctgtcagctgggagtctcataccctgaacctgacacaggattgtcaaaatgcacatcaagagttccggttttggccgtttcttgtgattatcgtgattctgtctgccctcttcctcggaactctggcttgcttctgtgtctggcggcgcaaacggaaagagaaacagtctgagacttccccgaaagagtttctcacgatatacgaagatgtcaaggacctcaagacccgccgcaaccatgagcaagaacagacattcccaggcggaggctccacaatctactccatgattcagtcccagtctagcgccccaacctctcaagagcctgcttataccctgtacagtctgattcagccctccagaaagtccggctctcggaagaggaaccactctcctagcttcaactccaccatatatgaagtcattggcaagtctcagcccaaagcacagaatcctgccaggctgagcagaaaagaacttgagaatttcgacgtctactcc

SEQ ID NO: 5694 - DNA, 1491 bp, Artificial Sequence
  Synthetic Polynucleotide
atggccttaccagtgaccgccttgctcctgccgctggccttgctgctccacgccgccaggccggaagtgcagctggttgaatctggcggaggactggttcagcctggcggatctctgagactgtcttgtgccgcctctggcttcgccagcgactactatatcatcggctggttcagacaggcccctggcaaagagagagagggcgtcagctgtatcagcagcagatacgccaacaccaactacgccgacagcgtgaagggcagattcaccatcagccgggacaacgccaagaacaccgtgtacctccagatgaacagcctgaagcctgaggacaccgccgtgtactactgtgccgccgacaccagaagatacacctgtcctgacattgccaccatgcaccggaacttcgattcttggggccagggcacactggtcaccgtttcttctacgcgtaaaggatgccagggaagcgccgaccatgtggtgtcaatttctggcgtgcccctgcaactccagccaaactctattcagaccaaagtcgatagcattgcctggaaaaaattgctgccctctcagaacgggtttcaccacattctcaaatgggaaaatggctctctgccctccaacacctccaacgatcggtttagctttatcgtcaagaatctgtccctgctcatcaaagcagcccagcagcaagactccggcctgtattgcctcgaagtcacctccatctccgggaaagtgcagacagctacattccaagtgttcgtctttgataaggtcgagaagcctagactccaaggacaggggaagattctggacagaggacggtgtcaggtggcactgtcttgccttgtcagccgcgacggcaatgtgtcttatgcttggtatcggggctccaagctgattcaaaccgctgggaatctgacatacctcgatgaagaggttgacatcaatgggacgcacacgtatacttgcaatgtctccaatcctgtcagctgggagtctcataccctgaacctgacacaggattgtcaaaatgcacatcaagagttccggttttggccgtttcttgtgattatcgtgattctgtctgccctcttcctcggaactctggcttgcttctgtgtctggcggcgcaaacggaaagagaaacagtctgagacttccccgaaagagtttctcacgatatacgaagatgtcaaggacctcaagacccgccgcaaccatgagcaagaacagacattcccaggcggaggctccacaatctactccatgattcagtcccagtctagcgccccaacctctcaagagcctgcttataccctgtacagtctgattcagccctccagaaagtccggctctcggaagaggaaccactctcctagcttcaactccaccatatatgaagtcattggcaagtctcagcccaaagcacagaatcctgccaggctgagcagaaaagaacttgagaatttcgacgtctactcc

SEQ ID NO: 5695 - DNA, 1479 bp, Artificial Sequence
  Synthetic Polynucleotide
atggccttaccagtgaccgccttgctcctgccgctggccttgctgctccacgccgccaggccggaagtgcaactggtggaatctggaggctctctggtgcagccagggggaagcctgagactgtcttgtgccgcttccggcttcaccttcgacgactacgccatgagctgggtgcgccaggtgccaggcaaaggcctggaatgggtgtccagcatcaactggagcggcacccacaccgattacgccgactccgtgaaaggcagattcacaatcagcagaaacaacgccaacaataccctgtacctgcagatgaactccctgaagtctgaggatacagcagtgtattattgcgccaagaactggcgggacgccggcaccacttggtttgagaaaagcggctctgccggacagggaacccaagtgacagtgtcctccacgcgtaaaggatgccagggaagcgccgaccatgtggtgtcaatttctggcgtgcccctgcaactccagccaaactctattcagaccaaagtcgatagcattgcctggaaaaaattgctgccctctcagaacgggtttcaccacattctcaaatgggaaaatggctctctgccctccaacacctccaacgatcggtttagctttatcgtcaagaatctgtccctgctcatcaaagcagcccagcagcaagactccggcctgtattgcctcgaagtcacctccatctccgggaaagtgcagacagctacattccaagtgttcgtctttgataaggtcgagaagcctagactccaaggacaggggaagattctggacagaggacggtgtcaggtggcactgtcttgccttgtcagccgcgacggcaatgtgtcttatgcttggtatcggggctccaagctgattcaaaccgctgggaatctgacatacctcgatgaagaggttgacatcaatgggacgcacacgtatacttgcaatgtctccaatcctgtcagctgggagtctcataccctgaacctgacacaggattgtcaaaatgcacatcaagagttccggttttggccgtttcttgtgattatcgtgattctgtctgccctcttcctcggaactctggcttgcttctgtgtctggcggcgcaaacggaaagagaaacagtctgagacttccccgaaagagtttctcacgatatacgaagatgtcaaggacctcaagacccgccgcaaccatgagcaagaacagacattcccaggcggaggctccacaatctactccatgattcagtcccagtctagcgccccaacctctcaagagcctgcttataccctgtacagtctgattcagccctccagaaagtccggctctcggaagaggaaccactctcctagcttcaactccaccatatatgaagtcattggcaagtctcagcccaaagcacagaatcctgccaggctgagcagaaaagaacttgagaatttcgacgtctactcc

SEQ ID NO: 5696 - DNA, 1464 bp, Artificial Sequence
  Synthetic Polynucleotide
atggccttaccagtgaccgccttgctcctgccgctggccttgctgctccacgccgccaggccggaggtgcagctggttgaatctggcggaggactggttcagcctggcggatctctgagactgtcttgtgccgccagcggcttcaacatcaaggatacctgtatcggctgggttcgcagagcccctggcaaagaggaagaactggtcgccaaaatctgcaagtacagcggccacaccagatacgccgacagcgtgaagggcagattcaccatcagcgccgacaccagcaagaacaccgcctacctccagatgaacagcctgagagccgaggacaccgccgtgtactattgtgccgctgtgtccgtcagagatgggcactacaattactggggccagggcaccaccgtgaccgtttcttcaacgcgtaaaggatgccagggaagcgccgaccatgtggtgtcaatttctggcgtgcccctgcaactccagccaaactctattcagaccaaagtcgatagcattgcctggaaaaaattgctgccctctcagaacgggtttcaccacattctcaaatgggaaaatggctctctgccctccaacacctccaacgatcggtttagctttatcgtcaagaatctgtccctgctcatcaaagcagcccagcagcaagactccggcctgtattgcctcgaagtcacctccatctccgggaaagtgcagacagctacattccaagtgttcgtctttgataaggtcgagaagcctagactccaaggacaggggaagattctggacagaggacggtgtcaggtggcactgtcttgccttgtcagccgcgacggcaatgtgtcttatgcttggtatcggggctccaagctgattcaaaccgctgggaatctgacatacctcgatgaagaggttgacatcaatgggacgcacacgtatacttgcaatgtctccaatcctgtcagctgggagtctcataccctgaacctgacacaggattgtcaaaatgcacatcaagagttccggttttggccgtttcttgtgattatcgtgattctgtctgccctcttcctcggaactctggcttgcttctgtgtctggcggcgcaaacggaaagagaaacagtctgagacttccccgaaagagtttctcacgatatacgaagatgtcaaggacctcaagacccgccgcaaccatgagcaagaacagacattcccaggcggaggctccacaatctactccatgattcagtcccagtctagcgccccaacctctcaagagcctgcttataccctgtacagtctgattcagccctccagaaagtccggctctcggaagaggaaccactctcctagcttcaactccaccatatatgaagtcattggcaagtctcagcccaaagcacagaatcctgccaggctgagcagaaaagaacttgagaatttcgacgtctactcc

SEQ ID NO: 5697 - DNA, 1479 bp, Artificial Sequence
  Synthetic Polynucleotide
atggccttaccagtgaccgccttgctcctgccgctggccttgctgctccacgccgccaggccgggctctgacctgggcatcaagctgctgttcgccgctgccaagggccaggacgacgaagtgcggattctgctggctgctggggccgacgtgaacgccaaggatttcgagggctacacccccctgcacgtggccgcctatgatggacacctggaaatcgtggaagtgctgctgaaggctggcgctgatgtgaatgccaaagacagccagggccggacccctctgcatgaagccgcctacagcggccatctggaaattgtggaagtgctgctgaaagccggggcagacgtgaacgctcaggacgacgctggcgagacaccagccgatctggctgcagcttggggccacgaagatatcgccgaggtgctgcagaagacgcgtaaaggatgccagggaagcgccgaccatgtggtgtcaatttctggcgtgcccctgcaactccagccaaactctattcagaccaaagtcgatagcattgcctggaaaaaattgctgccctctcagaacgggtttcaccacattctcaaatgggaaaatggctctctgccctccaacacctccaacgatcggtttagctttatcgtcaagaatctgtccctgctcatcaaagcagcccagcagcaagactccggcctgtattgcctcgaagtcacctccatctccgggaaagtgcagacagctacattccaagtgttcgtctttgataaggtcgagaagcctagactccaaggacaggggaagattctggacagaggacggtgtcaggtggcactgtcttgccttgtcagccgcgacggcaatgtgtcttatgcttggtatcggggctccaagctgattcaaaccgctgggaatctgacatacctcgatgaagaggttgacatcaatgggacgcacacgtatacttgcaatgtctccaatcctgtcagctgggagtctcataccctgaacctgacacaggattgtcaaaatgcacatcaagagttccggttttggccgtttcttgtgattatcgtgattctgtctgccctcttcctcggaactctggcttgcttctgtgtctggcggcgcaaacggaaagagaaacagtctgagacttccccgaaagagtttctcacgatatacgaagatgtcaaggacctcaagacccgccgcaaccatgagcaagaacagacattcccaggcggaggctccacaatctactccatgattcagtcccagtctagcgccccaacctctcaagagcctgcttataccctgtacagtctgattcagccctccagaaagtccggctctcggaagaggaaccactctcctagcttcaactccaccatatatgaagtcattggcaagtctcagcccaaagcacagaatcctgccaggctgagcagaaaagaacttgagaatttcgacgtctactcc

SEQ ID NO: 5698 - DNA, 1281 bp, Artificial Sequence
  Synthetic Polynucleotide
atggccttaccagtgaccgccttgctcctgccgctggccttgctgctccacgccgccaggccggtggacaacaagttcaacaaagagcggtacagcgcctactacgagatttggcaactgcccaacctgaacgtgcggcagaaggccgccttcatcggatctctgcaggacgaccctagccagagcgccaatctgctggccgaggccaagaagctgaacgacgcccaggcccctaaaacgcgtaaaggatgccagggaagcgccgaccatgtggtgtcaatttctggcgtgcccctgcaactccagccaaactctattcagaccaaagtcgatagcattgcctggaaaaaattgctgccctctcagaacgggtttcaccacattctcaaatgggaaaatggctctctgccctccaacacctccaacgatcggtttagctttatcgtcaagaatctgtccctgctcatcaaagcagcccagcagcaagactccggcctgtattgcctcgaagtcacctccatctccgggaaagtgcagacagctacattccaagtgttcgtctttgataaggtcgagaagcctagactccaaggacaggggaagattctggacagaggacggtgtcaggtggcactgtcttgccttgtcagccgcgacggcaatgtgtcttatgcttggtatcggggctccaagctgattcaaaccgctgggaatctgacatacctcgatgaagaggttgacatcaatgggacgcacacgtatacttgcaatgtctccaatcctgtcagctgggagtctcataccctgaacctgacacaggattgtcaaaatgcacatcaagagttccggttttggccgtttcttgtgattatcgtgattctgtctgccctcttcctcggaactctggcttgcttctgtgtctggcggcgcaaacggaaagagaaacagtctgagacttccccgaaagagtttctcacgatatacgaagatgtcaaggacctcaagacccgccgcaaccatgagcaagaacagacattcccaggcggaggctccacaatctactccatgattcagtcccagtctagcgccccaacctctcaagagcctgcttataccctgtacagtctgattcagccctccagaaagtccggctctcggaagaggaaccactctcctagcttcaactccaccatatatgaagtcattggcaagtctcagcccaaagcacagaatcctgccaggctgagcagaaaagaacttgagaatttcgacgtctactcc

SEQ ID NO: 5699 - DNA, 1374 bp, Artificial Sequence
  Synthetic Polynucleotide
atggccttaccagtgaccgccttgctcctgccgctggccttgctgctccacgccgccaggccgctgccagccccgaagaatttggtcgtttcccgtgtcactgaggactctgcacgtctgagctggaccgcaccggacgcggcgttcgacagctttgcaatcggctactgggagtgggatgatgacggcgaggccattgtgctgaccgttccgggtagcgagcgcagctacgatctgaccggtctgaagccgggtacggaatatccggtgtatattgcgggcgtgaagggtggccagtggagcttcccgctgagcgcgatctttaccaccacgcgtaaaggatgccagggaagcgccgaccatgtggtgtcaatttctggcgtgcccctgcaactccagccaaactctattcagaccaaagtcgatagcattgcctggaaaaaattgctgccctctcagaacgggtttcaccacattctcaaatgggaaaatggctctctgccctccaacacctccaacgatcggtttagctttatcgtcaagaatctgtccctgctcatcaaagcagcccagcagcaagactccggcctgtattgcctcgaagtcacctccatctccgggaaagtgcagacagctacattccaagtgttcgtctttgataaggtcgagaagcctagactccaaggacaggggaagattctggacagaggacggtgtcaggtggcactgtcttgccttgtcagccgcgacggcaatgtgtcttatgcttggtatcggggctccaagctgattcaaaccgctgggaatctgacatacctcgatgaagaggttgacatcaatgggacgcacacgtatacttgcaatgtctccaatcctgtcagctgggagtctcataccctgaacctgacacaggattgtcaaaatgcacatcaagagttccggttttggccgtttcttgtgattatcgtgattctgtctgccctcttcctcggaactctggcttgcttctgtgtctggcggcgcaaacggaaagagaaacagtctgagacttccccgaaagagtttctcacgatatacgaagatgtcaaggacctcaagacccgccgcaaccatgagcaagaacagacattcccaggcggaggctccacaatctactccatgattcagtcccagtctagcgccccaacctctcaagagcctgcttataccctgtacagtctgattcagccctccagaaagtccggctctcggaagaggaaccactctcctagcttcaactccaccatatatgaagtcattggcaagtctcagcccaaagcacagaatcctgccaggctgagcagaaaagaacttgagaatttcgacgtctactcc

SEQ ID NO: 5700 - DNA, 1377 bp, Artificial Sequence
  Synthetic Polynucleotide
atggccttaccagtgaccgccttgctcctgccgctggccttgctgctccacgccgccaggccgatgctgcccgctcctaagaatctggtggtgtccagaatcaccgaggacagcgccagactgtcttggacagctcctgatgccgccttcgacagcttccccatccggtacatcgagacactgatctggggcgaagccatctggctggatgtgcctggaagcgagagaagctacgacctgaccggactgaagcctggcacagagtatgccgtggtcatcaccggcgtgaaaggcggcagattctctagccctctggtggcctctttcaccaccacgcgtaaaggatgccagggaagcgccgaccatgtggtgtcaatttctggcgtgcccctgcaactccagccaaactctattcagaccaaagtcgatagcattgcctggaaaaaattgctgccctctcagaacgggtttcaccacattctcaaatgggaaaatggctctctgccctccaacacctccaacgatcggtttagctttatcgtcaagaatctgtccctgctcatcaaagcagcccagcagcaagactccggcctgtattgcctcgaagtcacctccatctccgggaaagtgcagacagctacattccaagtgttcgtctttgataaggtcgagaagcctagactccaaggacaggggaagattctggacagaggacggtgtcaggtggcactgtcttgccttgtcagccgcgacggcaatgtgtcttatgcttggtatcggggctccaagctgattcaaaccgctgggaatctgacatacctcgatgaagaggttgacatcaatgggacgcacacgtatacttgcaatgtctccaatcctgtcagctgggagtctcataccctgaacctgacacaggattgtcaaaatgcacatcaagagttccggttttggccgtttcttgtgattatcgtgattctgtctgccctcttcctcggaactctggcttgcttctgtgtctggcggcgcaaacggaaagagaaacagtctgagacttccccgaaagagtttctcacgatatacgaagatgtcaaggacctcaagacccgccgcaaccatgagcaagaacagacattcccaggcggaggctccacaatctactccatgattcagtcccagtctagcgccccaacctctcaagagcctgcttataccctgtacagtctgattcagccctccagaaagtccggctctcggaagaggaaccactctcctagcttcaactccaccatatatgaagtcattggcaagtctcagcccaaagcacagaatcctgccaggctgagcagaaaagaacttgagaatttcgacgtctactcc

SEQ ID NO: 5701 - DNA, 2028 bp, Artificial Sequence
  Synthetic Polynucleotide
atggccttaccagtgaccgccttgctcctgccgctggccttgctgctccacgccgccaggccgatggccttaccagtgaccgccttgctcctgccgctggccttgctgctccacgccgccaggccgctgttcaatcaagaggtgcagatccctctgaccgagagctactgtggcccctgtcctaagaactggatctgctacaagaacaactgctaccagttcttcgacgagagcaagaattggtacgagagccaggccagctgcatgagccagaatgccagcctgctgaaggtgtacagcaaagaggaccaggacctgctgaaactggtcaagagctaccactggatgggccttgtgcacatccccaccaatggctcttggcagtgggaggacggcagcattctgagccctaacctgctgaccatcatcgagatgcagaagggcgactgcgccctgtacgccagcagctttaagggctacatcgagaattgcagcaccccgaacacctacatctgtatgcagagaaccgttggcggaggcggaagtggaggcggaggatctggcggcggaggctctgacctctttaatcaagaagtccagattccactcaccgaatcctactgcggaccttgtccaaaaaattggatttgttataagaacaactgttatcaattctttgatgagtctaaaaattggtatgagtcccaggcttcctgcatgtctcagaacgcttctctgctgaaagtctactctaaagaagatcaggatctcctgaagctcgtcaagtcttatcattggatggggctcgtccacattcctaccaacggaagctggcaatgggaagatggctccatcctgtctccaaatctgctcacgattattgaaatgcagaaaggggattgtgctctctacgccagctccttcaagggatatattgagaactgtagcacgcccaatacttatatctgtatgcaacggaccgtgacgcgtaaaggatgccagggaagcgccgaccatgtggtgtcaatttctggcgtgcccctgcaactccagccaaactctattcagaccaaagtcgatagcattgcctggaaaaaattgctgccctctcagaacgggtttcaccacattctcaaatgggaaaatggctctctgccctccaacacctccaacgatcggtttagctttatcgtcaagaatctgtccctgctcatcaaagcagcccagcagcaagactccggcctgtattgcctcgaagtcacctccatctccgggaaagtgcagacagctacattccaagtgttcgtctttgataaggtcgagaagcctagactccaaggacaggggaagattctggacagaggacggtgtcaggtggcactgtcttgccttgtcagccgcgacggcaatgtgtcttatgcttggtatcggggctccaagctgattcaaaccgctgggaatctgacatacctcgatgaagaggttgacatcaatgggacgcacacgtatacttgcaatgtctccaatcctgtcagctgggagtctcataccctgaacctgacacaggattgtcaaaatgcacatcaagagttccggttttggccgtttcttgtgattatcgtgattctgtctgccctcttcctcggaactctggcttgcttctgtgtctggcggcgcaaacggaaagagaaacagtctgagacttccccgaaagagtttctcacgatatacgaagatgtcaaggacctcaagacccgccgcaaccatgagcaagaacagacattcccaggcggaggctccacaatctactccatgattcagtcccagtctagcgccccaacctctcaagagcctgcttataccctgtacagtctgattcagccctccagaaagtccggctctcggaagaggaaccactctcctagcttcaactccaccatatatgaagtcattggcaagtctcagcccaaagcacagaatcctgccaggctgagcagaaaagaacttgagaatttcgacgtctactcc

SEQ ID NO: 5702 - DNA, 1668 bp, Artificial Sequence
  Synthetic Polynucleotide
atggccttaccagtgaccgccttgctcctgccgctggccttgctgctccacgccgccaggccgatggagctgactgatttgctcctggcggccatgcttcttgcagtggcaagactaactctgtccagccccgtagctcctgcctgtgaccccagactcctaaataaactgctgcgtgactcccacctccttcacagccgactgagtcagtgtcccgacgtggaccctttgtctatccctgttctgctgcctgctgtggactttagcctgggagaatggaaaacccagacggaacagagcaaggcacaggacattctaggggcagtgtcccttctactggagggagtgatggcagcacgaggacagttggaaccctcctgcctctcatccctcctgggacagctttctgggcaggttcgcctcctcttgggggccctgcagggcctcctaggaacccagcttcctctacagggcaggaccacagctcacaaggaccccaatgccctcttcttgagcttgcaacaactgcttcggggaaaggtgcgcttcctgcttctggtagaaggtcccaccctctgtgtcagacggaccctgccaaccacagctgtcccaagcagtacttctacgcgtaaaggatgccagggaagcgccgaccatgtggtgtcaatttctggcgtgcccctgcaactccagccaaactctattcagaccaaagtcgatagcattgcctggaaaaaattgctgccctctcagaacgggtttcaccacattctcaaatgggaaaatggctctctgccctccaacacctccaacgatcggtttagctttatcgtcaagaatctgtccctgctcatcaaagcagcccagcagcaagactccggcctgtattgcctcgaagtcacctccatctccgggaaagtgcagacagctacattccaagtgttcgtctttgataaggtcgagaagcctagactccaaggacaggggaagattctggacagaggacggtgtcaggtggcactgtcttgccttgtcagccgcgacggcaatgtgtcttatgcttggtatcggggctccaagctgattcaaaccgctgggaatctgacatacctcgatgaagaggttgacatcaatgggacgcacacgtatacttgcaatgtctccaatcctgtcagctgggagtctcataccctgaacctgacacaggattgtcaaaatgcacatcaagagttccggttttggccgtttcttgtgattatcgtgattctgtctgccctcttcctcggaactctggcttgcttctgtgtctggcggcgcaaacggaaagagaaacagtctgagacttccccgaaagagtttctcacgatatacgaagatgtcaaggacctcaagacccgccgcaaccatgagcaagaacagacattcccaggcggaggctccacaatctactccatgattcagtcccagtctagcgccccaacctctcaagagcctgcttataccctgtacagtctgattcagccctccagaaagtccggctctcggaagaggaaccactctcctagcttcaactccaccatatatgaagtcattggcaagtctcagcccaaagcacagaatcctgccaggctgagcagaaaagaacttgagaatttcgacgtctactcc

SEQ ID NO: 5703 - DNA, 1266 bp, Artificial Sequence
  Synthetic Polynucleotide
atggccttaccagtgaccgccttgctcctgccgctggccttgctgctccacgccgccaggccgatggaccccgacctggaaatcagagccgccttcctgcggcagagaaacacagccctgagaacagaggtggccgagctggaacaagaggtgcagcggctggaaaacgaggtgtcccagtacgagacaagatacggccctctcggaggcggaaaaacgcgtacgcgtaaaggatgccagggaagcgccgaccatgtggtgtcaatttctggcgtgcccctgcaactccagccaaactctattcagaccaaagtcgatagcattgcctggaaaaaattgctgccctctcagaacgggtttcaccacattctcaaatgggaaaatggctctctgccctccaacacctccaacgatcggtttagctttatcgtcaagaatctgtccctgctcatcaaagcagcccagcagcaagactccggcctgtattgcctcgaagtcacctccatctccgggaaagtgcagacagctacattccaagtgttcgtctttgataaggtcgagaagcctagactccaaggacaggggaagattctggacagaggacggtgtcaggtggcactgtcttgccttgtcagccgcgacggcaatgtgtcttatgcttggtatcggggctccaagctgattcaaaccgctgggaatctgacatacctcgatgaagaggttgacatcaatgggacgcacacgtatacttgcaatgtctccaatcctgtcagctgggagtctcataccctgaacctgacacaggattgtcaaaatgcacatcaagagttccggttttggccgtttcttgtgattatcgtgattctgtctgccctcttcctcggaactctggcttgcttctgtgtctggcggcgcaaacggaaagagaaacagtctgagacttccccgaaagagtttctcacgatatacgaagatgtcaaggacctcaagacccgccgcaaccatgagcaagaacagacattcccaggcggaggctccacaatctactccatgattcagtcccagtctagcgccccaacctctcaagagcctgcttataccctgtacagtctgattcagccctccagaaagtccggctctcggaagaggaaccactctcctagcttcaactccaccatatatgaagtcattggcaagtctcagcccaaagcacagaatcctgccaggctgagcagaaaagaacttgagaatttcgacgtctactcc

SEQ ID NO: 5704 - DNA, 1191 bp, Artificial Sequence
  Synthetic Polynucleotide
atggccttaccagtgaccgccttgctcctgccgctggccttgctgctccacgccgccaggccggaagttgctgccctcgagaaggaggtagcagctttggaaaaagaagtcgcagcccttgagaaagaagttgcggctctggagaagacgcgtaaaggatgccagggaagcgccgaccatgtggtgtcaatttctggcgtgcccctgcaactccagccaaactctattcagaccaaagtcgatagcattgcctggaaaaaattgctgccctctcagaacgggtttcaccacattctcaaatgggaaaatggctctctgccctccaacacctccaacgatcggtttagctttatcgtcaagaatctgtccctgctcatcaaagcagcccagcagcaagactccggcctgtattgcctcgaagtcacctccatctccgggaaagtgcagacagctacattccaagtgttcgtctttgataaggtcgagaagcctagactccaaggacaggggaagattctggacagaggacggtgtcaggtggcactgtcttgccttgtcagccgcgacggcaatgtgtcttatgcttggtatcggggctccaagctgattcaaaccgctgggaatctgacatacctcgatgaagaggttgacatcaatgggacgcacacgtatacttgcaatgtctccaatcctgtcagctgggagtctcataccctgaacctgacacaggattgtcaaaatgcacatcaagagttccggttttggccgtttcttgtgattatcgtgattctgtctgccctcttcctcggaactctggcttgcttctgtgtctggcggcgcaaacggaaagagaaacagtctgagacttccccgaaagagtttctcacgatatacgaagatgtcaaggacctcaagacccgccgcaaccatgagcaagaacagacattcccaggcggaggctccacaatctactccatgattcagtcccagtctagcgccccaacctctcaagagcctgcttataccctgtacagtctgattcagccctccagaaagtccggctctcggaagaggaaccactctcctagcttcaactccaccatatatgaagtcattggcaagtctcagcccaaagcacagaatcctgccaggctgagcagaaaagaacttgagaatttcgacgtctactcc

SEQ ID NO: 5705 - DNA, 1965 bp, Artificial Sequence
  Synthetic Polynucleotide
atggccttaccagtgaccgccttgctcctgccgctggccttgctgctccacgccgccaggccgctgttcaatcaagaggtgcagatccctctgaccgagagctactgtggcccctgtcctaagaactggatctgctacaagaacaactgctaccagttcttcgacgagagcaagaattggtacgagagccaggccagctgcatgagccagaatgccagcctgctgaaggtgtacagcaaagaggaccaggacctgctgaaactggtcaagagcgcccactggatgggccttgtgcacatccccaccaatggctcttggcagtgggaggacggcagcattctgagccctaacctgctgaccatcatcgagatgcagaagggcgactgcgccctgtacgccagcagctttaagggcttcatcgagaattgcagcaccccgaacacctacatctgtatgcagagaaccgttggcggaggcggaagtggaggcggaggatctggcggcggaggctctgacctctttaatcaagaagtccagattccactcaccgaatcctactgcggaccttgtccaaaaaattggatttgttataagaacaactgttatcaattctttgatgagtctaaaaattggtatgagtcccaggcttcctgcatgtctcagaacgcttctctgctgaaagtctactctaaagaagatcaggatctcctgaagctcgtcaagtctgcccattggatggggctcgtccacattcctaccaacggaagctggcaatgggaagatggctccatcctgtctccaaatctgctcacgattattgaaatgcagaaaggggattgtgctctctacgccagctccttcaagggatttattgagaactgtagcacgcccaatacttatatctgtatgcaacggaccgtgacgcgtaaaggatgccagggaagcgccgaccatgtggtgtcaatttctggcgtgcccctgcaactccagccaaactctattcagaccaaagtcgatagcattgcctggaaaaaattgctgccctctcagaacgggtttcaccacattctcaaatgggaaaatggctctctgccctccaacacctccaacgatcggtttagctttatcgtcaagaatctgtccctgctcatcaaagcagcccagcagcaagactccggcctgtattgcctcgaagtcacctccatctccgggaaagtgcagacagctacattccaagtgttcgtctttgataaggtcgagaagcctagactccaaggacaggggaagattctggacagaggacggtgtcaggtggcactgtcttgccttgtcagccgcgacggcaatgtgtcttatgcttggtatcggggctccaagctgattcaaaccgctgggaatctgacatacctcgatgaagaggttgacatcaatgggacgcacacgtatacttgcaatgtctccaatcctgtcagctgggagtctcataccctgaacctgacacaggattgtcaaaatgcacatcaagagttccggttttggccgtttcttgtgattatcgtgattctgtctgccctcttcctcggaactctggcttgcttctgtgtctggcggcgcaaacggaaagagaaacagtctgagacttccccgaaagagtttctcacgatatacgaagatgtcaaggacctcaagacccgccgcaaccatgagcaagaacagacattcccaggcggaggctccacaatctactccatgattcagtcccagtctagcgccccaacctctcaagagcctgcttataccctgtacagtctgattcagccctccagaaagtccggctctcggaagaggaaccactctcctagcttcaactccaccatatatgaagtcattggcaagtctcagcccaaagcacagaatcctgccaggctgagcagaaaagaacttgagaatttcgacgtctactcc

SEQ ID NO: 5706 - DNA, 1965 bp, Artificial Sequence
  Synthetic Polynucleotide
atggccttaccagtgaccgccttgctcctgccgctggccttgctgctccacgccgccaggccgctgttcaatcaagaggtgcagatccctctgaccgagagctactgtggcccctgtcctaagaactggatctgctacaagaacaactgctaccagttcttcgacgagagcaagaattggtacgagagccaggccagctgcatgagccagaatgccagcctgctgaaggtgtacagcaaagaggaccaggacctgctgaaactggtcaagagcgcccactggatgggccttgtgcacatccccaccaatggctcttggcagtgggaggacggcagcattctgagccctaacctgctgaccatcatcgagatgcagaagggcgactgcgccctgtacgccagcagctttaagggctacatcgagaattgcagcaccccgaacacctacatctgtatgcagagaaccgtttctggcggaggcggctctggaggaggcggaagtggcggcggaggcgacctctttaatcaagaagtccagattccactcaccgaatcctactgcggaccttgtccaaaaaattggatttgttataagaacaactgttatcaattctttgatgagtctaaaaattggtatgagtcccaggcttcctgcatgtctcagaacgcttctctgctgaaagtctactctaaagaagatcaggatctcctgaagctcgtcaagtctgcccattggatggggctcgtccacattcctaccaacggaagctggcaatgggaagatggctccatcctgtctccaaatctgctcacgattattgaaatgcagaaaggggattgtgctctctacgccagctccttcaagggatatattgagaactgtagcacgcccaatacttatatctgtatgcaacggaccgtgacgcgtaaaggatgccagggaagcgccgaccatgtggtgtcaatttctggcgtgcccctgcaactccagccaaactctattcagaccaaagtcgatagcattgcctggaaaaaattgctgccctctcagaacgggtttcaccacattctcaaatgggaaaatggctctctgccctccaacacctccaacgatcggtttagctttatcgtcaagaatctgtccctgctcatcaaagcagcccagcagcaagactccggcctgtattgcctcgaagtcacctccatctccgggaaagtgcagacagctacattccaagtgttcgtctttgataaggtcgagaagcctagactccaaggacaggggaagattctggacagaggacggtgtcaggtggcactgtcttgccttgtcagccgcgacggcaatgtgtcttatgcttggtatcggggctccaagctgattcaaaccgctgggaatctgacatacctcgatgaagaggttgacatcaatgggacgcacacgtatacttgcaatgtctccaatcctgtcagctgggagtctcataccctgaacctgacacaggattgtcaaaatgcacatcaagagttccggttttggccgtttcttgtgattatcgtgattctgtctgccctcttcctcggaactctggcttgcttctgtgtctggcggcgcaaacggaaagagaaacagtctgagacttccccgaaagagtttctcacgatatacgaagatgtcaaggacctcaagacccgccgcaaccatgagcaagaacagacattcccaggcggaggctccacaatctactccatgattcagtcccagtctagcgccccaacctctcaagagcctgcttataccctgtacagtctgattcagccctccagaaagtccggctctcggaagaggaaccactctcctagcttcaactccaccatatatgaagtcattggcaagtctcagcccaaagcacagaatcctgccaggctgagcagaaaagaacttgagaatttcgacgtctactcc

SEQ ID NO: 5707 - DNA, 3690 bp, Artificial Sequence
  Synthetic Polynucleotide
atggccttaccagtgaccgccttgctcctgccgctggccttgctgctccacgccgccaggccggacatccagatgacacagagccctagcagcctgtctgccagcgtgggagacagagtgaccatcacatgcaaggccagcgaccacatcaacaactggctggcctggtatcagcagaagcctggacaggcccctaagctgctgatctacggcgctaccacactggaaacaggcgtgcccagcagattttctggcagcggctctggcaccgactacaccctgacaatatccagcctccagcctgaggacttcgccacctactactgtcagcagagctggaacaccccttggacattcggccagggcaccaagctggaaatcaagagactcgagaagggctgtcagggctctgccgatcacgtggtgtctatcagcggagtgcctctccagctccagcctaacagcatccagaccaaggtggactctatcgcctggaagaagctgctgcccagccagaatggcttccaccacatcctgaagtgggagaacggcagcctgcctagcaacaccagcaacgacagattcagcttcatcgtgaagaacctgagcctgctgattaaggccgctcagcagcaggatagcggcctgtactgtctggaagtgaccagcatcagcggcaaggtgcagaccgccacctttcaggtgttcgtgttcgacaaggtggaaaagccccggctgcaaggccagggcaagatccttgatagaggcagatgccaggtggccctgagctgtctggtttccagagatggcaacgtgtcctacgcctggtacagaggcagcaagctgatccagacagccggcaacctgacctacctggacgaggaagtggacatcaacggcacccacacctacacctgtaatgtgtctaaccccgtgtcctgggagagccacacactgaatctgacccaggactgccagaacgcccaccaagagttcagattctggcccttcctggtcatcatcgtgatcctgagcgccctgttcctgggcaccctggcctgtttttgcgtgtggcgcagaaagcgcaaagagaagcagagcgagacaagccccaaagagttcctgaccatctacgaggacgtgaaggatctgaaaacccggcggaaccacgaacaagagcagacctttcctggcggcggaagcaccatctacagcatgatccagagccagagcagcgcccctacaagccaagagccagcctacacactgtactccctgatccagcctagcagaaagagcggcagccggaagagaaatcacagccccagcttcaacagcacgatctacgaagtgatcggaaagtcccagcctaaggctcagaaccccgccagactgagccggaaagagctggaaaacttcgacgtgtacagcagggccaagcgatctggatctggagcaacaaacttctcactactcaaacaagcaggtgacgtggaggagaatcccgggcctactagtatggactggatttggcgcatccttttccttgtcggcgctgctaccggcgcgcattccttcgaacaagttcagcttcaacagcctggcgctgagctggtcaaacctggcgcttctgtgaagatgagctgcaaagccagcggctacgccttcagcagctactggatcaactggatgaagcagaaacccggccagggactcgaatggatcggccaaatctatcccggcgacggcgacaccaactacaacggcaagttcaagggcagagccacactgaccgccgatacctctagcagcacagcctacatgcagctgagcagcctgaccagcgaagatagcgccgtgtacttctgtgcccggtccatcacaacagtcgtgggctgcgctatggactattggggccagggaacaagcgtgaccgtgtctagtacgcgtaaaggatgccagggaagcgccgaccatgtggtgtcaatttctggcgtgcccctgcaactccagccaaactctattcagaccaaagtcgatagcattgcctggaaaaaattgctgccctctcagaacgggtttcaccacattctcaaatgggaaaatggctctctgccctccaacacctccaacgatcggtttagctttatcgtcaagaatctgtccctgctcatcaaagcagcccagcagcaagactccggcctgtattgcctcgaagtcacctccatctccgggaaagtgcagacagctacattccaagtgttcgtctttgataaggtcgagaagcctagactccaaggacaggggaagattctggacagaggacggtgtcaggtggcactgtcttgccttgtcagccgcgacggcaatgtgtcttatgcttggtatcggggctccaagctgattcaaaccgctgggaatctgacatacctcgatgaagaggttgacatcaatgggacgcacacgtatacttgcaatgtctccaatcctgtcagctgggagtctcataccctgaacctgacacaggattgtcaaaatgcacatcaagagttccggttttggccgtttcttgtgattatcgtgattctgtctgccctcttcctcggaactctggcttgcttctgtgtctggcggcgcaaacggaaagagaaacagtctgagacttccccgaaagagtttctcacgatatacgaagatgtcaaggacctcaagacccgccgcaaccatgagcaagaacagacattcccaggcggaggctccacaatctactccatgattcagtcccagtctagcgccccaacctctcaagagcctgcttataccctgtacagtctgattcagccctccagaaagtccggctctcggaagaggaaccactctcctagcttcaactccaccatatatgaagtcattggcaagtctcagcccaaagcacagaatcctgccaggctgagcagaaaagaacttgagaatttcgacgtctactcccgcgccaagagaagcggatctggcgtgaagcagaccctgaatttcgacctgctgaagctggctggcgacgtggaatccaacccaggcccttctagaggccatatgaccgagtacaagcccacggtgcgcctcgccacccgcgacgacgtccccagggccgtacgcaccctcgccgccgcgttcgccgactaccccgccacgcgccacaccgtcgatccggaccgccacatcgagcgggtcaccgagctgcaagaactcttcctcacgcgcgtcgggctcgacatcggcaaggtgtgggtcgcggacgacggcgccgcggtggcggtctggaccacgccggagagcgtcgaagcgggggcggtgttcgccgagatcggcccgcgcatggccgagttgagcggttcccggctggccgcgcagcaacagatggaaggcctcctggcgccgcaccggcccaaggagcccgcgtggttcctggccaccgtcggcgtctcgcccgaccaccagggcaagggtctgggcagcgccgtcgtgctccccggagtggaggcggccgagcgcgccggggtgcccgccttcctggagacctccgcgccccgcaacctccccttctacgagcggctcggcttcaccgtcaccgccgacgtcgaggtgcccgaaggaccgcgcacctggtgcatgacccgcaagcccggtgcctga

SEQ ID NO: 5708 - DNA, 3852 bp, Artificial Sequence
  Synthetic Polynucleotide
atggccttaccagtgaccgccttgctcctgccgctggccttgctgctccacgccgccaggccggcatgcgaagtgcagctgcttgaaagtggcggcggactgattcagcctggcggatctctgagactgagctgtgccgccagcggcttcaccttttctagccacgccatgacctgggtccgacaggcacctggaaaagggcttgaatgggtgtccgccatcagcggctctggcgattacacacactacgccgacagcgtgaagggcagattcaccatcagcagagacaacagcaagaacaccgtgtacctccagatgaacagcctgagagccgaggacagcgccgtgtattattgcgccaaggatgaggatggcggcagcctgcttggacacagaggacaaggcaccctggtcaccgtttcttccggtaccggcggaggcggatctggcggcggaggtagcggtggcggaggatctgaattcggatctctcgagaagggctgtcagggctctgccgatcacgtggtgtctatcagcggagtgcctctccagctccagcctaacagcatccagaccaaggtggactctatcgcctggaagaagctgctgcccagccagaatggcttccaccacatcctgaagtgggagaacggcagcctgcctagcaacaccagcaacgacagattcagcttcatcgtgaagaacctgagcctgctgattaaggccgctcagcagcaggatagcggcctgtactgtctggaagtgaccagcatcagcggcaaggtgcagaccgccacctttcaggtgttcgtgttcgacaaggtggaaaagccccggctgcaaggccagggcaagatccttgatagaggcagatgccaggtggccctgagctgtctggtttccagagatggcaacgtgtcctacgcctggtacagaggcagcaagctgatccagacagccggcaacctgacctacctggacgaggaagtggacatcaacggcacccacacctacacctgtaatgtgtctaaccccgtgtcctgggagagccacacactgaatctgacccaggactgccagaacgcccaccaagagttcagattctggcccttcctggtcatcatcgtgatcctgagcgccctgttcctgggcaccctggcctgtttttgcgtgtggcgcagaaagcgcaaagagaagcagagcgagacaagccccaaagagttcctgaccatctacgaggacgtgaaggatctgaaaacccggcggaaccacgaacaagagcagacctttcctggcggcggaagcaccatctacagcatgatccagagccagagcagcgcccctacaagccaagagccagcctacacactgtactccctgatccagcctagcagaaagagcggcagccggaagagaaatcacagccccagcttcaacagcacgatctacgaagtgatcggaaagtcccagcctaaggctcagaaccccgccagactgagccggaaagagctggaaaacttcgacgtgtacagcagggccaagcgatctggatctggagcaacaaacttctcactactcaaacaagcaggtgacgtggaggagaatcccgggcctactagtgccaccatggactggatttggcgcatccttttccttgtcggcgctgctaccggcgcccattccgggcccgaagtgcagctggttgaatctggcggaggactggttcaggctggcggatctctgagactgtcttgtgccgccagcggcagaacctttagcatgggctggtttagacaggcccctggcaaagagagagagttcgtcgccgccatcacatactctggcggcagcccttactacgccgactctgtgaagggcagattcaccatcagccgggacaacgccaagaacaccgtgtacctccagatgaacagcctgaagcctgaggacaccgccgtgtactactgcgccgccaatccaacatacggcagcgactggaacgccgagaattggggccagggaacccaagtgacagtgtctagcggatccggcggcggaggatctggcggaggcggatctgggggcggaggctctttcgaaggcagcacgcgtaaaggatgccagggaagcgccgaccatgtggtgtcaatttctggcgtgcccctgcaactccagccaaactctattcagaccaaagtcgatagcattgcctggaaaaaattgctgccctctcagaacgggtttcaccacattctcaaatgggaaaatggctctctgccctccaacacctccaacgatcggtttagctttatcgtcaagaatctgtccctgctcatcaaagcagcccagcagcaagactccggcctgtattgcctcgaagtcacctccatctccgggaaagtgcagacagctacattccaagtgttcgtctttgataaggtcgagaagcctagactccaaggacaggggaagattctggacagaggacggtgtcaggtggcactgtcttgccttgtcagccgcgacggcaatgtgtcttatgcttggtatcggggctccaagctgattcaaaccgctgggaatctgacatacctcgatgaagaggttgacatcaatgggacgcacacgtatacttgcaatgtctccaatcctgtcagctgggagtctcataccctgaacctgacacaggattgtcaaaatgcacatcaagagttccggttttggccgtttcttgtgattatcgtgattctgtctgccctcttcctcggaactctggcttgcttctgtgtctggcggcgcaaacggaaagagaaacagtctgagacttccccgaaagagtttctcacgatatacgaagatgtcaaggacctcaagacccgccgcaaccatgagcaagaacagacattcccaggcggaggctccacaatctactccatgattcagtcccagtctagcgccccaacctctcaagagcctgcttataccctgtacagtctgattcagccctccagaaagtccggctctcggaagaggaaccactctcctagcttcaactccaccatatatgaagtcattggcaagtctcagcccaaagcacagaatcctgccaggctgagcagaaaagaacttgagaatttcgacgtctactcccgcgccaagagaagcggatctggcgtgaagcagaccctgaatttcgacctgctgaagctggctggcgacgtggaatccaacccaggcccttctagaggccatatgaccgagtacaagcccacggtgcgcctcgccacccgcgacgacgtccccagggccgtacgcaccctcgccgccgcgttcgccgactaccccgccacgcgccacaccgtcgatccggaccgccacatcgagcgggtcaccgagctgcaagaactcttcctcacgcgcgtcgggctcgacatcggcaaggtgtgggtcgcggacgacggcgccgcggtggcggtctggaccacgccggagagcgtcgaagcgggggcggtgttcgccgagatcggcccgcgcatggccgagttgagcggttcccggctggccgcgcagcaacagatggaaggcctcctggcgccgcaccggcccaaggagcccgcgtggttcctggccaccgtcggcgtctcgcccgaccaccagggcaagggtctgggcagcgccgtcgtgctccccggagtggaggcggccgagcgcgccggggtgcccgccttcctggagacctccgcgccccgcaacctccccttctacgagcggctcggcttcaccgtcaccgccgacgtcgaggtgcccgaaggaccgcgcacctggtgcatgacccgcaagcccggtgcctga

SEQ ID NO: 5709 - DNA, 4302 bp, Artificial Sequence
  Synthetic Polynucleotide
atggccttaccagtgaccgccttgctcctgccgctggccttgctgctccacgccgccaggccggacatccagatgacacagagccctagcagcctgtctgccagcgtgggagacagagtgaccatcacatgcaaggccagcgaccacatcaacaactggctggcctggtatcagcagaagcctggacaggcccctaagctgctgatctacggcgctaccacactggaaacaggcgtgcccagcagattttctggcagcggctctggcaccgactacaccctgacaatatccagcctccagcctgaggacttcgccacctactactgtcagcagagctggaacaccccttggacattcggccagggcaccaagctggaaatcaagagactcgagggacagcctaaggccaatcctaccgtgacactgttccctccaagcagcgaagaactccaggccaacaaggccacacttgtgtgcctgatctccgacttctaccctggggctgtgacagtggcttggaaggccgatggatctcctgtgaaagccggcgtggaaaccaccaagccatccaagcagagcaacaacaaatacgccgccagctcctacctgagcctgacacctgagcagtggaagtcccacagatcctacagctgccaagtgacccacgaaggcagcaccgtggaaaagacagtggcccctacagagtgcagcggatccaagggctgtcagggctctgccgatcacgtggtgtctatcagcggagtgcctctccagctccagcctaacagcatccagaccaaggtggactctatcgcctggaagaagctgctgcccagccagaatggcttccaccacatcctgaagtgggagaacggcagcctgcctagcaacaccagcaacgacagattcagcttcatcgtgaagaacctgagcctgctgattaaggccgctcagcagcaggatagcggcctgtactgtctggaagtgaccagcatcagcggcaaggtgcagaccgccacctttcaggtgttcgtgttcgacaaggtggaaaagccccggctgcaaggccagggcaagatccttgatagaggcagatgccaggtggccctgagctgtctggtttccagagatggcaacgtgtcctacgcctggtacagaggcagcaagctgatccagacagccggcaacctgacctacctggacgaggaagtggacatcaacggcacccacacctacacctgtaatgtgtctaaccccgtgtcctgggagagccacacactgaatctgacccaggactgccagaacgcccaccaagagttcagattctggcccttcctggtcatcatcgtgatcctgagcgccctgttcctgggcaccctggcctgtttttgcgtgtggcgcagaaagcgcaaagagaagcagagcgagacaagccccaaagagttcctgaccatctacgaggacgtgaaggatctgaaaacccggcggaaccacgaacaagagcagacctttcctggcggcggaagcaccatctacagcatgatccagagccagagcagcgcccctacaagccaagagccagcctacacactgtactccctgatccagcctagcagaaagagcggcagccggaagagaaatcacagccccagcttcaacagcacgatctacgaagtgatcggaaagtcccagcctaaggctcagaaccccgccagactgagccggaaagagctggaaaacttcgacgtgtacagcagggccaagcgatctggatctggagcaacaaacttctcactactcaaacaagcaggtgacgtggaggagaatcccgggcctactagtatggactggatttggcgcatccttttccttgtcggcgctgctaccggcgcgcattccttcgaacaagttcagcttcaacagcctggcgctgagctggtcaaacctggcgcttctgtgaagatgagctgcaaagccagcggctacgccttcagcagctactggatcaactggatgaagcagaaacccggccagggactcgaatggatcggccaaatctatcccggcgacggcgacaccaactacaacggcaagttcaagggcagagccacactgaccgccgatacctctagcagcacagcctacatgcagctgagcagcctgaccagcgaagatagcgccgtgtacttctgtgcccggtccatcacaacagtcgtgggctgcgctatggactattggggccagggaacaagcgtgaccgtgtctagtacgcgtgcctctacaaagggaccctccgtgtttcctctggctcccagcagcaagtctacaagcggaggaacagccgctctgggctgcctggtcaaggattactttcccgagcctgtgaccgtgtcctggaatagcggagcactgacaagcggcgtgcacacctttccagccgtgctgcaaagcagcggcctgtactctctgagcagcgtggtcacagtgcctagctctagcctgggcacccagacctacatctgcaatgtgaaccacaagcctagcaacaccaaggtggacaagagagtggaacccaagagctgtggtaccaaaggatgccagggaagcgccgaccatgtggtgtcaatttctggcgtgcccctgcaactccagccaaactctattcagaccaaagtcgatagcattgcctggaaaaaattgctgccctctcagaacgggtttcaccacattctcaaatgggaaaatggctctctgccctccaacacctccaacgatcggtttagctttatcgtcaagaatctgtccctgctcatcaaagcagcccagcagcaagactccggcctgtattgcctcgaagtcacctccatctccgggaaagtgcagacagctacattccaagtgttcgtctttgataaggtcgagaagcctagactccaaggacaggggaagattctggacagaggacggtgtcaggtggcactgtcttgccttgtcagccgcgacggcaatgtgtcttatgcttggtatcggggctccaagctgattcaaaccgctgggaatctgacatacctcgatgaagaggttgacatcaatgggacgcacacgtatacttgcaatgtctccaatcctgtcagctgggagtctcataccctgaacctgacacaggattgtcaaaatgcacatcaagagttccggttttggccgtttcttgtgattatcgtgattctgtctgccctcttcctcggaactctggcttgcttctgtgtctggcggcgcaaacggaaagagaaacagtctgagacttccccgaaagagtttctcacgatatacgaagatgtcaaggacctcaagacccgccgcaaccatgagcaagaacagacattcccaggcggaggctccacaatctactccatgattcagtcccagtctagcgccccaacctctcaagagcctgcttataccctgtacagtctgattcagccctccagaaagtccggctctcggaagaggaaccactctcctagcttcaactccaccatatatgaagtcattggcaagtctcagcccaaagcacagaatcctgccaggctgagcagaaaagaacttgagaatttcgacgtctactcccgcgccaagagaagcggatctggcgtgaagcagaccctgaatttcgacctgctgaagctggctggcgacgtggaatccaacccaggcccttctagaggcgggatccacaccatggctacctacgaggtgctgtgcgaggtggcaagaaagctgggcaccgacgacagagaagtggtgctgttcctgctgaacgtgttcatccctcagcctacactggcccagctgatcggtgcactgagagccctgaaagaggaaggccggctgacctttcctctgctggccgaatgcctgttcagagccggaagaagggatctgctgcgggacctgctgcatctggaccccagatttctggaaagacacctggccggcaccatgagctacttcagcccttaccagctgaccgtgctgcacgttgacggcgaactgtgcgccagagatattcggagcctgatcttcctgagcaaggacaccatcggcagccggtctacccctcagacatttctgcactgggtgtactgcatggaaaacctggacctgctcggccccacagatgtggatgccctgatgtccatgctgagaagcctgagcagagtggacctccagagacaggtgcagacactgatgggactgcacctgagcggacctagccacagccagcactacagacacacccct

SEQ ID NO: 5710 - DNA, 4461 bp, Artificial Sequence
  Synthetic Polynucleotide
atggccttaccagtgaccgccttgctcctgccgctggccttgctgctccacgccgccaggccggacatccagatgacacagagccctagcagcctgtctgccagcgtgggagacagagtgaccatcacatgcaaggccagcgaccacatcaacaactggctggcctggtatcagcagaagcctggacaggcccctaagctgctgatctacggcgctaccacactggaaacaggcgtgcccagcagattttctggcagcggctctggcaccgactacaccctgacaatatccagcctccagcctgaggacttcgccacctactactgtcagcagagctggaacaccccttggacattcggccagggcaccaagctggaaatcaagagactcgagggacagcctaaggccaatcctaccgtgacactgttccctccaagcagcgaagaactccaggccaacaaggccacacttgtgtgcctgatctccgacttctaccctggggctgtgacagtggcttggaaggccgatggatctcctgtgaaagccggcgtggaaaccaccaagccatccaagcagagcaacaacaaatacgccgccagctcctacctgagcctgacacctgagcagtggaagtcccacagatcctacagctgccaagtgacccacgaaggcagcaccgtggaaaagacagtggcccctacagagtgcagcggatccaagggctgtcagggctctgccgatcacgtggtgtctatcagcggagtgcctctccagctccagcctaacagcatccagaccaaggtggactctatcgcctggaagaagctgctgcccagccagaatggcttccaccacatcctgaagtgggagaacggcagcctgcctagcaacaccagcaacgacagattcagcttcatcgtgaagaacctgagcctgctgattaaggccgctcagcagcaggatagcggcctgtactgtctggaagtgaccagcatcagcggcaaggtgcagaccgccacctttcaggtgttcgtgttcgacaaggtggaaaagccccggctgcaaggccagggcaagatccttgatagaggcagatgccaggtggccctgagctgtctggtttccagagatggcaacgtgtcctacgcctggtacagaggcagcaagctgatccagacagccggcaacctgacctacctggacgaggaagtggacatcaacggcacccacacctacacctgtaatgtgtctaaccccgtgtcctgggagagccacacactgaatctgacccaggactgccagaacgcccaccaagagttcagattctggcccttcctggtcatcatcgtgatcctgagcgccctgttcctgggcaccctggcctgtttttgcgtgtggcgcagaaagcgcaaagagaagcagagcgagacaagccccaaagagttcctgaccatctacgaggacgtgaaggatctgaaaacccggcggaaccacgaacaagagcagacctttcctggcggcggaagcaccatctacagcatgatccagagccagagcagcgcccctacaagccaagagccagcctacacactgtactccctgatccagcctagcagaaagagcggcagccggaagagaaatcacagccccagcttcaacagcacgatctacgaagtgatcggaaagtcccagcctaaggctcagaaccccgccagactgagccggaaagagctggaaaacttcgacgtgtacagcagggccaagcgatctggatctggagcaacaaacttctcactactcaaacaagcaggtgacgtggaggagaatcccgggcctactagtatggactggatttggcgcatccttttccttgtcggcgctgctaccggcgcgcattccttcgaacaagttcagcttcaacagcctggcgctgagctggtcaaacctggcgcttctgtgaagatgagctgcaaagccagcggctacgccttcagcagctactggatcaactggatgaagcagaaacccggccagggactcgaatggatcggccaaatctatcccggcgacggcgacaccaactacaacggcaagttcaagggcagagccacactgaccgccgatacctctagcagcacagcctacatgcagctgagcagcctgaccagcgaagatagcgccgtgtacttctgtgcccggtccatcacaacagtcgtgggctgcgctatggactattggggccagggaacaagcgtgaccgtgtctagtacgcgtgcctctacaaagggaccctccgtgtttcctctggctcccagcagcaagtctacaagcggaggaacagccgctctgggctgcctggtcaaggattactttcccgagcctgtgaccgtgtcctggaatagcggagcactgacaagcggcgtgcacacctttccagccgtgctgcaaagcagcggcctgtactctctgagcagcgtggtcacagtgcctagctctagcctgggcacccagacctacatctgcaatgtgaaccacaagcctagcaacaccaaggtggacaagagagtggaacccaagagctgtggtaccaaaggatgccagggaagcgccgaccatgtggtgtcaatttctggcgtgcccctgcaactccagccaaactctattcagaccaaagtcgatagcattgcctggaaaaaattgctgccctctcagaacgggtttcaccacattctcaaatgggaaaatggctctctgccctccaacacctccaacgatcggtttagctttatcgtcaagaatctgtccctgctcatcaaagcagcccagcagcaagactccggcctgtattgcctcgaagtcacctccatctccgggaaagtgcagacagctacattccaagtgttcgtctttgataaggtcgagaagcctagactccaaggacaggggaagattctggacagaggacggtgtcaggtggcactgtcttgccttgtcagccgcgacggcaatgtgtcttatgcttggtatcggggctccaagctgattcaaaccgctgggaatctgacatacctcgatgaagaggttgacatcaatgggacgcacacgtatacttgcaatgtctccaatcctgtcagctgggagtctcataccctgaacctgacacaggattgtcaaaatgcacatcaagagttccggttttggccgtttcttgtgattatcgtgattctgtctgccctcttcctcggaactctggcttgcttctgtgtctggcggcgcaaacggaaagagaaacagtctgagacttccccgaaagagtttctcacgatatacgaagatgtcaaggacctcaagacccgccgcaaccatgagcaagaacagacattcccaggcggaggctccacaatctactccatgattcagtcccagtctagcgccccaacctctcaagagcctgcttataccctgtacagtctgattcagccctccagaaagtccggctctcggaagaggaaccactctcctagcttcaactccaccatatatgaagtcattggcaagtctcagcccaaagcacagaatcctgccaggctgagcagaaaagaacttgagaatttcgacgtctactcccgcgccaagagaagcggatctggcgtgaagcagaccctgaatttcgacctgctgaagctggctggcgacgtggaatccaacccaggcccttctagaggcgggatccacaccatgtccgactccaaggaggtccctagccttccatttttgcgacacttgctcgaagagttggacagccatgaggacagcttgctgctgtttctgtgtcacgacgcggccccgggctgcacgacggtcacgcaagctttgtgctcgcttagccaacagcgcaagctgaccctcgcggctctggtcgagatgctctacgtgctgcagcgtatggatcttctcaagagccgcttcgggctcagcaaggagggggccgagcaattgctgggcacaagctttctcacgcgctaccgcaagctcatggtttgcgtgggtgaggagctcgactcgagcgagctacgcgctctacgcttgttcgcgtgcaacctgaatccgagcctgagcacggcgctttctgagagcagccgctttgtcgagcttgtactcgcgcttgaaaacgtaggactcgtctcgccatcgagtgtttccgtgcttgcggacatgttgcgcactcttcggcgcctcgatttgtgccagcagcttgttgagtacgaacaacaagagcaagccaggtaccgttactgttacgcggcctcgccctcattgccagttcgtacgttacgtcgggggcacggcgcgagtgaacacgagcagctgtgcatgcccgtgcaagaatcctctgacagccccgagctgctgcgcacgcccgtacaagaatcctccagcgacagccccgagcaaacgact

SEQ ID NO: 5711 - DNA, 4329 bp, Artificial Sequence
  Synthetic Polynucleotide
atggccttaccagtgaccgccttgctcctgccgctggccttgctgctccacgccgccaggccggacatccagatgacacagagccctagcagcctgtctgccagcgtgggagacagagtgaccatcacatgcaaggccagcgaccacatcaacaactggctggcctggtatcagcagaagcctggacaggcccctaagctgctgatctacggcgctaccacactggaaacaggcgtgcccagcagattttctggcagcggctctggcaccgactacaccctgacaatatccagcctccagcctgaggacttcgccacctactactgtcagcagagctggaacaccccttggacattcggccagggcaccaagctggaaatcaagagactcgagggacagcctaaggccaatcctaccgtgacactgttccctccaagcagcgaagaactccaggccaacaaggccacacttgtgtgcctgatctccgacttctaccctggggctgtgacagtggcttggaaggccgatggatctcctgtgaaagccggcgtggaaaccaccaagccatccaagcagagcaacaacaaatacgccgccagctcctacctgagcctgacacctgagcagtggaagtcccacagatcctacagctgccaagtgacccacgaaggcagcaccgtggaaaagacagtggcccctacagagtgcagcggatccaagggctgtcagggctctgccgatcacgtggtgtctatcagcggagtgcctctccagctccagcctaacagcatccagaccaaggtggactctatcgcctggaagaagctgctgcccagccagaatggcttccaccacatcctgaagtgggagaacggcagcctgcctagcaacaccagcaacgacagattcagcttcatcgtgaagaacctgagcctgctgattaaggccgctcagcagcaggatagcggcctgtactgtctggaagtgaccagcatcagcggcaaggtgcagaccgccacctttcaggtgttcgtgttcgacaaggtggaaaagccccggctgcaaggccagggcaagatccttgatagaggcagatgccaggtggccctgagctgtctggtttccagagatggcaacgtgtcctacgcctggtacagaggcagcaagctgatccagacagccggcaacctgacctacctggacgaggaagtggacatcaacggcacccacacctacacctgtaatgtgtctaaccccgtgtcctgggagagccacacactgaatctgacccaggactgccagaacgcccaccaagagttcagattctggcccttcctggtcatcatcgtgatcctgagcgccctgttcctgggcaccctggcctgtttttgcgtgtggcgcagaaagcgcaaagagaagcagagcgagacaagccccaaagagttcctgaccatctacgaggacgtgaaggatctgaaaacccggcggaaccacgaacaagagcagacctttcctggcggcggaagcaccatctacagcatgatccagagccagagcagcgcccctacaagccaagagccagcctacacactgtactccctgatccagcctagcagaaagagcggcagccggaagagaaatcacagccccagcttcaacagcacgatctacgaagtgatcggaaagtcccagcctaaggctcagaaccccgccagactgagccggaaagagctggaaaacttcgacgtgtacagcagggccaagcgatctggatctggagcaacaaacttctcactactcaaacaagcaggtgacgtggaggagaatcccgggcctactagtatggactggatttggcgcatccttttccttgtcggcgctgctaccggcgcgcattccttcgaacaagttcagcttcaacagcctggcgctgagctggtcaaacctggcgcttctgtgaagatgagctgcaaagccagcggctacgccttcagcagctactggatcaactggatgaagcagaaacccggccagggactcgaatggatcggccaaatctatcccggcgacggcgacaccaactacaacggcaagttcaagggcagagccacactgaccgccgatacctctagcagcacagcctacatgcagctgagcagcctgaccagcgaagatagcgccgtgtacttctgtgcccggtccatcacaacagtcgtgggctgcgctatggactattggggccagggaacaagcgtgaccgtgtctagtacgcgtgcctctacaaagggaccctccgtgtttcctctggctcccagcagcaagtctacaagcggaggaacagccgctctgggctgcctggtcaaggattactttcccgagcctgtgaccgtgtcctggaatagcggagcactgacaagcggcgtgcacacctttccagccgtgctgcaaagcagcggcctgtactctctgagcagcgtggtcacagtgcctagctctagcctgggcacccagacctacatctgcaatgtgaaccacaagcctagcaacaccaaggtggacaagagagtggaacccaagagctgtggtaccaaaggatgccagggaagcgccgaccatgtggtgtcaatttctggcgtgcccctgcaactccagccaaactctattcagaccaaagtcgatagcattgcctggaaaaaattgctgccctctcagaacgggtttcaccacattctcaaatgggaaaatggctctctgccctccaacacctccaacgatcggtttagctttatcgtcaagaatctgtccctgctcatcaaagcagcccagcagcaagactccggcctgtattgcctcgaagtcacctccatctccgggaaagtgcagacagctacattccaagtgttcgtctttgataaggtcgagaagcctagactccaaggacaggggaagattctggacagaggacggtgtcaggtggcactgtcttgccttgtcagccgcgacggcaatgtgtcttatgcttggtatcggggctccaagctgattcaaaccgctgggaatctgacatacctcgatgaagaggttgacatcaatgggacgcacacgtatacttgcaatgtctccaatcctgtcagctgggagtctcataccctgaacctgacacaggattgtcaaaatgcacatcaagagttccggttttggccgtttcttgtgattatcgtgattctgtctgccctcttcctcggaactctggcttgcttctgtgtctggcggcgcaaacggaaagagaaacagtctgagacttccccgaaagagtttctcacgatatacgaagatgtcaaggacctcaagacccgccgcaaccatgagcaagaacagacattcccaggcggaggctccacaatctactccatgattcagtcccagtctagcgccccaacctctcaagagcctgcttataccctgtacagtctgattcagccctccagaaagtccggctctcggaagaggaaccactctcctagcttcaactccaccatatatgaagtcattggcaagtctcagcccaaagcacagaatcctgccaggctgagcagaaaagaacttgagaatttcgacgtctactcccgcgccaagagaagcggatctggcgtgaagcagaccctgaatttcgacctgctgaagctggctggcgacgtggaatccaacccaggcccttctagaggccatatgaccgagtacaagcccacggtgcgcctcgccacccgcgacgacgtccccagggccgtacgcaccctcgccgccgcgttcgccgactaccccgccacgcgccacaccgtcgatccggaccgccacatcgagcgggtcaccgagctgcaagaactcttcctcacgcgcgtcgggctcgacatcggcaaggtgtgggtcgcggacgacggcgccgcggtggcggtctggaccacgccggagagcgtcgaagcgggggcggtgttcgccgagatcggcccgcgcatggccgagttgagcggttcccggctggccgcgcagcaacagatggaaggcctcctggcgccgcaccggcccaaggagcccgcgtggttcctggccaccgtcggcgtctcgcccgaccaccagggcaagggtctgggcagcgccgtcgtgctccccggagtggaggcggccgagcgcgccggggtgcccgccttcctggagacctccgcgccccgcaacctccccttctacgagcggctcggcttcaccgtcaccgccgacgtcgaggtgcccgaaggaccgcgcacctggtgcatgacccgcaagcccggtgcctga

SEQ ID NO: 5712 - DNA, 4740 bp, Artificial Sequence
  Synthetic Polynucleotide
atggccttaccagtgaccgccttgctcctgccgctggccttgctgctccacgccgccaggccggaagtgcagctggttgaatctggcggaggactggttcaggctggcggatctctgagactgtcttgtgccgccagcggcagaacctttagcatgggctggtttagacaggcccctggcaaagagagagagttcgtcgccgccatcacatactctggcggcagcccttactacgccgactctgtgaagggcagattcaccatcagccgggacaacgccaagaacaccgtgtacctccagatgaacagcctgaagcctgaggacaccgccgtgtactactgcgccgccaatccaacatacggcagcgactggaacgccgagaattggggccagggaacccaagtgacagtgtctagcggtaccggcggaggcggatctggcggcggaggtagcggtggcggaggatctgaattcgacatccagatgacacagagccctagcagcctgtctgccagcgtgggagacagagtgaccatcacatgcaaggccagcgaccacatcaacaactggctggcctggtatcagcagaagcctggacaggcccctaagctgctgatctacggcgctaccacactggaaacaggcgtgcccagcagattttctggcagcggctctggcaccgactacaccctgacaatatccagcctccagcctgaggacttcgccacctactactgtcagcagagctggaacaccccttggacattcggccagggcaccaagctggaaatcaagagactcgagggacagcctaaggccaatcctaccgtgacactgttccctccaagcagcgaagaactccaggccaacaaggccacacttgtgtgcctgatctccgacttctaccctggggctgtgacagtggcttggaaggccgatggatctcctgtgaaagccggcgtggaaaccaccaagccatccaagcagagcaacaacaaatacgccgccagctcctacctgagcctgacacctgagcagtggaagtcccacagatcctacagctgccaagtgacccacgaaggcagcaccgtggaaaagacagtggcccctacagagtgcagcggatccaagggctgtcagggctctgccgatcacgtggtgtctatcagcggagtgcctctccagctccagcctaacagcatccagaccaaggtggactctatcgcctggaagaagctgctgcccagccagaatggcttccaccacatcctgaagtgggagaacggcagcctgcctagcaacaccagcaacgacagattcagcttcatcgtgaagaacctgagcctgctgattaaggccgctcagcagcaggatagcggcctgtactgtctggaagtgaccagcatcagcggcaaggtgcagaccgccacctttcaggtgttcgtgttcgacaaggtggaaaagccccggctgcaaggccagggcaagatccttgatagaggcagatgccaggtggccctgagctgtctggtttccagagatggcaacgtgtcctacgcctggtacagaggcagcaagctgatccagacagccggcaacctgacctacctggacgaggaagtggacatcaacggcacccacacctacacctgtaatgtgtctaaccccgtgtcctgggagagccacacactgaatctgacccaggactgccagaacgcccaccaagagttcagattctggcccttcctggtcatcatcgtgatcctgagcgccctgttcctgggcaccctggcctgtttttgcgtgtggcgcagaaagcgcaaagagaagcagagcgagacaagccccaaagagttcctgaccatctacgaggacgtgaaggatctgaaaacccggcggaaccacgaacaagagcagacctttcctggcggcggaagcaccatctacagcatgatccagagccagagcagcgcccctacaagccaagagccagcctacacactgtactccctgatccagcctagcagaaagagcggcagccggaagagaaatcacagccccagcttcaacagcacgatctacgaagtgatcggaaagtcccagcctaaggctcagaaccccgccagactgagccggaaagagctggaaaacttcgacgtgtacagcagggccaagcgatctggatctggagcaacaaacttctcactactcaaacaagcaggtgacgtggaggagaatcccgggcctactagtatggactggatttggcgcatccttttccttgtcggcgctgctaccggcgcgcattccttcgaacaagttcagcttcaacagcctggcgctgagctggtcaaacctggcgcttctgtgaagatgagctgcaaagccagcggctacgccttcagcagctactggatcaactggatgaagcagaaacccggccagggactcgaatggatcggccaaatctatcccggcgacggcgacaccaactacaacggcaagttcaagggcagagccacactgaccgccgatacctctagcagcacagcctacatgcagctgagcagcctgaccagcgaagatagcgccgtgtacttctgtgcccggtccatcacaacagtcgtgggctgcgctatggactattggggccagggaacaagcgtgaccgtgtctagtacgcgtgcctctacaaagggaccctccgtgtttcctctggctcccagcagcaagtctacaagcggaggaacagccgctctgggctgcctggtcaaggattactttcccgagcctgtgaccgtgtcctggaatagcggagcactgacaagcggcgtgcacacctttccagccgtgctgcaaagcagcggcctgtactctctgagcagcgtggtcacagtgcctagctctagcctgggcacccagacctacatctgcaatgtgaaccacaagcctagcaacaccaaggtggacaagagagtggaacccaagagctgtggtaccaaaggatgccagggaagcgccgaccatgtggtgtcaatttctggcgtgcccctgcaactccagccaaactctattcagaccaaagtcgatagcattgcctggaaaaaattgctgccctctcagaacgggtttcaccacattctcaaatgggaaaatggctctctgccctccaacacctccaacgatcggtttagctttatcgtcaagaatctgtccctgctcatcaaagcagcccagcagcaagactccggcctgtattgcctcgaagtcacctccatctccgggaaagtgcagacagctacattccaagtgttcgtctttgataaggtcgagaagcctagactccaaggacaggggaagattctggacagaggacggtgtcaggtggcactgtcttgccttgtcagccgcgacggcaatgtgtcttatgcttggtatcggggctccaagctgattcaaaccgctgggaatctgacatacctcgatgaagaggttgacatcaatgggacgcacacgtatacttgcaatgtctccaatcctgtcagctgggagtctcataccctgaacctgacacaggattgtcaaaatgcacatcaagagttccggttttggccgtttcttgtgattatcgtgattctgtctgccctcttcctcggaactctggcttgcttctgtgtctggcggcgcaaacggaaagagaaacagtctgagacttccccgaaagagtttctcacgatatacgaagatgtcaaggacctcaagacccgccgcaaccatgagcaagaacagacattcccaggcggaggctccacaatctactccatgattcagtcccagtctagcgccccaacctctcaagagcctgcttataccctgtacagtctgattcagccctccagaaagtccggctctcggaagaggaaccactctcctagcttcaactccaccatatatgaagtcattggcaagtctcagcccaaagcacagaatcctgccaggctgagcagaaaagaacttgagaatttcgacgtctactcccgcgccaagagaagcggatctggcgtgaagcagaccctgaatttcgacctgctgaagctggctggcgacgtggaatccaacccaggcccttctagaggccatatgaccgagtacaagcccacggtgcgcctcgccacccgcgacgacgtccccagggccgtacgcaccctcgccgccgcgttcgccgactaccccgccacgcgccacaccgtcgatccggaccgccacatcgagcgggtcaccgagctgcaagaactcttcctcacgcgcgtcgggctcgacatcggcaaggtgtgggtcgcggacgacggcgccgcggtggcggtctggaccacgccggagagcgtcgaagcgggggcggtgttcgccgagatcggcccgcgcatggccgagttgagcggttcccggctggccgcgcagcaacagatggaaggcctcctggcgccgcaccggcccaaggagcccgcgtggttcctggccaccgtcggcgtctcgcccgaccaccagggcaagggtctgggcagcgccgtcgtgctccccggagtggaggcggccgagcgcgccggggtgcccgccttcctggagacctccgcgccccgcaacctccccttctacgagcggctcggcttcaccgtcaccgccgacgtcgaggtgcccgaaggaccgcgcacctggtgcatgacccgcaagcccggtgcctga

SEQ ID NO: 5713 - DNA, 5151 bp, Artificial Sequence
  Synthetic Polynucleotide
atggccttaccagtgaccgccttgctcctgccgctggccttgctgctccacgccgccaggccggaagtgcagctggttgaatctggcggaggactggttcaggctggcggatctctgagactgtcttgtgccgccagcggcagaacctttagcatgggctggtttagacaggcccctggcaaagagagagagttcgtcgccgccatcacatactctggcggcagcccttactacgccgactctgtgaagggcagattcaccatcagccgggacaacgccaagaacaccgtgtacctccagatgaacagcctgaagcctgaggacaccgccgtgtactactgcgccgccaatccaacatacggcagcgactggaacgccgagaattggggccagggaacccaagtgacagtgtctagcggtaccggcggaggcggatctggcggcggaggtagcggtggcggaggatctgaattcgacatccagatgacacagagccctagcagcctgtctgccagcgtgggagacagagtgaccatcacatgcaaggccagcgaccacatcaacaactggctggcctggtatcagcagaagcctggacaggcccctaagctgctgatctacggcgctaccacactggaaacaggcgtgcccagcagattttctggcagcggctctggcaccgactacaccctgacaatatccagcctccagcctgaggacttcgccacctactactgtcagcagagctggaacaccccttggacattcggccagggcaccaagctggaaatcaagagactcgagggacagcctaaggccaatcctaccgtgacactgttccctccaagcagcgaagaactccaggccaacaaggccacacttgtgtgcctgatctccgacttctaccctggggctgtgacagtggcttggaaggccgatggatctcctgtgaaagccggcgtggaaaccaccaagccatccaagcagagcaacaacaaatacgccgccagctcctacctgagcctgacacctgagcagtggaagtcccacagatcctacagctgccaagtgacccacgaaggcagcaccgtggaaaagacagtggcccctacagagtgcagcggatccaagggctgtcagggctctgccgatcacgtggtgtctatcagcggagtgcctctccagctccagcctaacagcatccagaccaaggtggactctatcgcctggaagaagctgctgcccagccagaatggcttccaccacatcctgaagtgggagaacggcagcctgcctagcaacaccagcaacgacagattcagcttcatcgtgaagaacctgagcctgctgattaaggccgctcagcagcaggatagcggcctgtactgtctggaagtgaccagcatcagcggcaaggtgcagaccgccacctttcaggtgttcgtgttcgacaaggtggaaaagccccggctgcaaggccagggcaagatccttgatagaggcagatgccaggtggccctgagctgtctggtttccagagatggcaacgtgtcctacgcctggtacagaggcagcaagctgatccagacagccggcaacctgacctacctggacgaggaagtggacatcaacggcacccacacctacacctgtaatgtgtctaaccccgtgtcctgggagagccacacactgaatctgacccaggactgccagaacgcccaccaagagttcagattctggcccttcctggtcatcatcgtgatcctgagcgccctgttcctgggcaccctggcctgtttttgcgtgtggcgcagaaagcgcaaagagaagcagagcgagacaagccccaaagagttcctgaccatctacgaggacgtgaaggatctgaaaacccggcggaaccacgaacaagagcagacctttcctggcggcggaagcaccatctacagcatgatccagagccagagcagcgcccctacaagccaagagccagcctacacactgtactccctgatccagcctagcagaaagagcggcagccggaagagaaatcacagccccagcttcaacagcacgatctacgaagtgatcggaaagtcccagcctaaggctcagaaccccgccagactgagccggaaagagctggaaaacttcgacgtgtacagcagggccaagcgatctggatctggagcaacaaacttctcactactcaaacaagcaggtgacgtggaggagaatcccgggcctactagtatggactggatttggcgcatccttttccttgtcggcgctgctaccggcgcgcattccgggcccgaagtgcaactggttgaatccggtggcggcctggtgcaagcaggcggatctctcagacttagctgtgccgcctccggcagaaccttcacaatgggatggtttaggcaggctccagggaaagagagagagttcgtcgccgccatctctctgtctcccacactggcctactacgccgactctgtgaaaggccggttcaccatctccagagataatgccaagaacaccgtggtgctgcaaatgaactctctgaaacccgaggatacagccctgtactattgtgccgctgaccggaagtccgtgatgagcatcagacccgattactggggacagggcacacaagtcacagtgtcctctggatccggcggcggaggatctggcggaggcggatctgggggcggaggctctttcgaacaagttcagcttcaacagcctggcgctgagctggtcaaacctggcgcttctgtgaagatgagctgcaaagccagcggctacgccttcagcagctactggatcaactggatgaagcagaaacccggccagggactcgaatggatcggccaaatctatcccggcgacggcgacaccaactacaacggcaagttcaagggcagagccacactgaccgccgatacctctagcagcacagcctacatgcagctgagcagcctgaccagcgaagatagcgccgtgtacttctgtgcccggtccatcacaacagtcgtgggctgcgctatggactattggggccagggaacaagcgtgaccgtgtctagtacgcgtgcctctacaaagggaccctccgtgtttcctctggctcccagcagcaagtctacaagcggaggaacagccgctctgggctgcctggtcaaggattactttcccgagcctgtgaccgtgtcctggaatagcggagcactgacaagcggcgtgcacacctttccagccgtgctgcaaagcagcggcctgtactctctgagcagcgtggtcacagtgcctagctctagcctgggcacccagacctacatctgcaatgtgaaccacaagcctagcaacaccaaggtggacaagagagtggaacccaagagctgtggtaccaaaggatgccagggaagcgccgaccatgtggtgtcaatttctggcgtgcccctgcaactccagccaaactctattcagaccaaagtcgatagcattgcctggaaaaaattgctgccctctcagaacgggtttcaccacattctcaaatgggaaaatggctctctgccctccaacacctccaacgatcggtttagctttatcgtcaagaatctgtccctgctcatcaaagcagcccagcagcaagactccggcctgtattgcctcgaagtcacctccatctccgggaaagtgcagacagctacattccaagtgttcgtctttgataaggtcgagaagcctagactccaaggacaggggaagattctggacagaggacggtgtcaggtggcactgtcttgccttgtcagccgcgacggcaatgtgtcttatgcttggtatcggggctccaagctgattcaaaccgctgggaatctgacatacctcgatgaagaggttgacatcaatgggacgcacacgtatacttgcaatgtctccaatcctgtcagctgggagtctcataccctgaacctgacacaggattgtcaaaatgcacatcaagagttccggttttggccgtttcttgtgattatcgtgattctgtctgccctcttcctcggaactctggcttgcttctgtgtctggcggcgcaaacggaaagagaaacagtctgagacttccccgaaagagtttctcacgatatacgaagatgtcaaggacctcaagacccgccgcaaccatgagcaagaacagacattcccaggcggaggctccacaatctactccatgattcagtcccagtctagcgccccaacctctcaagagcctgcttataccctgtacagtctgattcagccctccagaaagtccggctctcggaagaggaaccactctcctagcttcaactccaccatatatgaagtcattggcaagtctcagcccaaagcacagaatcctgccaggctgagcagaaaagaacttgagaatttcgacgtctactcccgcgccaagagaagcggatctggcgtgaagcagaccctgaatttcgacctgctgaagctggctggcgacgtggaatccaacccaggcccttctagaggccatatgaccgagtacaagcccacggtgcgcctcgccacccgcgacgacgtccccagggccgtacgcaccctcgccgccgcgttcgccgactaccccgccacgcgccacaccgtcgatccggaccgccacatcgagcgggtcaccgagctgcaagaactcttcctcacgcgcgtcgggctcgacatcggcaaggtgtgggtcgcggacgacggcgccgcggtggcggtctggaccacgccggagagcgtcgaagcgggggcggtgttcgccgagatcggcccgcgcatggccgagttgagcggttcccggctggccgcgcagcaacagatggaaggcctcctggcgccgcaccggcccaaggagcccgcgtggttcctggccaccgtcggcgtctcgcccgaccaccagggcaagggtctgggcagcgccgtcgtgctccccggagtggaggcggccgagcgcgccggggtgcccgccttcctggagacctccgcgccccgcaacctccccttctacgagcggctcggcttcaccgtcaccgccgacgtcgaggtgcccgaaggaccgcgcacctggtgcatgacccgcaagcccggtgcctga

SEQ ID NO: 5714 - DNA, 4350 bp, Artificial Sequence
  Synthetic Polynucleotide
atggccttaccagtgaccgccttgctcctgccgctggccttgctgctccacgccgccaggccggaagtgcagctggttgaatctggcggaggactggttcaggctggcggatctctgagactgtcttgtgccgccagcggcagaacctttagcatgggctggtttagacaggcccctggcaaagagagagagttcgtcgccgccatcacatactctggcggcagcccttactacgccgactctgtgaagggcagattcaccatcagccgggacaacgccaagaacaccgtgtacctccagatgaacagcctgaagcctgaggacaccgccgtgtactactgcgccgccaatccaacatacggcagcgactggaacgccgagaattggggccagggaacccaagtgacagtgtctagcctcgagggacagcctaaggccaatcctaccgtgacactgttccctccaagcagcgaagaactccaggccaacaaggccacacttgtgtgcctgatctccgacttctaccctggggctgtgacagtggcttggaaggccgatggatctcctgtgaaagccggcgtggaaaccaccaagccatccaagcagagcaacaacaaatacgccgccagctcctacctgagcctgacacctgagcagtggaagtcccacagatcctacagctgccaagtgacccacgaaggcagcaccgtggaaaagacagtggcccctacagagtgcagcggatccaagggctgtcagggctctgccgatcacgtggtgtctatcagcggagtgcctctccagctccagcctaacagcatccagaccaaggtggactctatcgcctggaagaagctgctgcccagccagaatggcttccaccacatcctgaagtgggagaacggcagcctgcctagcaacaccagcaacgacagattcagcttcatcgtgaagaacctgagcctgctgattaaggccgctcagcagcaggatagcggcctgtactgtctggaagtgaccagcatcagcggcaaggtgcagaccgccacctttcaggtgttcgtgttcgacaaggtggaaaagccccggctgcaaggccagggcaagatccttgatagaggcagatgccaggtggccctgagctgtctggtttccagagatggcaacgtgtcctacgcctggtacagaggcagcaagctgatccagacagccggcaacctgacctacctggacgaggaagtggacatcaacggcacccacacctacacctgtaatgtgtctaaccccgtgtcctgggagagccacacactgaatctgacccaggactgccagaacgcccaccaagagttcagattctggcccttcctggtcatcatcgtgatcctgagcgccctgttcctgggcaccctggcctgtttttgcgtgtggcgcagaaagcgcaaagagaagcagagcgagacaagccccaaagagttcctgaccatctacgaggacgtgaaggatctgaaaacccggcggaaccacgaacaagagcagacctttcctggcggcggaagcaccatctacagcatgatccagagccagagcagcgcccctacaagccaagagccagcctacacactgtactccctgatccagcctagcagaaagagcggcagccggaagagaaatcacagccccagcttcaacagcacgatctacgaagtgatcggaaagtcccagcctaaggctcagaaccccgccagactgagccggaaagagctggaaaacttcgacgtgtacagcagggccaagcgatctggatctggagcaacaaacttctcactactcaaacaagcaggtgacgtggaggagaatcccgggcctactagtatggactggatttggcgcatccttttccttgtcggcgctgctaccggcgcgcattccgggcccgaagtgcaactggttgaatccggtggcggcctggtgcaagcaggcggatctctcagacttagctgtgccgcctccggcagaaccttcacaatgggatggtttaggcaggctccagggaaagagagagagttcgtcgccgccatctctctgtctcccacactggcctactacgccgactctgtgaaaggccggttcaccatctccagagataatgccaagaacaccgtggtgctgcaaatgaactctctgaaacccgaggatacagccctgtactattgtgccgctgaccggaagtccgtgatgagcatcagacccgattactggggacagggcacacaagtcacagtgtcctctacgcgtgcctctacaaagggaccctccgtgtttcctctggctcccagcagcaagtctacaagcggaggaacagccgctctgggctgcctggtcaaggattactttcccgagcctgtgaccgtgtcctggaatagcggagcactgacaagcggcgtgcacacctttccagccgtgctgcaaagcagcggcctgtactctctgagcagcgtggtcacagtgcctagctctagcctgggcacccagacctacatctgcaatgtgaaccacaagcctagcaacaccaaggtggacaagagagtggaacccaagagctgtggtaccaaaggatgccagggaagcgccgaccatgtggtgtcaatttctggcgtgcccctgcaactccagccaaactctattcagaccaaagtcgatagcattgcctggaaaaaattgctgccctctcagaacgggtttcaccacattctcaaatgggaaaatggctctctgccctccaacacctccaacgatcggtttagctttatcgtcaagaatctgtccctgctcatcaaagcagcccagcagcaagactccggcctgtattgcctcgaagtcacctccatctccgggaaagtgcagacagctacattccaagtgttcgtctttgataaggtcgagaagcctagactccaaggacaggggaagattctggacagaggacggtgtcaggtggcactgtcttgccttgtcagccgcgacggcaatgtgtcttatgcttggtatcggggctccaagctgattcaaaccgctgggaatctgacatacctcgatgaagaggttgacatcaatgggacgcacacgtatacttgcaatgtctccaatcctgtcagctgggagtctcataccctgaacctgacacaggattgtcaaaatgcacatcaagagttccggttttggccgtttcttgtgattatcgtgattctgtctgccctcttcctcggaactctggcttgcttctgtgtctggcggcgcaaacggaaagagaaacagtctgagacttccccgaaagagtttctcacgatatacgaagatgtcaaggacctcaagacccgccgcaaccatgagcaagaacagacattcccaggcggaggctccacaatctactccatgattcagtcccagtctagcgccccaacctctcaagagcctgcttataccctgtacagtctgattcagccctccagaaagtccggctctcggaagaggaaccactctcctagcttcaactccaccatatatgaagtcattggcaagtctcagcccaaagcacagaatcctgccaggctgagcagaaaagaacttgagaatttcgacgtctactcccgcgccaagagaagcggatctggcgtgaagcagaccctgaatttcgacctgctgaagctggctggcgacgtggaatccaacccaggcccttctagaggccatatgaccgagtacaagcccacggtgcgcctcgccacccgcgacgacgtccccagggccgtacgcaccctcgccgccgcgttcgccgactaccccgccacgcgccacaccgtcgatccggaccgccacatcgagcgggtcaccgagctgcaagaactcttcctcacgcgcgtcgggctcgacatcggcaaggtgtgggtcgcggacgacggcgccgcggtggcggtctggaccacgccggagagcgtcgaagcgggggcggtgttcgccgagatcggcccgcgcatggccgagttgagcggttcccggctggccgcgcagcaacagatggaaggcctcctggcgccgcaccggcccaaggagcccgcgtggttcctggccaccgtcggcgtctcgcccgaccaccagggcaagggtctgggcagcgccgtcgtgctccccggagtggaggcggccgagcgcgccggggtgcccgccttcctggagacctccgcgccccgcaacctccccttctacgagcggctcggcttcaccgtcaccgccgacgtcgaggtgcccgaaggaccgcgcacctggtgcatgacccgcaagcccggtgcctga

SEQ ID NO: 5715 - DNA, 4374 bp, Artificial Sequence
  Synthetic Polynucleotide
atggccttaccagtgaccgccttgctcctgccgctggccttgctgctccacgccgccaggccggacatccagatgacacagagccctagcagcctgtctgccagcgtgggagacagagtgaccatcacatgcaaggccagcgaccacatcaacaactggctggcctggtatcagcagaagcctggacaggcccctaagctgctgatctacggcgctaccacactggaaacaggcgtgcccagcagattttctggcagcggctctggcaccgactacaccctgacaatatccagcctccagcctgaggacttcgccacctactactgtcagcagagctggaacaccccttggacattcggccagggcaccaagctggaaatcaagagactcgaggacctgaagaacgtgttcccacctgaggtggccgtgttcgagcctagcgaggccgagatcagccacacccagaaagccaccctcgtgtgcctggctaccggcttctaccccgaccatgtggaactgtcttggtgggtcaacggcaaagaggtgcacagcggcgtgtctaccgacccccagccactgaaagaacagcccgccctgaacgacagccggtactgcctgagcagcagactgagagtgtccgccaccttctggcagaacccccggaaccacttcagatgccaggtgcagttctacggcctgagcgagaacgacgagtggacccaggacagagccaagcccgtgacccagatcgtgtctgccgaagcctggggcagagccgattgcggatccaagggctgtcagggctctgccgatcacgtggtgtctatcagcggagtgcctctccagctccagcctaacagcatccagaccaaggtggactctatcgcctggaagaagctgctgcccagccagaatggcttccaccacatcctgaagtgggagaacggcagcctgcctagcaacaccagcaacgacagattcagcttcatcgtgaagaacctgagcctgctgattaaggccgctcagcagcaggatagcggcctgtactgtctggaagtgaccagcatcagcggcaaggtgcagaccgccacctttcaggtgttcgtgttcgacaaggtggaaaagccccggctgcaaggccagggcaagatccttgatagaggcagatgccaggtggccctgagctgtctggtttccagagatggcaacgtgtcctacgcctggtacagaggcagcaagctgatccagacagccggcaacctgacctacctggacgaggaagtggacatcaacggcacccacacctacacctgtaatgtgtctaaccccgtgtcctgggagagccacacactgaatctgacccaggactgccagaacgcccaccaagagttcagattctggcccttcctggtcatcatcgtgatcctgagcgccctgttcctgggcaccctggcctgtttttgcgtgtggcgcagaaagcgcaaagagaagcagagcgagacaagccccaaagagttcctgaccatctacgaggacgtgaaggatctgaaaacccggcggaaccacgaacaagagcagacctttcctggcggcggaagcaccatctacagcatgatccagagccagagcagcgcccctacaagccaagagccagcctacacactgtactccctgatccagcctagcagaaagagcggcagccggaagagaaatcacagccccagcttcaacagcacgatctacgaagtgatcggaaagtcccagcctaaggctcagaaccccgccagactgagccggaaagagctggaaaacttcgacgtgtacagcagggccaagcgatctggatctggagcaacaaacttctcactactcaaacaagcaggtgacgtggaggagaatcccgggcctactagtatggactggatttggcgcatccttttccttgtcggcgctgctaccggcgcgcattccttcgaacaagttcagcttcaacagcctggcgctgagctggtcaaacctggcgcttctgtgaagatgagctgcaaagccagcggctacgccttcagcagctactggatcaactggatgaagcagaaacccggccagggactcgaatggatcggccaaatctatcccggcgacggcgacaccaactacaacggcaagttcaagggcagagccacactgaccgccgatacctctagcagcacagcctacatgcagctgagcagcctgaccagcgaagatagcgccgtgtacttctgtgcccggtccatcacaacagtcgtgggctgcgctatggactattggggccagggaacaagcgtgaccgtgtctagtacgcgtatccagaaccctgatcctgccgtgtaccagctgcgggatagcaagagcagcgacaagagcgtgtgtctgttcaccgacttcgacagccagaccaacgtgtcccagagcaaggactccgacgtgtacatcaccgataagaccgtgctggacatgcggagcatggacttcaagagcaactccgccgtggcctggtccaacaagtccgatttcgcctgcgccaacgccttcaacaacagcattatccccgaggacacattcttcccaagccccgagagcagctgcggtaccaaaggatgccagggaagcgccgaccatgtggtgtcaatttctggcgtgcccctgcaactccagccaaactctattcagaccaaagtcgatagcattgcctggaaaaaattgctgccctctcagaacgggtttcaccacattctcaaatgggaaaatggctctctgccctccaacacctccaacgatcggtttagctttatcgtcaagaatctgtccctgctcatcaaagcagcccagcagcaagactccggcctgtattgcctcgaagtcacctccatctccgggaaagtgcagacagctacattccaagtgttcgtctttgataaggtcgagaagcctagactccaaggacaggggaagattctggacagaggacggtgtcaggtggcactgtcttgccttgtcagccgcgacggcaatgtgtcttatgcttggtatcggggctccaagctgattcaaaccgctgggaatctgacatacctcgatgaagaggttgacatcaatgggacgcacacgtatacttgcaatgtctccaatcctgtcagctgggagtctcataccctgaacctgacacaggattgtcaaaatgcacatcaagagttccggttttggccgtttcttgtgattatcgtgattctgtctgccctcttcctcggaactctggcttgcttctgtgtctggcggcgcaaacggaaagagaaacagtctgagacttccccgaaagagtttctcacgatatacgaagatgtcaaggacctcaagacccgccgcaaccatgagcaagaacagacattcccaggcggaggctccacaatctactccatgattcagtcccagtctagcgccccaacctctcaagagcctgcttataccctgtacagtctgattcagccctccagaaagtccggctctcggaagaggaaccactctcctagcttcaactccaccatatatgaagtcattggcaagtctcagcccaaagcacagaatcctgccaggctgagcagaaaagaacttgagaatttcgacgtctactcccgcgccaagagaagcggatctggcgtgaagcagaccctgaatttcgacctgctgaagctggctggcgacgtggaatccaacccaggcccttctagaggccatatgaccgagtacaagcccacggtgcgcctcgccacccgcgacgacgtccccagggccgtacgcaccctcgccgccgcgttcgccgactaccccgccacgcgccacaccgtcgatccggaccgccacatcgagcgggtcaccgagctgcaagaactcttcctcacgcgcgtcgggctcgacatcggcaaggtgtgggtcgcggacgacggcgccgcggtggcggtctggaccacgccggagagcgtcgaagcgggggcggtgttcgccgagatcggcccgcgcatggccgagttgagcggttcccggctggccgcgcagcaacagatggaaggcctcctggcgccgcaccggcccaaggagcccgcgtggttcctggccaccgtcggcgtctcgcccgaccaccagggcaagggtctgggcagcgccgtcgtgctccccggagtggaggcggccgagcgcgccggggtgcccgccttcctggagacctccgcgccccgcaacctccccttctacgagcggctcggcttcaccgtcaccgccgacgtcgaggtgcccgaaggaccgcgcacctggtgcatgacccgcaagcccggtgcctga

SEQ ID NO: 5716 - DNA, 4785 bp, Artificial Sequence
  Synthetic Polynucleotide
atggccttaccagtgaccgccttgctcctgccgctggccttgctgctccacgccgccaggccggaagtgcagctggttgaatctggcggaggactggttcaggctggcggatctctgagactgtcttgtgccgccagcggcagaacctttagcatgggctggtttagacaggcccctggcaaagagagagagttcgtcgccgccatcacatactctggcggcagcccttactacgccgactctgtgaagggcagattcaccatcagccgggacaacgccaagaacaccgtgtacctccagatgaacagcctgaagcctgaggacaccgccgtgtactactgcgccgccaatccaacatacggcagcgactggaacgccgagaattggggccagggaacccaagtgacagtgtctagcggtaccggcggaggcggatctggcggcggaggtagcggtggcggaggatctgaattcgacatccagatgacacagagccctagcagcctgtctgccagcgtgggagacagagtgaccatcacatgcaaggccagcgaccacatcaacaactggctggcctggtatcagcagaagcctggacaggcccctaagctgctgatctacggcgctaccacactggaaacaggcgtgcccagcagattttctggcagcggctctggcaccgactacaccctgacaatatccagcctccagcctgaggacttcgccacctactactgtcagcagagctggaacaccccttggacattcggccagggcaccaagctggaaatcaagagactcgaggacctgaagaacgtgttcccacctgaggtggccgtgttcgagcctagcgaggccgagatcagccacacccagaaagccaccctcgtgtgcctggctaccggcttctaccccgaccatgtggaactgtcttggtgggtcaacggcaaagaggtgcacagcggcgtgtctaccgacccccagccactgaaagaacagcccgccctgaacgacagccggtactgcctgagcagcagactgagagtgtccgccaccttctggcagaacccccggaaccacttcagatgccaggtgcagttctacggcctgagcgagaacgacgagtggacccaggacagagccaagcccgtgacccagatcgtgtctgccgaagcctggggcagagccgattgcggatccaagggctgtcagggctctgccgatcacgtggtgtctatcagcggagtgcctctccagctccagcctaacagcatccagaccaaggtggactctatcgcctggaagaagctgctgcccagccagaatggcttccaccacatcctgaagtgggagaacggcagcctgcctagcaacaccagcaacgacagattcagcttcatcgtgaagaacctgagcctgctgattaaggccgctcagcagcaggatagcggcctgtactgtctggaagtgaccagcatcagcggcaaggtgcagaccgccacctttcaggtgttcgtgttcgacaaggtggaaaagccccggctgcaaggccagggcaagatccttgatagaggcagatgccaggtggccctgagctgtctggtttccagagatggcaacgtgtcctacgcctggtacagaggcagcaagctgatccagacagccggcaacctgacctacctggacgaggaagtggacatcaacggcacccacacctacacctgtaatgtgtctaaccccgtgtcctgggagagccacacactgaatctgacccaggactgccagaacgcccaccaagagttcagattctggcccttcctggtcatcatcgtgatcctgagcgccctgttcctgggcaccctggcctgtttttgcgtgtggcgcagaaagcgcaaagagaagcagagcgagacaagccccaaagagttcctgaccatctacgaggacgtgaaggatctgaaaacccggcggaaccacgaacaagagcagacctttcctggcggcggaagcaccatctacagcatgatccagagccagagcagcgcccctacaagccaagagccagcctacacactgtactccctgatccagcctagcagaaagagcggcagccggaagagaaatcacagccccagcttcaacagcacgatctacgaagtgatcggaaagtcccagcctaaggctcagaaccccgccagactgagccggaaagagctggaaaacttcgacgtgtacagcagggccaagcgatctggatctggagcaacaaacttctcactactcaaacaagcaggtgacgtggaggagaatcccgggcctactagtatggactggatttggcgcatccttttccttgtcggcgctgctaccggcgcgcattccttcgaacaagttcagcttcaacagcctggcgctgagctggtcaaacctggcgcttctgtgaagatgagctgcaaagccagcggctacgccttcagcagctactggatcaactggatgaagcagaaacccggccagggactcgaatggatcggccaaatctatcccggcgacggcgacaccaactacaacggcaagttcaagggcagagccacactgaccgccgatacctctagcagcacagcctacatgcagctgagcagcctgaccagcgaagatagcgccgtgtacttctgtgcccggtccatcacaacagtcgtgggctgcgctatggactattggggccagggaacaagcgtgaccgtgtctagtacgcgtatccagaaccctgatcctgccgtgtaccagctgcgggatagcaagagcagcgacaagagcgtgtgtctgttcaccgacttcgacagccagaccaacgtgtcccagagcaaggactccgacgtgtacatcaccgataagaccgtgctggacatgcggagcatggacttcaagagcaactccgccgtggcctggtccaacaagtccgatttcgcctgcgccaacgccttcaacaacagcattatccccgaggacacattcttcccaagccccgagagcagctgcggtaccaaaggatgccagggaagcgccgaccatgtggtgtcaatttctggcgtgcccctgcaactccagccaaactctattcagaccaaagtcgatagcattgcctggaaaaaattgctgccctctcagaacgggtttcaccacattctcaaatgggaaaatggctctctgccctccaacacctccaacgatcggtttagctttatcgtcaagaatctgtccctgctcatcaaagcagcccagcagcaagactccggcctgtattgcctcgaagtcacctccatctccgggaaagtgcagacagctacattccaagtgttcgtctttgataaggtcgagaagcctagactccaaggacaggggaagattctggacagaggacggtgtcaggtggcactgtcttgccttgtcagccgcgacggcaatgtgtcttatgcttggtatcggggctccaagctgattcaaaccgctgggaatctgacatacctcgatgaagaggttgacatcaatgggacgcacacgtatacttgcaatgtctccaatcctgtcagctgggagtctcataccctgaacctgacacaggattgtcaaaatgcacatcaagagttccggttttggccgtttcttgtgattatcgtgattctgtctgccctcttcctcggaactctggcttgcttctgtgtctggcggcgcaaacggaaagagaaacagtctgagacttccccgaaagagtttctcacgatatacgaagatgtcaaggacctcaagacccgccgcaaccatgagcaagaacagacattcccaggcggaggctccacaatctactccatgattcagtcccagtctagcgccccaacctctcaagagcctgcttataccctgtacagtctgattcagccctccagaaagtccggctctcggaagaggaaccactctcctagcttcaactccaccatatatgaagtcattggcaagtctcagcccaaagcacagaatcctgccaggctgagcagaaaagaacttgagaatttcgacgtctactcccgcgccaagagaagcggatctggcgtgaagcagaccctgaatttcgacctgctgaagctggctggcgacgtggaatccaacccaggcccttctagaggccatatgaccgagtacaagcccacggtgcgcctcgccacccgcgacgacgtccccagggccgtacgcaccctcgccgccgcgttcgccgactaccccgccacgcgccacaccgtcgatccggaccgccacatcgagcgggtcaccgagctgcaagaactcttcctcacgcgcgtcgggctcgacatcggcaaggtgtgggtcgcggacgacggcgccgcggtggcggtctggaccacgccggagagcgtcgaagcgggggcggtgttcgccgagatcggcccgcgcatggccgagttgagcggttcccggctggccgcgcagcaacagatggaaggcctcctggcgccgcaccggcccaaggagcccgcgtggttcctggccaccgtcggcgtctcgcccgaccaccagggcaagggtctgggcagcgccgtcgtgctccccggagtggaggcggccgagcgcgccggggtgcccgccttcctggagacctccgcgccccgcaacctccccttctacgagcggctcggcttcaccgtcaccgccgacgtcgaggtgcccgaaggaccgcgcacctggtgcatgacccgcaagcccggtgcctga

SEQ ID NO: 5717 - DNA, 5196 bp, Artificial Sequence
  Synthetic Polynucleotide
atggccttaccagtgaccgccttgctcctgccgctggccttgctgctccacgccgccaggccggaagtgcagctggttgaatctggcggaggactggttcaggctggcggatctctgagactgtcttgtgccgccagcggcagaacctttagcatgggctggtttagacaggcccctggcaaagagagagagttcgtcgccgccatcacatactctggcggcagcccttactacgccgactctgtgaagggcagattcaccatcagccgggacaacgccaagaacaccgtgtacctccagatgaacagcctgaagcctgaggacaccgccgtgtactactgcgccgccaatccaacatacggcagcgactggaacgccgagaattggggccagggaacccaagtgacagtgtctagcggtaccggcggaggcggatctggcggcggaggtagcggtggcggaggatctgaattcgacatccagatgacacagagccctagcagcctgtctgccagcgtgggagacagagtgaccatcacatgcaaggccagcgaccacatcaacaactggctggcctggtatcagcagaagcctggacaggcccctaagctgctgatctacggcgctaccacactggaaacaggcgtgcccagcagattttctggcagcggctctggcaccgactacaccctgacaatatccagcctccagcctgaggacttcgccacctactactgtcagcagagctggaacaccccttggacattcggccagggcaccaagctggaaatcaagagactcgaggacctgaagaacgtgttcccacctgaggtggccgtgttcgagcctagcgaggccgagatcagccacacccagaaagccaccctcgtgtgcctggctaccggcttctaccccgaccatgtggaactgtcttggtgggtcaacggcaaagaggtgcacagcggcgtgtctaccgacccccagccactgaaagaacagcccgccctgaacgacagccggtactgcctgagcagcagactgagagtgtccgccaccttctggcagaacccccggaaccacttcagatgccaggtgcagttctacggcctgagcgagaacgacgagtggacccaggacagagccaagcccgtgacccagatcgtgtctgccgaagcctggggcagagccgattgcggatccaagggctgtcagggctctgccgatcacgtggtgtctatcagcggagtgcctctccagctccagcctaacagcatccagaccaaggtggactctatcgcctggaagaagctgctgcccagccagaatggcttccaccacatcctgaagtgggagaacggcagcctgcctagcaacaccagcaacgacagattcagcttcatcgtgaagaacctgagcctgctgattaaggccgctcagcagcaggatagcggcctgtactgtctggaagtgaccagcatcagcggcaaggtgcagaccgccacctttcaggtgttcgtgttcgacaaggtggaaaagccccggctgcaaggccagggcaagatccttgatagaggcagatgccaggtggccctgagctgtctggtttccagagatggcaacgtgtcctacgcctggtacagaggcagcaagctgatccagacagccggcaacctgacctacctggacgaggaagtggacatcaacggcacccacacctacacctgtaatgtgtctaaccccgtgtcctgggagagccacacactgaatctgacccaggactgccagaacgcccaccaagagttcagattctggcccttcctggtcatcatcgtgatcctgagcgccctgttcctgggcaccctggcctgtttttgcgtgtggcgcagaaagcgcaaagagaagcagagcgagacaagccccaaagagttcctgaccatctacgaggacgtgaaggatctgaaaacccggcggaaccacgaacaagagcagacctttcctggcggcggaagcaccatctacagcatgatccagagccagagcagcgcccctacaagccaagagccagcctacacactgtactccctgatccagcctagcagaaagagcggcagccggaagagaaatcacagccccagcttcaacagcacgatctacgaagtgatcggaaagtcccagcctaaggctcagaaccccgccagactgagccggaaagagctggaaaacttcgacgtgtacagcagggccaagcgatctggatctggagcaacaaacttctcactactcaaacaagcaggtgacgtggaggagaatcccgggcctactagtatggactggatttggcgcatccttttccttgtcggcgctgctaccggcgcgcattccgggcccgaagtgcaactggttgaatccggtggcggcctggtgcaagcaggcggatctctcagacttagctgtgccgcctccggcagaaccttcacaatgggatggtttaggcaggctccagggaaagagagagagttcgtcgccgccatctctctgtctcccacactggcctactacgccgactctgtgaaaggccggttcaccatctccagagataatgccaagaacaccgtggtgctgcaaatgaactctctgaaacccgaggatacagccctgtactattgtgccgctgaccggaagtccgtgatgagcatcagacccgattactggggacagggcacacaagtcacagtgtcctctggatccggcggcggaggatctggcggaggcggatctgggggcggaggctctttcgaacaagttcagcttcaacagcctggcgctgagctggtcaaacctggcgcttctgtgaagatgagctgcaaagccagcggctacgccttcagcagctactggatcaactggatgaagcagaaacccggccagggactcgaatggatcggccaaatctatcccggcgacggcgacaccaactacaacggcaagttcaagggcagagccacactgaccgccgatacctctagcagcacagcctacatgcagctgagcagcctgaccagcgaagatagcgccgtgtacttctgtgcccggtccatcacaacagtcgtgggctgcgctatggactattggggccagggaacaagcgtgaccgtgtctagtacgcgtatccagaaccctgatcctgccgtgtaccagctgcgggatagcaagagcagcgacaagagcgtgtgtctgttcaccgacttcgacagccagaccaacgtgtcccagagcaaggactccgacgtgtacatcaccgataagaccgtgctggacatgcggagcatggacttcaagagcaactccgccgtggcctggtccaacaagtccgatttcgcctgcgccaacgccttcaacaacagcattatccccgaggacacattcttcccaagccccgagagcagctgcggtaccaaaggatgccagggaagcgccgaccatgtggtgtcaatttctggcgtgcccctgcaactccagccaaactctattcagaccaaagtcgatagcattgcctggaaaaaattgctgccctctcagaacgggtttcaccacattctcaaatgggaaaatggctctctgccctccaacacctccaacgatcggtttagctttatcgtcaagaatctgtccctgctcatcaaagcagcccagcagcaagactccggcctgtattgcctcgaagtcacctccatctccgggaaagtgcagacagctacattccaagtgttcgtctttgataaggtcgagaagcctagactccaaggacaggggaagattctggacagaggacggtgtcaggtggcactgtcttgccttgtcagccgcgacggcaatgtgtcttatgcttggtatcggggctccaagctgattcaaaccgctgggaatctgacatacctcgatgaagaggttgacatcaatgggacgcacacgtatacttgcaatgtctccaatcctgtcagctgggagtctcataccctgaacctgacacaggattgtcaaaatgcacatcaagagttccggttttggccgtttcttgtgattatcgtgattctgtctgccctcttcctcggaactctggcttgcttctgtgtctggcggcgcaaacggaaagagaaacagtctgagacttccccgaaagagtttctcacgatatacgaagatgtcaaggacctcaagacccgccgcaaccatgagcaagaacagacattcccaggcggaggctccacaatctactccatgattcagtcccagtctagcgccccaacctctcaagagcctgcttataccctgtacagtctgattcagccctccagaaagtccggctctcggaagaggaaccactctcctagcttcaactccaccatatatgaagtcattggcaagtctcagcccaaagcacagaatcctgccaggctgagcagaaaagaacttgagaatttcgacgtctactcccgcgccaagagaagcggatctggcgtgaagcagaccctgaatttcgacctgctgaagctggctggcgacgtggaatccaacccaggcccttctagaggccatatgaccgagtacaagcccacggtgcgcctcgccacccgcgacgacgtccccagggccgtacgcaccctcgccgccgcgttcgccgactaccccgccacgcgccacaccgtcgatccggaccgccacatcgagcgggtcaccgagctgcaagaactcttcctcacgcgcgtcgggctcgacatcggcaaggtgtgggtcgcggacgacggcgccgcggtggcggtctggaccacgccggagagcgtcgaagcgggggcggtgttcgccgagatcggcccgcgcatggccgagttgagcggttcccggctggccgcgcagcaacagatggaaggcctcctggcgccgcaccggcccaaggagcccgcgtggttcctggccaccgtcggcgtctcgcccgaccaccagggcaagggtctgggcagcgccgtcgtgctccccggagtggaggcggccgagcgcgccggggtgcccgccttcctggagacctccgcgccccgcaacctccccttctacgagcggctcggcttcaccgtcaccgccgacgtcgaggtgcccgaaggaccgcgcacctggtgcatgacccgcaagcccggtgcctga

SEQ ID NO: 5718 - DNA, 4395 bp, Artificial Sequence
  Synthetic Polynucleotide
atggccttaccagtgaccgccttgctcctgccgctggccttgctgctccacgccgccaggccggaagtgcagctggttgaatctggcggaggactggttcaggctggcggatctctgagactgtcttgtgccgccagcggcagaacctttagcatgggctggtttagacaggcccctggcaaagagagagagttcgtcgccgccatcacatactctggcggcagcccttactacgccgactctgtgaagggcagattcaccatcagccgggacaacgccaagaacaccgtgtacctccagatgaacagcctgaagcctgaggacaccgccgtgtactactgcgccgccaatccaacatacggcagcgactggaacgccgagaattggggccagggaacccaagtgacagtgtctagcctcgaggacctgaagaacgtgttcccacctgaggtggccgtgttcgagcctagcgaggccgagatcagccacacccagaaagccaccctcgtgtgcctggctaccggcttctaccccgaccatgtggaactgtcttggtgggtcaacggcaaagaggtgcacagcggcgtgtctaccgacccccagccactgaaagaacagcccgccctgaacgacagccggtactgcctgagcagcagactgagagtgtccgccaccttctggcagaacccccggaaccacttcagatgccaggtgcagttctacggcctgagcgagaacgacgagtggacccaggacagagccaagcccgtgacccagatcgtgtctgccgaagcctggggcagagccgattgcggatccaagggctgtcagggctctgccgatcacgtggtgtctatcagcggagtgcctctccagctccagcctaacagcatccagaccaaggtggactctatcgcctggaagaagctgctgcccagccagaatggcttccaccacatcctgaagtgggagaacggcagcctgcctagcaacaccagcaacgacagattcagcttcatcgtgaagaacctgagcctgctgattaaggccgctcagcagcaggatagcggcctgtactgtctggaagtgaccagcatcagcggcaaggtgcagaccgccacctttcaggtgttcgtgttcgacaaggtggaaaagccccggctgcaaggccagggcaagatccttgatagaggcagatgccaggtggccctgagctgtctggtttccagagatggcaacgtgtcctacgcctggtacagaggcagcaagctgatccagacagccggcaacctgacctacctggacgaggaagtggacatcaacggcacccacacctacacctgtaatgtgtctaaccccgtgtcctgggagagccacacactgaatctgacccaggactgccagaacgcccaccaagagttcagattctggcccttcctggtcatcatcgtgatcctgagcgccctgttcctgggcaccctggcctgtttttgcgtgtggcgcagaaagcgcaaagagaagcagagcgagacaagccccaaagagttcctgaccatctacgaggacgtgaaggatctgaaaacccggcggaaccacgaacaagagcagacctttcctggcggcggaagcaccatctacagcatgatccagagccagagcagcgcccctacaagccaagagccagcctacacactgtactccctgatccagcctagcagaaagagcggcagccggaagagaaatcacagccccagcttcaacagcacgatctacgaagtgatcggaaagtcccagcctaaggctcagaaccccgccagactgagccggaaagagctggaaaacttcgacgtgtacagcagggccaagcgatctggatctggagcaacaaacttctcactactcaaacaagcaggtgacgtggaggagaatcccgggcctactagtatggactggatttggcgcatccttttccttgtcggcgctgctaccggcgcgcattccgggcccgaagtgcaactggttgaatccggtggcggcctggtgcaagcaggcggatctctcagacttagctgtgccgcctccggcagaaccttcacaatgggatggtttaggcaggctccagggaaagagagagagttcgtcgccgccatctctctgtctcccacactggcctactacgccgactctgtgaaaggccggttcaccatctccagagataatgccaagaacaccgtggtgctgcaaatgaactctctgaaacccgaggatacagccctgtactattgtgccgctgaccggaagtccgtgatgagcatcagacccgattactggggacagggcacacaagtcacagtgtcctctacgcgtatccagaaccctgatcctgccgtgtaccagctgcgggatagcaagagcagcgacaagagcgtgtgtctgttcaccgacttcgacagccagaccaacgtgtcccagagcaaggactccgacgtgtacatcaccgataagaccgtgctggacatgcggagcatggacttcaagagcaactccgccgtggcctggtccaacaagtccgatttcgcctgcgccaacgccttcaacaacagcattatccccgaggacacattcttcccaagccccgagagcagctgcggtaccaaaggatgccagggaagcgccgaccatgtggtgtcaatttctggcgtgcccctgcaactccagccaaactctattcagaccaaagtcgatagcattgcctggaaaaaattgctgccctctcagaacgggtttcaccacattctcaaatgggaaaatggctctctgccctccaacacctccaacgatcggtttagctttatcgtcaagaatctgtccctgctcatcaaagcagcccagcagcaagactccggcctgtattgcctcgaagtcacctccatctccgggaaagtgcagacagctacattccaagtgttcgtctttgataaggtcgagaagcctagactccaaggacaggggaagattctggacagaggacggtgtcaggtggcactgtcttgccttgtcagccgcgacggcaatgtgtcttatgcttggtatcggggctccaagctgattcaaaccgctgggaatctgacatacctcgatgaagaggttgacatcaatgggacgcacacgtatacttgcaatgtctccaatcctgtcagctgggagtctcataccctgaacctgacacaggattgtcaaaatgcacatcaagagttccggttttggccgtttcttgtgattatcgtgattctgtctgccctcttcctcggaactctggcttgcttctgtgtctggcggcgcaaacggaaagagaaacagtctgagacttccccgaaagagtttctcacgatatacgaagatgtcaaggacctcaagacccgccgcaaccatgagcaagaacagacattcccaggcggaggctccacaatctactccatgattcagtcccagtctagcgccccaacctctcaagagcctgcttataccctgtacagtctgattcagccctccagaaagtccggctctcggaagaggaaccactctcctagcttcaactccaccatatatgaagtcattggcaagtctcagcccaaagcacagaatcctgccaggctgagcagaaaagaacttgagaatttcgacgtctactcccgcgccaagagaagcggatctggcgtgaagcagaccctgaatttcgacctgctgaagctggctggcgacgtggaatccaacccaggcccttctagaggccatatgaccgagtacaagcccacggtgcgcctcgccacccgcgacgacgtccccagggccgtacgcaccctcgccgccgcgttcgccgactaccccgccacgcgccacaccgtcgatccggaccgccacatcgagcgggtcaccgagctgcaagaactcttcctcacgcgcgtcgggctcgacatcggcaaggtgtgggtcgcggacgacggcgccgcggtggcggtctggaccacgccggagagcgtcgaagcgggggcggtgttcgccgagatcggcccgcgcatggccgagttgagcggttcccggctggccgcgcagcaacagatggaaggcctcctggcgccgcaccggcccaaggagcccgcgtggttcctggccaccgtcggcgtctcgcccgaccaccagggcaagggtctgggcagcgccgtcgtgctccccggagtggaggcggccgagcgcgccggggtgcccgccttcctggagacctccgcgccccgcaacctccccttctacgagcggctcggcttcaccgtcaccgccgacgtcgaggtgcccgaaggaccgcgcacctggtgcatgacccgcaagcccggtgcctga

SEQ ID NO: 5719 - DNA, 2226 bp, Artificial Sequence
  Synthetic Polynucleotide
atggccttaccagtgaccgccttgctcctgccgctggccttgctgctccacgccgccaggccggcatgcgaagtgcagctgcttgaaagtggcggcggactgattcagcctggcggatctctgagactgagctgtgccgccagcggcttcaccttttctagccacgccatgacctgggtccgacaggcacctggaaaagggcttgaatgggtgtccgccatcagcggctctggcgattacacacactacgccgacagcgtgaagggcagattcaccatcagcagagacaacagcaagaacaccgtgtacctccagatgaacagcctgagagccgaggacagcgccgtgtattattgcgccaaggatgaggatggcggcagcctgcttggacacagaggacaaggcaccctggtcaccgtttcttccggtaccggcggaggcggatctggcggcggaggtagcggtggcggaggatctgaattcggatctctcgagaagggctgtcagggctctgccgatcacgtggtgtctatcagcggagtgcctctccagctccagcctaacagcatccagaccaaggtggactctatcgcctggaagaagctgctgcccagccagaatggcttccaccacatcctgaagtgggagaacggcagcctgcctagcaacaccagcaacgacagattcagcttcatcgtgaagaacctgagcctgctgattaaggccgctcagcagcaggatagcggcctgtactgtctggaagtgaccagcatcagcggcaaggtgcagaccgccacctttcaggtgttcgtgttcgacaaggtggaaaagccccggctgcaaggccagggcaagatccttgatagaggcagatgccaggtggccctgagctgtctggtttccagagatggcaacgtgtcctacgcctggtacagaggcagcaagctgatccagacagccggcaacctgacctacctggacgaggaagtggacatcaacggcacccacacctacacctgtaatgtgtctaaccccgtgtcctgggagagccacacactgaatctgacccaggactgccagaacgcccaccaagagttcagattctggcccttcctggtcatcatcgtgatcctgagcgccctgttcctgggcaccctggcctgtttttgcgtgtggcgcagaaagcgcaaagagaagcagagcgagacaagccccaaagagttcctgaccatctacgaggacgtgaaggatctgaaaacccggcggaaccacgaacaagagcagacctttcctggcggcggaagcaccatctacagcatgatccagagccagagcagcgcccctacaagccaagagccagcctacacactgtactccctgatccagcctagcagaaagagcggcagccggaagagaaatcacagccccagcttcaacagcacgatctacgaagtgatcggaaagtcccagcctaaggctcagaaccccgccagactgagccggaaagagctggaaaacttcgacgtgtacagcagggccaagcgatctggatctggagcaacaaacttctcactactcaaacaagcaggtgacgtggaggagaatcccgggcctactagaggccatatgaccgagtacaagcccacggtgcgcctcgccacccgcgacgacgtccccagggccgtacgcaccctcgccgccgcgttcgccgactaccccgccacgcgccacaccgtcgatccggaccgccacatcgagcgggtcaccgagctgcaagaactcttcctcacgcgcgtcgggctcgacatcggcaaggtgtgggtcgcggacgacggcgccgcggtggcggtctggaccacgccggagagcgtcgaagcgggggcggtgttcgccgagatcggcccgcgcatggccgagttgagcggttcccggctggccgcgcagcaacagatggaaggcctcctggcgccgcaccggcccaaggagcccgcgtggttcctggccaccgtcggcgtctcgcccgaccaccagggcaagggtctgggcagcgccgtcgtgctccccggagtggaggcggccgagcgcgccggggtgcccgccttcctggagacctccgcgccccgcaacctccccttctacgagcggctcggcttcaccgtcaccgccgacgtcgaggtgcccgaaggaccgcgcacctggtgcatgacccgcaagcccggtgcctga

SEQ ID NO: 5720 - DNA, 1839 bp, Artificial Sequence; identical to SEQ ID NO: 5688
  Synthetic Polynucleotide

SEQ ID NO: 5721 - DNA, 1839 bp, Artificial Sequence; identical to SEQ ID NO: 5689
  Synthetic Polynucleotide

SEQ ID NO: 5722 - DNA, 1461 bp, Artificial Sequence; identical to SEQ ID NO: 5690
  Synthetic Polynucleotide

SEQ ID NO: 5723 - DNA, 1461 bp, Artificial Sequence; identical to SEQ ID NO: 5691
  Synthetic Polynucleotide

SEQ ID NO: 5724 - DNA, 1461 bp, Artificial Sequence; identical to SEQ ID NO: 5692
  Synthetic Polynucleotide

SEQ ID NO: 5725 - DNA, 1467 bp, Artificial Sequence; identical to SEQ ID NO: 5693
  Synthetic Polynucleotide

SEQ ID NO: 5726 - DNA, 1491 bp, Artificial Sequence; identical to SEQ ID NO: 5694
  Synthetic Polynucleotide

SEQ ID NO: 5727 - DNA, 1479 bp, Artificial Sequence; identical to SEQ ID NO: 5695
  Synthetic Polynucleotide

SEQ ID NO: 5728 - DNA, 1464 bp, Artificial Sequence; identical to SEQ ID NO: 5696
  Synthetic Polynucleotide

SEQ ID NO: 5729 - DNA, 1479 bp, Artificial Sequence; identical to SEQ ID NO: 5697
  Synthetic Polynucleotide

SEQ ID NO: 5730 - DNA, 1281 bp, Artificial Sequence; identical to SEQ ID NO: 5698
  Synthetic Polynucleotide

SEQ ID NO: 5731 - DNA, 1374 bp, Artificial Sequence; identical to SEQ ID NO: 5699
  Synthetic Polynucleotide

SEQ ID NO: 5732 - DNA, 1377 bp, Artificial Sequence; identical to SEQ ID NO: 5700
  Synthetic Polynucleotide

SEQ ID NO: 5733 - DNA, 2028 bp, Artificial Sequence; identical to SEQ ID NO: 5701
  Synthetic Polynucleotide

SEQ ID NO: 5734 - DNA, 1668 bp, Artificial Sequence; identical to SEQ ID NO: 5702
  Synthetic Polynucleotide

SEQ ID NO: 5735 - DNA, 1266 bp, Artificial Sequence; identical to SEQ ID NO: 5703
  Synthetic Polynucleotide

SEQ ID NO: 5736 - DNA, 1191 bp, Artificial Sequence; identical to SEQ ID NO: 5704
  Synthetic Polynucleotide

SEQ ID NO: 5737 - DNA, 1965 bp, Artificial Sequence; identical to SEQ ID NO: 5705
  Synthetic Polynucleotide

SEQ ID NO: 5738 - DNA, 1965 bp, Artificial Sequence; identical to SEQ ID NO: 5706
  Synthetic Polynucleotide

SEQ ID NO: 5739 - DNA, 3132 bp, Artificial Sequence
  Synthetic Polynucleotide
atggccttaccagtgaccgccttgctcctgccgctggccttgctgctccacgccgccaggccggacatccagatgacacagagccctagcagcctgtctgccagcgtgggagacagagtgaccatcacatgcaaggccagcgaccacatcaacaactggctggcctggtatcagcagaagcctggacaggcccctaagctgctgatctacggcgctaccacactggaaacaggcgtgcccagcagattttctggcagcggctctggcaccgactacaccctgacaatatccagcctccagcctgaggacttcgccacctactactgtcagcagagctggaacaccccttggacattcggccagggcaccaagctggaaatcaagagactcgagggcatgcggactgaagacctcccaaaggctgtggtgttcctggagcctcaatggtacagggtgctggagaaggacagtgtgactctgaagtgccagggagcctactcccctgaggacaattccacacagtggtttcacaatgagagcctcatctcaagccaggcctccagctacttcattgacgctgccacagtggacgacagtggagagtacaggtgccagacaaacctctccaccctcagtgacccggtgcagctagaagtccatatcggctggctgttgctccaggcccctcggtgggtgttcaaggaggaagaccctattcacctgaggtgtcacagctggaagaacactgctctgcataaggtcacatatttacagaatggcaaaggcaggaagtattttcatcataattctgacttctacattccaaaagccacactcaaagacagcggctcctacttctgcagggggcttgttgggagtaaaaatgtgtcttcagagactgtgaacatcaccatcactcaaggtttggcagtgtcaaccatctcatcattctttccacctggctaccaagtgtccttctgcctggtcatggtgctgctgttcgccgtggataccggcctgtacttcagcgtcaagaccaacatccggtccagcaccagagactggaaggaccacaagttcaagtggcggaaggaccctcaggacaagagggccaagcgatctggatctggagcaacaaacttctcactactcaaacaagcaggtgacgtggaggagaatcccgggcctactagtatggactggatttggcgcatccttttccttgtcggcgctgctaccggcgcgcattccttcgaacaagttcagcttcaacagcctggcgctgagctggtcaaacctggcgcttctgtgaagatgagctgcaaagccagcggctacgccttcagcagctactggatcaactggatgaagcagaaacccggccagggactcgaatggatcggccaaatctatcccggcgacggcgacaccaactacaacggcaagttcaagggcagagccacactgaccgccgatacctctagcagcacagcctacatgcagctgagcagcctgaccagcgaagatagcgccgtgtacttctgtgcccggtccatcacaacagtcgtgggctgcgctatggactattggggccagggaacaagcgtgaccgtgtctagtacgcgtactccagctgctccacctaaagctgtcctgaagctcgaacctcaatggattaacgtcctccaagaagattctgtcaccctgacatgccggggcacccactctccagagtctgattccattcagtggtttcataatgggaacctgattccgactcacacgcagcccagctatcggtttaaagctaacaacaatgactccggggagtatacttgccagacaggacagaccagcctgtctgacccagtgcacctgacagttctgagcgaatggctcgtcctgcagacccctcatcttgagttccaagagggcgaaaccattgtcctgagatgccactcctggaaagataagccccttgtgaaagtcacattttttcagaatggcaagagcaagaagttttctcggagcgatccgaatttcagtattccccaggccaaccactctcacagcggagactatcactgtacaggcaacatcgggtatacactctacagctctaagcccgtcacaattaccgttcaggctcccagcagctccccaatgggcattattgtggccgtcgtgaccggaattgctgtggccgcaatcgtggcagctgtcgtcgctctgatctattgcagaaagaagcggatcagcgccctgccagggtatcctgagtgccgcgaaatgggcgaaactctgcctgagaaacctgctaaccccacaaatcccgatgaagctgacaaagtcggcgctgaaaacacgatcacatactccctgctcatgcatcctgacgctcttgaggaacctgacgatcagaaccggatccgcgccaagagaagcggatctggcgtgaagcagaccctgaatttcgacctgctgaagctggctggcgacgtggaatccaacccaggcccttctagaggccatatgaccgagtacaagcccacggtgcgcctcgccacccgcgacgacgtccccagggccgtacgcaccctcgccgccgcgttcgccgactaccccgccacgcgccacaccgtcgatccggaccgccacatcgagcgggtcaccgagctgcaagaactcttcctcacgcgcgtcgggctcgacatcggcaaggtgtgggtcgcggacgacggcgccgcggtggcggtctggaccacgccggagagcgtcgaagcgggggcggtgttcgccgagatcggcccgcgcatggccgagttgagcggttcccggctggccgcgcagcaacagatggaaggcctcctggcgccgcaccggcccaaggagcccgcgtggttcctggccaccgtcggcgtctcgcccgaccaccagggcaagggtctgggcagcgccgtcgtgctccccggagtggaggcggccgagcgcgccggggtgcccgccttcctggagacctccgcgccccgcaacctccccttctacgagcggctcggcttcaccgtcaccgccgacgtcgaggtgcccgaaggaccgcgcacctggtgcatgacccgcaagcccggtgcctga

SEQ ID NO: 5740 - DNA, 3294 bp, Artificial Sequence
  Synthetic Polynucleotide
atggccttaccagtgaccgccttgctcctgccgctggccttgctgctccacgccgccaggccggcatgcgaagtgcagctgcttgaaagtggcggcggactgattcagcctggcggatctctgagactgagctgtgccgccagcggcttcaccttttctagccacgccatgacctgggtccgacaggcacctggaaaagggcttgaatgggtgtccgccatcagcggctctggcgattacacacactacgccgacagcgtgaagggcagattcaccatcagcagagacaacagcaagaacaccgtgtacctccagatgaacagcctgagagccgaggacagcgccgtgtattattgcgccaaggatgaggatggcggcagcctgcttggacacagaggacaaggcaccctggtcaccgtttcttccggtaccggcggaggcggatctggcggcggaggtagcggtggcggaggatctgaattcggatctctcgagggcatgcggactgaagacctcccaaaggctgtggtgttcctggagcctcaatggtacagggtgctggagaaggacagtgtgactctgaagtgccagggagcctactcccctgaggacaattccacacagtggtttcacaatgagagcctcatctcaagccaggcctccagctacttcattgacgctgccacagtggacgacagtggagagtacaggtgccagacaaacctctccaccctcagtgacccggtgcagctagaagtccatatcggctggctgttgctccaggcccctcggtgggtgttcaaggaggaagaccctattcacctgaggtgtcacagctggaagaacactgctctgcataaggtcacatatttacagaatggcaaaggcaggaagtattttcatcataattctgacttctacattccaaaagccacactcaaagacagcggctcctacttctgcagggggcttgttgggagtaaaaatgtgtcttcagagactgtgaacatcaccatcactcaaggtttggcagtgtcaaccatctcatcattctttccacctggctaccaagtgtccttctgcctggtcatggtgctgctgttcgccgtggataccggcctgtacttcagcgtcaagaccaacatccggtccagcaccagagactggaaggaccacaagttcaagtggcggaaggaccctcaggacaagagggccaagcgatctggatctggagcaacaaacttctcactactcaaacaagcaggtgacgtggaggagaatcccgggcctactagtgccaccatggactggatttggcgcatccttttccttgtcggcgctgctaccggcgcccattccgggcccgaagtgcagctggttgaatctggcggaggactggttcaggctggcggatctctgagactgtcttgtgccgccagcggcagaacctttagcatgggctggtttagacaggcccctggcaaagagagagagttcgtcgccgccatcacatactctggcggcagcccttactacgccgactctgtgaagggcagattcaccatcagccgggacaacgccaagaacaccgtgtacctccagatgaacagcctgaagcctgaggacaccgccgtgtactactgcgccgccaatccaacatacggcagcgactggaacgccgagaattggggccagggaacccaagtgacagtgtctagcggatccggcggcggaggatctggcggaggcggatctgggggcggaggctctttcgaaggcagcacgcgtactccagctgctccacctaaagctgtcctgaagctcgaacctcaatggattaacgtcctccaagaagattctgtcaccctgacatgccggggcacccactctccagagtctgattccattcagtggtttcataatgggaacctgattccgactcacacgcagcccagctatcggtttaaagctaacaacaatgactccggggagtatacttgccagacaggacagaccagcctgtctgacccagtgcacctgacagttctgagcgaatggctcgtcctgcagacccctcatcttgagttccaagagggcgaaaccattgtcctgagatgccactcctggaaagataagccccttgtgaaagtcacattttttcagaatggcaagagcaagaagttttctcggagcgatccgaatttcagtattccccaggccaaccactctcacagcggagactatcactgtacaggcaacatcgggtatacactctacagctctaagcccgtcacaattaccgttcaggctcccagcagctccccaatgggcattattgtggccgtcgtgaccggaattgctgtggccgcaatcgtggcagctgtcgtcgctctgatctattgcagaaagaagcggatcagcgccctgccagggtatcctgagtgccgcgaaatgggcgaaactctgcctgagaaacctgctaaccccacaaatcccgatgaagctgacaaagtcggcgctgaaaacacgatcacatactccctgctcatgcatcctgacgctcttgaggaacctgacgatcagaaccggatccgcgccaagagaagcggatctggcgtgaagcagaccctgaatttcgacctgctgaagctggctggcgacgtggaatccaacccaggcccttctagaggccatatgaccgagtacaagcccacggtgcgcctcgccacccgcgacgacgtccccagggccgtacgcaccctcgccgccgcgttcgccgactaccccgccacgcgccacaccgtcgatccggaccgccacatcgagcgggtcaccgagctgcaagaactcttcctcacgcgcgtcgggctcgacatcggcaaggtgtgggtcgcggacgacggcgccgcggtggcggtctggaccacgccggagagcgtcgaagcgggggcggtgttcgccgagatcggcccgcgcatggccgagttgagcggttcccggctggccgcgcagcaacagatggaaggcctcctggcgccgcaccggcccaaggagcccgcgtggttcctggccaccgtcggcgtctcgcccgaccaccagggcaagggtctgggcagcgccgtcgtgctccccggagtggaggcggccgagcgcgccggggtgcccgccttcctggagacctccgcgccccgcaacctccccttctacgagcggctcggcttcaccgtcaccgccgacgtcgaggtgcccgaaggaccgcgcacctggtgcatgacccgcaagcccggtgcctga

SEQ ID NO: 5741 - DNA, 3744 bp, Artificial Sequence
  Synthetic Polynucleotide
atggccttaccagtgaccgccttgctcctgccgctggccttgctgctccacgccgccaggccggacatccagatgacacagagccctagcagcctgtctgccagcgtgggagacagagtgaccatcacatgcaaggccagcgaccacatcaacaactggctggcctggtatcagcagaagcctggacaggcccctaagctgctgatctacggcgctaccacactggaaacaggcgtgcccagcagattttctggcagcggctctggcaccgactacaccctgacaatatccagcctccagcctgaggacttcgccacctactactgtcagcagagctggaacaccccttggacattcggccagggcaccaagctggaaatcaagagactcgagggacagcctaaggccaatcctaccgtgacactgttccctccaagcagcgaagaactccaggccaacaaggccacacttgtgtgcctgatctccgacttctaccctggggctgtgacagtggcttggaaggccgatggatctcctgtgaaagccggcgtggaaaccaccaagccatccaagcagagcaacaacaaatacgccgccagctcctacctgagcctgacacctgagcagtggaagtcccacagatcctacagctgccaagtgacccacgaaggcagcaccgtggaaaagacagtggcccctacagagtgcagcggatccggcatgcggactgaagacctcccaaaggctgtggtgttcctggagcctcaatggtacagggtgctggagaaggacagtgtgactctgaagtgccagggagcctactcccctgaggacaattccacacagtggtttcacaatgagagcctcatctcaagccaggcctccagctacttcattgacgctgccacagtggacgacagtggagagtacaggtgccagacaaacctctccaccctcagtgacccggtgcagctagaagtccatatcggctggctgttgctccaggcccctcggtgggtgttcaaggaggaagaccctattcacctgaggtgtcacagctggaagaacactgctctgcataaggtcacatatttacagaatggcaaaggcaggaagtattttcatcataattctgacttctacattccaaaagccacactcaaagacagcggctcctacttctgcagggggcttgttgggagtaaaaatgtgtcttcagagactgtgaacatcaccatcactcaaggtttggcagtgtcaaccatctcatcattctttccacctggctaccaagtgtccttctgcctggtcatggtgctgctgttcgccgtggataccggcctgtacttcagcgtcaagaccaacatccggtccagcaccagagactggaaggaccacaagttcaagtggcggaaggaccctcaggacaagagggccaagcgatctggatctggagcaacaaacttctcactactcaaacaagcaggtgacgtggaggagaatcccgggcctactagtatggactggatttggcgcatccttttccttgtcggcgctgctaccggcgcgcattccttcgaacaagttcagcttcaacagcctggcgctgagctggtcaaacctggcgcttctgtgaagatgagctgcaaagccagcggctacgccttcagcagctactggatcaactggatgaagcagaaacccggccagggactcgaatggatcggccaaatctatcccggcgacggcgacaccaactacaacggcaagttcaagggcagagccacactgaccgccgatacctctagcagcacagcctacatgcagctgagcagcctgaccagcgaagatagcgccgtgtacttctgtgcccggtccatcacaacagtcgtgggctgcgctatggactattggggccagggaacaagcgtgaccgtgtctagtacgcgtgcctctacaaagggaccctccgtgtttcctctggctcccagcagcaagtctacaagcggaggaacagccgctctgggctgcctggtcaaggattactttcccgagcctgtgaccgtgtcctggaatagcggagcactgacaagcggcgtgcacacctttccagccgtgctgcaaagcagcggcctgtactctctgagcagcgtggtcacagtgcctagctctagcctgggcacccagacctacatctgcaatgtgaaccacaagcctagcaacaccaaggtggacaagagagtggaacccaagagctgtggtaccactccagctgctccacctaaagctgtcctgaagctcgaacctcaatggattaacgtcctccaagaagattctgtcaccctgacatgccggggcacccactctccagagtctgattccattcagtggtttcataatgggaacctgattccgactcacacgcagcccagctatcggtttaaagctaacaacaatgactccggggagtatacttgccagacaggacagaccagcctgtctgacccagtgcacctgacagttctgagcgaatggctcgtcctgcagacccctcatcttgagttccaagagggcgaaaccattgtcctgagatgccactcctggaaagataagccccttgtgaaagtcacattttttcagaatggcaagagcaagaagttttctcggagcgatccgaatttcagtattccccaggccaaccactctcacagcggagactatcactgtacaggcaacatcgggtatacactctacagctctaagcccgtcacaattaccgttcaggctcccagcagctccccaatgggcattattgtggccgtcgtgaccggaattgctgtggccgcaatcgtggcagctgtcgtcgctctgatctattgcagaaagaagcggatcagcgccctgccagggtatcctgagtgccgcgaaatgggcgaaactctgcctgagaaacctgctaaccccacaaatcccgatgaagctgacaaagtcggcgctgaaaacacgatcacatactccctgctcatgcatcctgacgctcttgaggaacctgacgatcagaaccggatccgcgccaagagaagcggatctggcgtgaagcagaccctgaatttcgacctgctgaagctggctggcgacgtggaatccaacccaggcccttctagaggcgggatccacaccatggctacctacgaggtgctgtgcgaggtggcaagaaagctgggcaccgacgacagagaagtggtgctgttcctgctgaacgtgttcatccctcagcctacactggcccagctgatcggtgcactgagagccctgaaagaggaaggccggctgacctttcctctgctggccgaatgcctgttcagagccggaagaagggatctgctgcgggacctgctgcatctggaccccagatttctggaaagacacctggccggcaccatgagctacttcagcccttaccagctgaccgtgctgcacgttgacggcgaactgtgcgccagagatattcggagcctgatcttcctgagcaaggacaccatcggcagccggtctacccctcagacatttctgcactgggtgtactgcatggaaaacctggacctgctcggccccacagatgtggatgccctgatgtccatgctgagaagcctgagcagagtggacctccagagacaggtgcagacactgatgggactgcacctgagcggacctagccacagccagcactacagacacacccct

SEQ ID NO: 5742 - DNA, 3903 bp, Artificial Sequence
  Synthetic Polynucleotide
atggccttaccagtgaccgccttgctcctgccgctggccttgctgctccacgccgccaggccggacatccagatgacacagagccctagcagcctgtctgccagcgtgggagacagagtgaccatcacatgcaaggccagcgaccacatcaacaactggctggcctggtatcagcagaagcctggacaggcccctaagctgctgatctacggcgctaccacactggaaacaggcgtgcccagcagattttctggcagcggctctggcaccgactacaccctgacaatatccagcctccagcctgaggacttcgccacctactactgtcagcagagctggaacaccccttggacattcggccagggcaccaagctggaaatcaagagactcgagggacagcctaaggccaatcctaccgtgacactgttccctccaagcagcgaagaactccaggccaacaaggccacacttgtgtgcctgatctccgacttctaccctggggctgtgacagtggcttggaaggccgatggatctcctgtgaaagccggcgtggaaaccaccaagccatccaagcagagcaacaacaaatacgccgccagctcctacctgagcctgacacctgagcagtggaagtcccacagatcctacagctgccaagtgacccacgaaggcagcaccgtggaaaagacagtggcccctacagagtgcagcggatccggcatgcggactgaagacctcccaaaggctgtggtgttcctggagcctcaatggtacagggtgctggagaaggacagtgtgactctgaagtgccagggagcctactcccctgaggacaattccacacagtggtttcacaatgagagcctcatctcaagccaggcctccagctacttcattgacgctgccacagtggacgacagtggagagtacaggtgccagacaaacctctccaccctcagtgacccggtgcagctagaagtccatatcggctggctgttgctccaggcccctcggtgggtgttcaaggaggaagaccctattcacctgaggtgtcacagctggaagaacactgctctgcataaggtcacatatttacagaatggcaaaggcaggaagtattttcatcataattctgacttctacattccaaaagccacactcaaagacagcggctcctacttctgcagggggcttgttgggagtaaaaatgtgtcttcagagactgtgaacatcaccatcactcaaggtttggcagtgtcaaccatctcatcattctttccacctggctaccaagtgtccttctgcctggtcatggtgctgctgttcgccgtggataccggcctgtacttcagcgtcaagaccaacatccggtccagcaccagagactggaaggaccacaagttcaagtggcggaaggaccctcaggacaagagggccaagcgatctggatctggagcaacaaacttctcactactcaaacaagcaggtgacgtggaggagaatcccgggcctactagtatggactggatttggcgcatccttttccttgtcggcgctgctaccggcgcgcattccttcgaacaagttcagcttcaacagcctggcgctgagctggtcaaacctggcgcttctgtgaagatgagctgcaaagccagcggctacgccttcagcagctactggatcaactggatgaagcagaaacccggccagggactcgaatggatcggccaaatctatcccggcgacggcgacaccaactacaacggcaagttcaagggcagagccacactgaccgccgatacctctagcagcacagcctacatgcagctgagcagcctgaccagcgaagatagcgccgtgtacttctgtgcccggtccatcacaacagtcgtgggctgcgctatggactattggggccagggaacaagcgtgaccgtgtctagtacgcgtgcctctacaaagggaccctccgtgtttcctctggctcccagcagcaagtctacaagcggaggaacagccgctctgggctgcctggtcaaggattactttcccgagcctgtgaccgtgtcctggaatagcggagcactgacaagcggcgtgcacacctttccagccgtgctgcaaagcagcggcctgtactctctgagcagcgtggtcacagtgcctagctctagcctgggcacccagacctacatctgcaatgtgaaccacaagcctagcaacaccaaggtggacaagagagtggaacccaagagctgtggtaccactccagctgctccacctaaagctgtcctgaagctcgaacctcaatggattaacgtcctccaagaagattctgtcaccctgacatgccggggcacccactctccagagtctgattccattcagtggtttcataatgggaacctgattccgactcacacgcagcccagctatcggtttaaagctaacaacaatgactccggggagtatacttgccagacaggacagaccagcctgtctgacccagtgcacctgacagttctgagcgaatggctcgtcctgcagacccctcatcttgagttccaagagggcgaaaccattgtcctgagatgccactcctggaaagataagccccttgtgaaagtcacattttttcagaatggcaagagcaagaagttttctcggagcgatccgaatttcagtattccccaggccaaccactctcacagcggagactatcactgtacaggcaacatcgggtatacactctacagctctaagcccgtcacaattaccgttcaggctcccagcagctccccaatgggcattattgtggccgtcgtgaccggaattgctgtggccgcaatcgtggcagctgtcgtcgctctgatctattgcagaaagaagcggatcagcgccctgccagggtatcctgagtgccgcgaaatgggcgaaactctgcctgagaaacctgctaaccccacaaatcccgatgaagctgacaaagtcggcgctgaaaacacgatcacatactccctgctcatgcatcctgacgctcttgaggaacctgacgatcagaaccggatccgcgccaagagaagcggatctggcgtgaagcagaccctgaatttcgacctgctgaagctggctggcgacgtggaatccaacccaggcccttctagaggcgggatccacaccatgtccgactccaaggaggtccctagccttccatttttgcgacacttgctcgaagagttggacagccatgaggacagcttgctgctgtttctgtgtcacgacgcggccccgggctgcacgacggtcacgcaagctttgtgctcgcttagccaacagcgcaagctgaccctcgcggctctggtcgagatgctctacgtgctgcagcgtatggatcttctcaagagccgcttcgggctcagcaaggagggggccgagcaattgctgggcacaagctttctcacgcgctaccgcaagctcatggtttgcgtgggtgaggagctcgactcgagcgagctacgcgctctacgcttgttcgcgtgcaacctgaatccgagcctgagcacggcgctttctgagagcagccgctttgtcgagcttgtactcgcgcttgaaaacgtaggactcgtctcgccatcgagtgtttccgtgcttgcggacatgttgcgcactcttcggcgcctcgatttgtgccagcagcttgttgagtacgaacaacaagagcaagccaggtaccgttactgttacgcggcctcgccctcattgccagttcgtacgttacgtcgggggcacggcgcgagtgaacacgagcagctgtgcatgcccgtgcaagaatcctctgacagccccgagctgctgcgcacgcccgtacaagaatcctccagcgacagccccgagcaaacgact

SEQ ID NO: 5743 - DNA, 3771 bp, Artificial Sequence
  Synthetic Polynucleotide
atggccttaccagtgaccgccttgctcctgccgctggccttgctgctccacgccgccaggccggacatccagatgacacagagccctagcagcctgtctgccagcgtgggagacagagtgaccatcacatgcaaggccagcgaccacatcaacaactggctggcctggtatcagcagaagcctggacaggcccctaagctgctgatctacggcgctaccacactggaaacaggcgtgcccagcagattttctggcagcggctctggcaccgactacaccctgacaatatccagcctccagcctgaggacttcgccacctactactgtcagcagagctggaacaccccttggacattcggccagggcaccaagctggaaatcaagagactcgagggacagcctaaggccaatcctaccgtgacactgttccctccaagcagcgaagaactccaggccaacaaggccacacttgtgtgcctgatctccgacttctaccctggggctgtgacagtggcttggaaggccgatggatctcctgtgaaagccggcgtggaaaccaccaagccatccaagcagagcaacaacaaatacgccgccagctcctacctgagcctgacacctgagcagtggaagtcccacagatcctacagctgccaagtgacccacgaaggcagcaccgtggaaaagacagtggcccctacagagtgcagcggatccggcatgcggactgaagacctcccaaaggctgtggtgttcctggagcctcaatggtacagggtgctggagaaggacagtgtgactctgaagtgccagggagcctactcccctgaggacaattccacacagtggtttcacaatgagagcctcatctcaagccaggcctccagctacttcattgacgctgccacagtggacgacagtggagagtacaggtgccagacaaacctctccaccctcagtgacccggtgcagctagaagtccatatcggctggctgttgctccaggcccctcggtgggtgttcaaggaggaagaccctattcacctgaggtgtcacagctggaagaacactgctctgcataaggtcacatatttacagaatggcaaaggcaggaagtattttcatcataattctgacttctacattccaaaagccacactcaaagacagcggctcctacttctgcagggggcttgttgggagtaaaaatgtgtcttcagagactgtgaacatcaccatcactcaaggtttggcagtgtcaaccatctcatcattctttccacctggctaccaagtgtccttctgcctggtcatggtgctgctgttcgccgtggataccggcctgtacttcagcgtcaagaccaacatccggtccagcaccagagactggaaggaccacaagttcaagtggcggaaggaccctcaggacaagagggccaagcgatctggatctggagcaacaaacttctcactactcaaacaagcaggtgacgtggaggagaatcccgggcctactagtatggactggatttggcgcatccttttccttgtcggcgctgctaccggcgcgcattccttcgaacaagttcagcttcaacagcctggcgctgagctggtcaaacctggcgcttctgtgaagatgagctgcaaagccagcggctacgccttcagcagctactggatcaactggatgaagcagaaacccggccagggactcgaatggatcggccaaatctatcccggcgacggcgacaccaactacaacggcaagttcaagggcagagccacactgaccgccgatacctctagcagcacagcctacatgcagctgagcagcctgaccagcgaagatagcgccgtgtacttctgtgcccggtccatcacaacagtcgtgggctgcgctatggactattggggccagggaacaagcgtgaccgtgtctagtacgcgtgcctctacaaagggaccctccgtgtttcctctggctcccagcagcaagtctacaagcggaggaacagccgctctgggctgcctggtcaaggattactttcccgagcctgtgaccgtgtcctggaatagcggagcactgacaagcggcgtgcacacctttccagccgtgctgcaaagcagcggcctgtactctctgagcagcgtggtcacagtgcctagctctagcctgggcacccagacctacatctgcaatgtgaaccacaagcctagcaacaccaaggtggacaagagagtggaacccaagagctgtggtaccactccagctgctccacctaaagctgtcctgaagctcgaacctcaatggattaacgtcctccaagaagattctgtcaccctgacatgccggggcacccactctccagagtctgattccattcagtggtttcataatgggaacctgattccgactcacacgcagcccagctatcggtttaaagctaacaacaatgactccggggagtatacttgccagacaggacagaccagcctgtctgacccagtgcacctgacagttctgagcgaatggctcgtcctgcagacccctcatcttgagttccaagagggcgaaaccattgtcctgagatgccactcctggaaagataagccccttgtgaaagtcacattttttcagaatggcaagagcaagaagttttctcggagcgatccgaatttcagtattccccaggccaaccactctcacagcggagactatcactgtacaggcaacatcgggtatacactctacagctctaagcccgtcacaattaccgttcaggctcccagcagctccccaatgggcattattgtggccgtcgtgaccggaattgctgtggccgcaatcgtggcagctgtcgtcgctctgatctattgcagaaagaagcggatcagcgccctgccagggtatcctgagtgccgcgaaatgggcgaaactctgcctgagaaacctgctaaccccacaaatcccgatgaagctgacaaagtcggcgctgaaaacacgatcacatactccctgctcatgcatcctgacgctcttgaggaacctgacgatcagaaccggatccgcgccaagagaagcggatctggcgtgaagcagaccctgaatttcgacctgctgaagctggctggcgacgtggaatccaacccaggcccttctagaggccatatgaccgagtacaagcccacggtgcgcctcgccacccgcgacgacgtccccagggccgtacgcaccctcgccgccgcgttcgccgactaccccgccacgcgccacaccgtcgatccggaccgccacatcgagcgggtcaccgagctgcaagaactcttcctcacgcgcgtcgggctcgacatcggcaaggtgtgggtcgcggacgacggcgccgcggtggcggtctggaccacgccggagagcgtcgaagcgggggcggtgttcgccgagatcggcccgcgcatggccgagttgagcggttcccggctggccgcgcagcaacagatggaaggcctcctggcgccgcaccggcccaaggagcccgcgtggttcctggccaccgtcggcgtctcgcccgaccaccagggcaagggtctgggcagcgccgtcgtgctccccggagtggaggcggccgagcgcgccggggtgcccgccttcctggagacctccgcgccccgcaacctccccttctacgagcggctcggcttcaccgtcaccgccgacgtcgaggtgcccgaaggaccgcgcacctggtgcatgacccgcaagcccggtgcctga

SEQ ID NO: 5744 - DNA, 4182 bp, Artificial Sequence
  Synthetic Polynucleotide
atggccttaccagtgaccgccttgctcctgccgctggccttgctgctccacgccgccaggccggaagtgcagctggttgaatctggcggaggactggttcaggctggcggatctctgagactgtcttgtgccgccagcggcagaacctttagcatgggctggtttagacaggcccctggcaaagagagagagttcgtcgccgccatcacatactctggcggcagcccttactacgccgactctgtgaagggcagattcaccatcagccgggacaacgccaagaacaccgtgtacctccagatgaacagcctgaagcctgaggacaccgccgtgtactactgcgccgccaatccaacatacggcagcgactggaacgccgagaattggggccagggaacccaagtgacagtgtctagcggtaccggcggaggcggatctggcggcggaggtagcggtggcggaggatctgaattcgacatccagatgacacagagccctagcagcctgtctgccagcgtgggagacagagtgaccatcacatgcaaggccagcgaccacatcaacaactggctggcctggtatcagcagaagcctggacaggcccctaagctgctgatctacggcgctaccacactggaaacaggcgtgcccagcagattttctggcagcggctctggcaccgactacaccctgacaatatccagcctccagcctgaggacttcgccacctactactgtcagcagagctggaacaccccttggacattcggccagggcaccaagctggaaatcaagagactcgagggacagcctaaggccaatcctaccgtgacactgttccctccaagcagcgaagaactccaggccaacaaggccacacttgtgtgcctgatctccgacttctaccctggggctgtgacagtggcttggaaggccgatggatctcctgtgaaagccggcgtggaaaccaccaagccatccaagcagagcaacaacaaatacgccgccagctcctacctgagcctgacacctgagcagtggaagtcccacagatcctacagctgccaagtgacccacgaaggcagcaccgtggaaaagacagtggcccctacagagtgcagcggatccggcatgcggactgaagacctcccaaaggctgtggtgttcctggagcctcaatggtacagggtgctggagaaggacagtgtgactctgaagtgccagggagcctactcccctgaggacaattccacacagtggtttcacaatgagagcctcatctcaagccaggcctccagctacttcattgacgctgccacagtggacgacagtggagagtacaggtgccagacaaacctctccaccctcagtgacccggtgcagctagaagtccatatcggctggctgttgctccaggcccctcggtgggtgttcaaggaggaagaccctattcacctgaggtgtcacagctggaagaacactgctctgcataaggtcacatatttacagaatggcaaaggcaggaagtattttcatcataattctgacttctacattccaaaagccacactcaaagacagcggctcctacttctgcagggggcttgttgggagtaaaaatgtgtcttcagagactgtgaacatcaccatcactcaaggtttggcagtgtcaaccatctcatcattctttccacctggctaccaagtgtccttctgcctggtcatggtgctgctgttcgccgtggataccggcctgtacttcagcgtcaagaccaacatccggtccagcaccagagactggaaggaccacaagttcaagtggcggaaggaccctcaggacaagagggccaagcgatctggatctggagcaacaaacttctcactactcaaacaagcaggtgacgtggaggagaatcccgggcctactagtatggactggatttggcgcatccttttccttgtcggcgctgctaccggcgcgcattccttcgaacaagttcagcttcaacagcctggcgctgagctggtcaaacctggcgcttctgtgaagatgagctgcaaagccagcggctacgccttcagcagctactggatcaactggatgaagcagaaacccggccagggactcgaatggatcggccaaatctatcccggcgacggcgacaccaactacaacggcaagttcaagggcagagccacactgaccgccgatacctctagcagcacagcctacatgcagctgagcagcctgaccagcgaagatagcgccgtgtacttctgtgcccggtccatcacaacagtcgtgggctgcgctatggactattggggccagggaacaagcgtgaccgtgtctagtacgcgtgcctctacaaagggaccctccgtgtttcctctggctcccagcagcaagtctacaagcggaggaacagccgctctgggctgcctggtcaaggattactttcccgagcctgtgaccgtgtcctggaatagcggagcactgacaagcggcgtgcacacctttccagccgtgctgcaaagcagcggcctgtactctctgagcagcgtggtcacagtgcctagctctagcctgggcacccagacctacatctgcaatgtgaaccacaagcctagcaacaccaaggtggacaagagagtggaacccaagagctgtggtaccactccagctgctccacctaaagctgtcctgaagctcgaacctcaatggattaacgtcctccaagaagattctgtcaccctgacatgccggggcacccactctccagagtctgattccattcagtggtttcataatgggaacctgattccgactcacacgcagcccagctatcggtttaaagctaacaacaatgactccggggagtatacttgccagacaggacagaccagcctgtctgacccagtgcacctgacagttctgagcgaatggctcgtcctgcagacccctcatcttgagttccaagagggcgaaaccattgtcctgagatgccactcctggaaagataagccccttgtgaaagtcacattttttcagaatggcaagagcaagaagttttctcggagcgatccgaatttcagtattccccaggccaaccactctcacagcggagactatcactgtacaggcaacatcgggtatacactctacagctctaagcccgtcacaattaccgttcaggctcccagcagctccccaatgggcattattgtggccgtcgtgaccggaattgctgtggccgcaatcgtggcagctgtcgtcgctctgatctattgcagaaagaagcggatcagcgccctgccagggtatcctgagtgccgcgaaatgggcgaaactctgcctgagaaacctgctaaccccacaaatcccgatgaagctgacaaagtcggcgctgaaaacacgatcacatactccctgctcatgcatcctgacgctcttgaggaacctgacgatcagaaccggatccgcgccaagagaagcggatctggcgtgaagcagaccctgaatttcgacctgctgaagctggctggcgacgtggaatccaacccaggcccttctagaggccatatgaccgagtacaagcccacggtgcgcctcgccacccgcgacgacgtccccagggccgtacgcaccctcgccgccgcgttcgccgactaccccgccacgcgccacaccgtcgatccggaccgccacatcgagcgggtcaccgagctgcaagaactcttcctcacgcgcgtcgggctcgacatcggcaaggtgtgggtcgcggacgacggcgccgcggtggcggtctggaccacgccggagagcgtcgaagcgggggcggtgttcgccgagatcggcccgcgcatggccgagttgagcggttcccggctggccgcgcagcaacagatggaaggcctcctggcgccgcaccggcccaaggagcccgcgtggttcctggccaccgtcggcgtctcgcccgaccaccagggcaagggtctgggcagcgccgtcgtgctccccggagtggaggcggccgagcgcgccggggtgcccgccttcctggagacctccgcgccccgcaacctccccttctacgagcggctcggcttcaccgtcaccgccgacgtcgaggtgcccgaaggaccgcgcacctggtgcatgacccgcaagcccggtgcctga

SEQ ID NO: 5745 - DNA, 4593 bp, Artificial Sequence
  Synthetic Polynucleotide
atggccttaccagtgaccgccttgctcctgccgctggccttgctgctccacgccgccaggccggaagtgcagctggttgaatctggcggaggactggttcaggctggcggatctctgagactgtcttgtgccgccagcggcagaacctttagcatgggctggtttagacaggcccctggcaaagagagagagttcgtcgccgccatcacatactctggcggcagcccttactacgccgactctgtgaagggcagattcaccatcagccgggacaacgccaagaacaccgtgtacctccagatgaacagcctgaagcctgaggacaccgccgtgtactactgcgccgccaatccaacatacggcagcgactggaacgccgagaattggggccagggaacccaagtgacagtgtctagcggtaccggcggaggcggatctggcggcggaggtagcggtggcggaggatctgaattcgacatccagatgacacagagccctagcagcctgtctgccagcgtgggagacagagtgaccatcacatgcaaggccagcgaccacatcaacaactggctggcctggtatcagcagaagcctggacaggcccctaagctgctgatctacggcgctaccacactggaaacaggcgtgcccagcagattttctggcagcggctctggcaccgactacaccctgacaatatccagcctccagcctgaggacttcgccacctactactgtcagcagagctggaacaccccttggacattcggccagggcaccaagctggaaatcaagagactcgagggacagcctaaggccaatcctaccgtgacactgttccctccaagcagcgaagaactccaggccaacaaggccacacttgtgtgcctgatctccgacttctaccctggggctgtgacagtggcttggaaggccgatggatctcctgtgaaagccggcgtggaaaccaccaagccatccaagcagagcaacaacaaatacgccgccagctcctacctgagcctgacacctgagcagtggaagtcccacagatcctacagctgccaagtgacccacgaaggcagcaccgtggaaaagacagtggcccctacagagtgcagcggatccggcatgcggactgaagacctcccaaaggctgtggtgttcctggagcctcaatggtacagggtgctggagaaggacagtgtgactctgaagtgccagggagcctactcccctgaggacaattccacacagtggtttcacaatgagagcctcatctcaagccaggcctccagctacttcattgacgctgccacagtggacgacagtggagagtacaggtgccagacaaacctctccaccctcagtgacccggtgcagctagaagtccatatcggctggctgttgctccaggcccctcggtgggtgttcaaggaggaagaccctattcacctgaggtgtcacagctggaagaacactgctctgcataaggtcacatatttacagaatggcaaaggcaggaagtattttcatcataattctgacttctacattccaaaagccacactcaaagacagcggctcctacttctgcagggggcttgttgggagtaaaaatgtgtcttcagagactgtgaacatcaccatcactcaaggtttggcagtgtcaaccatctcatcattctttccacctggctaccaagtgtccttctgcctggtcatggtgctgctgttcgccgtggataccggcctgtacttcagcgtcaagaccaacatccggtccagcaccagagactggaaggaccacaagttcaagtggcggaaggaccctcaggacaagagggccaagcgatctggatctggagcaacaaacttctcactactcaaacaagcaggtgacgtggaggagaatcccgggcctactagtatggactggatttggcgcatccttttccttgtcggcgctgctaccggcgcgcattccgggcccgaagtgcaactggttgaatccggtggcggcctggtgcaagcaggcggatctctcagacttagctgtgccgcctccggcagaaccttcacaatgggatggtttaggcaggctccagggaaagagagagagttcgtcgccgccatctctctgtctcccacactggcctactacgccgactctgtgaaaggccggttcaccatctccagagataatgccaagaacaccgtggtgctgcaaatgaactctctgaaacccgaggatacagccctgtactattgtgccgctgaccggaagtccgtgatgagcatcagacccgattactggggacagggcacacaagtcacagtgtcctctggatccggcggcggaggatctggcggaggcggatctgggggcggaggctctttcgaacaagttcagcttcaacagcctggcgctgagctggtcaaacctggcgcttctgtgaagatgagctgcaaagccagcggctacgccttcagcagctactggatcaactggatgaagcagaaacccggccagggactcgaatggatcggccaaatctatcccggcgacggcgacaccaactacaacggcaagttcaagggcagagccacactgaccgccgatacctctagcagcacagcctacatgcagctgagcagcctgaccagcgaagatagcgccgtgtacttctgtgcccggtccatcacaacagtcgtgggctgcgctatggactattggggccagggaacaagcgtgaccgtgtctagtacgcgtgcctctacaaagggaccctccgtgtttcctctggctcccagcagcaagtctacaagcggaggaacagccgctctgggctgcctggtcaaggattactttcccgagcctgtgaccgtgtcctggaatagcggagcactgacaagcggcgtgcacacctttccagccgtgctgcaaagcagcggcctgtactctctgagcagcgtggtcacagtgcctagctctagcctgggcacccagacctacatctgcaatgtgaaccacaagcctagcaacaccaaggtggacaagagagtggaacccaagagctgtggtaccactccagctgctccacctaaagctgtcctgaagctcgaacctcaatggattaacgtcctccaagaagattctgtcaccctgacatgccggggcacccactctccagagtctgattccattcagtggtttcataatgggaacctgattccgactcacacgcagcccagctatcggtttaaagctaacaacaatgactccggggagtatacttgccagacaggacagaccagcctgtctgacccagtgcacctgacagttctgagcgaatggctcgtcctgcagacccctcatcttgagttccaagagggcgaaaccattgtcctgagatgccactcctggaaagataagccccttgtgaaagtcacattttttcagaatggcaagagcaagaagttttctcggagcgatccgaatttcagtattccccaggccaaccactctcacagcggagactatcactgtacaggcaacatcgggtatacactctacagctctaagcccgtcacaattaccgttcaggctcccagcagctccccaatgggcattattgtggccgtcgtgaccggaattgctgtggccgcaatcgtggcagctgtcgtcgctctgatctattgcagaaagaagcggatcagcgccctgccagggtatcctgagtgccgcgaaatgggcgaaactctgcctgagaaacctgctaaccccacaaatcccgatgaagctgacaaagtcggcgctgaaaacacgatcacatactccctgctcatgcatcctgacgctcttgaggaacctgacgatcagaaccggatccgcgccaagagaagcggatctggcgtgaagcagaccctgaatttcgacctgctgaagctggctggcgacgtggaatccaacccaggcccttctagaggccatatgaccgagtacaagcccacggtgcgcctcgccacccgcgacgacgtccccagggccgtacgcaccctcgccgccgcgttcgccgactaccccgccacgcgccacaccgtcgatccggaccgccacatcgagcgggtcaccgagctgcaagaactcttcctcacgcgcgtcgggctcgacatcggcaaggtgtgggtcgcggacgacggcgccgcggtggcggtctggaccacgccggagagcgtcgaagcgggggcggtgttcgccgagatcggcccgcgcatggccgagttgagcggttcccggctggccgcgcagcaacagatggaaggcctcctggcgccgcaccggcccaaggagcccgcgtggttcctggccaccgtcggcgtctcgcccgaccaccagggcaagggtctgggcagcgccgtcgtgctccccggagtggaggcggccgagcgcgccggggtgcccgccttcctggagacctccgcgccccgcaacctccccttctacgagcggctcggcttcaccgtcaccgccgacgtcgaggtgcccgaaggaccgcgcacctggtgcatgacccgcaagcccggtgcctga

SEQ ID NO: 5746 - DNA, 3792 bp, Artificial Sequence
  Synthetic Polynucleotide
atggccttaccagtgaccgccttgctcctgccgctggccttgctgctccacgccgccaggccggaagtgcagctggttgaatctggcggaggactggttcaggctggcggatctctgagactgtcttgtgccgccagcggcagaacctttagcatgggctggtttagacaggcccctggcaaagagagagagttcgtcgccgccatcacatactctggcggcagcccttactacgccgactctgtgaagggcagattcaccatcagccgggacaacgccaagaacaccgtgtacctccagatgaacagcctgaagcctgaggacaccgccgtgtactactgcgccgccaatccaacatacggcagcgactggaacgccgagaattggggccagggaacccaagtgacagtgtctagcctcgagggacagcctaaggccaatcctaccgtgacactgttccctccaagcagcgaagaactccaggccaacaaggccacacttgtgtgcctgatctccgacttctaccctggggctgtgacagtggcttggaaggccgatggatctcctgtgaaagccggcgtggaaaccaccaagccatccaagcagagcaacaacaaatacgccgccagctcctacctgagcctgacacctgagcagtggaagtcccacagatcctacagctgccaagtgacccacgaaggcagcaccgtggaaaagacagtggcccctacagagtgcagcggatccggcatgcggactgaagacctcccaaaggctgtggtgttcctggagcctcaatggtacagggtgctggagaaggacagtgtgactctgaagtgccagggagcctactcccctgaggacaattccacacagtggtttcacaatgagagcctcatctcaagccaggcctccagctacttcattgacgctgccacagtggacgacagtggagagtacaggtgccagacaaacctctccaccctcagtgacccggtgcagctagaagtccatatcggctggctgttgctccaggcccctcggtgggtgttcaaggaggaagaccctattcacctgaggtgtcacagctggaagaacactgctctgcataaggtcacatatttacagaatggcaaaggcaggaagtattttcatcataattctgacttctacattccaaaagccacactcaaagacagcggctcctacttctgcagggggcttgttgggagtaaaaatgtgtcttcagagactgtgaacatcaccatcactcaaggtttggcagtgtcaaccatctcatcattctttccacctggctaccaagtgtccttctgcctggtcatggtgctgctgttcgccgtggataccggcctgtacttcagcgtcaagaccaacatccggtccagcaccagagactggaaggaccacaagttcaagtggcggaaggaccctcaggacaagagggccaagcgatctggatctggagcaacaaacttctcactactcaaacaagcaggtgacgtggaggagaatcccgggcctactagtatggactggatttggcgcatccttttccttgtcggcgctgctaccggcgcgcattccgggcccgaagtgcaactggttgaatccggtggcggcctggtgcaagcaggcggatctctcagacttagctgtgccgcctccggcagaaccttcacaatgggatggtttaggcaggctccagggaaagagagagagttcgtcgccgccatctctctgtctcccacactggcctactacgccgactctgtgaaaggccggttcaccatctccagagataatgccaagaacaccgtggtgctgcaaatgaactctctgaaacccgaggatacagccctgtactattgtgccgctgaccggaagtccgtgatgagcatcagacccgattactggggacagggcacacaagtcacagtgtcctctacgcgtgcctctacaaagggaccctccgtgtttcctctggctcccagcagcaagtctacaagcggaggaacagccgctctgggctgcctggtcaaggattactttcccgagcctgtgaccgtgtcctggaatagcggagcactgacaagcggcgtgcacacctttccagccgtgctgcaaagcagcggcctgtactctctgagcagcgtggtcacagtgcctagctctagcctgggcacccagacctacatctgcaatgtgaaccacaagcctagcaacaccaaggtggacaagagagtggaacccaagagctgtggtaccactccagctgctccacctaaagctgtcctgaagctcgaacctcaatggattaacgtcctccaagaagattctgtcaccctgacatgccggggcacccactctccagagtctgattccattcagtggtttcataatgggaacctgattccgactcacacgcagcccagctatcggtttaaagctaacaacaatgactccggggagtatacttgccagacaggacagaccagcctgtctgacccagtgcacctgacagttctgagcgaatggctcgtcctgcagacccctcatcttgagttccaagagggcgaaaccattgtcctgagatgccactcctggaaagataagccccttgtgaaagtcacattttttcagaatggcaagagcaagaagttttctcggagcgatccgaatttcagtattccccaggccaaccactctcacagcggagactatcactgtacaggcaacatcgggtatacactctacagctctaagcccgtcacaattaccgttcaggctcccagcagctccccaatgggcattattgtggccgtcgtgaccggaattgctgtggccgcaatcgtggcagctgtcgtcgctctgatctattgcagaaagaagcggatcagcgccctgccagggtatcctgagtgccgcgaaatgggcgaaactctgcctgagaaacctgctaaccccacaaatcccgatgaagctgacaaagtcggcgctgaaaacacgatcacatactccctgctcatgcatcctgacgctcttgaggaacctgacgatcagaaccggatccgcgccaagagaagcggatctggcgtgaagcagaccctgaatttcgacctgctgaagctggctggcgacgtggaatccaacccaggcccttctagaggccatatgaccgagtacaagcccacggtgcgcctcgccacccgcgacgacgtccccagggccgtacgcaccctcgccgccgcgttcgccgactaccccgccacgcgccacaccgtcgatccggaccgccacatcgagcgggtcaccgagctgcaagaactcttcctcacgcgcgtcgggctcgacatcggcaaggtgtgggtcgcggacgacggcgccgcggtggcggtctggaccacgccggagagcgtcgaagcgggggcggtgttcgccgagatcggcccgcgcatggccgagttgagcggttcccggctggccgcgcagcaacagatggaaggcctcctggcgccgcaccggcccaaggagcccgcgtggttcctggccaccgtcggcgtctcgcccgaccaccagggcaagggtctgggcagcgccgtcgtgctccccggagtggaggcggccgagcgcgccggggtgcccgccttcctggagacctccgcgccccgcaacctccccttctacgagcggctcggcttcaccgtcaccgccgacgtcgaggtgcccgaaggaccgcgcacctggtgcatgacccgcaagcccggtgcctga

SEQ ID NO: 5747 - DNA, 3816 bp, Artificial Sequence
  Synthetic Polynucleotide
atggccttaccagtgaccgccttgctcctgccgctggccttgctgctccacgccgccaggccggacatccagatgacacagagccctagcagcctgtctgccagcgtgggagacagagtgaccatcacatgcaaggccagcgaccacatcaacaactggctggcctggtatcagcagaagcctggacaggcccctaagctgctgatctacggcgctaccacactggaaacaggcgtgcccagcagattttctggcagcggctctggcaccgactacaccctgacaatatccagcctccagcctgaggacttcgccacctactactgtcagcagagctggaacaccccttggacattcggccagggcaccaagctggaaatcaagagactcgaggacctgaagaacgtgttcccacctgaggtggccgtgttcgagcctagcgaggccgagatcagccacacccagaaagccaccctcgtgtgcctggctaccggcttctaccccgaccatgtggaactgtcttggtgggtcaacggcaaagaggtgcacagcggcgtgtctaccgacccccagccactgaaagaacagcccgccctgaacgacagccggtactgcctgagcagcagactgagagtgtccgccaccttctggcagaacccccggaaccacttcagatgccaggtgcagttctacggcctgagcgagaacgacgagtggacccaggacagagccaagcccgtgacccagatcgtgtctgccgaagcctggggcagagccgattgcggatccggcatgcggactgaagacctcccaaaggctgtggtgttcctggagcctcaatggtacagggtgctggagaaggacagtgtgactctgaagtgccagggagcctactcccctgaggacaattccacacagtggtttcacaatgagagcctcatctcaagccaggcctccagctacttcattgacgctgccacagtggacgacagtggagagtacaggtgccagacaaacctctccaccctcagtgacccggtgcagctagaagtccatatcggctggctgttgctccaggcccctcggtgggtgttcaaggaggaagaccctattcacctgaggtgtcacagctggaagaacactgctctgcataaggtcacatatttacagaatggcaaaggcaggaagtattttcatcataattctgacttctacattccaaaagccacactcaaagacagcggctcctacttctgcagggggcttgttgggagtaaaaatgtgtcttcagagactgtgaacatcaccatcactcaaggtttggcagtgtcaaccatctcatcattctttccacctggctaccaagtgtccttctgcctggtcatggtgctgctgttcgccgtggataccggcctgtacttcagcgtcaagaccaacatccggtccagcaccagagactggaaggaccacaagttcaagtggcggaaggaccctcaggacaagagggccaagcgatctggatctggagcaacaaacttctcactactcaaacaagcaggtgacgtggaggagaatcccgggcctactagtatggactggatttggcgcatccttttccttgtcggcgctgctaccggcgcgcattccttcgaacaagttcagcttcaacagcctggcgctgagctggtcaaacctggcgcttctgtgaagatgagctgcaaagccagcggctacgccttcagcagctactggatcaactggatgaagcagaaacccggccagggactcgaatggatcggccaaatctatcccggcgacggcgacaccaactacaacggcaagttcaagggcagagccacactgaccgccgatacctctagcagcacagcctacatgcagctgagcagcctgaccagcgaagatagcgccgtgtacttctgtgcccggtccatcacaacagtcgtgggctgcgctatggactattggggccagggaacaagcgtgaccgtgtctagtacgcgtatccagaaccctgatcctgccgtgtaccagctgcgggatagcaagagcagcgacaagagcgtgtgtctgttcaccgacttcgacagccagaccaacgtgtcccagagcaaggactccgacgtgtacatcaccgataagaccgtgctggacatgcggagcatggacttcaagagcaactccgccgtggcctggtccaacaagtccgatttcgcctgcgccaacgccttcaacaacagcattatccccgaggacacattcttcccaagccccgagagcagctgcggtaccactccagctgctccacctaaagctgtcctgaagctcgaacctcaatggattaacgtcctccaagaagattctgtcaccctgacatgccggggcacccactctccagagtctgattccattcagtggtttcataatgggaacctgattccgactcacacgcagcccagctatcggtttaaagctaacaacaatgactccggggagtatacttgccagacaggacagaccagcctgtctgacccagtgcacctgacagttctgagcgaatggctcgtcctgcagacccctcatcttgagttccaagagggcgaaaccattgtcctgagatgccactcctggaaagataagccccttgtgaaagtcacattttttcagaatggcaagagcaagaagttttctcggagcgatccgaatttcagtattccccaggccaaccactctcacagcggagactatcactgtacaggcaacatcgggtatacactctacagctctaagcccgtcacaattaccgttcaggctcccagcagctccccaatgggcattattgtggccgtcgtgaccggaattgctgtggccgcaatcgtggcagctgtcgtcgctctgatctattgcagaaagaagcggatcagcgccctgccagggtatcctgagtgccgcgaaatgggcgaaactctgcctgagaaacctgctaaccccacaaatcccgatgaagctgacaaagtcggcgctgaaaacacgatcacatactccctgctcatgcatcctgacgctcttgaggaacctgacgatcagaaccggatccgcgccaagagaagcggatctggcgtgaagcagaccctgaatttcgacctgctgaagctggctggcgacgtggaatccaacccaggcccttctagaggccatatgaccgagtacaagcccacggtgcgcctcgccacccgcgacgacgtccccagggccgtacgcaccctcgccgccgcgttcgccgactaccccgccacgcgccacaccgtcgatccggaccgccacatcgagcgggtcaccgagctgcaagaactcttcctcacgcgcgtcgggctcgacatcggcaaggtgtgggtcgcggacgacggcgccgcggtggcggtctggaccacgccggagagcgtcgaagcgggggcggtgttcgccgagatcggcccgcgcatggccgagttgagcggttcccggctggccgcgcagcaacagatggaaggcctcctggcgccgcaccggcccaaggagcccgcgtggttcctggccaccgtcggcgtctcgcccgaccaccagggcaagggtctgggcagcgccgtcgtgctccccggagtggaggcggccgagcgcgccggggtgcccgccttcctggagacctccgcgccccgcaacctccccttctacgagcggctcggcttcaccgtcaccgccgacgtcgaggtgcccgaaggaccgcgcacctggtgcatgacccgcaagcccggtgcctga

SEQ ID NO: 5748 - DNA, 4227 bp, Artificial Sequence
  Synthetic Polynucleotide
atggccttaccagtgaccgccttgctcctgccgctggccttgctgctccacgccgccaggccggaagtgcagctggttgaatctggcggaggactggttcaggctggcggatctctgagactgtcttgtgccgccagcggcagaacctttagcatgggctggtttagacaggcccctggcaaagagagagagttcgtcgccgccatcacatactctggcggcagcccttactacgccgactctgtgaagggcagattcaccatcagccgggacaacgccaagaacaccgtgtacctccagatgaacagcctgaagcctgaggacaccgccgtgtactactgcgccgccaatccaacatacggcagcgactggaacgccgagaattggggccagggaacccaagtgacagtgtctagcggtaccggcggaggcggatctggcggcggaggtagcggtggcggaggatctgaattcgacatccagatgacacagagccctagcagcctgtctgccagcgtgggagacagagtgaccatcacatgcaaggccagcgaccacatcaacaactggctggcctggtatcagcagaagcctggacaggcccctaagctgctgatctacggcgctaccacactggaaacaggcgtgcccagcagattttctggcagcggctctggcaccgactacaccctgacaatatccagcctccagcctgaggacttcgccacctactactgtcagcagagctggaacaccccttggacattcggccagggcaccaagctggaaatcaagagactcgaggacctgaagaacgtgttcccacctgaggtggccgtgttcgagcctagcgaggccgagatcagccacacccagaaagccaccctcgtgtgcctggctaccggcttctaccccgaccatgtggaactgtcttggtgggtcaacggcaaagaggtgcacagcggcgtgtctaccgacccccagccactgaaagaacagcccgccctgaacgacagccggtactgcctgagcagcagactgagagtgtccgccaccttctggcagaacccccggaaccacttcagatgccaggtgcagttctacggcctgagcgagaacgacgagtggacccaggacagagccaagcccgtgacccagatcgtgtctgccgaagcctggggcagagccgattgcggatccggcatgcggactgaagacctcccaaaggctgtggtgttcctggagcctcaatggtacagggtgctggagaaggacagtgtgactctgaagtgccagggagcctactcccctgaggacaattccacacagtggtttcacaatgagagcctcatctcaagccaggcctccagctacttcattgacgctgccacagtggacgacagtggagagtacaggtgccagacaaacctctccaccctcagtgacccggtgcagctagaagtccatatcggctggctgttgctccaggcccctcggtgggtgttcaaggaggaagaccctattcacctgaggtgtcacagctggaagaacactgctctgcataaggtcacatatttacagaatggcaaaggcaggaagtattttcatcataattctgacttctacattccaaaagccacactcaaagacagcggctcctacttctgcagggggcttgttgggagtaaaaatgtgtcttcagagactgtgaacatcaccatcactcaaggtttggcagtgtcaaccatctcatcattctttccacctggctaccaagtgtccttctgcctggtcatggtgctgctgttcgccgtggataccggcctgtacttcagcgtcaagaccaacatccggtccagcaccagagactggaaggaccacaagttcaagtggcggaaggaccctcaggacaagagggccaagcgatctggatctggagcaacaaacttctcactactcaaacaagcaggtgacgtggaggagaatcccgggcctactagtatggactggatttggcgcatccttttccttgtcggcgctgctaccggcgcgcattccttcgaacaagttcagcttcaacagcctggcgctgagctggtcaaacctggcgcttctgtgaagatgagctgcaaagccagcggctacgccttcagcagctactggatcaactggatgaagcagaaacccggccagggactcgaatggatcggccaaatctatcccggcgacggcgacaccaactacaacggcaagttcaagggcagagccacactgaccgccgatacctctagcagcacagcctacatgcagctgagcagcctgaccagcgaagatagcgccgtgtacttctgtgcccggtccatcacaacagtcgtgggctgcgctatggactattggggccagggaacaagcgtgaccgtgtctagtacgcgtatccagaaccctgatcctgccgtgtaccagctgcgggatagcaagagcagcgacaagagcgtgtgtctgttcaccgacttcgacagccagaccaacgtgtcccagagcaaggactccgacgtgtacatcaccgataagaccgtgctggacatgcggagcatggacttcaagagcaactccgccgtggcctggtccaacaagtccgatttcgcctgcgccaacgccttcaacaacagcattatccccgaggacacattcttcccaagccccgagagcagctgcggtaccactccagctgctccacctaaagctgtcctgaagctcgaacctcaatggattaacgtcctccaagaagattctgtcaccctgacatgccggggcacccactctccagagtctgattccattcagtggtttcataatgggaacctgattccgactcacacgcagcccagctatcggtttaaagctaacaacaatgactccggggagtatacttgccagacaggacagaccagcctgtctgacccagtgcacctgacagttctgagcgaatggctcgtcctgcagacccctcatcttgagttccaagagggcgaaaccattgtcctgagatgccactcctggaaagataagccccttgtgaaagtcacattttttcagaatggcaagagcaagaagttttctcggagcgatccgaatttcagtattccccaggccaaccactctcacagcggagactatcactgtacaggcaacatcgggtatacactctacagctctaagcccgtcacaattaccgttcaggctcccagcagctccccaatgggcattattgtggccgtcgtgaccggaattgctgtggccgcaatcgtggcagctgtcgtcgctctgatctattgcagaaagaagcggatcagcgccctgccagggtatcctgagtgccgcgaaatgggcgaaactctgcctgagaaacctgctaaccccacaaatcccgatgaagctgacaaagtcggcgctgaaaacacgatcacatactccctgctcatgcatcctgacgctcttgaggaacctgacgatcagaaccggatccgcgccaagagaagcggatctggcgtgaagcagaccctgaatttcgacctgctgaagctggctggcgacgtggaatccaacccaggcccttctagaggccatatgaccgagtacaagcccacggtgcgcctcgccacccgcgacgacgtccccagggccgtacgcaccctcgccgccgcgttcgccgactaccccgccacgcgccacaccgtcgatccggaccgccacatcgagcgggtcaccgagctgcaagaactcttcctcacgcgcgtcgggctcgacatcggcaaggtgtgggtcgcggacgacggcgccgcggtggcggtctggaccacgccggagagcgtcgaagcgggggcggtgttcgccgagatcggcccgcgcatggccgagttgagcggttcccggctggccgcgcagcaacagatggaaggcctcctggcgccgcaccggcccaaggagcccgcgtggttcctggccaccgtcggcgtctcgcccgaccaccagggcaagggtctgggcagcgccgtcgtgctccccggagtggaggcggccgagcgcgccggggtgcccgccttcctggagacctccgcgccccgcaacctccccttctacgagcggctcggcttcaccgtcaccgccgacgtcgaggtgcccgaaggaccgcgcacctggtgcatgacccgcaagcccggtgcctga

SEQ ID NO: 5749 - DNA, 4638 bp, Artificial Sequence
  Synthetic Polynucleotide
atggccttaccagtgaccgccttgctcctgccgctggccttgctgctccacgccgccaggccggaagtgcagctggttgaatctggcggaggactggttcaggctggcggatctctgagactgtcttgtgccgccagcggcagaacctttagcatgggctggtttagacaggcccctggcaaagagagagagttcgtcgccgccatcacatactctggcggcagcccttactacgccgactctgtgaagggcagattcaccatcagccgggacaacgccaagaacaccgtgtacctccagatgaacagcctgaagcctgaggacaccgccgtgtactactgcgccgccaatccaacatacggcagcgactggaacgccgagaattggggccagggaacccaagtgacagtgtctagcggtaccggcggaggcggatctggcggcggaggtagcggtggcggaggatctgaattcgacatccagatgacacagagccctagcagcctgtctgccagcgtgggagacagagtgaccatcacatgcaaggccagcgaccacatcaacaactggctggcctggtatcagcagaagcctggacaggcccctaagctgctgatctacggcgctaccacactggaaacaggcgtgcccagcagattttctggcagcggctctggcaccgactacaccctgacaatatccagcctccagcctgaggacttcgccacctactactgtcagcagagctggaacaccccttggacattcggccagggcaccaagctggaaatcaagagactcgaggacctgaagaacgtgttcccacctgaggtggccgtgttcgagcctagcgaggccgagatcagccacacccagaaagccaccctcgtgtgcctggctaccggcttctaccccgaccatgtggaactgtcttggtgggtcaacggcaaagaggtgcacagcggcgtgtctaccgacccccagccactgaaagaacagcccgccctgaacgacagccggtactgcctgagcagcagactgagagtgtccgccaccttctggcagaacccccggaaccacttcagatgccaggtgcagttctacggcctgagcgagaacgacgagtggacccaggacagagccaagcccgtgacccagatcgtgtctgccgaagcctggggcagagccgattgcggatccggcatgcggactgaagacctcccaaaggctgtggtgttcctggagcctcaatggtacagggtgctggagaaggacagtgtgactctgaagtgccagggagcctactcccctgaggacaattccacacagtggtttcacaatgagagcctcatctcaagccaggcctccagctacttcattgacgctgccacagtggacgacagtggagagtacaggtgccagacaaacctctccaccctcagtgacccggtgcagctagaagtccatatcggctggctgttgctccaggcccctcggtgggtgttcaaggaggaagaccctattcacctgaggtgtcacagctggaagaacactgctctgcataaggtcacatatttacagaatggcaaaggcaggaagtattttcatcataattctgacttctacattccaaaagccacactcaaagacagcggctcctacttctgcagggggcttgttgggagtaaaaatgtgtcttcagagactgtgaacatcaccatcactcaaggtttggcagtgtcaaccatctcatcattctttccacctggctaccaagtgtccttctgcctggtcatggtgctgctgttcgccgtggataccggcctgtacttcagcgtcaagaccaacatccggtccagcaccagagactggaaggaccacaagttcaagtggcggaaggaccctcaggacaagagggccaagcgatctggatctggagcaacaaacttctcactactcaaacaagcaggtgacgtggaggagaatcccgggcctactagtatggactggatttggcgcatccttttccttgtcggcgctgctaccggcgcgcattccgggcccgaagtgcaactggttgaatccggtggcggcctggtgcaagcaggcggatctctcagacttagctgtgccgcctccggcagaaccttcacaatgggatggtttaggcaggctccagggaaagagagagagttcgtcgccgccatctctctgtctcccacactggcctactacgccgactctgtgaaaggccggttcaccatctccagagataatgccaagaacaccgtggtgctgcaaatgaactctctgaaacccgaggatacagccctgtactattgtgccgctgaccggaagtccgtgatgagcatcagacccgattactggggacagggcacacaagtcacagtgtcctctggatccggcggcggaggatctggcggaggcggatctgggggcggaggctctttcgaacaagttcagcttcaacagcctggcgctgagctggtcaaacctggcgcttctgtgaagatgagctgcaaagccagcggctacgccttcagcagctactggatcaactggatgaagcagaaacccggccagggactcgaatggatcggccaaatctatcccggcgacggcgacaccaactacaacggcaagttcaagggcagagccacactgaccgccgatacctctagcagcacagcctacatgcagctgagcagcctgaccagcgaagatagcgccgtgtacttctgtgcccggtccatcacaacagtcgtgggctgcgctatggactattggggccagggaacaagcgtgaccgtgtctagtacgcgtatccagaaccctgatcctgccgtgtaccagctgcgggatagcaagagcagcgacaagagcgtgtgtctgttcaccgacttcgacagccagaccaacgtgtcccagagcaaggactccgacgtgtacatcaccgataagaccgtgctggacatgcggagcatggacttcaagagcaactccgccgtggcctggtccaacaagtccgatttcgcctgcgccaacgccttcaacaacagcattatccccgaggacacattcttcccaagccccgagagcagctgcggtaccactccagctgctccacctaaagctgtcctgaagctcgaacctcaatggattaacgtcctccaagaagattctgtcaccctgacatgccggggcacccactctccagagtctgattccattcagtggtttcataatgggaacctgattccgactcacacgcagcccagctatcggtttaaagctaacaacaatgactccggggagtatacttgccagacaggacagaccagcctgtctgacccagtgcacctgacagttctgagcgaatggctcgtcctgcagacccctcatcttgagttccaagagggcgaaaccattgtcctgagatgccactcctggaaagataagccccttgtgaaagtcacattttttcagaatggcaagagcaagaagttttctcggagcgatccgaatttcagtattccccaggccaaccactctcacagcggagactatcactgtacaggcaacatcgggtatacactctacagctctaagcccgtcacaattaccgttcaggctcccagcagctccccaatgggcattattgtggccgtcgtgaccggaattgctgtggccgcaatcgtggcagctgtcgtcgctctgatctattgcagaaagaagcggatcagcgccctgccagggtatcctgagtgccgcgaaatgggcgaaactctgcctgagaaacctgctaaccccacaaatcccgatgaagctgacaaagtcggcgctgaaaacacgatcacatactccctgctcatgcatcctgacgctcttgaggaacctgacgatcagaaccggatccgcgccaagagaagcggatctggcgtgaagcagaccctgaatttcgacctgctgaagctggctggcgacgtggaatccaacccaggcccttctagaggccatatgaccgagtacaagcccacggtgcgcctcgccacccgcgacgacgtccccagggccgtacgcaccctcgccgccgcgttcgccgactaccccgccacgcgccacaccgtcgatccggaccgccacatcgagcgggtcaccgagctgcaagaactcttcctcacgcgcgtcgggctcgacatcggcaaggtgtgggtcgcggacgacggcgccgcggtggcggtctggaccacgccggagagcgtcgaagcgggggcggtgttcgccgagatcggcccgcgcatggccgagttgagcggttcccggctggccgcgcagcaacagatggaaggcctcctggcgccgcaccggcccaaggagcccgcgtggttcctggccaccgtcggcgtctcgcccgaccaccagggcaagggtctgggcagcgccgtcgtgctccccggagtggaggcggccgagcgcgccggggtgcccgccttcctggagacctccgcgccccgcaacctccccttctacgagcggctcggcttcaccgtcaccgccgacgtcgaggtgcccgaaggaccgcgcacctggtgcatgacccgcaagcccggtgcctga

SEQ ID NO: 5750 - DNA, 3837 bp, Artificial Sequence
  Synthetic Polynucleotide
atggccttaccagtgaccgccttgctcctgccgctggccttgctgctccacgccgccaggccggaagtgcagctggttgaatctggcggaggactggttcaggctggcggatctctgagactgtcttgtgccgccagcggcagaacctttagcatgggctggtttagacaggcccctggcaaagagagagagttcgtcgccgccatcacatactctggcggcagcccttactacgccgactctgtgaagggcagattcaccatcagccgggacaacgccaagaacaccgtgtacctccagatgaacagcctgaagcctgaggacaccgccgtgtactactgcgccgccaatccaacatacggcagcgactggaacgccgagaattggggccagggaacccaagtgacagtgtctagcctcgaggacctgaagaacgtgttcccacctgaggtggccgtgttcgagcctagcgaggccgagatcagccacacccagaaagccaccctcgtgtgcctggctaccggcttctaccccgaccatgtggaactgtcttggtgggtcaacggcaaagaggtgcacagcggcgtgtctaccgacccccagccactgaaagaacagcccgccctgaacgacagccggtactgcctgagcagcagactgagagtgtccgccaccttctggcagaacccccggaaccacttcagatgccaggtgcagttctacggcctgagcgagaacgacgagtggacccaggacagagccaagcccgtgacccagatcgtgtctgccgaagcctggggcagagccgattgcggatccggcatgcggactgaagacctcccaaaggctgtggtgttcctggagcctcaatggtacagggtgctggagaaggacagtgtgactctgaagtgccagggagcctactcccctgaggacaattccacacagtggtttcacaatgagagcctcatctcaagccaggcctccagctacttcattgacgctgccacagtggacgacagtggagagtacaggtgccagacaaacctctccaccctcagtgacccggtgcagctagaagtccatatcggctggctgttgctccaggcccctcggtgggtgttcaaggaggaagaccctattcacctgaggtgtcacagctggaagaacactgctctgcataaggtcacatatttacagaatggcaaaggcaggaagtattttcatcataattctgacttctacattccaaaagccacactcaaagacagcggctcctacttctgcagggggcttgttgggagtaaaaatgtgtcttcagagactgtgaacatcaccatcactcaaggtttggcagtgtcaaccatctcatcattctttccacctggctaccaagtgtccttctgcctggtcatggtgctgctgttcgccgtggataccggcctgtacttcagcgtcaagaccaacatccggtccagcaccagagactggaaggaccacaagttcaagtggcggaaggaccctcaggacaagagggccaagcgatctggatctggagcaacaaacttctcactactcaaacaagcaggtgacgtggaggagaatcccgggcctactagtatggactggatttggcgcatccttttccttgtcggcgctgctaccggcgcgcattccgggcccgaagtgcaactggttgaatccggtggcggcctggtgcaagcaggcggatctctcagacttagctgtgccgcctccggcagaaccttcacaatgggatggtttaggcaggctccagggaaagagagagagttcgtcgccgccatctctctgtctcccacactggcctactacgccgactctgtgaaaggccggttcaccatctccagagataatgccaagaacaccgtggtgctgcaaatgaactctctgaaacccgaggatacagccctgtactattgtgccgctgaccggaagtccgtgatgagcatcagacccgattactggggacagggcacacaagtcacagtgtcctctacgcgtatccagaaccctgatcctgccgtgtaccagctgcgggatagcaagagcagcgacaagagcgtgtgtctgttcaccgacttcgacagccagaccaacgtgtcccagagcaaggactccgacgtgtacatcaccgataagaccgtgctggacatgcggagcatggacttcaagagcaactccgccgtggcctggtccaacaagtccgatttcgcctgcgccaacgccttcaacaacagcattatccccgaggacacattcttcccaagccccgagagcagctgcggtaccactccagctgctccacctaaagctgtcctgaagctcgaacctcaatggattaacgtcctccaagaagattctgtcaccctgacatgccggggcacccactctccagagtctgattccattcagtggtttcataatgggaacctgattccgactcacacgcagcccagctatcggtttaaagctaacaacaatgactccggggagtatacttgccagacaggacagaccagcctgtctgacccagtgcacctgacagttctgagcgaatggctcgtcctgcagacccctcatcttgagttccaagagggcgaaaccattgtcctgagatgccactcctggaaagataagccccttgtgaaagtcacattttttcagaatggcaagagcaagaagttttctcggagcgatccgaatttcagtattccccaggccaaccactctcacagcggagactatcactgtacaggcaacatcgggtatacactctacagctctaagcccgtcacaattaccgttcaggctcccagcagctccccaatgggcattattgtggccgtcgtgaccggaattgctgtggccgcaatcgtggcagctgtcgtcgctctgatctattgcagaaagaagcggatcagcgccctgccagggtatcctgagtgccgcgaaatgggcgaaactctgcctgagaaacctgctaaccccacaaatcccgatgaagctgacaaagtcggcgctgaaaacacgatcacatactccctgctcatgcatcctgacgctcttgaggaacctgacgatcagaaccggatccgcgccaagagaagcggatctggcgtgaagcagaccctgaatttcgacctgctgaagctggctggcgacgtggaatccaacccaggcccttctagaggccatatgaccgagtacaagcccacggtgcgcctcgccacccgcgacgacgtccccagggccgtacgcaccctcgccgccgcgttcgccgactaccccgccacgcgccacaccgtcgatccggaccgccacatcgagcgggtcaccgagctgcaagaactcttcctcacgcgcgtcgggctcgacatcggcaaggtgtgggtcgcggacgacggcgccgcggtggcggtctggaccacgccggagagcgtcgaagcgggggcggtgttcgccgagatcggcccgcgcatggccgagttgagcggttcccggctggccgcgcagcaacagatggaaggcctcctggcgccgcaccggcccaaggagcccgcgtggttcctggccaccgtcggcgtctcgcccgaccaccagggcaagggtctgggcagcgccgtcgtgctccccggagtggaggcggccgagcgcgccggggtgcccgccttcctggagacctccgcgccccgcaacctccccttctacgagcggctcggcttcaccgtcaccgccgacgtcgaggtgcccgaaggaccgcgcacctggtgcatgacccgcaagcccggtgcctga

SEQ ID NO: 5751 - DNA, 1902 bp, Artificial Sequence; identical to SEQ ID NO: 1638
  Synthetic Polynucleotide

SEQ ID NO: 5752 - DNA, 1605 bp, Artificial Sequence
  Synthetic Polynucleotide
atggccttaccagtgaccgccttgctcctgccgctggccttgctgctccacgccgccaggccggacatccagatgacacagagccctagcagcctgtctgccagcgtgggagacagagtgaccatcacatgcaaggccagcgaccacatcaacaactggctggcctggtatcagcagaagcctggacaggcccctaagctgctgatctacggcgctaccacactggaaacaggcgtgcccagcagattttctggcagcggctctggcaccgactacaccctgacaatatccagcctccagcctgaggacttcgccacctactactgtcagcagagctggaacaccccttggacattcggccagggcaccaagctggaaatcaagagaggcggaggcggaagtggaggcggaggatctggcggcggaggctctcaagttcagcttcaacagcctggcgctgagctggtcaaacctggcgcttctgtgaagatgagctgcaaagccagcggctacgccttcagcagctactggatcaactggatgaagcagaaacccggccagggactcgaatggatcggccaaatctatcccggcgacggcgacaccaactacaacggcaagttcaagggcagagccacactgaccgccgatacctctagcagcacagcctacatgcagctgagcagcctgaccagcgaagatagcgccgtgtacttctgtgcccggtccatcacaacagtcgtgggctgcgctatggactattggggccagggaacaagcgtgaccgtgtctagtacgcgtactccagctgctccacctaaagctgtcctgaagctcgaacctcaatggattaacgtcctccaagaagattctgtcaccctgacatgccggggcacccactctccagagtctgattccattcagtggtttcataatgggaacctgattccgactcacacgcagcccagctatcggtttaaagctaacaacaatgactccggggagtatacttgccagacaggacagaccagcctgtctgacccagtgcacctgacagttctgagcgaatggctcgtcctgcagacccctcatcttgagttccaagagggcgaaaccattgtcctgagatgccactcctggaaagataagccccttgtgaaagtcacattttttcagaatggcaagagcaagaagttttctcggagcgatccgaatttcagtattccccaggccaaccactctcacagcggagactatcactgtacaggcaacatcgggtatacactctacagctctaagcccgtcacaattaccgttcaggctcccagcagctccccaatgggcattattgtggccgtcgtgaccggaattgctgtggccgcaatcgtggcagctgtcgtcgctctgatctattgcagaaagaagcggatcagcgccctgccagggtatcctgagtgccgcgaaatgggcgaaactctgcctgagaaacctgctaaccccacaaatcccgatgaagctgacaaagtcggcgctgaaaacacgatcacatactccctgctcatgcatcctgacgctcttgaggaacctgacgatcagaaccggatc

SEQ ID NO: 5753 - DNA, 1605 bp, Artificial Sequence
  Synthetic Polynucleotide
atggccttaccagtgaccgccttgctcctgccgctggccttgctgctccacgccgccaggccggagatcgtgctgacacagagccctgccaccctgtctctgagccctggcgaaagagccaccctgagctgtagagccagccagagcgtgtccagctacctggcctggtatcagcagaagcccggccaggctccccggctgctgatctacgatgccagcaatagagccaccggcatccccgccagattttccggctctggcagcggcaccgacttcaccctgaccatcagctccctggaacccgaggacttcgccgtgtactactgccagcagcggagcaactggcccatcacattcggccagggcacccggctggaaatcaaaggcggaggcggaagtggaggcggaggatctggcggcggaggctctgaagtgcagctggtggaatcaggcggcggactggtgcagcctggcagaagcctgagactgagctgtgccgccagcggcttcaccttcaacgactacgccatgcactgggtgcgccaggcccctggaaaaggactggaatgggtgtccacaatcagctggaacagcggcagcatcggctacgccgatagcgtgaagggccggttcaccatcagccgggacaacgccaagaagtccctgtacctccagatgaacagcctgcgggccgaggacacagccctgtactattgcgccaaggacatccagtacggcaactactactacggcatggacgtgtggggccagggaaccaccgtgaccgtgtcatctacgcgtactccagctgctccacctaaagctgtcctgaagctcgaacctcaatggattaacgtcctccaagaagattctgtcaccctgacatgccggggcacccactctccagagtctgattccattcagtggtttcataatgggaacctgattccgactcacacgcagcccagctatcggtttaaagctaacaacaatgactccggggagtatacttgccagacaggacagaccagcctgtctgacccagtgcacctgacagttctgagcgaatggctcgtcctgcagacccctcatcttgagttccaagagggcgaaaccattgtcctgagatgccactcctggaaagataagccccttgtgaaagtcacattttttcagaatggcaagagcaagaagttttctcggagcgatccgaatttcagtattccccaggccaaccactctcacagcggagactatcactgtacaggcaacatcgggtatacactctacagctctaagcccgtcacaattaccgttcaggctcccagcagctccccaatgggcattattgtggccgtcgtgaccggaattgctgtggccgcaatcgtggcagctgtcgtcgctctgatctattgcagaaagaagcggatcagcgccctgccagggtatcctgagtgccgcgaaatgggcgaaactctgcctgagaaacctgctaaccccacaaatcccgatgaagctgacaaagtcggcgctgaaaacacgatcacatactccctgctcatgcatcctgacgctcttgaggaacctgacgatcagaaccggatc

SEQ ID NO: 5754 - DNA, 1227 bp, Artificial Sequence
  Synthetic Polynucleotide
atggccttaccagtgaccgccttgctcctgccgctggccttgctgctccacgccgccaggccggaagtgcagctggttgaatctggcggaggactggttcaggctggcggatctctgagactgtcttgtgccgccagcggcagaacctttagcatgggctggtttagacaggcccctggcaaagagagagagttcgtcgccgccatcacatactctggcggcagcccttactacgccgactctgtgaagggcagattcaccatcagccgggacaacgccaagaacaccgtgtacctccagatgaacagcctgaagcctgaggacaccgccgtgtactactgcgccgccaatccaacatacggcagcgactggaacgccgagaattggggccagggaacccaagtgacagtgtctagcacgcgtactccagctgctccacctaaagctgtcctgaagctcgaacctcaatggattaacgtcctccaagaagattctgtcaccctgacatgccggggcacccactctccagagtctgattccattcagtggtttcataatgggaacctgattccgactcacacgcagcccagctatcggtttaaagctaacaacaatgactccggggagtatacttgccagacaggacagaccagcctgtctgacccagtgcacctgacagttctgagcgaatggctcgtcctgcagacccctcatcttgagttccaagagggcgaaaccattgtcctgagatgccactcctggaaagataagccccttgtgaaagtcacattttttcagaatggcaagagcaagaagttttctcggagcgatccgaatttcagtattccccaggccaaccactctcacagcggagactatcactgtacaggcaacatcgggtatacactctacagctctaagcccgtcacaattaccgttcaggctcccagcagctccccaatgggcattattgtggccgtcgtgaccggaattgctgtggccgcaatcgtggcagctgtcgtcgctctgatctattgcagaaagaagcggatcagcgccctgccagggtatcctgagtgccgcgaaatgggcgaaactctgcctgagaaacctgctaaccccacaaatcccgatgaagctgacaaagtcggcgctgaaaacacgatcacatactccctgctcatgcatcctgacgctcttgaggaacctgacgatcagaaccggatc

SEQ ID NO: 5755 - DNA, 1227 bp, Artificial Sequence
  Synthetic Polynucleotide
atggccttaccagtgaccgccttgctcctgccgctggccttgctgctccacgccgccaggccgcagctccagttgcaagagagcggccctggcttggtaaaaccttccgagacccttagcctcacatgcacggttagtgggggcagcatttcctcaggtgattactattggggatggattcggcaacccccgggtaaaggattggagtggattggtcatatttattatagtggagcgacgtactacaacccaagtctcaaatccagggttacaatatccgtcgatacgagcaggaaccaattcagcttgaaactttctagtgtcaccgcagcagacacagccgtctattactgtacgcgggatgactccagtaattggcggtcccgagggcaagggacactggtcacggtctcctcaacgcgtactccagctgctccacctaaagctgtcctgaagctcgaacctcaatggattaacgtcctccaagaagattctgtcaccctgacatgccggggcacccactctccagagtctgattccattcagtggtttcataatgggaacctgattccgactcacacgcagcccagctatcggtttaaagctaacaacaatgactccggggagtatacttgccagacaggacagaccagcctgtctgacccagtgcacctgacagttctgagcgaatggctcgtcctgcagacccctcatcttgagttccaagagggcgaaaccattgtcctgagatgccactcctggaaagataagccccttgtgaaagtcacattttttcagaatggcaagagcaagaagttttctcggagcgatccgaatttcagtattccccaggccaaccactctcacagcggagactatcactgtacaggcaacatcgggtatacactctacagctctaagcccgtcacaattaccgttcaggctcccagcagctccccaatgggcattattgtggccgtcgtgaccggaattgctgtggccgcaatcgtggcagctgtcgtcgctctgatctattgcagaaagaagcggatcagcgccctgccagggtatcctgagtgccgcgaaatgggcgaaactctgcctgagaaacctgctaaccccacaaatcccgatgaagctgacaaagtcggcgctgaaaacacgatcacatactccctgctcatgcatcctgacgctcttgaggaacctgacgatcagaaccggatc

SEQ ID NO: 5756 - DNA, 1227 bp, Artificial Sequence
  Synthetic Polynucleotide
atggccttaccagtgaccgccttgctcctgccgctggccttgctgctccacgccgccaggccgcagctccagctgcaagagtctggacctggcctggtcaagcctagcgagacactgagcctgacctgtaccgtgtccggcgatagcatcagcagcggcgattactactggggctggatcagacagcctcctggcaaaggactggaatggatcggccacatctactacagcggcgtgacctactacaaccccagcctgaagtccagagtgaccatcagcgtggacaccagccggaaccagttctccctgaagctgtctagcgtgacagccgccgataccgccgtgtactactgcaccagagaggacagcagcaactggcggagtagaggccagggaacactggtcacagttagctctacgcgtactccagctgctccacctaaagctgtcctgaagctcgaacctcaatggattaacgtcctccaagaagattctgtcaccctgacatgccggggcacccactctccagagtctgattccattcagtggtttcataatgggaacctgattccgactcacacgcagcccagctatcggtttaaagctaacaacaatgactccggggagtatacttgccagacaggacagaccagcctgtctgacccagtgcacctgacagttctgagcgaatggctcgtcctgcagacccctcatcttgagttccaagagggcgaaaccattgtcctgagatgccactcctggaaagataagccccttgtgaaagtcacattttttcagaatggcaagagcaagaagttttctcggagcgatccgaatttcagtattccccaggccaaccactctcacagcggagactatcactgtacaggcaacatcgggtatacactctacagctctaagcccgtcacaattaccgttcaggctcccagcagctccccaatgggcattattgtggccgtcgtgaccggaattgctgtggccgcaatcgtggcagctgtcgtcgctctgatctattgcagaaagaagcggatcagcgccctgccagggtatcctgagtgccgcgaaatgggcgaaactctgcctgagaaacctgctaaccccacaaatcccgatgaagctgacaaagtcggcgctgaaaacacgatcacatactccctgctcatgcatcctgacgctcttgaggaacctgacgatcagaaccggatc

SEQ ID NO: 5757 - DNA, 1233 bp, Artificial Sequence
  Synthetic Polynucleotide
atggccttaccagtgaccgccttgctcctgccgctggccttgctgctccacgccgccaggccggaagttcagctgcaagagtctggcggaggactggttcaacctggcggaagcctgagactgtcttgtgccgcctctggcagaaccttcagcagcctgttcatgggctggttcagacaggcccctggcaaagagagagaactggtcgccgccatcagccggtacagcctgtacacctactacgccgacagcgtgaagggcagattcaccatcagcgccgacaacgccaagaacgccgtgtacctccagatgaacagcctgaagccagaggacacagccgtgtactactgcgccagcaaacttgagtacaccagcaacgactacgacagctggggccagggaacccaagtgacagtctcttctacgcgtactccagctgctccacctaaagctgtcctgaagctcgaacctcaatggattaacgtcctccaagaagattctgtcaccctgacatgccggggcacccactctccagagtctgattccattcagtggtttcataatgggaacctgattccgactcacacgcagcccagctatcggtttaaagctaacaacaatgactccggggagtatacttgccagacaggacagaccagcctgtctgacccagtgcacctgacagttctgagcgaatggctcgtcctgcagacccctcatcttgagttccaagagggcgaaaccattgtcctgagatgccactcctggaaagataagccccttgtgaaagtcacattttttcagaatggcaagagcaagaagttttctcggagcgatccgaatttcagtattccccaggccaaccactctcacagcggagactatcactgtacaggcaacatcgggtatacactctacagctctaagcccgtcacaattaccgttcaggctcccagcagctccccaatgggcattattgtggccgtcgtgaccggaattgctgtggccgcaatcgtggcagctgtcgtcgctctgatctattgcagaaagaagcggatcagcgccctgccagggtatcctgagtgccgcgaaatgggcgaaactctgcctgagaaacctgctaaccccacaaatcccgatgaagctgacaaagtcggcgctgaaaacacgatcacatactccctgctcatgcatcctgacgctcttgaggaacctgacgatcagaaccggatc

SEQ ID NO: 5758 - DNA, 1257 bp, Artificial Sequence
  Synthetic Polynucleotide
atggccttaccagtgaccgccttgctcctgccgctggccttgctgctccacgccgccaggccggaagtgcagctggttgaatctggcggaggactggttcagcctggcggatctctgagactgtcttgtgccgcctctggcttcgccagcgactactatatcatcggctggttcagacaggcccctggcaaagagagagagggcgtcagctgtatcagcagcagatacgccaacaccaactacgccgacagcgtgaagggcagattcaccatcagccgggacaacgccaagaacaccgtgtacctccagatgaacagcctgaagcctgaggacaccgccgtgtactactgtgccgccgacaccagaagatacacctgtcctgacattgccaccatgcaccggaacttcgattcttggggccagggcacactggtcaccgtttcttctacgcgtactccagctgctccacctaaagctgtcctgaagctcgaacctcaatggattaacgtcctccaagaagattctgtcaccctgacatgccggggcacccactctccagagtctgattccattcagtggtttcataatgggaacctgattccgactcacacgcagcccagctatcggtttaaagctaacaacaatgactccggggagtatacttgccagacaggacagaccagcctgtctgacccagtgcacctgacagttctgagcgaatggctcgtcctgcagacccctcatcttgagttccaagagggcgaaaccattgtcctgagatgccactcctggaaagataagccccttgtgaaagtcacattttttcagaatggcaagagcaagaagttttctcggagcgatccgaatttcagtattccccaggccaaccactctcacagcggagactatcactgtacaggcaacatcgggtatacactctacagctctaagcccgtcacaattaccgttcaggctcccagcagctccccaatgggcattattgtggccgtcgtgaccggaattgctgtggccgcaatcgtggcagctgtcgtcgctctgatctattgcagaaagaagcggatcagcgccctgccagggtatcctgagtgccgcgaaatgggcgaaactctgcctgagaaacctgctaaccccacaaatcccgatgaagctgacaaagtcggcgctgaaaacacgatcacatactccctgctcatgcatcctgacgctcttgaggaacctgacgatcagaaccggatc

SEQ ID NO: 5759 - DNA, 1245 bp, Artificial Sequence
  Synthetic Polynucleotide
atggccttaccagtgaccgccttgctcctgccgctggccttgctgctccacgccgccaggccggaagtgcaactggtggaatctggaggctctctggtgcagccagggggaagcctgagactgtcttgtgccgcttccggcttcaccttcgacgactacgccatgagctgggtgcgccaggtgccaggcaaaggcctggaatgggtgtccagcatcaactggagcggcacccacaccgattacgccgactccgtgaaaggcagattcacaatcagcagaaacaacgccaacaataccctgtacctgcagatgaactccctgaagtctgaggatacagcagtgtattattgcgccaagaactggcgggacgccggcaccacttggtttgagaaaagcggctctgccggacagggaacccaagtgacagtgtcctccacgcgtactccagctgctccacctaaagctgtcctgaagctcgaacctcaatggattaacgtcctccaagaagattctgtcaccctgacatgccggggcacccactctccagagtctgattccattcagtggtttcataatgggaacctgattccgactcacacgcagcccagctatcggtttaaagctaacaacaatgactccggggagtatacttgccagacaggacagaccagcctgtctgacccagtgcacctgacagttctgagcgaatggctcgtcctgcagacccctcatcttgagttccaagagggcgaaaccattgtcctgagatgccactcctggaaagataagccccttgtgaaagtcacattttttcagaatggcaagagcaagaagttttctcggagcgatccgaatttcagtattccccaggccaaccactctcacagcggagactatcactgtacaggcaacatcgggtatacactctacagctctaagcccgtcacaattaccgttcaggctcccagcagctccccaatgggcattattgtggccgtcgtgaccggaattgctgtggccgcaatcgtggcagctgtcgtcgctctgatctattgcagaaagaagcggatcagcgccctgccagggtatcctgagtgccgcgaaatgggcgaaactctgcctgagaaacctgctaaccccacaaatcccgatgaagctgacaaagtcggcgctgaaaacacgatcacatactccctgctcatgcatcctgacgctcttgaggaacctgacgatcagaaccggatc

SEQ ID NO: 5760 - DNA, 1230 bp, Artificial Sequence
  Synthetic Polynucleotide
atggccttaccagtgaccgccttgctcctgccgctggccttgctgctccacgccgccaggccggaggtgcagctggttgaatctggcggaggactggttcagcctggcggatctctgagactgtcttgtgccgccagcggcttcaacatcaaggatacctgtatcggctgggttcgcagagcccctggcaaagaggaagaactggtcgccaaaatctgcaagtacagcggccacaccagatacgccgacagcgtgaagggcagattcaccatcagcgccgacaccagcaagaacaccgcctacctccagatgaacagcctgagagccgaggacaccgccgtgtactattgtgccgctgtgtccgtcagagatgggcactacaattactggggccagggcaccaccgtgaccgtttcttcaacgcgtactccagctgctccacctaaagctgtcctgaagctcgaacctcaatggattaacgtcctccaagaagattctgtcaccctgacatgccggggcacccactctccagagtctgattccattcagtggtttcataatgggaacctgattccgactcacacgcagcccagctatcggtttaaagctaacaacaatgactccggggagtatacttgccagacaggacagaccagcctgtctgacccagtgcacctgacagttctgagcgaatggctcgtcctgcagacccctcatcttgagttccaagagggcgaaaccattgtcctgagatgccactcctggaaagataagccccttgtgaaagtcacattttttcagaatggcaagagcaagaagttttctcggagcgatccgaatttcagtattccccaggccaaccactctcacagcggagactatcactgtacaggcaacatcgggtatacactctacagctctaagcccgtcacaattaccgttcaggctcccagcagctccccaatgggcattattgtggccgtcgtgaccggaattgctgtggccgcaatcgtggcagctgtcgtcgctctgatctattgcagaaagaagcggatcagcgccctgccagggtatcctgagtgccgcgaaatgggcgaaactctgcctgagaaacctgctaaccccacaaatcccgatgaagctgacaaagtcggcgctgaaaacacgatcacatactccctgctcatgcatcctgacgctcttgaggaacctgacgatcagaaccggatc

SEQ ID NO: 5761 - DNA, 1245 bp, Artificial Sequence
  Synthetic Polynucleotide
atggccttaccagtgaccgccttgctcctgccgctggccttgctgctccacgccgccaggccgggctctgacctgggcatcaagctgctgttcgccgctgccaagggccaggacgacgaagtgcggattctgctggctgctggggccgacgtgaacgccaaggatttcgagggctacacccccctgcacgtggccgcctatgatggacacctggaaatcgtggaagtgctgctgaaggctggcgctgatgtgaatgccaaagacagccagggccggacccctctgcatgaagccgcctacagcggccatctggaaattgtggaagtgctgctgaaagccggggcagacgtgaacgctcaggacgacgctggcgagacaccagccgatctggctgcagcttggggccacgaagatatcgccgaggtgctgcagaagacgcgtactccagctgctccacctaaagctgtcctgaagctcgaacctcaatggattaacgtcctccaagaagattctgtcaccctgacatgccggggcacccactctccagagtctgattccattcagtggtttcataatgggaacctgattccgactcacacgcagcccagctatcggtttaaagctaacaacaatgactccggggagtatacttgccagacaggacagaccagcctgtctgacccagtgcacctgacagttctgagcgaatggctcgtcctgcagacccctcatcttgagttccaagagggcgaaaccattgtcctgagatgccactcctggaaagataagccccttgtgaaagtcacattttttcagaatggcaagagcaagaagttttctcggagcgatccgaatttcagtattccccaggccaaccactctcacagcggagactatcactgtacaggcaacatcgggtatacactctacagctctaagcccgtcacaattaccgttcaggctcccagcagctccccaatgggcattattgtggccgtcgtgaccggaattgctgtggccgcaatcgtggcagctgtcgtcgctctgatctattgcagaaagaagcggatcagcgccctgccagggtatcctgagtgccgcgaaatgggcgaaactctgcctgagaaacctgctaaccccacaaatcccgatgaagctgacaaagtcggcgctgaaaacacgatcacatactccctgctcatgcatcctgacgctcttgaggaacctgacgatcagaaccggatc

SEQ ID NO: 5762 - DNA, 1047 bp, Artificial Sequence
  Synthetic Polynucleotide
atggccttaccagtgaccgccttgctcctgccgctggccttgctgctccacgccgccaggccggtggacaacaagttcaacaaagagcggtacagcgcctactacgagatttggcaactgcccaacctgaacgtgcggcagaaggccgccttcatcggatctctgcaggacgaccctagccagagcgccaatctgctggccgaggccaagaagctgaacgacgcccaggcccctaaaacgcgtactccagctgctccacctaaagctgtcctgaagctcgaacctcaatggattaacgtcctccaagaagattctgtcaccctgacatgccggggcacccactctccagagtctgattccattcagtggtttcataatgggaacctgattccgactcacacgcagcccagctatcggtttaaagctaacaacaatgactccggggagtatacttgccagacaggacagaccagcctgtctgacccagtgcacctgacagttctgagcgaatggctcgtcctgcagacccctcatcttgagttccaagagggcgaaaccattgtcctgagatgccactcctggaaagataagccccttgtgaaagtcacattttttcagaatggcaagagcaagaagttttctcggagcgatccgaatttcagtattccccaggccaaccactctcacagcggagactatcactgtacaggcaacatcgggtatacactctacagctctaagcccgtcacaattaccgttcaggctcccagcagctccccaatgggcattattgtggccgtcgtgaccggaattgctgtggccgcaatcgtggcagctgtcgtcgctctgatctattgcagaaagaagcggatcagcgccctgccagggtatcctgagtgccgcgaaatgggcgaaactctgcctgagaaacctgctaaccccacaaatcccgatgaagctgacaaagtcggcgctgaaaacacgatcacatactccctgctcatgcatcctgacgctcttgaggaacctgacgatcagaaccggatc

SEQ ID NO: 5763 - DNA, 1140 bp, Artificial Sequence
  Synthetic Polynucleotide
atggccttaccagtgaccgccttgctcctgccgctggccttgctgctccacgccgccaggccgctgccagccccgaagaatttggtcgtttcccgtgtcactgaggactctgcacgtctgagctggaccgcaccggacgcggcgttcgacagctttgcaatcggctactgggagtgggatgatgacggcgaggccattgtgctgaccgttccgggtagcgagcgcagctacgatctgaccggtctgaagccgggtacggaatatccggtgtatattgcgggcgtgaagggtggccagtggagcttcccgctgagcgcgatctttaccaccacgcgtactccagctgctccacctaaagctgtcctgaagctcgaacctcaatggattaacgtcctccaagaagattctgtcaccctgacatgccggggcacccactctccagagtctgattccattcagtggtttcataatgggaacctgattccgactcacacgcagcccagctatcggtttaaagctaacaacaatgactccggggagtatacttgccagacaggacagaccagcctgtctgacccagtgcacctgacagttctgagcgaatggctcgtcctgcagacccctcatcttgagttccaagagggcgaaaccattgtcctgagatgccactcctggaaagataagccccttgtgaaagtcacattttttcagaatggcaagagcaagaagttttctcggagcgatccgaatttcagtattccccaggccaaccactctcacagcggagactatcactgtacaggcaacatcgggtatacactctacagctctaagcccgtcacaattaccgttcaggctcccagcagctccccaatgggcattattgtggccgtcgtgaccggaattgctgtggccgcaatcgtggcagctgtcgtcgctctgatctattgcagaaagaagcggatcagcgccctgccagggtatcctgagtgccgcgaaatgggcgaaactctgcctgagaaacctgctaaccccacaaatcccgatgaagctgacaaagtcggcgctgaaaacacgatcacatactccctgctcatgcatcctgacgctcttgaggaacctgacgatcagaaccggatc

SEQ ID NO: 5764 - DNA, 1143 bp, Artificial Sequence
  Synthetic Polynucleotide
atggccttaccagtgaccgccttgctcctgccgctggccttgctgctccacgccgccaggccgatgctgcccgctcctaagaatctggtggtgtccagaatcaccgaggacagcgccagactgtcttggacagctcctgatgccgccttcgacagcttccccatccggtacatcgagacactgatctggggcgaagccatctggctggatgtgcctggaagcgagagaagctacgacctgaccggactgaagcctggcacagagtatgccgtggtcatcaccggcgtgaaaggcggcagattctctagccctctggtggcctctttcaccaccacgcgtactccagctgctccacctaaagctgtcctgaagctcgaacctcaatggattaacgtcctccaagaagattctgtcaccctgacatgccggggcacccactctccagagtctgattccattcagtggtttcataatgggaacctgattccgactcacacgcagcccagctatcggtttaaagctaacaacaatgactccggggagtatacttgccagacaggacagaccagcctgtctgacccagtgcacctgacagttctgagcgaatggctcgtcctgcagacccctcatcttgagttccaagagggcgaaaccattgtcctgagatgccactcctggaaagataagccccttgtgaaagtcacattttttcagaatggcaagagcaagaagttttctcggagcgatccgaatttcagtattccccaggccaaccactctcacagcggagactatcactgtacaggcaacatcgggtatacactctacagctctaagcccgtcacaattaccgttcaggctcccagcagctccccaatgggcattattgtggccgtcgtgaccggaattgctgtggccgcaatcgtggcagctgtcgtcgctctgatctattgcagaaagaagcggatcagcgccctgccagggtatcctgagtgccgcgaaatgggcgaaactctgcctgagaaacctgctaaccccacaaatcccgatgaagctgacaaagtcggcgctgaaaacacgatcacatactccctgctcatgcatcctgacgctcttgaggaacctgacgatcagaaccggatc

SEQ ID NO: 5765 - DNA, 1794 bp, Artificial Sequence
  Synthetic Polynucleotide
atggccttaccagtgaccgccttgctcctgccgctggccttgctgctccacgccgccaggccgatggccttaccagtgaccgccttgctcctgccgctggccttgctgctccacgccgccaggccgctgttcaatcaagaggtgcagatccctctgaccgagagctactgtggcccctgtcctaagaactggatctgctacaagaacaactgctaccagttcttcgacgagagcaagaattggtacgagagccaggccagctgcatgagccagaatgccagcctgctgaaggtgtacagcaaagaggaccaggacctgctgaaactggtcaagagctaccactggatgggccttgtgcacatccccaccaatggctcttggcagtgggaggacggcagcattctgagccctaacctgctgaccatcatcgagatgcagaagggcgactgcgccctgtacgccagcagctttaagggctacatcgagaattgcagcaccccgaacacctacatctgtatgcagagaaccgttggcggaggcggaagtggaggcggaggatctggcggcggaggctctgacctctttaatcaagaagtccagattccactcaccgaatcctactgcggaccttgtccaaaaaattggatttgttataagaacaactgttatcaattctttgatgagtctaaaaattggtatgagtcccaggcttcctgcatgtctcagaacgcttctctgctgaaagtctactctaaagaagatcaggatctcctgaagctcgtcaagtcttatcattggatggggctcgtccacattcctaccaacggaagctggcaatgggaagatggctccatcctgtctccaaatctgctcacgattattgaaatgcagaaaggggattgtgctctctacgccagctccttcaagggatatattgagaactgtagcacgcccaatacttatatctgtatgcaacggaccgtgacgcgtactccagctgctccacctaaagctgtcctgaagctcgaacctcaatggattaacgtcctccaagaagattctgtcaccctgacatgccggggcacccactctccagagtctgattccattcagtggtttcataatgggaacctgattccgactcacacgcagcccagctatcggtttaaagctaacaacaatgactccggggagtatacttgccagacaggacagaccagcctgtctgacccagtgcacctgacagttctgagcgaatggctcgtcctgcagacccctcatcttgagttccaagagggcgaaaccattgtcctgagatgccactcctggaaagataagccccttgtgaaagtcacattttttcagaatggcaagagcaagaagttttctcggagcgatccgaatttcagtattccccaggccaaccactctcacagcggagactatcactgtacaggcaacatcgggtatacactctacagctctaagcccgtcacaattaccgttcaggctcccagcagctccccaatgggcattattgtggccgtcgtgaccggaattgctgtggccgcaatcgtggcagctgtcgtcgctctgatctattgcagaaagaagcggatcagcgccctgccagggtatcctgagtgccgcgaaatgggcgaaactctgcctgagaaacctgctaaccccacaaatcccgatgaagctgacaaagtcggcgctgaaaacacgatcacatactccctgctcatgcatcctgacgctcttgaggaacctgacgatcagaaccggatc

SEQ ID NO: 5766 - DNA, 1434 bp, Artificial Sequence
  Synthetic Polynucleotide
atggccttaccagtgaccgccttgctcctgccgctggccttgctgctccacgccgccaggccgatggagctgactgatttgctcctggcggccatgcttcttgcagtggcaagactaactctgtccagccccgtagctcctgcctgtgaccccagactcctaaataaactgctgcgtgactcccacctccttcacagccgactgagtcagtgtcccgacgtggaccctttgtctatccctgttctgctgcctgctgtggactttagcctgggagaatggaaaacccagacggaacagagcaaggcacaggacattctaggggcagtgtcccttctactggagggagtgatggcagcacgaggacagttggaaccctcctgcctctcatccctcctgggacagctttctgggcaggttcgcctcctcttgggggccctgcagggcctcctaggaacccagcttcctctacagggcaggaccacagctcacaaggaccccaatgccctcttcttgagcttgcaacaactgcttcggggaaaggtgcgcttcctgcttctggtagaaggtcccaccctctgtgtcagacggaccctgccaaccacagctgtcccaagcagtacttctacgcgtactccagctgctccacctaaagctgtcctgaagctcgaacctcaatggattaacgtcctccaagaagattctgtcaccctgacatgccggggcacccactctccagagtctgattccattcagtggtttcataatgggaacctgattccgactcacacgcagcccagctatcggtttaaagctaacaacaatgactccggggagtatacttgccagacaggacagaccagcctgtctgacccagtgcacctgacagttctgagcgaatggctcgtcctgcagacccctcatcttgagttccaagagggcgaaaccattgtcctgagatgccactcctggaaagataagccccttgtgaaagtcacattttttcagaatggcaagagcaagaagttttctcggagcgatccgaatttcagtattccccaggccaaccactctcacagcggagactatcactgtacaggcaacatcgggtatacactctacagctctaagcccgtcacaattaccgttcaggctcccagcagctccccaatgggcattattgtggccgtcgtgaccggaattgctgtggccgcaatcgtggcagctgtcgtcgctctgatctattgcagaaagaagcggatcagcgccctgccagggtatcctgagtgccgcgaaatgggcgaaactctgcctgagaaacctgctaaccccacaaatcccgatgaagctgacaaagtcggcgctgaaaacacgatcacatactccctgctcatgcatcctgacgctcttgaggaacctgacgatcagaaccggatc

SEQ ID NO: 5767 - DNA, 1032 bp, Artificial Sequence
  Synthetic Polynucleotide
atggccttaccagtgaccgccttgctcctgccgctggccttgctgctccacgccgccaggccgatggaccccgacctggaaatcagagccgccttcctgcggcagagaaacacagccctgagaacagaggtggccgagctggaacaagaggtgcagcggctggaaaacgaggtgtcccagtacgagacaagatacggccctctcggaggcggaaaaacgcgtacgcgtactccagctgctccacctaaagctgtcctgaagctcgaacctcaatggattaacgtcctccaagaagattctgtcaccctgacatgccggggcacccactctccagagtctgattccattcagtggtttcataatgggaacctgattccgactcacacgcagcccagctatcggtttaaagctaacaacaatgactccggggagtatacttgccagacaggacagaccagcctgtctgacccagtgcacctgacagttctgagcgaatggctcgtcctgcagacccctcatcttgagttccaagagggcgaaaccattgtcctgagatgccactcctggaaagataagccccttgtgaaagtcacattttttcagaatggcaagagcaagaagttttctcggagcgatccgaatttcagtattccccaggccaaccactctcacagcggagactatcactgtacaggcaacatcgggtatacactctacagctctaagcccgtcacaattaccgttcaggctcccagcagctccccaatgggcattattgtggccgtcgtgaccggaattgctgtggccgcaatcgtggcagctgtcgtcgctctgatctattgcagaaagaagcggatcagcgccctgccagggtatcctgagtgccgcgaaatgggcgaaactctgcctgagaaacctgctaaccccacaaatcccgatgaagctgacaaagtcggcgctgaaaacacgatcacatactccctgctcatgcatcctgacgctcttgaggaacctgacgatcagaaccggatc

SEQ ID NO: 5768 - DNA, 957 bp, Artificial Sequence
  Synthetic Polynucleotide
atggccttaccagtgaccgccttgctcctgccgctggccttgctgctccacgccgccaggccggaagttgctgccctcgagaaggaggtagcagctttggaaaaagaagtcgcagcccttgagaaagaagttgcggctctggagaagacgcgtactccagctgctccacctaaagctgtcctgaagctcgaacctcaatggattaacgtcctccaagaagattctgtcaccctgacatgccggggcacccactctccagagtctgattccattcagtggtttcataatgggaacctgattccgactcacacgcagcccagctatcggtttaaagctaacaacaatgactccggggagtatacttgccagacaggacagaccagcctgtctgacccagtgcacctgacagttctgagcgaatggctcgtcctgcagacccctcatcttgagttccaagagggcgaaaccattgtcctgagatgccactcctggaaagataagccccttgtgaaagtcacattttttcagaatggcaagagcaagaagttttctcggagcgatccgaatttcagtattccccaggccaaccactctcacagcggagactatcactgtacaggcaacatcgggtatacactctacagctctaagcccgtcacaattaccgttcaggctcccagcagctccccaatgggcattattgtggccgtcgtgaccggaattgctgtggccgcaatcgtggcagctgtcgtcgctctgatctattgcagaaagaagcggatcagcgccctgccagggtatcctgagtgccgcgaaatgggcgaaactctgcctgagaaacctgctaaccccacaaatcccgatgaagctgacaaagtcggcgctgaaaacacgatcacatactccctgctcatgcatcctgacgctcttgaggaacctgacgatcagaaccggatc

SEQ ID NO: 5769 - DNA, 1731 bp, Artificial Sequence
  Synthetic Polynucleotide
atggccttaccagtgaccgccttgctcctgccgctggccttgctgctccacgccgccaggccgctgttcaatcaagaggtgcagatccctctgaccgagagctactgtggcccctgtcctaagaactggatctgctacaagaacaactgctaccagttcttcgacgagagcaagaattggtacgagagccaggccagctgcatgagccagaatgccagcctgctgaaggtgtacagcaaagaggaccaggacctgctgaaactggtcaagagcgcccactggatgggccttgtgcacatccccaccaatggctcttggcagtgggaggacggcagcattctgagccctaacctgctgaccatcatcgagatgcagaagggcgactgcgccctgtacgccagcagctttaagggcttcatcgagaattgcagcaccccgaacacctacatctgtatgcagagaaccgttggcggaggcggaagtggaggcggaggatctggcggcggaggctctgacctctttaatcaagaagtccagattccactcaccgaatcctactgcggaccttgtccaaaaaattggatttgttataagaacaactgttatcaattctttgatgagtctaaaaattggtatgagtcccaggcttcctgcatgtctcagaacgcttctctgctgaaagtctactctaaagaagatcaggatctcctgaagctcgtcaagtctgcccattggatggggctcgtccacattcctaccaacggaagctggcaatgggaagatggctccatcctgtctccaaatctgctcacgattattgaaatgcagaaaggggattgtgctctctacgccagctccttcaagggatttattgagaactgtagcacgcccaatacttatatctgtatgcaacggaccgtgacgcgtactccagctgctccacctaaagctgtcctgaagctcgaacctcaatggattaacgtcctccaagaagattctgtcaccctgacatgccggggcacccactctccagagtctgattccattcagtggtttcataatgggaacctgattccgactcacacgcagcccagctatcggtttaaagctaacaacaatgactccggggagtatacttgccagacaggacagaccagcctgtctgacccagtgcacctgacagttctgagcgaatggctcgtcctgcagacccctcatcttgagttccaagagggcgaaaccattgtcctgagatgccactcctggaaagataagccccttgtgaaagtcacattttttcagaatggcaagagcaagaagttttctcggagcgatccgaatttcagtattccccaggccaaccactctcacagcggagactatcactgtacaggcaacatcgggtatacactctacagctctaagcccgtcacaattaccgttcaggctcccagcagctccccaatgggcattattgtggccgtcgtgaccggaattgctgtggccgcaatcgtggcagctgtcgtcgctctgatctattgcagaaagaagcggatcagcgccctgccagggtatcctgagtgccgcgaaatgggcgaaactctgcctgagaaacctgctaaccccacaaatcccgatgaagctgacaaagtcggcgctgaaaacacgatcacatactccctgctcatgcatcctgacgctcttgaggaacctgacgatcagaaccggatc

SEQ ID NO: 5770 - DNA, 1731 bp, Artificial Sequence
  Synthetic Polynucleotide
atggccttaccagtgaccgccttgctcctgccgctggccttgctgctccacgccgccaggccgctgttcaatcaagaggtgcagatccctctgaccgagagctactgtggcccctgtcctaagaactggatctgctacaagaacaactgctaccagttcttcgacgagagcaagaattggtacgagagccaggccagctgcatgagccagaatgccagcctgctgaaggtgtacagcaaagaggaccaggacctgctgaaactggtcaagagcgcccactggatgggccttgtgcacatccccaccaatggctcttggcagtgggaggacggcagcattctgagccctaacctgctgaccatcatcgagatgcagaagggcgactgcgccctgtacgccagcagctttaagggctacatcgagaattgcagcaccccgaacacctacatctgtatgcagagaaccgtttctggcggaggcggctctggaggaggcggaagtggcggcggaggcgacctctttaatcaagaagtccagattccactcaccgaatcctactgcggaccttgtccaaaaaattggatttgttataagaacaactgttatcaattctttgatgagtctaaaaattggtatgagtcccaggcttcctgcatgtctcagaacgcttctctgctgaaagtctactctaaagaagatcaggatctcctgaagctcgtcaagtctgcccattggatggggctcgtccacattcctaccaacggaagctggcaatgggaagatggctccatcctgtctccaaatctgctcacgattattgaaatgcagaaaggggattgtgctctctacgccagctccttcaagggatatattgagaactgtagcacgcccaatacttatatctgtatgcaacggaccgtgacgcgtactccagctgctccacctaaagctgtcctgaagctcgaacctcaatggattaacgtcctccaagaagattctgtcaccctgacatgccggggcacccactctccagagtctgattccattcagtggtttcataatgggaacctgattccgactcacacgcagcccagctatcggtttaaagctaacaacaatgactccggggagtatacttgccagacaggacagaccagcctgtctgacccagtgcacctgacagttctgagcgaatggctcgtcctgcagacccctcatcttgagttccaagagggcgaaaccattgtcctgagatgccactcctggaaagataagccccttgtgaaagtcacattttttcagaatggcaagagcaagaagttttctcggagcgatccgaatttcagtattccccaggccaaccactctcacagcggagactatcactgtacaggcaacatcgggtatacactctacagctctaagcccgtcacaattaccgttcaggctcccagcagctccccaatgggcattattgtggccgtcgtgaccggaattgctgtggccgcaatcgtggcagctgtcgtcgctctgatctattgcagaaagaagcggatcagcgccctgccagggtatcctgagtgccgcgaaatgggcgaaactctgcctgagaaacctgctaaccccacaaatcccgatgaagctgacaaagtcggcgctgaaaacacgatcacatactccctgctcatgcatcctgacgctcttgaggaacctgacgatcagaaccggatc

SEQ ID NO: 5771 - DNA, 3222 bp, Artificial Sequence
  Synthetic Polynucleotide
atggccttaccagtgaccgccttgctcctgccgctggccttgctgctccacgccgccaggccggacatccagatgacacagagccctagcagcctgtctgccagcgtgggagacagagtgaccatcacatgcaaggccagcgaccacatcaacaactggctggcctggtatcagcagaagcctggacaggcccctaagctgctgatctacggcgctaccacactggaaacaggcgtgcccagcagattttctggcagcggctctggcaccgactacaccctgacaatatccagcctccagcctgaggacttcgccacctactactgtcagcagagctggaacaccccttggacattcggccagggcaccaagctggaaatcaagagactcgagacaccagccgctcctccaaaggccgtgctgaaactggaaccccagtggatcaacgtgctgcaagaggacagcgtgaccctgacctgtagaggcacacacagccctgagagcgacagcatccagtggttccacaacggcaatctgatccccacacacacccagcctagctacagattcaaggccaacaacaacgacagcggcgagtacacctgtcagaccggccagacaagcctgagcgatcctgtgcatctgaccgtgctgtctgagtggctggtgctgcagacaccccacctggaatttcaagagggcgagacaatcgtgctgcggtgccacagctggaaggacaagcctctggtcaaagtgacattcttccagaacgggaagtccaagaagttcagcagaagcgaccccaacttcagcatccctcaggccaatcacagccactccggcgattaccactgcaccggcaatatcggctacaccctgtacagcagcaagcccgtgaccatcacagtgcaggcccctagcagtagccctatgggaatcatcgtggccgtggtcacaggcattgccgtggctgctattgtggctgcagtggtggccctgatctactgccggaagaagagaatctctgccctgcctggctaccccgagtgtagagagatgggagagacactgcccgagaagcccgccaatcctaccaatcctgacgaggccgacaaagtgggagccgagaacaccatcacctacagcctgctgatgcaccccgacgcactggaagaacccgacgaccagaatagaatcagggccaagcgatctggatctggagcaacaaacttctcactactcaaacaagcaggtgacgtggaggagaatcccgggcctactagtatggactggatttggcgcatccttttccttgtcggcgctgctaccggcgcgcattccttcgaacaagttcagcttcaacagcctggcgctgagctggtcaaacctggcgcttctgtgaagatgagctgcaaagccagcggctacgccttcagcagctactggatcaactggatgaagcagaaacccggccagggactcgaatggatcggccaaatctatcccggcgacggcgacaccaactacaacggcaagttcaagggcagagccacactgaccgccgatacctctagcagcacagcctacatgcagctgagcagcctgaccagcgaagatagcgccgtgtacttctgtgcccggtccatcacaacagtcgtgggctgcgctatggactattggggccagggaacaagcgtgaccgtgtctagtacgcgtactccagctgctccacctaaagctgtcctgaagctcgaacctcaatggattaacgtcctccaagaagattctgtcaccctgacatgccggggcacccactctccagagtctgattccattcagtggtttcataatgggaacctgattccgactcacacgcagcccagctatcggtttaaagctaacaacaatgactccggggagtatacttgccagacaggacagaccagcctgtctgacccagtgcacctgacagttctgagcgaatggctcgtcctgcagacccctcatcttgagttccaagagggcgaaaccattgtcctgagatgccactcctggaaagataagccccttgtgaaagtcacattttttcagaatggcaagagcaagaagttttctcggagcgatccgaatttcagtattccccaggccaaccactctcacagcggagactatcactgtacaggcaacatcgggtatacactctacagctctaagcccgtcacaattaccgttcaggctcccagcagctccccaatgggcattattgtggccgtcgtgaccggaattgctgtggccgcaatcgtggcagctgtcgtcgctctgatctattgcagaaagaagcggatcagcgccctgccagggtatcctgagtgccgcgaaatgggcgaaactctgcctgagaaacctgctaaccccacaaatcccgatgaagctgacaaagtcggcgctgaaaacacgatcacatactccctgctcatgcatcctgacgctcttgaggaacctgacgatcagaaccggatccgcgccaagagaagcggatctggcgtgaagcagaccctgaatttcgacctgctgaagctggctggcgacgtggaatccaacccaggcccttctagaggccatatgaccgagtacaagcccacggtgcgcctcgccacccgcgacgacgtccccagggccgtacgcaccctcgccgccgcgttcgccgactaccccgccacgcgccacaccgtcgatccggaccgccacatcgagcgggtcaccgagctgcaagaactcttcctcacgcgcgtcgggctcgacatcggcaaggtgtgggtcgcggacgacggcgccgcggtggcggtctggaccacgccggagagcgtcgaagcgggggcggtgttcgccgagatcggcccgcgcatggccgagttgagcggttcccggctggccgcgcagcaacagatggaaggcctcctggcgccgcaccggcccaaggagcccgcgtggttcctggccaccgtcggcgtctcgcccgaccaccagggcaagggtctgggcagcgccgtcgtgctccccggagtggaggcggccgagcgcgccggggtgcccgccttcctggagacctccgcgccccgcaacctccccttctacgagcggctcggcttcaccgtcaccgccgacgtcgaggtgcccgaaggaccgcgcacctggtgcatgacccgcaagcccggtgcctga

SEQ ID NO: 5772 - DNA, 3384 bp, Artificial Sequence
  Synthetic Polynucleotide
atggccttaccagtgaccgccttgctcctgccgctggccttgctgctccacgccgccaggccggcatgcgaagtgcagctgcttgaaagtggcggcggactgattcagcctggcggatctctgagactgagctgtgccgccagcggcttcaccttttctagccacgccatgacctgggtccgacaggcacctggaaaagggcttgaatgggtgtccgccatcagcggctctggcgattacacacactacgccgacagcgtgaagggcagattcaccatcagcagagacaacagcaagaacaccgtgtacctccagatgaacagcctgagagccgaggacagcgccgtgtattattgcgccaaggatgaggatggcggcagcctgcttggacacagaggacaaggcaccctggtcaccgtttcttccggtaccggcggaggcggatctggcggcggaggtagcggtggcggaggatctgaattcggatctctcgagacaccagccgctcctccaaaggccgtgctgaaactggaaccccagtggatcaacgtgctgcaagaggacagcgtgaccctgacctgtagaggcacacacagccctgagagcgacagcatccagtggttccacaacggcaatctgatccccacacacacccagcctagctacagattcaaggccaacaacaacgacagcggcgagtacacctgtcagaccggccagacaagcctgagcgatcctgtgcatctgaccgtgctgtctgagtggctggtgctgcagacaccccacctggaatttcaagagggcgagacaatcgtgctgcggtgccacagctggaaggacaagcctctggtcaaagtgacattcttccagaacgggaagtccaagaagttcagcagaagcgaccccaacttcagcatccctcaggccaatcacagccactccggcgattaccactgcaccggcaatatcggctacaccctgtacagcagcaagcccgtgaccatcacagtgcaggcccctagcagtagccctatgggaatcatcgtggccgtggtcacaggcattgccgtggctgctattgtggctgcagtggtggccctgatctactgccggaagaagagaatctctgccctgcctggctaccccgagtgtagagagatgggagagacactgcccgagaagcccgccaatcctaccaatcctgacgaggccgacaaagtgggagccgagaacaccatcacctacagcctgctgatgcaccccgacgcactggaagaacccgacgaccagaatagaatcagggccaagcgatctggatctggagcaacaaacttctcactactcaaacaagcaggtgacgtggaggagaatcccgggcctactagtgccaccatggactggatttggcgcatccttttccttgtcggcgctgctaccggcgcccattccgggcccgaagtgcagctggttgaatctggcggaggactggttcaggctggcggatctctgagactgtcttgtgccgccagcggcagaacctttagcatgggctggtttagacaggcccctggcaaagagagagagttcgtcgccgccatcacatactctggcggcagcccttactacgccgactctgtgaagggcagattcaccatcagccgggacaacgccaagaacaccgtgtacctccagatgaacagcctgaagcctgaggacaccgccgtgtactactgcgccgccaatccaacatacggcagcgactggaacgccgagaattggggccagggaacccaagtgacagtgtctagcggatccggcggcggaggatctggcggaggcggatctgggggcggaggctctttcgaaggcagcacgcgtactccagctgctccacctaaagctgtcctgaagctcgaacctcaatggattaacgtcctccaagaagattctgtcaccctgacatgccggggcacccactctccagagtctgattccattcagtggtttcataatgggaacctgattccgactcacacgcagcccagctatcggtttaaagctaacaacaatgactccggggagtatacttgccagacaggacagaccagcctgtctgacccagtgcacctgacagttctgagcgaatggctcgtcctgcagacccctcatcttgagttccaagagggcgaaaccattgtcctgagatgccactcctggaaagataagccccttgtgaaagtcacattttttcagaatggcaagagcaagaagttttctcggagcgatccgaatttcagtattccccaggccaaccactctcacagcggagactatcactgtacaggcaacatcgggtatacactctacagctctaagcccgtcacaattaccgttcaggctcccagcagctccccaatgggcattattgtggccgtcgtgaccggaattgctgtggccgcaatcgtggcagctgtcgtcgctctgatctattgcagaaagaagcggatcagcgccctgccagggtatcctgagtgccgcgaaatgggcgaaactctgcctgagaaacctgctaaccccacaaatcccgatgaagctgacaaagtcggcgctgaaaacacgatcacatactccctgctcatgcatcctgacgctcttgaggaacctgacgatcagaaccggatccgcgccaagagaagcggatctggcgtgaagcagaccctgaatttcgacctgctgaagctggctggcgacgtggaatccaacccaggcccttctagaggccatatgaccgagtacaagcccacggtgcgcctcgccacccgcgacgacgtccccagggccgtacgcaccctcgccgccgcgttcgccgactaccccgccacgcgccacaccgtcgatccggaccgccacatcgagcgggtcaccgagctgcaagaactcttcctcacgcgcgtcgggctcgacatcggcaaggtgtgggtcgcggacgacggcgccgcggtggcggtctggaccacgccggagagcgtcgaagcgggggcggtgttcgccgagatcggcccgcgcatggccgagttgagcggttcccggctggccgcgcagcaacagatggaaggcctcctggcgccgcaccggcccaaggagcccgcgtggttcctggccaccgtcggcgtctcgcccgaccaccagggcaagggtctgggcagcgccgtcgtgctccccggagtggaggcggccgagcgcgccggggtgcccgccttcctggagacctccgcgccccgcaacctccccttctacgagcggctcggcttcaccgtcaccgccgacgtcgaggtgcccgaaggaccgcgcacctggtgcatgacccgcaagcccggtgcctga

SEQ ID NO: 5773 - DNA, 3834 bp, Artificial Sequence
  Synthetic Polynucleotide
atggccttaccagtgaccgccttgctcctgccgctggccttgctgctccacgccgccaggccggacatccagatgacacagagccctagcagcctgtctgccagcgtgggagacagagtgaccatcacatgcaaggccagcgaccacatcaacaactggctggcctggtatcagcagaagcctggacaggcccctaagctgctgatctacggcgctaccacactggaaacaggcgtgcccagcagattttctggcagcggctctggcaccgactacaccctgacaatatccagcctccagcctgaggacttcgccacctactactgtcagcagagctggaacaccccttggacattcggccagggcaccaagctggaaatcaagagactcgagggacagcctaaggccaatcctaccgtgacactgttccctccaagcagcgaagaactccaggccaacaaggccacacttgtgtgcctgatctccgacttctaccctggggctgtgacagtggcttggaaggccgatggatctcctgtgaaagccggcgtggaaaccaccaagccatccaagcagagcaacaacaaatacgccgccagctcctacctgagcctgacacctgagcagtggaagtcccacagatcctacagctgccaagtgacccacgaaggcagcaccgtggaaaagacagtggcccctacagagtgcagcggatccacaccagccgctcctccaaaggccgtgctgaaactggaaccccagtggatcaacgtgctgcaagaggacagcgtgaccctgacctgtagaggcacacacagccctgagagcgacagcatccagtggttccacaacggcaatctgatccccacacacacccagcctagctacagattcaaggccaacaacaacgacagcggcgagtacacctgtcagaccggccagacaagcctgagcgatcctgtgcatctgaccgtgctgtctgagtggctggtgctgcagacaccccacctggaatttcaagagggcgagacaatcgtgctgcggtgccacagctggaaggacaagcctctggtcaaagtgacattcttccagaacgggaagtccaagaagttcagcagaagcgaccccaacttcagcatccctcaggccaatcacagccactccggcgattaccactgcaccggcaatatcggctacaccctgtacagcagcaagcccgtgaccatcacagtgcaggcccctagcagtagccctatgggaatcatcgtggccgtggtcacaggcattgccgtggctgctattgtggctgcagtggtggccctgatctactgccggaagaagagaatctctgccctgcctggctaccccgagtgtagagagatgggagagacactgcccgagaagcccgccaatcctaccaatcctgacgaggccgacaaagtgggagccgagaacaccatcacctacagcctgctgatgcaccccgacgcactggaagaacccgacgaccagaatagaatcagggccaagcgatctggatctggagcaacaaacttctcactactcaaacaagcaggtgacgtggaggagaatcccgggcctactagtatggactggatttggcgcatccttttccttgtcggcgctgctaccggcgcgcattccttcgaacaagttcagcttcaacagcctggcgctgagctggtcaaacctggcgcttctgtgaagatgagctgcaaagccagcggctacgccttcagcagctactggatcaactggatgaagcagaaacccggccagggactcgaatggatcggccaaatctatcccggcgacggcgacaccaactacaacggcaagttcaagggcagagccacactgaccgccgatacctctagcagcacagcctacatgcagctgagcagcctgaccagcgaagatagcgccgtgtacttctgtgcccggtccatcacaacagtcgtgggctgcgctatggactattggggccagggaacaagcgtgaccgtgtctagtacgcgtgcctctacaaagggaccctccgtgtttcctctggctcccagcagcaagtctacaagcggaggaacagccgctctgggctgcctggtcaaggattactttcccgagcctgtgaccgtgtcctggaatagcggagcactgacaagcggcgtgcacacctttccagccgtgctgcaaagcagcggcctgtactctctgagcagcgtggtcacagtgcctagctctagcctgggcacccagacctacatctgcaatgtgaaccacaagcctagcaacaccaaggtggacaagagagtggaacccaagagctgtggtaccactccagctgctccacctaaagctgtcctgaagctcgaacctcaatggattaacgtcctccaagaagattctgtcaccctgacatgccggggcacccactctccagagtctgattccattcagtggtttcataatgggaacctgattccgactcacacgcagcccagctatcggtttaaagctaacaacaatgactccggggagtatacttgccagacaggacagaccagcctgtctgacccagtgcacctgacagttctgagcgaatggctcgtcctgcagacccctcatcttgagttccaagagggcgaaaccattgtcctgagatgccactcctggaaagataagccccttgtgaaagtcacattttttcagaatggcaagagcaagaagttttctcggagcgatccgaatttcagtattccccaggccaaccactctcacagcggagactatcactgtacaggcaacatcgggtatacactctacagctctaagcccgtcacaattaccgttcaggctcccagcagctccccaatgggcattattgtggccgtcgtgaccggaattgctgtggccgcaatcgtggcagctgtcgtcgctctgatctattgcagaaagaagcggatcagcgccctgccagggtatcctgagtgccgcgaaatgggcgaaactctgcctgagaaacctgctaaccccacaaatcccgatgaagctgacaaagtcggcgctgaaaacacgatcacatactccctgctcatgcatcctgacgctcttgaggaacctgacgatcagaaccggatccgcgccaagagaagcggatctggcgtgaagcagaccctgaatttcgacctgctgaagctggctggcgacgtggaatccaacccaggcccttctagaggcgggatccacaccatggctacctacgaggtgctgtgcgaggtggcaagaaagctgggcaccgacgacagagaagtggtgctgttcctgctgaacgtgttcatccctcagcctacactggcccagctgatcggtgcactgagagccctgaaagaggaaggccggctgacctttcctctgctggccgaatgcctgttcagagccggaagaagggatctgctgcgggacctgctgcatctggaccccagatttctggaaagacacctggccggcaccatgagctacttcagcccttaccagctgaccgtgctgcacgttgacggcgaactgtgcgccagagatattcggagcctgatcttcctgagcaaggacaccatcggcagccggtctacccctcagacatttctgcactgggtgtactgcatggaaaacctggacctgctcggccccacagatgtggatgccctgatgtccatgctgagaagcctgagcagagtggacctccagagacaggtgcagacactgatgggactgcacctgagcggacctagccacagccagcactacagacacacccct

SEQ ID NO: 5774 - DNA, 3993 bp, Artificial Sequence
  Synthetic Polynucleotide
atggccttaccagtgaccgccttgctcctgccgctggccttgctgctccacgccgccaggccggacatccagatgacacagagccctagcagcctgtctgccagcgtgggagacagagtgaccatcacatgcaaggccagcgaccacatcaacaactggctggcctggtatcagcagaagcctggacaggcccctaagctgctgatctacggcgctaccacactggaaacaggcgtgcccagcagattttctggcagcggctctggcaccgactacaccctgacaatatccagcctccagcctgaggacttcgccacctactactgtcagcagagctggaacaccccttggacattcggccagggcaccaagctggaaatcaagagactcgagggacagcctaaggccaatcctaccgtgacactgttccctccaagcagcgaagaactccaggccaacaaggccacacttgtgtgcctgatctccgacttctaccctggggctgtgacagtggcttggaaggccgatggatctcctgtgaaagccggcgtggaaaccaccaagccatccaagcagagcaacaacaaatacgccgccagctcctacctgagcctgacacctgagcagtggaagtcccacagatcctacagctgccaagtgacccacgaaggcagcaccgtggaaaagacagtggcccctacagagtgcagcggatccacaccagccgctcctccaaaggccgtgctgaaactggaaccccagtggatcaacgtgctgcaagaggacagcgtgaccctgacctgtagaggcacacacagccctgagagcgacagcatccagtggttccacaacggcaatctgatccccacacacacccagcctagctacagattcaaggccaacaacaacgacagcggcgagtacacctgtcagaccggccagacaagcctgagcgatcctgtgcatctgaccgtgctgtctgagtggctggtgctgcagacaccccacctggaatttcaagagggcgagacaatcgtgctgcggtgccacagctggaaggacaagcctctggtcaaagtgacattcttccagaacgggaagtccaagaagttcagcagaagcgaccccaacttcagcatccctcaggccaatcacagccactccggcgattaccactgcaccggcaatatcggctacaccctgtacagcagcaagcccgtgaccatcacagtgcaggcccctagcagtagccctatgggaatcatcgtggccgtggtcacaggcattgccgtggctgctattgtggctgcagtggtggccctgatctactgccggaagaagagaatctctgccctgcctggctaccccgagtgtagagagatgggagagacactgcccgagaagcccgccaatcctaccaatcctgacgaggccgacaaagtgggagccgagaacaccatcacctacagcctgctgatgcaccccgacgcactggaagaacccgacgaccagaatagaatcagggccaagcgatctggatctggagcaacaaacttctcactactcaaacaagcaggtgacgtggaggagaatcccgggcctactagtatggactggatttggcgcatccttttccttgtcggcgctgctaccggcgcgcattccttcgaacaagttcagcttcaacagcctggcgctgagctggtcaaacctggcgcttctgtgaagatgagctgcaaagccagcggctacgccttcagcagctactggatcaactggatgaagcagaaacccggccagggactcgaatggatcggccaaatctatcccggcgacggcgacaccaactacaacggcaagttcaagggcagagccacactgaccgccgatacctctagcagcacagcctacatgcagctgagcagcctgaccagcgaagatagcgccgtgtacttctgtgcccggtccatcacaacagtcgtgggctgcgctatggactattggggccagggaacaagcgtgaccgtgtctagtacgcgtgcctctacaaagggaccctccgtgtttcctctggctcccagcagcaagtctacaagcggaggaacagccgctctgggctgcctggtcaaggattactttcccgagcctgtgaccgtgtcctggaatagcggagcactgacaagcggcgtgcacacctttccagccgtgctgcaaagcagcggcctgtactctctgagcagcgtggtcacagtgcctagctctagcctgggcacccagacctacatctgcaatgtgaaccacaagcctagcaacaccaaggtggacaagagagtggaacccaagagctgtggtaccactccagctgctccacctaaagctgtcctgaagctcgaacctcaatggattaacgtcctccaagaagattctgtcaccctgacatgccggggcacccactctccagagtctgattccattcagtggtttcataatgggaacctgattccgactcacacgcagcccagctatcggtttaaagctaacaacaatgactccggggagtatacttgccagacaggacagaccagcctgtctgacccagtgcacctgacagttctgagcgaatggctcgtcctgcagacccctcatcttgagttccaagagggcgaaaccattgtcctgagatgccactcctggaaagataagccccttgtgaaagtcacattttttcagaatggcaagagcaagaagttttctcggagcgatccgaatttcagtattccccaggccaaccactctcacagcggagactatcactgtacaggcaacatcgggtatacactctacagctctaagcccgtcacaattaccgttcaggctcccagcagctccccaatgggcattattgtggccgtcgtgaccggaattgctgtggccgcaatcgtggcagctgtcgtcgctctgatctattgcagaaagaagcggatcagcgccctgccagggtatcctgagtgccgcgaaatgggcgaaactctgcctgagaaacctgctaaccccacaaatcccgatgaagctgacaaagtcggcgctgaaaacacgatcacatactccctgctcatgcatcctgacgctcttgaggaacctgacgatcagaaccggatccgcgccaagagaagcggatctggcgtgaagcagaccctgaatttcgacctgctgaagctggctggcgacgtggaatccaacccaggcccttctagaggcgggatccacaccatgtccgactccaaggaggtccctagccttccatttttgcgacacttgctcgaagagttggacagccatgaggacagcttgctgctgtttctgtgtcacgacgcggccccgggctgcacgacggtcacgcaagctttgtgctcgcttagccaacagcgcaagctgaccctcgcggctctggtcgagatgctctacgtgctgcagcgtatggatcttctcaagagccgcttcgggctcagcaaggagggggccgagcaattgctgggcacaagctttctcacgcgctaccgcaagctcatggtttgcgtgggtgaggagctcgactcgagcgagctacgcgctctacgcttgttcgcgtgcaacctgaatccgagcctgagcacggcgctttctgagagcagccgctttgtcgagcttgtactcgcgcttgaaaacgtaggactcgtctcgccatcgagtgtttccgtgcttgcggacatgttgcgcactcttcggcgcctcgatttgtgccagcagcttgttgagtacgaacaacaagagcaagccaggtaccgttactgttacgcggcctcgccctcattgccagttcgtacgttacgtcgggggcacggcgcgagtgaacacgagcagctgtgcatgcccgtgcaagaatcctctgacagccccgagctgctgcgcacgcccgtacaagaatcctccagcgacagccccgagcaaacgact

SEQ ID NO: 5775 - DNA, 3861 bp, Artificial Sequence
  Synthetic Polynucleotide
atggccttaccagtgaccgccttgctcctgccgctggccttgctgctccacgccgccaggccggacatccagatgacacagagccctagcagcctgtctgccagcgtgggagacagagtgaccatcacatgcaaggccagcgaccacatcaacaactggctggcctggtatcagcagaagcctggacaggcccctaagctgctgatctacggcgctaccacactggaaacaggcgtgcccagcagattttctggcagcggctctggcaccgactacaccctgacaatatccagcctccagcctgaggacttcgccacctactactgtcagcagagctggaacaccccttggacattcggccagggcaccaagctggaaatcaagagactcgagggacagcctaaggccaatcctaccgtgacactgttccctccaagcagcgaagaactccaggccaacaaggccacacttgtgtgcctgatctccgacttctaccctggggctgtgacagtggcttggaaggccgatggatctcctgtgaaagccggcgtggaaaccaccaagccatccaagcagagcaacaacaaatacgccgccagctcctacctgagcctgacacctgagcagtggaagtcccacagatcctacagctgccaagtgacccacgaaggcagcaccgtggaaaagacagtggcccctacagagtgcagcggatccacaccagccgctcctccaaaggccgtgctgaaactggaaccccagtggatcaacgtgctgcaagaggacagcgtgaccctgacctgtagaggcacacacagccctgagagcgacagcatccagtggttccacaacggcaatctgatccccacacacacccagcctagctacagattcaaggccaacaacaacgacagcggcgagtacacctgtcagaccggccagacaagcctgagcgatcctgtgcatctgaccgtgctgtctgagtggctggtgctgcagacaccccacctggaatttcaagagggcgagacaatcgtgctgcggtgccacagctggaaggacaagcctctggtcaaagtgacattcttccagaacgggaagtccaagaagttcagcagaagcgaccccaacttcagcatccctcaggccaatcacagccactccggcgattaccactgcaccggcaatatcggctacaccctgtacagcagcaagcccgtgaccatcacagtgcaggcccctagcagtagccctatgggaatcatcgtggccgtggtcacaggcattgccgtggctgctattgtggctgcagtggtggccctgatctactgccggaagaagagaatctctgccctgcctggctaccccgagtgtagagagatgggagagacactgcccgagaagcccgccaatcctaccaatcctgacgaggccgacaaagtgggagccgagaacaccatcacctacagcctgctgatgcaccccgacgcactggaagaacccgacgaccagaatagaatcagggccaagcgatctggatctggagcaacaaacttctcactactcaaacaagcaggtgacgtggaggagaatcccgggcctactagtatggactggatttggcgcatccttttccttgtcggcgctgctaccggcgcgcattccttcgaacaagttcagcttcaacagcctggcgctgagctggtcaaacctggcgcttctgtgaagatgagctgcaaagccagcggctacgccttcagcagctactggatcaactggatgaagcagaaacccggccagggactcgaatggatcggccaaatctatcccggcgacggcgacaccaactacaacggcaagttcaagggcagagccacactgaccgccgatacctctagcagcacagcctacatgcagctgagcagcctgaccagcgaagatagcgccgtgtacttctgtgcccggtccatcacaacagtcgtgggctgcgctatggactattggggccagggaacaagcgtgaccgtgtctagtacgcgtgcctctacaaagggaccctccgtgtttcctctggctcccagcagcaagtctacaagcggaggaacagccgctctgggctgcctggtcaaggattactttcccgagcctgtgaccgtgtcctggaatagcggagcactgacaagcggcgtgcacacctttccagccgtgctgcaaagcagcggcctgtactctctgagcagcgtggtcacagtgcctagctctagcctgggcacccagacctacatctgcaatgtgaaccacaagcctagcaacaccaaggtggacaagagagtggaacccaagagctgtggtaccactccagctgctccacctaaagctgtcctgaagctcgaacctcaatggattaacgtcctccaagaagattctgtcaccctgacatgccggggcacccactctccagagtctgattccattcagtggtttcataatgggaacctgattccgactcacacgcagcccagctatcggtttaaagctaacaacaatgactccggggagtatacttgccagacaggacagaccagcctgtctgacccagtgcacctgacagttctgagcgaatggctcgtcctgcagacccctcatcttgagttccaagagggcgaaaccattgtcctgagatgccactcctggaaagataagccccttgtgaaagtcacattttttcagaatggcaagagcaagaagttttctcggagcgatccgaatttcagtattccccaggccaaccactctcacagcggagactatcactgtacaggcaacatcgggtatacactctacagctctaagcccgtcacaattaccgttcaggctcccagcagctccccaatgggcattattgtggccgtcgtgaccggaattgctgtggccgcaatcgtggcagctgtcgtcgctctgatctattgcagaaagaagcggatcagcgccctgccagggtatcctgagtgccgcgaaatgggcgaaactctgcctgagaaacctgctaaccccacaaatcccgatgaagctgacaaagtcggcgctgaaaacacgatcacatactccctgctcatgcatcctgacgctcttgaggaacctgacgatcagaaccggatccgcgccaagagaagcggatctggcgtgaagcagaccctgaatttcgacctgctgaagctggctggcgacgtggaatccaacccaggcccttctagaggccatatgaccgagtacaagcccacggtgcgcctcgccacccgcgacgacgtccccagggccgtacgcaccctcgccgccgcgttcgccgactaccccgccacgcgccacaccgtcgatccggaccgccacatcgagcgggtcaccgagctgcaagaactcttcctcacgcgcgtcgggctcgacatcggcaaggtgtgggtcgcggacgacggcgccgcggtggcggtctggaccacgccggagagcgtcgaagcgggggcggtgttcgccgagatcggcccgcgcatggccgagttgagcggttcccggctggccgcgcagcaacagatggaaggcctcctggcgccgcaccggcccaaggagcccgcgtggttcctggccaccgtcggcgtctcgcccgaccaccagggcaagggtctgggcagcgccgtcgtgctccccggagtggaggcggccgagcgcgccggggtgcccgccttcctggagacctccgcgccccgcaacctccccttctacgagcggctcggcttcaccgtcaccgccgacgtcgaggtgcccgaaggaccgcgcacctggtgcatgacccgcaagcccggtgcctga

SEQ ID NO: 5776 - DNA, 4272 bp, Artificial Sequence
  Synthetic Polynucleotide
atggccttaccagtgaccgccttgctcctgccgctggccttgctgctccacgccgccaggccggaagtgcagctggttgaatctggcggaggactggttcaggctggcggatctctgagactgtcttgtgccgccagcggcagaacctttagcatgggctggtttagacaggcccctggcaaagagagagagttcgtcgccgccatcacatactctggcggcagcccttactacgccgactctgtgaagggcagattcaccatcagccgggacaacgccaagaacaccgtgtacctccagatgaacagcctgaagcctgaggacaccgccgtgtactactgcgccgccaatccaacatacggcagcgactggaacgccgagaattggggccagggaacccaagtgacagtgtctagcggtaccggcggaggcggatctggcggcggaggtagcggtggcggaggatctgaattcgacatccagatgacacagagccctagcagcctgtctgccagcgtgggagacagagtgaccatcacatgcaaggccagcgaccacatcaacaactggctggcctggtatcagcagaagcctggacaggcccctaagctgctgatctacggcgctaccacactggaaacaggcgtgcccagcagattttctggcagcggctctggcaccgactacaccctgacaatatccagcctccagcctgaggacttcgccacctactactgtcagcagagctggaacaccccttggacattcggccagggcaccaagctggaaatcaagagactcgagggacagcctaaggccaatcctaccgtgacactgttccctccaagcagcgaagaactccaggccaacaaggccacacttgtgtgcctgatctccgacttctaccctggggctgtgacagtggcttggaaggccgatggatctcctgtgaaagccggcgtggaaaccaccaagccatccaagcagagcaacaacaaatacgccgccagctcctacctgagcctgacacctgagcagtggaagtcccacagatcctacagctgccaagtgacccacgaaggcagcaccgtggaaaagacagtggcccctacagagtgcagcggatccacaccagccgctcctccaaaggccgtgctgaaactggaaccccagtggatcaacgtgctgcaagaggacagcgtgaccctgacctgtagaggcacacacagccctgagagcgacagcatccagtggttccacaacggcaatctgatccccacacacacccagcctagctacagattcaaggccaacaacaacgacagcggcgagtacacctgtcagaccggccagacaagcctgagcgatcctgtgcatctgaccgtgctgtctgagtggctggtgctgcagacaccccacctggaatttcaagagggcgagacaatcgtgctgcggtgccacagctggaaggacaagcctctggtcaaagtgacattcttccagaacgggaagtccaagaagttcagcagaagcgaccccaacttcagcatccctcaggccaatcacagccactccggcgattaccactgcaccggcaatatcggctacaccctgtacagcagcaagcccgtgaccatcacagtgcaggcccctagcagtagccctatgggaatcatcgtggccgtggtcacaggcattgccgtggctgctattgtggctgcagtggtggccctgatctactgccggaagaagagaatctctgccctgcctggctaccccgagtgtagagagatgggagagacactgcccgagaagcccgccaatcctaccaatcctgacgaggccgacaaagtgggagccgagaacaccatcacctacagcctgctgatgcaccccgacgcactggaagaacccgacgaccagaatagaatcagggccaagcgatctggatctggagcaacaaacttctcactactcaaacaagcaggtgacgtggaggagaatcccgggcctactagtatggactggatttggcgcatccttttccttgtcggcgctgctaccggcgcgcattccttcgaacaagttcagcttcaacagcctggcgctgagctggtcaaacctggcgcttctgtgaagatgagctgcaaagccagcggctacgccttcagcagctactggatcaactggatgaagcagaaacccggccagggactcgaatggatcggccaaatctatcccggcgacggcgacaccaactacaacggcaagttcaagggcagagccacactgaccgccgatacctctagcagcacagcctacatgcagctgagcagcctgaccagcgaagatagcgccgtgtacttctgtgcccggtccatcacaacagtcgtgggctgcgctatggactattggggccagggaacaagcgtgaccgtgtctagtacgcgtgcctctacaaagggaccctccgtgtttcctctggctcccagcagcaagtctacaagcggaggaacagccgctctgggctgcctggtcaaggattactttcccgagcctgtgaccgtgtcctggaatagcggagcactgacaagcggcgtgcacacctttccagccgtgctgcaaagcagcggcctgtactctctgagcagcgtggtcacagtgcctagctctagcctgggcacccagacctacatctgcaatgtgaaccacaagcctagcaacaccaaggtggacaagagagtggaacccaagagctgtggtaccactccagctgctccacctaaagctgtcctgaagctcgaacctcaatggattaacgtcctccaagaagattctgtcaccctgacatgccggggcacccactctccagagtctgattccattcagtggtttcataatgggaacctgattccgactcacacgcagcccagctatcggtttaaagctaacaacaatgactccggggagtatacttgccagacaggacagaccagcctgtctgacccagtgcacctgacagttctgagcgaatggctcgtcctgcagacccctcatcttgagttccaagagggcgaaaccattgtcctgagatgccactcctggaaagataagccccttgtgaaagtcacattttttcagaatggcaagagcaagaagttttctcggagcgatccgaatttcagtattccccaggccaaccactctcacagcggagactatcactgtacaggcaacatcgggtatacactctacagctctaagcccgtcacaattaccgttcaggctcccagcagctccccaatgggcattattgtggccgtcgtgaccggaattgctgtggccgcaatcgtggcagctgtcgtcgctctgatctattgcagaaagaagcggatcagcgccctgccagggtatcctgagtgccgcgaaatgggcgaaactctgcctgagaaacctgctaaccccacaaatcccgatgaagctgacaaagtcggcgctgaaaacacgatcacatactccctgctcatgcatcctgacgctcttgaggaacctgacgatcagaaccggatccgcgccaagagaagcggatctggcgtgaagcagaccctgaatttcgacctgctgaagctggctggcgacgtggaatccaacccaggcccttctagaggccatatgaccgagtacaagcccacggtgcgcctcgccacccgcgacgacgtccccagggccgtacgcaccctcgccgccgcgttcgccgactaccccgccacgcgccacaccgtcgatccggaccgccacatcgagcgggtcaccgagctgcaagaactcttcctcacgcgcgtcgggctcgacatcggcaaggtgtgggtcgcggacgacggcgccgcggtggcggtctggaccacgccggagagcgtcgaagcgggggcggtgttcgccgagatcggcccgcgcatggccgagttgagcggttcccggctggccgcgcagcaacagatggaaggcctcctggcgccgcaccggcccaaggagcccgcgtggttcctggccaccgtcggcgtctcgcccgaccaccagggcaagggtctgggcagcgccgtcgtgctccccggagtggaggcggccgagcgcgccggggtgcccgccttcctggagacctccgcgccccgcaacctccccttctacgagcggctcggcttcaccgtcaccgccgacgtcgaggtgcccgaaggaccgcgcacctggtgcatgacccgcaagcccggtgcctga

SEQ ID NO: 5777 - DNA, 4683 bp, Artificial Sequence
  Synthetic Polynucleotide
atggccttaccagtgaccgccttgctcctgccgctggccttgctgctccacgccgccaggccggaagtgcagctggttgaatctggcggaggactggttcaggctggcggatctctgagactgtcttgtgccgccagcggcagaacctttagcatgggctggtttagacaggcccctggcaaagagagagagttcgtcgccgccatcacatactctggcggcagcccttactacgccgactctgtgaagggcagattcaccatcagccgggacaacgccaagaacaccgtgtacctccagatgaacagcctgaagcctgaggacaccgccgtgtactactgcgccgccaatccaacatacggcagcgactggaacgccgagaattggggccagggaacccaagtgacagtgtctagcggtaccggcggaggcggatctggcggcggaggtagcggtggcggaggatctgaattcgacatccagatgacacagagccctagcagcctgtctgccagcgtgggagacagagtgaccatcacatgcaaggccagcgaccacatcaacaactggctggcctggtatcagcagaagcctggacaggcccctaagctgctgatctacggcgctaccacactggaaacaggcgtgcccagcagattttctggcagcggctctggcaccgactacaccctgacaatatccagcctccagcctgaggacttcgccacctactactgtcagcagagctggaacaccccttggacattcggccagggcaccaagctggaaatcaagagactcgagggacagcctaaggccaatcctaccgtgacactgttccctccaagcagcgaagaactccaggccaacaaggccacacttgtgtgcctgatctccgacttctaccctggggctgtgacagtggcttggaaggccgatggatctcctgtgaaagccggcgtggaaaccaccaagccatccaagcagagcaacaacaaatacgccgccagctcctacctgagcctgacacctgagcagtggaagtcccacagatcctacagctgccaagtgacccacgaaggcagcaccgtggaaaagacagtggcccctacagagtgcagcggatccacaccagccgctcctccaaaggccgtgctgaaactggaaccccagtggatcaacgtgctgcaagaggacagcgtgaccctgacctgtagaggcacacacagccctgagagcgacagcatccagtggttccacaacggcaatctgatccccacacacacccagcctagctacagattcaaggccaacaacaacgacagcggcgagtacacctgtcagaccggccagacaagcctgagcgatcctgtgcatctgaccgtgctgtctgagtggctggtgctgcagacaccccacctggaatttcaagagggcgagacaatcgtgctgcggtgccacagctggaaggacaagcctctggtcaaagtgacattcttccagaacgggaagtccaagaagttcagcagaagcgaccccaacttcagcatccctcaggccaatcacagccactccggcgattaccactgcaccggcaatatcggctacaccctgtacagcagcaagcccgtgaccatcacagtgcaggcccctagcagtagccctatgggaatcatcgtggccgtggtcacaggcattgccgtggctgctattgtggctgcagtggtggccctgatctactgccggaagaagagaatctctgccctgcctggctaccccgagtgtagagagatgggagagacactgcccgagaagcccgccaatcctaccaatcctgacgaggccgacaaagtgggagccgagaacaccatcacctacagcctgctgatgcaccccgacgcactggaagaacccgacgaccagaatagaatcagggccaagcgatctggatctggagcaacaaacttctcactactcaaacaagcaggtgacgtggaggagaatcccgggcctactagtatggactggatttggcgcatccttttccttgtcggcgctgctaccggcgcgcattccgggcccgaagtgcaactggttgaatccggtggcggcctggtgcaagcaggcggatctctcagacttagctgtgccgcctccggcagaaccttcacaatgggatggtttaggcaggctccagggaaagagagagagttcgtcgccgccatctctctgtctcccacactggcctactacgccgactctgtgaaaggccggttcaccatctccagagataatgccaagaacaccgtggtgctgcaaatgaactctctgaaacccgaggatacagccctgtactattgtgccgctgaccggaagtccgtgatgagcatcagacccgattactggggacagggcacacaagtcacagtgtcctctggatccggcggcggaggatctggcggaggcggatctgggggcggaggctctttcgaacaagttcagcttcaacagcctggcgctgagctggtcaaacctggcgcttctgtgaagatgagctgcaaagccagcggctacgccttcagcagctactggatcaactggatgaagcagaaacccggccagggactcgaatggatcggccaaatctatcccggcgacggcgacaccaactacaacggcaagttcaagggcagagccacactgaccgccgatacctctagcagcacagcctacatgcagctgagcagcctgaccagcgaagatagcgccgtgtacttctgtgcccggtccatcacaacagtcgtgggctgcgctatggactattggggccagggaacaagcgtgaccgtgtctagtacgcgtgcctctacaaagggaccctccgtgtttcctctggctcccagcagcaagtctacaagcggaggaacagccgctctgggctgcctggtcaaggattactttcccgagcctgtgaccgtgtcctggaatagcggagcactgacaagcggcgtgcacacctttccagccgtgctgcaaagcagcggcctgtactctctgagcagcgtggtcacagtgcctagctctagcctgggcacccagacctacatctgcaatgtgaaccacaagcctagcaacaccaaggtggacaagagagtggaacccaagagctgtggtaccactccagctgctccacctaaagctgtcctgaagctcgaacctcaatggattaacgtcctccaagaagattctgtcaccctgacatgccggggcacccactctccagagtctgattccattcagtggtttcataatgggaacctgattccgactcacacgcagcccagctatcggtttaaagctaacaacaatgactccggggagtatacttgccagacaggacagaccagcctgtctgacccagtgcacctgacagttctgagcgaatggctcgtcctgcagacccctcatcttgagttccaagagggcgaaaccattgtcctgagatgccactcctggaaagataagccccttgtgaaagtcacattttttcagaatggcaagagcaagaagttttctcggagcgatccgaatttcagtattccccaggccaaccactctcacagcggagactatcactgtacaggcaacatcgggtatacactctacagctctaagcccgtcacaattaccgttcaggctcccagcagctccccaatgggcattattgtggccgtcgtgaccggaattgctgtggccgcaatcgtggcagctgtcgtcgctctgatctattgcagaaagaagcggatcagcgccctgccagggtatcctgagtgccgcgaaatgggcgaaactctgcctgagaaacctgctaaccccacaaatcccgatgaagctgacaaagtcggcgctgaaaacacgatcacatactccctgctcatgcatcctgacgctcttgaggaacctgacgatcagaaccggatccgcgccaagagaagcggatctggcgtgaagcagaccctgaatttcgacctgctgaagctggctggcgacgtggaatccaacccaggcccttctagaggccatatgaccgagtacaagcccacggtgcgcctcgccacccgcgacgacgtccccagggccgtacgcaccctcgccgccgcgttcgccgactaccccgccacgcgccacaccgtcgatccggaccgccacatcgagcgggtcaccgagctgcaagaactcttcctcacgcgcgtcgggctcgacatcggcaaggtgtgggtcgcggacgacggcgccgcggtggcggtctggaccacgccggagagcgtcgaagcgggggcggtgttcgccgagatcggcccgcgcatggccgagttgagcggttcccggctggccgcgcagcaacagatggaaggcctcctggcgccgcaccggcccaaggagcccgcgtggttcctggccaccgtcggcgtctcgcccgaccaccagggcaagggtctgggcagcgccgtcgtgctccccggagtggaggcggccgagcgcgccggggtgcccgccttcctggagacctccgcgccccgcaacctccccttctacgagcggctcggcttcaccgtcaccgccgacgtcgaggtgcccgaaggaccgcgcacctggtgcatgacccgcaagcccggtgcctga

SEQ ID NO: 5778 - DNA, 3882 bp, Artificial Sequence
  Synthetic Polynucleotide
atggccttaccagtgaccgccttgctcctgccgctggccttgctgctccacgccgccaggccggaagtgcagctggttgaatctggcggaggactggttcaggctggcggatctctgagactgtcttgtgccgccagcggcagaacctttagcatgggctggtttagacaggcccctggcaaagagagagagttcgtcgccgccatcacatactctggcggcagcccttactacgccgactctgtgaagggcagattcaccatcagccgggacaacgccaagaacaccgtgtacctccagatgaacagcctgaagcctgaggacaccgccgtgtactactgcgccgccaatccaacatacggcagcgactggaacgccgagaattggggccagggaacccaagtgacagtgtctagcctcgagggacagcctaaggccaatcctaccgtgacactgttccctccaagcagcgaagaactccaggccaacaaggccacacttgtgtgcctgatctccgacttctaccctggggctgtgacagtggcttggaaggccgatggatctcctgtgaaagccggcgtggaaaccaccaagccatccaagcagagcaacaacaaatacgccgccagctcctacctgagcctgacacctgagcagtggaagtcccacagatcctacagctgccaagtgacccacgaaggcagcaccgtggaaaagacagtggcccctacagagtgcagcggatccacaccagccgctcctccaaaggccgtgctgaaactggaaccccagtggatcaacgtgctgcaagaggacagcgtgaccctgacctgtagaggcacacacagccctgagagcgacagcatccagtggttccacaacggcaatctgatccccacacacacccagcctagctacagattcaaggccaacaacaacgacagcggcgagtacacctgtcagaccggccagacaagcctgagcgatcctgtgcatctgaccgtgctgtctgagtggctggtgctgcagacaccccacctggaatttcaagagggcgagacaatcgtgctgcggtgccacagctggaaggacaagcctctggtcaaagtgacattcttccagaacgggaagtccaagaagttcagcagaagcgaccccaacttcagcatccctcaggccaatcacagccactccggcgattaccactgcaccggcaatatcggctacaccctgtacagcagcaagcccgtgaccatcacagtgcaggcccctagcagtagccctatgggaatcatcgtggccgtggtcacaggcattgccgtggctgctattgtggctgcagtggtggccctgatctactgccggaagaagagaatctctgccctgcctggctaccccgagtgtagagagatgggagagacactgcccgagaagcccgccaatcctaccaatcctgacgaggccgacaaagtgggagccgagaacaccatcacctacagcctgctgatgcaccccgacgcactggaagaacccgacgaccagaatagaatcagggccaagcgatctggatctggagcaacaaacttctcactactcaaacaagcaggtgacgtggaggagaatcccgggcctactagtatggactggatttggcgcatccttttccttgtcggcgctgctaccggcgcgcattccgggcccgaagtgcaactggttgaatccggtggcggcctggtgcaagcaggcggatctctcagacttagctgtgccgcctccggcagaaccttcacaatgggatggtttaggcaggctccagggaaagagagagagttcgtcgccgccatctctctgtctcccacactggcctactacgccgactctgtgaaaggccggttcaccatctccagagataatgccaagaacaccgtggtgctgcaaatgaactctctgaaacccgaggatacagccctgtactattgtgccgctgaccggaagtccgtgatgagcatcagacccgattactggggacagggcacacaagtcacagtgtcctctacgcgtgcctctacaaagggaccctccgtgtttcctctggctcccagcagcaagtctacaagcggaggaacagccgctctgggctgcctggtcaaggattactttcccgagcctgtgaccgtgtcctggaatagcggagcactgacaagcggcgtgcacacctttccagccgtgctgcaaagcagcggcctgtactctctgagcagcgtggtcacagtgcctagctctagcctgggcacccagacctacatctgcaatgtgaaccacaagcctagcaacaccaaggtggacaagagagtggaacccaagagctgtggtaccactccagctgctccacctaaagctgtcctgaagctcgaacctcaatggattaacgtcctccaagaagattctgtcaccctgacatgccggggcacccactctccagagtctgattccattcagtggtttcataatgggaacctgattccgactcacacgcagcccagctatcggtttaaagctaacaacaatgactccggggagtatacttgccagacaggacagaccagcctgtctgacccagtgcacctgacagttctgagcgaatggctcgtcctgcagacccctcatcttgagttccaagagggcgaaaccattgtcctgagatgccactcctggaaagataagccccttgtgaaagtcacattttttcagaatggcaagagcaagaagttttctcggagcgatccgaatttcagtattccccaggccaaccactctcacagcggagactatcactgtacaggcaacatcgggtatacactctacagctctaagcccgtcacaattaccgttcaggctcccagcagctccccaatgggcattattgtggccgtcgtgaccggaattgctgtggccgcaatcgtggcagctgtcgtcgctctgatctattgcagaaagaagcggatcagcgccctgccagggtatcctgagtgccgcgaaatgggcgaaactctgcctgagaaacctgctaaccccacaaatcccgatgaagctgacaaagtcggcgctgaaaacacgatcacatactccctgctcatgcatcctgacgctcttgaggaacctgacgatcagaaccggatccgcgccaagagaagcggatctggcgtgaagcagaccctgaatttcgacctgctgaagctggctggcgacgtggaatccaacccaggcccttctagaggccatatgaccgagtacaagcccacggtgcgcctcgccacccgcgacgacgtccccagggccgtacgcaccctcgccgccgcgttcgccgactaccccgccacgcgccacaccgtcgatccggaccgccacatcgagcgggtcaccgagctgcaagaactcttcctcacgcgcgtcgggctcgacatcggcaaggtgtgggtcgcggacgacggcgccgcggtggcggtctggaccacgccggagagcgtcgaagcgggggcggtgttcgccgagatcggcccgcgcatggccgagttgagcggttcccggctggccgcgcagcaacagatggaaggcctcctggcgccgcaccggcccaaggagcccgcgtggttcctggccaccgtcggcgtctcgcccgaccaccagggcaagggtctgggcagcgccgtcgtgctccccggagtggaggcggccgagcgcgccggggtgcccgccttcctggagacctccgcgccccgcaacctccccttctacgagcggctcggcttcaccgtcaccgccgacgtcgaggtgcccgaaggaccgcgcacctggtgcatgacccgcaagcccggtgcctga

SEQ ID NO: 5779 - DNA, 3906 bp, Artificial Sequence
  Synthetic Polynucleotide
atggccttaccagtgaccgccttgctcctgccgctggccttgctgctccacgccgccaggccggacatccagatgacacagagccctagcagcctgtctgccagcgtgggagacagagtgaccatcacatgcaaggccagcgaccacatcaacaactggctggcctggtatcagcagaagcctggacaggcccctaagctgctgatctacggcgctaccacactggaaacaggcgtgcccagcagattttctggcagcggctctggcaccgactacaccctgacaatatccagcctccagcctgaggacttcgccacctactactgtcagcagagctggaacaccccttggacattcggccagggcaccaagctggaaatcaagagactcgaggacctgaagaacgtgttcccacctgaggtggccgtgttcgagcctagcgaggccgagatcagccacacccagaaagccaccctcgtgtgcctggctaccggcttctaccccgaccatgtggaactgtcttggtgggtcaacggcaaagaggtgcacagcggcgtgtctaccgacccccagccactgaaagaacagcccgccctgaacgacagccggtactgcctgagcagcagactgagagtgtccgccaccttctggcagaacccccggaaccacttcagatgccaggtgcagttctacggcctgagcgagaacgacgagtggacccaggacagagccaagcccgtgacccagatcgtgtctgccgaagcctggggcagagccgattgcggatccacaccagccgctcctccaaaggccgtgctgaaactggaaccccagtggatcaacgtgctgcaagaggacagcgtgaccctgacctgtagaggcacacacagccctgagagcgacagcatccagtggttccacaacggcaatctgatccccacacacacccagcctagctacagattcaaggccaacaacaacgacagcggcgagtacacctgtcagaccggccagacaagcctgagcgatcctgtgcatctgaccgtgctgtctgagtggctggtgctgcagacaccccacctggaatttcaagagggcgagacaatcgtgctgcggtgccacagctggaaggacaagcctctggtcaaagtgacattcttccagaacgggaagtccaagaagttcagcagaagcgaccccaacttcagcatccctcaggccaatcacagccactccggcgattaccactgcaccggcaatatcggctacaccctgtacagcagcaagcccgtgaccatcacagtgcaggcccctagcagtagccctatgggaatcatcgtggccgtggtcacaggcattgccgtggctgctattgtggctgcagtggtggccctgatctactgccggaagaagagaatctctgccctgcctggctaccccgagtgtagagagatgggagagacactgcccgagaagcccgccaatcctaccaatcctgacgaggccgacaaagtgggagccgagaacaccatcacctacagcctgctgatgcaccccgacgcactggaagaacccgacgaccagaatagaatcagggccaagcgatctggatctggagcaacaaacttctcactactcaaacaagcaggtgacgtggaggagaatcccgggcctactagtatggactggatttggcgcatccttttccttgtcggcgctgctaccggcgcgcattccttcgaacaagttcagcttcaacagcctggcgctgagctggtcaaacctggcgcttctgtgaagatgagctgcaaagccagcggctacgccttcagcagctactggatcaactggatgaagcagaaacccggccagggactcgaatggatcggccaaatctatcccggcgacggcgacaccaactacaacggcaagttcaagggcagagccacactgaccgccgatacctctagcagcacagcctacatgcagctgagcagcctgaccagcgaagatagcgccgtgtacttctgtgcccggtccatcacaacagtcgtgggctgcgctatggactattggggccagggaacaagcgtgaccgtgtctagtacgcgtatccagaaccctgatcctgccgtgtaccagctgcgggatagcaagagcagcgacaagagcgtgtgtctgttcaccgacttcgacagccagaccaacgtgtcccagagcaaggactccgacgtgtacatcaccgataagaccgtgctggacatgcggagcatggacttcaagagcaactccgccgtggcctggtccaacaagtccgatttcgcctgcgccaacgccttcaacaacagcattatccccgaggacacattcttcccaagccccgagagcagctgcggtaccactccagctgctccacctaaagctgtcctgaagctcgaacctcaatggattaacgtcctccaagaagattctgtcaccctgacatgccggggcacccactctccagagtctgattccattcagtggtttcataatgggaacctgattccgactcacacgcagcccagctatcggtttaaagctaacaacaatgactccggggagtatacttgccagacaggacagaccagcctgtctgacccagtgcacctgacagttctgagcgaatggctcgtcctgcagacccctcatcttgagttccaagagggcgaaaccattgtcctgagatgccactcctggaaagataagccccttgtgaaagtcacattttttcagaatggcaagagcaagaagttttctcggagcgatccgaatttcagtattccccaggccaaccactctcacagcggagactatcactgtacaggcaacatcgggtatacactctacagctctaagcccgtcacaattaccgttcaggctcccagcagctccccaatgggcattattgtggccgtcgtgaccggaattgctgtggccgcaatcgtggcagctgtcgtcgctctgatctattgcagaaagaagcggatcagcgccctgccagggtatcctgagtgccgcgaaatgggcgaaactctgcctgagaaacctgctaaccccacaaatcccgatgaagctgacaaagtcggcgctgaaaacacgatcacatactccctgctcatgcatcctgacgctcttgaggaacctgacgatcagaaccggatccgcgccaagagaagcggatctggcgtgaagcagaccctgaatttcgacctgctgaagctggctggcgacgtggaatccaacccaggcccttctagaggccatatgaccgagtacaagcccacggtgcgcctcgccacccgcgacgacgtccccagggccgtacgcaccctcgccgccgcgttcgccgactaccccgccacgcgccacaccgtcgatccggaccgccacatcgagcgggtcaccgagctgcaagaactcttcctcacgcgcgtcgggctcgacatcggcaaggtgtgggtcgcggacgacggcgccgcggtggcggtctggaccacgccggagagcgtcgaagcgggggcggtgttcgccgagatcggcccgcgcatggccgagttgagcggttcccggctggccgcgcagcaacagatggaaggcctcctggcgccgcaccggcccaaggagcccgcgtggttcctggccaccgtcggcgtctcgcccgaccaccagggcaagggtctgggcagcgccgtcgtgctccccggagtggaggcggccgagcgcgccggggtgcccgccttcctggagacctccgcgccccgcaacctccccttctacgagcggctcggcttcaccgtcaccgccgacgtcgaggtgcccgaaggaccgcgcacctggtgcatgacccgcaagcccggtgcctga

SEQ ID NO: 5780 - DNA, 4317 bp, Artificial Sequence
  Synthetic Polynucleotide
atggccttaccagtgaccgccttgctcctgccgctggccttgctgctccacgccgccaggccggaagtgcagctggttgaatctggcggaggactggttcaggctggcggatctctgagactgtcttgtgccgccagcggcagaacctttagcatgggctggtttagacaggcccctggcaaagagagagagttcgtcgccgccatcacatactctggcggcagcccttactacgccgactctgtgaagggcagattcaccatcagccgggacaacgccaagaacaccgtgtacctccagatgaacagcctgaagcctgaggacaccgccgtgtactactgcgccgccaatccaacatacggcagcgactggaacgccgagaattggggccagggaacccaagtgacagtgtctagcggtaccggcggaggcggatctggcggcggaggtagcggtggcggaggatctgaattcgacatccagatgacacagagccctagcagcctgtctgccagcgtgggagacagagtgaccatcacatgcaaggccagcgaccacatcaacaactggctggcctggtatcagcagaagcctggacaggcccctaagctgctgatctacggcgctaccacactggaaacaggcgtgcccagcagattttctggcagcggctctggcaccgactacaccctgacaatatccagcctccagcctgaggacttcgccacctactactgtcagcagagctggaacaccccttggacattcggccagggcaccaagctggaaatcaagagactcgaggacctgaagaacgtgttcccacctgaggtggccgtgttcgagcctagcgaggccgagatcagccacacccagaaagccaccctcgtgtgcctggctaccggcttctaccccgaccatgtggaactgtcttggtgggtcaacggcaaagaggtgcacagcggcgtgtctaccgacccccagccactgaaagaacagcccgccctgaacgacagccggtactgcctgagcagcagactgagagtgtccgccaccttctggcagaacccccggaaccacttcagatgccaggtgcagttctacggcctgagcgagaacgacgagtggacccaggacagagccaagcccgtgacccagatcgtgtctgccgaagcctggggcagagccgattgcggatccacaccagccgctcctccaaaggccgtgctgaaactggaaccccagtggatcaacgtgctgcaagaggacagcgtgaccctgacctgtagaggcacacacagccctgagagcgacagcatccagtggttccacaacggcaatctgatccccacacacacccagcctagctacagattcaaggccaacaacaacgacagcggcgagtacacctgtcagaccggccagacaagcctgagcgatcctgtgcatctgaccgtgctgtctgagtggctggtgctgcagacaccccacctggaatttcaagagggcgagacaatcgtgctgcggtgccacagctggaaggacaagcctctggtcaaagtgacattcttccagaacgggaagtccaagaagttcagcagaagcgaccccaacttcagcatccctcaggccaatcacagccactccggcgattaccactgcaccggcaatatcggctacaccctgtacagcagcaagcccgtgaccatcacagtgcaggcccctagcagtagccctatgggaatcatcgtggccgtggtcacaggcattgccgtggctgctattgtggctgcagtggtggccctgatctactgccggaagaagagaatctctgccctgcctggctaccccgagtgtagagagatgggagagacactgcccgagaagcccgccaatcctaccaatcctgacgaggccgacaaagtgggagccgagaacaccatcacctacagcctgctgatgcaccccgacgcactggaagaacccgacgaccagaatagaatcagggccaagcgatctggatctggagcaacaaacttctcactactcaaacaagcaggtgacgtggaggagaatcccgggcctactagtatggactggatttggcgcatccttttccttgtcggcgctgctaccggcgcgcattccttcgaacaagttcagcttcaacagcctggcgctgagctggtcaaacctggcgcttctgtgaagatgagctgcaaagccagcggctacgccttcagcagctactggatcaactggatgaagcagaaacccggccagggactcgaatggatcggccaaatctatcccggcgacggcgacaccaactacaacggcaagttcaagggcagagccacactgaccgccgatacctctagcagcacagcctacatgcagctgagcagcctgaccagcgaagatagcgccgtgtacttctgtgcccggtccatcacaacagtcgtgggctgcgctatggactattggggccagggaacaagcgtgaccgtgtctagtacgcgtatccagaaccctgatcctgccgtgtaccagctgcgggatagcaagagcagcgacaagagcgtgtgtctgttcaccgacttcgacagccagaccaacgtgtcccagagcaaggactccgacgtgtacatcaccgataagaccgtgctggacatgcggagcatggacttcaagagcaactccgccgtggcctggtccaacaagtccgatttcgcctgcgccaacgccttcaacaacagcattatccccgaggacacattcttcccaagccccgagagcagctgcggtaccactccagctgctccacctaaagctgtcctgaagctcgaacctcaatggattaacgtcctccaagaagattctgtcaccctgacatgccggggcacccactctccagagtctgattccattcagtggtttcataatgggaacctgattccgactcacacgcagcccagctatcggtttaaagctaacaacaatgactccggggagtatacttgccagacaggacagaccagcctgtctgacccagtgcacctgacagttctgagcgaatggctcgtcctgcagacccctcatcttgagttccaagagggcgaaaccattgtcctgagatgccactcctggaaagataagccccttgtgaaagtcacattttttcagaatggcaagagcaagaagttttctcggagcgatccgaatttcagtattccccaggccaaccactctcacagcggagactatcactgtacaggcaacatcgggtatacactctacagctctaagcccgtcacaattaccgttcaggctcccagcagctccccaatgggcattattgtggccgtcgtgaccggaattgctgtggccgcaatcgtggcagctgtcgtcgctctgatctattgcagaaagaagcggatcagcgccctgccagggtatcctgagtgccgcgaaatgggcgaaactctgcctgagaaacctgctaaccccacaaatcccgatgaagctgacaaagtcggcgctgaaaacacgatcacatactccctgctcatgcatcctgacgctcttgaggaacctgacgatcagaaccggatccgcgccaagagaagcggatctggcgtgaagcagaccctgaatttcgacctgctgaagctggctggcgacgtggaatccaacccaggcccttctagaggccatatgaccgagtacaagcccacggtgcgcctcgccacccgcgacgacgtccccagggccgtacgcaccctcgccgccgcgttcgccgactaccccgccacgcgccacaccgtcgatccggaccgccacatcgagcgggtcaccgagctgcaagaactcttcctcacgcgcgtcgggctcgacatcggcaaggtgtgggtcgcggacgacggcgccgcggtggcggtctggaccacgccggagagcgtcgaagcgggggcggtgttcgccgagatcggcccgcgcatggccgagttgagcggttcccggctggccgcgcagcaacagatggaaggcctcctggcgccgcaccggcccaaggagcccgcgtggttcctggccaccgtcggcgtctcgcccgaccaccagggcaagggtctgggcagcgccgtcgtgctccccggagtggaggcggccgagcgcgccggggtgcccgccttcctggagacctccgcgccccgcaacctccccttctacgagcggctcggcttcaccgtcaccgccgacgtcgaggtgcccgaaggaccgcgcacctggtgcatgacccgcaagcccggtgcctga

SEQ ID NO: 5781 - DNA, 4728 bp, Artificial Sequence
  Synthetic Polynucleotide
atggccttaccagtgaccgccttgctcctgccgctggccttgctgctccacgccgccaggccggaagtgcagctggttgaatctggcggaggactggttcaggctggcggatctctgagactgtcttgtgccgccagcggcagaacctttagcatgggctggtttagacaggcccctggcaaagagagagagttcgtcgccgccatcacatactctggcggcagcccttactacgccgactctgtgaagggcagattcaccatcagccgggacaacgccaagaacaccgtgtacctccagatgaacagcctgaagcctgaggacaccgccgtgtactactgcgccgccaatccaacatacggcagcgactggaacgccgagaattggggccagggaacccaagtgacagtgtctagcggtaccggcggaggcggatctggcggcggaggtagcggtggcggaggatctgaattcgacatccagatgacacagagccctagcagcctgtctgccagcgtgggagacagagtgaccatcacatgcaaggccagcgaccacatcaacaactggctggcctggtatcagcagaagcctggacaggcccctaagctgctgatctacggcgctaccacactggaaacaggcgtgcccagcagattttctggcagcggctctggcaccgactacaccctgacaatatccagcctccagcctgaggacttcgccacctactactgtcagcagagctggaacaccccttggacattcggccagggcaccaagctggaaatcaagagactcgaggacctgaagaacgtgttcccacctgaggtggccgtgttcgagcctagcgaggccgagatcagccacacccagaaagccaccctcgtgtgcctggctaccggcttctaccccgaccatgtggaactgtcttggtgggtcaacggcaaagaggtgcacagcggcgtgtctaccgacccccagccactgaaagaacagcccgccctgaacgacagccggtactgcctgagcagcagactgagagtgtccgccaccttctggcagaacccccggaaccacttcagatgccaggtgcagttctacggcctgagcgagaacgacgagtggacccaggacagagccaagcccgtgacccagatcgtgtctgccgaagcctggggcagagccgattgcggatccacaccagccgctcctccaaaggccgtgctgaaactggaaccccagtggatcaacgtgctgcaagaggacagcgtgaccctgacctgtagaggcacacacagccctgagagcgacagcatccagtggttccacaacggcaatctgatccccacacacacccagcctagctacagattcaaggccaacaacaacgacagcggcgagtacacctgtcagaccggccagacaagcctgagcgatcctgtgcatctgaccgtgctgtctgagtggctggtgctgcagacaccccacctggaatttcaagagggcgagacaatcgtgctgcggtgccacagctggaaggacaagcctctggtcaaagtgacattcttccagaacgggaagtccaagaagttcagcagaagcgaccccaacttcagcatccctcaggccaatcacagccactccggcgattaccactgcaccggcaatatcggctacaccctgtacagcagcaagcccgtgaccatcacagtgcaggcccctagcagtagccctatgggaatcatcgtggccgtggtcacaggcattgccgtggctgctattgtggctgcagtggtggccctgatctactgccggaagaagagaatctctgccctgcctggctaccccgagtgtagagagatgggagagacactgcccgagaagcccgccaatcctaccaatcctgacgaggccgacaaagtgggagccgagaacaccatcacctacagcctgctgatgcaccccgacgcactggaagaacccgacgaccagaatagaatcagggccaagcgatctggatctggagcaacaaacttctcactactcaaacaagcaggtgacgtggaggagaatcccgggcctactagtatggactggatttggcgcatccttttccttgtcggcgctgctaccggcgcgcattccgggcccgaagtgcaactggttgaatccggtggcggcctggtgcaagcaggcggatctctcagacttagctgtgccgcctccggcagaaccttcacaatgggatggtttaggcaggctccagggaaagagagagagttcgtcgccgccatctctctgtctcccacactggcctactacgccgactctgtgaaaggccggttcaccatctccagagataatgccaagaacaccgtggtgctgcaaatgaactctctgaaacccgaggatacagccctgtactattgtgccgctgaccggaagtccgtgatgagcatcagacccgattactggggacagggcacacaagtcacagtgtcctctggatccggcggcggaggatctggcggaggcggatctgggggcggaggctctttcgaacaagttcagcttcaacagcctggcgctgagctggtcaaacctggcgcttctgtgaagatgagctgcaaagccagcggctacgccttcagcagctactggatcaactggatgaagcagaaacccggccagggactcgaatggatcggccaaatctatcccggcgacggcgacaccaactacaacggcaagttcaagggcagagccacactgaccgccgatacctctagcagcacagcctacatgcagctgagcagcctgaccagcgaagatagcgccgtgtacttctgtgcccggtccatcacaacagtcgtgggctgcgctatggactattggggccagggaacaagcgtgaccgtgtctagtacgcgtatccagaaccctgatcctgccgtgtaccagctgcgggatagcaagagcagcgacaagagcgtgtgtctgttcaccgacttcgacagccagaccaacgtgtcccagagcaaggactccgacgtgtacatcaccgataagaccgtgctggacatgcggagcatggacttcaagagcaactccgccgtggcctggtccaacaagtccgatttcgcctgcgccaacgccttcaacaacagcattatccccgaggacacattcttcccaagccccgagagcagctgcggtaccactccagctgctccacctaaagctgtcctgaagctcgaacctcaatggattaacgtcctccaagaagattctgtcaccctgacatgccggggcacccactctccagagtctgattccattcagtggtttcataatgggaacctgattccgactcacacgcagcccagctatcggtttaaagctaacaacaatgactccggggagtatacttgccagacaggacagaccagcctgtctgacccagtgcacctgacagttctgagcgaatggctcgtcctgcagacccctcatcttgagttccaagagggcgaaaccattgtcctgagatgccactcctggaaagataagccccttgtgaaagtcacattttttcagaatggcaagagcaagaagttttctcggagcgatccgaatttcagtattccccaggccaaccactctcacagcggagactatcactgtacaggcaacatcgggtatacactctacagctctaagcccgtcacaattaccgttcaggctcccagcagctccccaatgggcattattgtggccgtcgtgaccggaattgctgtggccgcaatcgtggcagctgtcgtcgctctgatctattgcagaaagaagcggatcagcgccctgccagggtatcctgagtgccgcgaaatgggcgaaactctgcctgagaaacctgctaaccccacaaatcccgatgaagctgacaaagtcggcgctgaaaacacgatcacatactccctgctcatgcatcctgacgctcttgaggaacctgacgatcagaaccggatccgcgccaagagaagcggatctggcgtgaagcagaccctgaatttcgacctgctgaagctggctggcgacgtggaatccaacccaggcccttctagaggccatatgaccgagtacaagcccacggtgcgcctcgccacccgcgacgacgtccccagggccgtacgcaccctcgccgccgcgttcgccgactaccccgccacgcgccacaccgtcgatccggaccgccacatcgagcgggtcaccgagctgcaagaactcttcctcacgcgcgtcgggctcgacatcggcaaggtgtgggtcgcggacgacggcgccgcggtggcggtctggaccacgccggagagcgtcgaagcgggggcggtgttcgccgagatcggcccgcgcatggccgagttgagcggttcccggctggccgcgcagcaacagatggaaggcctcctggcgccgcaccggcccaaggagcccgcgtggttcctggccaccgtcggcgtctcgcccgaccaccagggcaagggtctgggcagcgccgtcgtgctccccggagtggaggcggccgagcgcgccggggtgcccgccttcctggagacctccgcgccccgcaacctccccttctacgagcggctcggcttcaccgtcaccgccgacgtcgaggtgcccgaaggaccgcgcacctggtgcatgacccgcaagcccggtgcctga

SEQ ID NO: 5782 - DNA, 3927 bp, Artificial Sequence
  Synthetic Polynucleotide
atggccttaccagtgaccgccttgctcctgccgctggccttgctgctccacgccgccaggccggaagtgcagctggttgaatctggcggaggactggttcaggctggcggatctctgagactgtcttgtgccgccagcggcagaacctttagcatgggctggtttagacaggcccctggcaaagagagagagttcgtcgccgccatcacatactctggcggcagcccttactacgccgactctgtgaagggcagattcaccatcagccgggacaacgccaagaacaccgtgtacctccagatgaacagcctgaagcctgaggacaccgccgtgtactactgcgccgccaatccaacatacggcagcgactggaacgccgagaattggggccagggaacccaagtgacagtgtctagcctcgaggacctgaagaacgtgttcccacctgaggtggccgtgttcgagcctagcgaggccgagatcagccacacccagaaagccaccctcgtgtgcctggctaccggcttctaccccgaccatgtggaactgtcttggtgggtcaacggcaaagaggtgcacagcggcgtgtctaccgacccccagccactgaaagaacagcccgccctgaacgacagccggtactgcctgagcagcagactgagagtgtccgccaccttctggcagaacccccggaaccacttcagatgccaggtgcagttctacggcctgagcgagaacgacgagtggacccaggacagagccaagcccgtgacccagatcgtgtctgccgaagcctggggcagagccgattgcggatccacaccagccgctcctccaaaggccgtgctgaaactggaaccccagtggatcaacgtgctgcaagaggacagcgtgaccctgacctgtagaggcacacacagccctgagagcgacagcatccagtggttccacaacggcaatctgatccccacacacacccagcctagctacagattcaaggccaacaacaacgacagcggcgagtacacctgtcagaccggccagacaagcctgagcgatcctgtgcatctgaccgtgctgtctgagtggctggtgctgcagacaccccacctggaatttcaagagggcgagacaatcgtgctgcggtgccacagctggaaggacaagcctctggtcaaagtgacattcttccagaacgggaagtccaagaagttcagcagaagcgaccccaacttcagcatccctcaggccaatcacagccactccggcgattaccactgcaccggcaatatcggctacaccctgtacagcagcaagcccgtgaccatcacagtgcaggcccctagcagtagccctatgggaatcatcgtggccgtggtcacaggcattgccgtggctgctattgtggctgcagtggtggccctgatctactgccggaagaagagaatctctgccctgcctggctaccccgagtgtagagagatgggagagacactgcccgagaagcccgccaatcctaccaatcctgacgaggccgacaaagtgggagccgagaacaccatcacctacagcctgctgatgcaccccgacgcactggaagaacccgacgaccagaatagaatcagggccaagcgatctggatctggagcaacaaacttctcactactcaaacaagcaggtgacgtggaggagaatcccgggcctactagtatggactggatttggcgcatccttttccttgtcggcgctgctaccggcgcgcattccgggcccgaagtgcaactggttgaatccggtggcggcctggtgcaagcaggcggatctctcagacttagctgtgccgcctccggcagaaccttcacaatgggatggtttaggcaggctccagggaaagagagagagttcgtcgccgccatctctctgtctcccacactggcctactacgccgactctgtgaaaggccggttcaccatctccagagataatgccaagaacaccgtggtgctgcaaatgaactctctgaaacccgaggatacagccctgtactattgtgccgctgaccggaagtccgtgatgagcatcagacccgattactggggacagggcacacaagtcacagtgtcctctacgcgtatccagaaccctgatcctgccgtgtaccagctgcgggatagcaagagcagcgacaagagcgtgtgtctgttcaccgacttcgacagccagaccaacgtgtcccagagcaaggactccgacgtgtacatcaccgataagaccgtgctggacatgcggagcatggacttcaagagcaactccgccgtggcctggtccaacaagtccgatttcgcctgcgccaacgccttcaacaacagcattatccccgaggacacattcttcccaagccccgagagcagctgcggtaccactccagctgctccacctaaagctgtcctgaagctcgaacctcaatggattaacgtcctccaagaagattctgtcaccctgacatgccggggcacccactctccagagtctgattccattcagtggtttcataatgggaacctgattccgactcacacgcagcccagctatcggtttaaagctaacaacaatgactccggggagtatacttgccagacaggacagaccagcctgtctgacccagtgcacctgacagttctgagcgaatggctcgtcctgcagacccctcatcttgagttccaagagggcgaaaccattgtcctgagatgccactcctggaaagataagccccttgtgaaagtcacattttttcagaatggcaagagcaagaagttttctcggagcgatccgaatttcagtattccccaggccaaccactctcacagcggagactatcactgtacaggcaacatcgggtatacactctacagctctaagcccgtcacaattaccgttcaggctcccagcagctccccaatgggcattattgtggccgtcgtgaccggaattgctgtggccgcaatcgtggcagctgtcgtcgctctgatctattgcagaaagaagcggatcagcgccctgccagggtatcctgagtgccgcgaaatgggcgaaactctgcctgagaaacctgctaaccccacaaatcccgatgaagctgacaaagtcggcgctgaaaacacgatcacatactccctgctcatgcatcctgacgctcttgaggaacctgacgatcagaaccggatccgcgccaagagaagcggatctggcgtgaagcagaccctgaatttcgacctgctgaagctggctggcgacgtggaatccaacccaggcccttctagaggccatatgaccgagtacaagcccacggtgcgcctcgccacccgcgacgacgtccccagggccgtacgcaccctcgccgccgcgttcgccgactaccccgccacgcgccacaccgtcgatccggaccgccacatcgagcgggtcaccgagctgcaagaactcttcctcacgcgcgtcgggctcgacatcggcaaggtgtgggtcgcggacgacggcgccgcggtggcggtctggaccacgccggagagcgtcgaagcgggggcggtgttcgccgagatcggcccgcgcatggccgagttgagcggttcccggctggccgcgcagcaacagatggaaggcctcctggcgccgcaccggcccaaggagcccgcgtggttcctggccaccgtcggcgtctcgcccgaccaccagggcaagggtctgggcagcgccgtcgtgctccccggagtggaggcggccgagcgcgccggggtgcccgccttcctggagacctccgcgccccgcaacctccccttctacgagcggctcggcttcaccgtcaccgccgacgtcgaggtgcccgaaggaccgcgcacctggtgcatgacccgcaagcccggtgcctga

SEQ ID NO: 5783 - DNA, 1992 bp, Artificial Sequence
  Synthetic Polynucleotide
atggccttaccagtgaccgccttgctcctgccgctggccttgctgctccacgccgccaggccggcatgcgaagtgcagctgcttgaaagtggcggcggactgattcagcctggcggatctctgagactgagctgtgccgccagcggcttcaccttttctagccacgccatgacctgggtccgacaggcacctggaaaagggcttgaatgggtgtccgccatcagcggctctggcgattacacacactacgccgacagcgtgaagggcagattcaccatcagcagagacaacagcaagaacaccgtgtacctccagatgaacagcctgagagccgaggacagcgccgtgtattattgcgccaaggatgaggatggcggcagcctgcttggacacagaggacaaggcaccctggtcaccgtttcttccggtaccggcggaggcggatctggcggcggaggtagcggtggcggaggatctgaattcggatctctcgagacaccagccgctcctccaaaggccgtgctgaaactggaaccccagtggatcaacgtgctgcaagaggacagcgtgaccctgacctgtagaggcacacacagccctgagagcgacagcatccagtggttccacaacggcaatctgatccccacacacacccagcctagctacagattcaaggccaacaacaacgacagcggcgagtacacctgtcagaccggccagacaagcctgagcgatcctgtgcatctgaccgtgctgtctgagtggctggtgctgcagacaccccacctggaatttcaagagggcgagacaatcgtgctgcggtgccacagctggaaggacaagcctctggtcaaagtgacattcttccagaacgggaagtccaagaagttcagcagaagcgaccccaacttcagcatccctcaggccaatcacagccactccggcgattaccactgcaccggcaatatcggctacaccctgtacagcagcaagcccgtgaccatcacagtgcaggcccctagcagtagccctatgggaatcatcgtggccgtggtcacaggcattgccgtggctgctattgtggctgcagtggtggccctgatctactgccggaagaagagaatctctgccctgcctggctaccccgagtgtagagagatgggagagacactgcccgagaagcccgccaatcctaccaatcctgacgaggccgacaaagtgggagccgagaacaccatcacctacagcctgctgatgcaccccgacgcactggaagaacccgacgaccagaatagaatcagggccaagcgatctggatctggagcaacaaacttctcactactcaaacaagcaggtgacgtggaggagaatcccgggcctactagaggccatatgaccgagtacaagcccacggtgcgcctcgccacccgcgacgacgtccccagggccgtacgcaccctcgccgccgcgttcgccgactaccccgccacgcgccacaccgtcgatccggaccgccacatcgagcgggtcaccgagctgcaagaactcttcctcacgcgcgtcgggctcgacatcggcaaggtgtgggtcgcggacgacggcgccgcggtggcggtctggaccacgccggagagcgtcgaagcgggggcggtgttcgccgagatcggcccgcgcatggccgagttgagcggttcccggctggccgcgcagcaacagatggaaggcctcctggcgccgcaccggcccaaggagcccgcgtggttcctggccaccgtcggcgtctcgcccgaccaccagggcaagggtctgggcagcgccgtcgtgctccccggagtggaggcggccgagcgcgccggggtgcccgccttcctggagacctccgcgccccgcaacctccccttctacgagcggctcggcttcaccgtcaccgccgacgtcgaggtgcccgaaggaccgcgcacctggtgcatgacccgcaagcccggtgcctga

SEQ ID NO: 5784 - DNA, 1605 bp, Artificial Sequence; identical to SEQ ID NO: 5752
  Synthetic Polynucleotide

SEQ ID NO: 5785 - DNA, 1605 bp, Artificial Sequence; identical to SEQ ID NO: 5753
  Synthetic Polynucleotide

SEQ ID NO: 5786 - DNA, 1227 bp, Artificial Sequence; identical to SEQ ID NO: 5754
  Synthetic Polynucleotide

SEQ ID NO: 5787 - DNA, 1227 bp, Artificial Sequence; identical to SEQ ID NO: 5755
  Synthetic Polynucleotide

SEQ ID NO: 5788 - DNA, 1227 bp, Artificial Sequence; identical to SEQ ID NO: 5756
  Synthetic Polynucleotide

SEQ ID NO: 5789 - DNA, 1233 bp, Artificial Sequence; identical to SEQ ID NO: 5757
  Synthetic Polynucleotide

SEQ ID NO: 5790 - DNA, 1257 bp, Artificial Sequence; identical to SEQ ID NO: 5758
  Synthetic Polynucleotide

SEQ ID NO: 5791 - DNA, 1245 bp, Artificial Sequence; identical to SEQ ID NO: 5759
  Synthetic Polynucleotide

SEQ ID NO: 5792 - DNA, 1230 bp, Artificial Sequence; identical to SEQ ID NO: 5760
  Synthetic Polynucleotide

SEQ ID NO: 5793 - DNA, 1245 bp, Artificial Sequence; identical to SEQ ID NO: 5761
  Synthetic Polynucleotide

SEQ ID NO: 5794 - DNA, 1047 bp, Artificial Sequence; identical to SEQ ID NO: 5762
  Synthetic Polynucleotide

SEQ ID NO: 5795 - DNA, 1140 bp, Artificial Sequence; identical to SEQ ID NO: 5763
  Synthetic Polynucleotide

SEQ ID NO: 5796 - DNA, 1143 bp, Artificial Sequence; identical to SEQ ID NO: 5764
  Synthetic Polynucleotide

SEQ ID NO: 5797 - DNA, 1794 bp, Artificial Sequence; identical to SEQ ID NO: 5765
  Synthetic Polynucleotide

SEQ ID NO: 5798 - DNA, 1434 bp, Artificial Sequence; identical to SEQ ID NO: 5766
  Synthetic Polynucleotide

SEQ ID NO: 5799 - DNA, 1032 bp, Artificial Sequence; identical to SEQ ID NO: 5767
  Synthetic Polynucleotide

SEQ ID NO: 5800 - DNA, 957 bp, Artificial Sequence; identical to SEQ ID NO: 5768
  Synthetic Polynucleotide

SEQ ID NO: 5801 - DNA, 1731 bp, Artificial Sequence; identical to SEQ ID NO: 5769
  Synthetic Polynucleotide

SEQ ID NO: 5802 - DNA, 1731 bp, Artificial Sequence; identical to SEQ ID NO: 5770
  Synthetic Polynucleotide

SEQ ID NO: 5803 - DNA, 3408 bp, Artificial Sequence
  Synthetic Polynucleotide
atggccttaccagtgaccgccttgctcctgccgctggccttgctgctccacgccgccaggccggacatccagatgacacagagccctagcagcctgtctgccagcgtgggagacagagtgaccatcacatgcaaggccagcgaccacatcaacaactggctggcctggtatcagcagaagcctggacaggcccctaagctgctgatctacggcgctaccacactggaaacaggcgtgcccagcagattttctggcagcggctctggcaccgactacaccctgacaatatccagcctccagcctgaggacttcgccacctactactgtcagcagagctggaacaccccttggacattcggccagggcaccaagctggaaatcaagagactcgagggcatgcggactgaagacctcccaaaggctgtggtgttcctggagcctcaatggtacagggtgctggagaaggacagtgtgactctgaagtgccagggagcctactcccctgaggacaattccacacagtggtttcacaatgagagcctcatctcaagccaggcctccagctacttcattgacgctgccacagtggacgacagtggagagtacaggtgccagacaaacctctccaccctcagtgacccggtgcagctagaagtccatatcggctggctgttgctccaggcccctcggtgggtgttcaaggaggaagaccctattcacctgaggtgtcacagctggaagaacactgctctgcataaggtcacatatttacagaatggcaaaggcaggaagtattttcatcataattctgacttctacattccaaaagccacactcaaagacagcggctcctacttctgcagggggcttgttgggagtaaaaatgtgtcttcagagactgtgaacatcaccatcactcaaggtttggcagtgtcaaccatctcatcattctttccacctggctaccaagtgtccttctgcctggtcatggtgctgctgttcgccgtggataccggcctgtacttcagcgtcaagaccaacatccggtccagcaccagagactggaaggaccacaagttcaagtggcggaaggaccctcaggacaagagggccaagcgatctggatctggagcaacaaacttctcactactcaaacaagcaggtgacgtggaggagaatcccgggcctactagtatggactggatttggcgcatccttttccttgtcggcgctgctaccggcgcgcattccttcgaacaagttcagcttcaacagcctggcgctgagctggtcaaacctggcgcttctgtgaagatgagctgcaaagccagcggctacgccttcagcagctactggatcaactggatgaagcagaaacccggccagggactcgaatggatcggccaaatctatcccggcgacggcgacaccaactacaacggcaagttcaagggcagagccacactgaccgccgatacctctagcagcacagcctacatgcagctgagcagcctgaccagcgaagatagcgccgtgtacttctgtgcccggtccatcacaacagtcgtgggctgcgctatggactattggggccagggaacaagcgtgaccgtgtctagtacgcgtcaagtggtggacacaacaaaagccgtcatcaccctgcaaccaccttgggtttcagtctttcaagaagagacagttaccctgcactgtgaagtcctgcacttgcccggaagcagctccacacagtggttcctcaacggcacagctacccagacaagcaccccttcctaccggatcacatctgcctccgtgaacgattccggcgagtataggtgtcagaggggcctgtctggccgcagcgatcctatccagcttgagattcatcgtggatggttgctcctccaagtgtcctccagggtgttcaccgaaggcgaacctctggcactgaggtgccatgcttggaaagataagctcgtctacaatgtcctctactaccgcaatggcaaggcttttaagttttttcattggaactctaatctcacgatcctgaaaacgaacatctcccacaatgggacataccactgctctggcatgggaaaacatcggtacacctctgccggcatctctgtcacagtcaaagaactgttccctgcaccagtcctgaacgcttccgtgacctctccactgcttgagggaaatctggtcaccctgtcctgcgaaactaagttgctgcttcagaggcccggactccagctctacttttcattctatatgggctctaagaccctgagaggccggaacaccagcagcgaatatcagattctgacagctcggcgcgaggactccgggctctattggtgtgaagctgctacagaggacggaaacgtgctgaaacggtcccctgaactggaactgcaagtcctgggccttcagctgccaactccagtgtggtttcatgtcctgttctatctggctgtggggattatgttccttgtgaataccgtgctctgggttaccattcggaaagaactcaagcgcaagaaaaaatgggatcttgagataagcctggacagcgggcatgagaagaaagtcatcagttcccttcaagaggacagacatctcgaagaggaactcaaatgtcaagaacaaaaagaagaacaactccaagagggtgtccatcggaaagagccacagggcgctacacgcgccaagagaagcggatctggcgtgaagcagaccctgaatttcgacctgctgaagctggctggcgacgtggaatccaacccaggcccttctagaggccatatgaccgagtacaagcccacggtgcgcctcgccacccgcgacgacgtccccagggccgtacgcaccctcgccgccgcgttcgccgactaccccgccacgcgccacaccgtcgatccggaccgccacatcgagcgggtcaccgagctgcaagaactcttcctcacgcgcgtcgggctcgacatcggcaaggtgtgggtcgcggacgacggcgccgcggtggcggtctggaccacgccggagagcgtcgaagcgggggcggtgttcgccgagatcggcccgcgcatggccgagttgagcggttcccggctggccgcgcagcaacagatggaaggcctcctggcgccgcaccggcccaaggagcccgcgtggttcctggccaccgtcggcgtctcgcccgaccaccagggcaagggtctgggcagcgccgtcgtgctccccggagtggaggcggccgagcgcgccggggtgcccgccttcctggagacctccgcgccccgcaacctccccttctacgagcggctcggcttcaccgtcaccgccgacgtcgaggtgcccgaaggaccgcgcacctggtgcatgacccgcaagcccggtgcctga

SEQ ID NO: 5804 - DNA, 3570 bp, Artificial Sequence
  Synthetic Polynucleotide
atggccttaccagtgaccgccttgctcctgccgctggccttgctgctccacgccgccaggccggcatgcgaagtgcagctgcttgaaagtggcggcggactgattcagcctggcggatctctgagactgagctgtgccgccagcggcttcaccttttctagccacgccatgacctgggtccgacaggcacctggaaaagggcttgaatgggtgtccgccatcagcggctctggcgattacacacactacgccgacagcgtgaagggcagattcaccatcagcagagacaacagcaagaacaccgtgtacctccagatgaacagcctgagagccgaggacagcgccgtgtattattgcgccaaggatgaggatggcggcagcctgcttggacacagaggacaaggcaccctggtcaccgtttcttccggtaccggcggaggcggatctggcggcggaggtagcggtggcggaggatctgaattcggatctctcgagggcatgcggactgaagacctcccaaaggctgtggtgttcctggagcctcaatggtacagggtgctggagaaggacagtgtgactctgaagtgccagggagcctactcccctgaggacaattccacacagtggtttcacaatgagagcctcatctcaagccaggcctccagctacttcattgacgctgccacagtggacgacagtggagagtacaggtgccagacaaacctctccaccctcagtgacccggtgcagctagaagtccatatcggctggctgttgctccaggcccctcggtgggtgttcaaggaggaagaccctattcacctgaggtgtcacagctggaagaacactgctctgcataaggtcacatatttacagaatggcaaaggcaggaagtattttcatcataattctgacttctacattccaaaagccacactcaaagacagcggctcctacttctgcagggggcttgttgggagtaaaaatgtgtcttcagagactgtgaacatcaccatcactcaaggtttggcagtgtcaaccatctcatcattctttccacctggctaccaagtgtccttctgcctggtcatggtgctgctgttcgccgtggataccggcctgtacttcagcgtcaagaccaacatccggtccagcaccagagactggaaggaccacaagttcaagtggcggaaggaccctcaggacaagagggccaagcgatctggatctggagcaacaaacttctcactactcaaacaagcaggtgacgtggaggagaatcccgggcctactagtgccaccatggactggatttggcgcatccttttccttgtcggcgctgctaccggcgcccattccgggcccgaagtgcagctggttgaatctggcggaggactggttcaggctggcggatctctgagactgtcttgtgccgccagcggcagaacctttagcatgggctggtttagacaggcccctggcaaagagagagagttcgtcgccgccatcacatactctggcggcagcccttactacgccgactctgtgaagggcagattcaccatcagccgggacaacgccaagaacaccgtgtacctccagatgaacagcctgaagcctgaggacaccgccgtgtactactgcgccgccaatccaacatacggcagcgactggaacgccgagaattggggccagggaacccaagtgacagtgtctagcggatccggcggcggaggatctggcggaggcggatctgggggcggaggctctttcgaaggcagcacgcgtcaagtggtggacacaacaaaagccgtcatcaccctgcaaccaccttgggtttcagtctttcaagaagagacagttaccctgcactgtgaagtcctgcacttgcccggaagcagctccacacagtggttcctcaacggcacagctacccagacaagcaccccttcctaccggatcacatctgcctccgtgaacgattccggcgagtataggtgtcagaggggcctgtctggccgcagcgatcctatccagcttgagattcatcgtggatggttgctcctccaagtgtcctccagggtgttcaccgaaggcgaacctctggcactgaggtgccatgcttggaaagataagctcgtctacaatgtcctctactaccgcaatggcaaggcttttaagttttttcattggaactctaatctcacgatcctgaaaacgaacatctcccacaatgggacataccactgctctggcatgggaaaacatcggtacacctctgccggcatctctgtcacagtcaaagaactgttccctgcaccagtcctgaacgcttccgtgacctctccactgcttgagggaaatctggtcaccctgtcctgcgaaactaagttgctgcttcagaggcccggactccagctctacttttcattctatatgggctctaagaccctgagaggccggaacaccagcagcgaatatcagattctgacagctcggcgcgaggactccgggctctattggtgtgaagctgctacagaggacggaaacgtgctgaaacggtcccctgaactggaactgcaagtcctgggccttcagctgccaactccagtgtggtttcatgtcctgttctatctggctgtggggattatgttccttgtgaataccgtgctctgggttaccattcggaaagaactcaagcgcaagaaaaaatgggatcttgagataagcctggacagcgggcatgagaagaaagtcatcagttcccttcaagaggacagacatctcgaagaggaactcaaatgtcaagaacaaaaagaagaacaactccaagagggtgtccatcggaaagagccacagggcgctacacgcgccaagagaagcggatctggcgtgaagcagaccctgaatttcgacctgctgaagctggctggcgacgtggaatccaacccaggcccttctagaggccatatgaccgagtacaagcccacggtgcgcctcgccacccgcgacgacgtccccagggccgtacgcaccctcgccgccgcgttcgccgactaccccgccacgcgccacaccgtcgatccggaccgccacatcgagcgggtcaccgagctgcaagaactcttcctcacgcgcgtcgggctcgacatcggcaaggtgtgggtcgcggacgacggcgccgcggtggcggtctggaccacgccggagagcgtcgaagcgggggcggtgttcgccgagatcggcccgcgcatggccgagttgagcggttcccggctggccgcgcagcaacagatggaaggcctcctggcgccgcaccggcccaaggagcccgcgtggttcctggccaccgtcggcgtctcgcccgaccaccagggcaagggtctgggcagcgccgtcgtgctccccggagtggaggcggccgagcgcgccggggtgcccgccttcctggagacctccgcgccccgcaacctccccttctacgagcggctcggcttcaccgtcaccgccgacgtcgaggtgcccgaaggaccgcgcacctggtgcatgacccgcaagcccggtgcctga

SEQ ID NO: 5805 - DNA, 4020 bp, Artificial Sequence
  Synthetic Polynucleotide
atggccttaccagtgaccgccttgctcctgccgctggccttgctgctccacgccgccaggccggacatccagatgacacagagccctagcagcctgtctgccagcgtgggagacagagtgaccatcacatgcaaggccagcgaccacatcaacaactggctggcctggtatcagcagaagcctggacaggcccctaagctgctgatctacggcgctaccacactggaaacaggcgtgcccagcagattttctggcagcggctctggcaccgactacaccctgacaatatccagcctccagcctgaggacttcgccacctactactgtcagcagagctggaacaccccttggacattcggccagggcaccaagctggaaatcaagagactcgagggacagcctaaggccaatcctaccgtgacactgttccctccaagcagcgaagaactccaggccaacaaggccacacttgtgtgcctgatctccgacttctaccctggggctgtgacagtggcttggaaggccgatggatctcctgtgaaagccggcgtggaaaccaccaagccatccaagcagagcaacaacaaatacgccgccagctcctacctgagcctgacacctgagcagtggaagtcccacagatcctacagctgccaagtgacccacgaaggcagcaccgtggaaaagacagtggcccctacagagtgcagcggatccggcatgcggactgaagacctcccaaaggctgtggtgttcctggagcctcaatggtacagggtgctggagaaggacagtgtgactctgaagtgccagggagcctactcccctgaggacaattccacacagtggtttcacaatgagagcctcatctcaagccaggcctccagctacttcattgacgctgccacagtggacgacagtggagagtacaggtgccagacaaacctctccaccctcagtgacccggtgcagctagaagtccatatcggctggctgttgctccaggcccctcggtgggtgttcaaggaggaagaccctattcacctgaggtgtcacagctggaagaacactgctctgcataaggtcacatatttacagaatggcaaaggcaggaagtattttcatcataattctgacttctacattccaaaagccacactcaaagacagcggctcctacttctgcagggggcttgttgggagtaaaaatgtgtcttcagagactgtgaacatcaccatcactcaaggtttggcagtgtcaaccatctcatcattctttccacctggctaccaagtgtccttctgcctggtcatggtgctgctgttcgccgtggataccggcctgtacttcagcgtcaagaccaacatccggtccagcaccagagactggaaggaccacaagttcaagtggcggaaggaccctcaggacaagagggccaagcgatctggatctggagcaacaaacttctcactactcaaacaagcaggtgacgtggaggagaatcccgggcctactagtatggactggatttggcgcatccttttccttgtcggcgctgctaccggcgcgcattccttcgaacaagttcagcttcaacagcctggcgctgagctggtcaaacctggcgcttctgtgaagatgagctgcaaagccagcggctacgccttcagcagctactggatcaactggatgaagcagaaacccggccagggactcgaatggatcggccaaatctatcccggcgacggcgacaccaactacaacggcaagttcaagggcagagccacactgaccgccgatacctctagcagcacagcctacatgcagctgagcagcctgaccagcgaagatagcgccgtgtacttctgtgcccggtccatcacaacagtcgtgggctgcgctatggactattggggccagggaacaagcgtgaccgtgtctagtacgcgtgcctctacaaagggaccctccgtgtttcctctggctcccagcagcaagtctacaagcggaggaacagccgctctgggctgcctggtcaaggattactttcccgagcctgtgaccgtgtcctggaatagcggagcactgacaagcggcgtgcacacctttccagccgtgctgcaaagcagcggcctgtactctctgagcagcgtggtcacagtgcctagctctagcctgggcacccagacctacatctgcaatgtgaaccacaagcctagcaacaccaaggtggacaagagagtggaacccaagagctgtggtacccaagtggtggacacaacaaaagccgtcatcaccctgcaaccaccttgggtttcagtctttcaagaagagacagttaccctgcactgtgaagtcctgcacttgcccggaagcagctccacacagtggttcctcaacggcacagctacccagacaagcaccccttcctaccggatcacatctgcctccgtgaacgattccggcgagtataggtgtcagaggggcctgtctggccgcagcgatcctatccagcttgagattcatcgtggatggttgctcctccaagtgtcctccagggtgttcaccgaaggcgaacctctggcactgaggtgccatgcttggaaagataagctcgtctacaatgtcctctactaccgcaatggcaaggcttttaagttttttcattggaactctaatctcacgatcctgaaaacgaacatctcccacaatgggacataccactgctctggcatgggaaaacatcggtacacctctgccggcatctctgtcacagtcaaagaactgttccctgcaccagtcctgaacgcttccgtgacctctccactgcttgagggaaatctggtcaccctgtcctgcgaaactaagttgctgcttcagaggcccggactccagctctacttttcattctatatgggctctaagaccctgagaggccggaacaccagcagcgaatatcagattctgacagctcggcgcgaggactccgggctctattggtgtgaagctgctacagaggacggaaacgtgctgaaacggtcccctgaactggaactgcaagtcctgggccttcagctgccaactccagtgtggtttcatgtcctgttctatctggctgtggggattatgttccttgtgaataccgtgctctgggttaccattcggaaagaactcaagcgcaagaaaaaatgggatcttgagataagcctggacagcgggcatgagaagaaagtcatcagttcccttcaagaggacagacatctcgaagaggaactcaaatgtcaagaacaaaaagaagaacaactccaagagggtgtccatcggaaagagccacagggcgctacacgcgccaagagaagcggatctggcgtgaagcagaccctgaatttcgacctgctgaagctggctggcgacgtggaatccaacccaggcccttctagaggcgggatccacaccatggctacctacgaggtgctgtgcgaggtggcaagaaagctgggcaccgacgacagagaagtggtgctgttcctgctgaacgtgttcatccctcagcctacactggcccagctgatcggtgcactgagagccctgaaagaggaaggccggctgacctttcctctgctggccgaatgcctgttcagagccggaagaagggatctgctgcgggacctgctgcatctggaccccagatttctggaaagacacctggccggcaccatgagctacttcagcccttaccagctgaccgtgctgcacgttgacggcgaactgtgcgccagagatattcggagcctgatcttcctgagcaaggacaccatcggcagccggtctacccctcagacatttctgcactgggtgtactgcatggaaaacctggacctgctcggccccacagatgtggatgccctgatgtccatgctgagaagcctgagcagagtggacctccagagacaggtgcagacactgatgggactgcacctgagcggacctagccacagccagcactacagacacacccct

SEQ ID NO: 5806 - DNA, 4179 bp, Artificial Sequence
  Synthetic Polynucleotide
atggccttaccagtgaccgccttgctcctgccgctggccttgctgctccacgccgccaggccggacatccagatgacacagagccctagcagcctgtctgccagcgtgggagacagagtgaccatcacatgcaaggccagcgaccacatcaacaactggctggcctggtatcagcagaagcctggacaggcccctaagctgctgatctacggcgctaccacactggaaacaggcgtgcccagcagattttctggcagcggctctggcaccgactacaccctgacaatatccagcctccagcctgaggacttcgccacctactactgtcagcagagctggaacaccccttggacattcggccagggcaccaagctggaaatcaagagactcgagggacagcctaaggccaatcctaccgtgacactgttccctccaagcagcgaagaactccaggccaacaaggccacacttgtgtgcctgatctccgacttctaccctggggctgtgacagtggcttggaaggccgatggatctcctgtgaaagccggcgtggaaaccaccaagccatccaagcagagcaacaacaaatacgccgccagctcctacctgagcctgacacctgagcagtggaagtcccacagatcctacagctgccaagtgacccacgaaggcagcaccgtggaaaagacagtggcccctacagagtgcagcggatccggcatgcggactgaagacctcccaaaggctgtggtgttcctggagcctcaatggtacagggtgctggagaaggacagtgtgactctgaagtgccagggagcctactcccctgaggacaattccacacagtggtttcacaatgagagcctcatctcaagccaggcctccagctacttcattgacgctgccacagtggacgacagtggagagtacaggtgccagacaaacctctccaccctcagtgacccggtgcagctagaagtccatatcggctggctgttgctccaggcccctcggtgggtgttcaaggaggaagaccctattcacctgaggtgtcacagctggaagaacactgctctgcataaggtcacatatttacagaatggcaaaggcaggaagtattttcatcataattctgacttctacattccaaaagccacactcaaagacagcggctcctacttctgcagggggcttgttgggagtaaaaatgtgtcttcagagactgtgaacatcaccatcactcaaggtttggcagtgtcaaccatctcatcattctttccacctggctaccaagtgtccttctgcctggtcatggtgctgctgttcgccgtggataccggcctgtacttcagcgtcaagaccaacatccggtccagcaccagagactggaaggaccacaagttcaagtggcggaaggaccctcaggacaagagggccaagcgatctggatctggagcaacaaacttctcactactcaaacaagcaggtgacgtggaggagaatcccgggcctactagtatggactggatttggcgcatccttttccttgtcggcgctgctaccggcgcgcattccttcgaacaagttcagcttcaacagcctggcgctgagctggtcaaacctggcgcttctgtgaagatgagctgcaaagccagcggctacgccttcagcagctactggatcaactggatgaagcagaaacccggccagggactcgaatggatcggccaaatctatcccggcgacggcgacaccaactacaacggcaagttcaagggcagagccacactgaccgccgatacctctagcagcacagcctacatgcagctgagcagcctgaccagcgaagatagcgccgtgtacttctgtgcccggtccatcacaacagtcgtgggctgcgctatggactattggggccagggaacaagcgtgaccgtgtctagtacgcgtgcctctacaaagggaccctccgtgtttcctctggctcccagcagcaagtctacaagcggaggaacagccgctctgggctgcctggtcaaggattactttcccgagcctgtgaccgtgtcctggaatagcggagcactgacaagcggcgtgcacacctttccagccgtgctgcaaagcagcggcctgtactctctgagcagcgtggtcacagtgcctagctctagcctgggcacccagacctacatctgcaatgtgaaccacaagcctagcaacaccaaggtggacaagagagtggaacccaagagctgtggtacccaagtggtggacacaacaaaagccgtcatcaccctgcaaccaccttgggtttcagtctttcaagaagagacagttaccctgcactgtgaagtcctgcacttgcccggaagcagctccacacagtggttcctcaacggcacagctacccagacaagcaccccttcctaccggatcacatctgcctccgtgaacgattccggcgagtataggtgtcagaggggcctgtctggccgcagcgatcctatccagcttgagattcatcgtggatggttgctcctccaagtgtcctccagggtgttcaccgaaggcgaacctctggcactgaggtgccatgcttggaaagataagctcgtctacaatgtcctctactaccgcaatggcaaggcttttaagttttttcattggaactctaatctcacgatcctgaaaacgaacatctcccacaatgggacataccactgctctggcatgggaaaacatcggtacacctctgccggcatctctgtcacagtcaaagaactgttccctgcaccagtcctgaacgcttccgtgacctctccactgcttgagggaaatctggtcaccctgtcctgcgaaactaagttgctgcttcagaggcccggactccagctctacttttcattctatatgggctctaagaccctgagaggccggaacaccagcagcgaatatcagattctgacagctcggcgcgaggactccgggctctattggtgtgaagctgctacagaggacggaaacgtgctgaaacggtcccctgaactggaactgcaagtcctgggccttcagctgccaactccagtgtggtttcatgtcctgttctatctggctgtggggattatgttccttgtgaataccgtgctctgggttaccattcggaaagaactcaagcgcaagaaaaaatgggatcttgagataagcctggacagcgggcatgagaagaaagtcatcagttcccttcaagaggacagacatctcgaagaggaactcaaatgtcaagaacaaaaagaagaacaactccaagagggtgtccatcggaaagagccacagggcgctacacgcgccaagagaagcggatctggcgtgaagcagaccctgaatttcgacctgctgaagctggctggcgacgtggaatccaacccaggcccttctagaggcgggatccacaccatgtccgactccaaggaggtccctagccttccatttttgcgacacttgctcgaagagttggacagccatgaggacagcttgctgctgtttctgtgtcacgacgcggccccgggctgcacgacggtcacgcaagctttgtgctcgcttagccaacagcgcaagctgaccctcgcggctctggtcgagatgctctacgtgctgcagcgtatggatcttctcaagagccgcttcgggctcagcaaggagggggccgagcaattgctgggcacaagctttctcacgcgctaccgcaagctcatggtttgcgtgggtgaggagctcgactcgagcgagctacgcgctctacgcttgttcgcgtgcaacctgaatccgagcctgagcacggcgctttctgagagcagccgctttgtcgagcttgtactcgcgcttgaaaacgtaggactcgtctcgccatcgagtgtttccgtgcttgcggacatgttgcgcactcttcggcgcctcgatttgtgccagcagcttgttgagtacgaacaacaagagcaagccaggtaccgttactgttacgcggcctcgccctcattgccagttcgtacgttacgtcgggggcacggcgcgagtgaacacgagcagctgtgcatgcccgtgcaagaatcctctgacagccccgagctgctgcgcacgcccgtacaagaatcctccagcgacagccccgagcaaacgact

SEQ ID NO: 5807 - DNA, 4047 bp, Artificial Sequence
  Synthetic Polynucleotide
atggccttaccagtgaccgccttgctcctgccgctggccttgctgctccacgccgccaggccggacatccagatgacacagagccctagcagcctgtctgccagcgtgggagacagagtgaccatcacatgcaaggccagcgaccacatcaacaactggctggcctggtatcagcagaagcctggacaggcccctaagctgctgatctacggcgctaccacactggaaacaggcgtgcccagcagattttctggcagcggctctggcaccgactacaccctgacaatatccagcctccagcctgaggacttcgccacctactactgtcagcagagctggaacaccccttggacattcggccagggcaccaagctggaaatcaagagactcgagggacagcctaaggccaatcctaccgtgacactgttccctccaagcagcgaagaactccaggccaacaaggccacacttgtgtgcctgatctccgacttctaccctggggctgtgacagtggcttggaaggccgatggatctcctgtgaaagccggcgtggaaaccaccaagccatccaagcagagcaacaacaaatacgccgccagctcctacctgagcctgacacctgagcagtggaagtcccacagatcctacagctgccaagtgacccacgaaggcagcaccgtggaaaagacagtggcccctacagagtgcagcggatccggcatgcggactgaagacctcccaaaggctgtggtgttcctggagcctcaatggtacagggtgctggagaaggacagtgtgactctgaagtgccagggagcctactcccctgaggacaattccacacagtggtttcacaatgagagcctcatctcaagccaggcctccagctacttcattgacgctgccacagtggacgacagtggagagtacaggtgccagacaaacctctccaccctcagtgacccggtgcagctagaagtccatatcggctggctgttgctccaggcccctcggtgggtgttcaaggaggaagaccctattcacctgaggtgtcacagctggaagaacactgctctgcataaggtcacatatttacagaatggcaaaggcaggaagtattttcatcataattctgacttctacattccaaaagccacactcaaagacagcggctcctacttctgcagggggcttgttgggagtaaaaatgtgtcttcagagactgtgaacatcaccatcactcaaggtttggcagtgtcaaccatctcatcattctttccacctggctaccaagtgtccttctgcctggtcatggtgctgctgttcgccgtggataccggcctgtacttcagcgtcaagaccaacatccggtccagcaccagagactggaaggaccacaagttcaagtggcggaaggaccctcaggacaagagggccaagcgatctggatctggagcaacaaacttctcactactcaaacaagcaggtgacgtggaggagaatcccgggcctactagtatggactggatttggcgcatccttttccttgtcggcgctgctaccggcgcgcattccttcgaacaagttcagcttcaacagcctggcgctgagctggtcaaacctggcgcttctgtgaagatgagctgcaaagccagcggctacgccttcagcagctactggatcaactggatgaagcagaaacccggccagggactcgaatggatcggccaaatctatcccggcgacggcgacaccaactacaacggcaagttcaagggcagagccacactgaccgccgatacctctagcagcacagcctacatgcagctgagcagcctgaccagcgaagatagcgccgtgtacttctgtgcccggtccatcacaacagtcgtgggctgcgctatggactattggggccagggaacaagcgtgaccgtgtctagtacgcgtgcctctacaaagggaccctccgtgtttcctctggctcccagcagcaagtctacaagcggaggaacagccgctctgggctgcctggtcaaggattactttcccgagcctgtgaccgtgtcctggaatagcggagcactgacaagcggcgtgcacacctttccagccgtgctgcaaagcagcggcctgtactctctgagcagcgtggtcacagtgcctagctctagcctgggcacccagacctacatctgcaatgtgaaccacaagcctagcaacaccaaggtggacaagagagtggaacccaagagctgtggtacccaagtggtggacacaacaaaagccgtcatcaccctgcaaccaccttgggtttcagtctttcaagaagagacagttaccctgcactgtgaagtcctgcacttgcccggaagcagctccacacagtggttcctcaacggcacagctacccagacaagcaccccttcctaccggatcacatctgcctccgtgaacgattccggcgagtataggtgtcagaggggcctgtctggccgcagcgatcctatccagcttgagattcatcgtggatggttgctcctccaagtgtcctccagggtgttcaccgaaggcgaacctctggcactgaggtgccatgcttggaaagataagctcgtctacaatgtcctctactaccgcaatggcaaggcttttaagttttttcattggaactctaatctcacgatcctgaaaacgaacatctcccacaatgggacataccactgctctggcatgggaaaacatcggtacacctctgccggcatctctgtcacagtcaaagaactgttccctgcaccagtcctgaacgcttccgtgacctctccactgcttgagggaaatctggtcaccctgtcctgcgaaactaagttgctgcttcagaggcccggactccagctctacttttcattctatatgggctctaagaccctgagaggccggaacaccagcagcgaatatcagattctgacagctcggcgcgaggactccgggctctattggtgtgaagctgctacagaggacggaaacgtgctgaaacggtcccctgaactggaactgcaagtcctgggccttcagctgccaactccagtgtggtttcatgtcctgttctatctggctgtggggattatgttccttgtgaataccgtgctctgggttaccattcggaaagaactcaagcgcaagaaaaaatgggatcttgagataagcctggacagcgggcatgagaagaaagtcatcagttcccttcaagaggacagacatctcgaagaggaactcaaatgtcaagaacaaaaagaagaacaactccaagagggtgtccatcggaaagagccacagggcgctacacgcgccaagagaagcggatctggcgtgaagcagaccctgaatttcgacctgctgaagctggctggcgacgtggaatccaacccaggcccttctagaggccatatgaccgagtacaagcccacggtgcgcctcgccacccgcgacgacgtccccagggccgtacgcaccctcgccgccgcgttcgccgactaccccgccacgcgccacaccgtcgatccggaccgccacatcgagcgggtcaccgagctgcaagaactcttcctcacgcgcgtcgggctcgacatcggcaaggtgtgggtcgcggacgacggcgccgcggtggcggtctggaccacgccggagagcgtcgaagcgggggcggtgttcgccgagatcggcccgcgcatggccgagttgagcggttcccggctggccgcgcagcaacagatggaaggcctcctggcgccgcaccggcccaaggagcccgcgtggttcctggccaccgtcggcgtctcgcccgaccaccagggcaagggtctgggcagcgccgtcgtgctccccggagtggaggcggccgagcgcgccggggtgcccgccttcctggagacctccgcgccccgcaacctccccttctacgagcggctcggcttcaccgtcaccgccgacgtcgaggtgcccgaaggaccgcgcacctggtgcatgacccgcaagcccggtgcctga

SEQ ID NO: 5808 - DNA, 4458 bp, Artificial Sequence
  Synthetic Polynucleotide
atggccttaccagtgaccgccttgctcctgccgctggccttgctgctccacgccgccaggccggaagtgcagctggttgaatctggcggaggactggttcaggctggcggatctctgagactgtcttgtgccgccagcggcagaacctttagcatgggctggtttagacaggcccctggcaaagagagagagttcgtcgccgccatcacatactctggcggcagcccttactacgccgactctgtgaagggcagattcaccatcagccgggacaacgccaagaacaccgtgtacctccagatgaacagcctgaagcctgaggacaccgccgtgtactactgcgccgccaatccaacatacggcagcgactggaacgccgagaattggggccagggaacccaagtgacagtgtctagcggtaccggcggaggcggatctggcggcggaggtagcggtggcggaggatctgaattcgacatccagatgacacagagccctagcagcctgtctgccagcgtgggagacagagtgaccatcacatgcaaggccagcgaccacatcaacaactggctggcctggtatcagcagaagcctggacaggcccctaagctgctgatctacggcgctaccacactggaaacaggcgtgcccagcagattttctggcagcggctctggcaccgactacaccctgacaatatccagcctccagcctgaggacttcgccacctactactgtcagcagagctggaacaccccttggacattcggccagggcaccaagctggaaatcaagagactcgagggacagcctaaggccaatcctaccgtgacactgttccctccaagcagcgaagaactccaggccaacaaggccacacttgtgtgcctgatctccgacttctaccctggggctgtgacagtggcttggaaggccgatggatctcctgtgaaagccggcgtggaaaccaccaagccatccaagcagagcaacaacaaatacgccgccagctcctacctgagcctgacacctgagcagtggaagtcccacagatcctacagctgccaagtgacccacgaaggcagcaccgtggaaaagacagtggcccctacagagtgcagcggatccggcatgcggactgaagacctcccaaaggctgtggtgttcctggagcctcaatggtacagggtgctggagaaggacagtgtgactctgaagtgccagggagcctactcccctgaggacaattccacacagtggtttcacaatgagagcctcatctcaagccaggcctccagctacttcattgacgctgccacagtggacgacagtggagagtacaggtgccagacaaacctctccaccctcagtgacccggtgcagctagaagtccatatcggctggctgttgctccaggcccctcggtgggtgttcaaggaggaagaccctattcacctgaggtgtcacagctggaagaacactgctctgcataaggtcacatatttacagaatggcaaaggcaggaagtattttcatcataattctgacttctacattccaaaagccacactcaaagacagcggctcctacttctgcagggggcttgttgggagtaaaaatgtgtcttcagagactgtgaacatcaccatcactcaaggtttggcagtgtcaaccatctcatcattctttccacctggctaccaagtgtccttctgcctggtcatggtgctgctgttcgccgtggataccggcctgtacttcagcgtcaagaccaacatccggtccagcaccagagactggaaggaccacaagttcaagtggcggaaggaccctcaggacaagagggccaagcgatctggatctggagcaacaaacttctcactactcaaacaagcaggtgacgtggaggagaatcccgggcctactagtatggactggatttggcgcatccttttccttgtcggcgctgctaccggcgcgcattccttcgaacaagttcagcttcaacagcctggcgctgagctggtcaaacctggcgcttctgtgaagatgagctgcaaagccagcggctacgccttcagcagctactggatcaactggatgaagcagaaacccggccagggactcgaatggatcggccaaatctatcccggcgacggcgacaccaactacaacggcaagttcaagggcagagccacactgaccgccgatacctctagcagcacagcctacatgcagctgagcagcctgaccagcgaagatagcgccgtgtacttctgtgcccggtccatcacaacagtcgtgggctgcgctatggactattggggccagggaacaagcgtgaccgtgtctagtacgcgtgcctctacaaagggaccctccgtgtttcctctggctcccagcagcaagtctacaagcggaggaacagccgctctgggctgcctggtcaaggattactttcccgagcctgtgaccgtgtcctggaatagcggagcactgacaagcggcgtgcacacctttccagccgtgctgcaaagcagcggcctgtactctctgagcagcgtggtcacagtgcctagctctagcctgggcacccagacctacatctgcaatgtgaaccacaagcctagcaacaccaaggtggacaagagagtggaacccaagagctgtggtacccaagtggtggacacaacaaaagccgtcatcaccctgcaaccaccttgggtttcagtctttcaagaagagacagttaccctgcactgtgaagtcctgcacttgcccggaagcagctccacacagtggttcctcaacggcacagctacccagacaagcaccccttcctaccggatcacatctgcctccgtgaacgattccggcgagtataggtgtcagaggggcctgtctggccgcagcgatcctatccagcttgagattcatcgtggatggttgctcctccaagtgtcctccagggtgttcaccgaaggcgaacctctggcactgaggtgccatgcttggaaagataagctcgtctacaatgtcctctactaccgcaatggcaaggcttttaagttttttcattggaactctaatctcacgatcctgaaaacgaacatctcccacaatgggacataccactgctctggcatgggaaaacatcggtacacctctgccggcatctctgtcacagtcaaagaactgttccctgcaccagtcctgaacgcttccgtgacctctccactgcttgagggaaatctggtcaccctgtcctgcgaaactaagttgctgcttcagaggcccggactccagctctacttttcattctatatgggctctaagaccctgagaggccggaacaccagcagcgaatatcagattctgacagctcggcgcgaggactccgggctctattggtgtgaagctgctacagaggacggaaacgtgctgaaacggtcccctgaactggaactgcaagtcctgggccttcagctgccaactccagtgtggtttcatgtcctgttctatctggctgtggggattatgttccttgtgaataccgtgctctgggttaccattcggaaagaactcaagcgcaagaaaaaatgggatcttgagataagcctggacagcgggcatgagaagaaagtcatcagttcccttcaagaggacagacatctcgaagaggaactcaaatgtcaagaacaaaaagaagaacaactccaagagggtgtccatcggaaagagccacagggcgctacacgcgccaagagaagcggatctggcgtgaagcagaccctgaatttcgacctgctgaagctggctggcgacgtggaatccaacccaggcccttctagaggccatatgaccgagtacaagcccacggtgcgcctcgccacccgcgacgacgtccccagggccgtacgcaccctcgccgccgcgttcgccgactaccccgccacgcgccacaccgtcgatccggaccgccacatcgagcgggtcaccgagctgcaagaactcttcctcacgcgcgtcgggctcgacatcggcaaggtgtgggtcgcggacgacggcgccgcggtggcggtctggaccacgccggagagcgtcgaagcgggggcggtgttcgccgagatcggcccgcgcatggccgagttgagcggttcccggctggccgcgcagcaacagatggaaggcctcctggcgccgcaccggcccaaggagcccgcgtggttcctggccaccgtcggcgtctcgcccgaccaccagggcaagggtctgggcagcgccgtcgtgctccccggagtggaggcggccgagcgcgccggggtgcccgccttcctggagacctccgcgccccgcaacctccccttctacgagcggctcggcttcaccgtcaccgccgacgtcgaggtgcccgaaggaccgcgcacctggtgcatgacccgcaagcccggtgcctga

SEQ ID NO: 5809 - DNA, 4869 bp, Artificial Sequence
  Synthetic Polynucleotide
atggccttaccagtgaccgccttgctcctgccgctggccttgctgctccacgccgccaggccggaagtgcagctggttgaatctggcggaggactggttcaggctggcggatctctgagactgtcttgtgccgccagcggcagaacctttagcatgggctggtttagacaggcccctggcaaagagagagagttcgtcgccgccatcacatactctggcggcagcccttactacgccgactctgtgaagggcagattcaccatcagccgggacaacgccaagaacaccgtgtacctccagatgaacagcctgaagcctgaggacaccgccgtgtactactgcgccgccaatccaacatacggcagcgactggaacgccgagaattggggccagggaacccaagtgacagtgtctagcggtaccggcggaggcggatctggcggcggaggtagcggtggcggaggatctgaattcgacatccagatgacacagagccctagcagcctgtctgccagcgtgggagacagagtgaccatcacatgcaaggccagcgaccacatcaacaactggctggcctggtatcagcagaagcctggacaggcccctaagctgctgatctacggcgctaccacactggaaacaggcgtgcccagcagattttctggcagcggctctggcaccgactacaccctgacaatatccagcctccagcctgaggacttcgccacctactactgtcagcagagctggaacaccccttggacattcggccagggcaccaagctggaaatcaagagactcgagggacagcctaaggccaatcctaccgtgacactgttccctccaagcagcgaagaactccaggccaacaaggccacacttgtgtgcctgatctccgacttctaccctggggctgtgacagtggcttggaaggccgatggatctcctgtgaaagccggcgtggaaaccaccaagccatccaagcagagcaacaacaaatacgccgccagctcctacctgagcctgacacctgagcagtggaagtcccacagatcctacagctgccaagtgacccacgaaggcagcaccgtggaaaagacagtggcccctacagagtgcagcggatccggcatgcggactgaagacctcccaaaggctgtggtgttcctggagcctcaatggtacagggtgctggagaaggacagtgtgactctgaagtgccagggagcctactcccctgaggacaattccacacagtggtttcacaatgagagcctcatctcaagccaggcctccagctacttcattgacgctgccacagtggacgacagtggagagtacaggtgccagacaaacctctccaccctcagtgacccggtgcagctagaagtccatatcggctggctgttgctccaggcccctcggtgggtgttcaaggaggaagaccctattcacctgaggtgtcacagctggaagaacactgctctgcataaggtcacatatttacagaatggcaaaggcaggaagtattttcatcataattctgacttctacattccaaaagccacactcaaagacagcggctcctacttctgcagggggcttgttgggagtaaaaatgtgtcttcagagactgtgaacatcaccatcactcaaggtttggcagtgtcaaccatctcatcattctttccacctggctaccaagtgtccttctgcctggtcatggtgctgctgttcgccgtggataccggcctgtacttcagcgtcaagaccaacatccggtccagcaccagagactggaaggaccacaagttcaagtggcggaaggaccctcaggacaagagggccaagcgatctggatctggagcaacaaacttctcactactcaaacaagcaggtgacgtggaggagaatcccgggcctactagtatggactggatttggcgcatccttttccttgtcggcgctgctaccggcgcgcattccgggcccgaagtgcaactggttgaatccggtggcggcctggtgcaagcaggcggatctctcagacttagctgtgccgcctccggcagaaccttcacaatgggatggtttaggcaggctccagggaaagagagagagttcgtcgccgccatctctctgtctcccacactggcctactacgccgactctgtgaaaggccggttcaccatctccagagataatgccaagaacaccgtggtgctgcaaatgaactctctgaaacccgaggatacagccctgtactattgtgccgctgaccggaagtccgtgatgagcatcagacccgattactggggacagggcacacaagtcacagtgtcctctggatccggcggcggaggatctggcggaggcggatctgggggcggaggctctttcgaacaagttcagcttcaacagcctggcgctgagctggtcaaacctggcgcttctgtgaagatgagctgcaaagccagcggctacgccttcagcagctactggatcaactggatgaagcagaaacccggccagggactcgaatggatcggccaaatctatcccggcgacggcgacaccaactacaacggcaagttcaagggcagagccacactgaccgccgatacctctagcagcacagcctacatgcagctgagcagcctgaccagcgaagatagcgccgtgtacttctgtgcccggtccatcacaacagtcgtgggctgcgctatggactattggggccagggaacaagcgtgaccgtgtctagtacgcgtgcctctacaaagggaccctccgtgtttcctctggctcccagcagcaagtctacaagcggaggaacagccgctctgggctgcctggtcaaggattactttcccgagcctgtgaccgtgtcctggaatagcggagcactgacaagcggcgtgcacacctttccagccgtgctgcaaagcagcggcctgtactctctgagcagcgtggtcacagtgcctagctctagcctgggcacccagacctacatctgcaatgtgaaccacaagcctagcaacaccaaggtggacaagagagtggaacccaagagctgtggtacccaagtggtggacacaacaaaagccgtcatcaccctgcaaccaccttgggtttcagtctttcaagaagagacagttaccctgcactgtgaagtcctgcacttgcccggaagcagctccacacagtggttcctcaacggcacagctacccagacaagcaccccttcctaccggatcacatctgcctccgtgaacgattccggcgagtataggtgtcagaggggcctgtctggccgcagcgatcctatccagcttgagattcatcgtggatggttgctcctccaagtgtcctccagggtgttcaccgaaggcgaacctctggcactgaggtgccatgcttggaaagataagctcgtctacaatgtcctctactaccgcaatggcaaggcttttaagttttttcattggaactctaatctcacgatcctgaaaacgaacatctcccacaatgggacataccactgctctggcatgggaaaacatcggtacacctctgccggcatctctgtcacagtcaaagaactgttccctgcaccagtcctgaacgcttccgtgacctctccactgcttgagggaaatctggtcaccctgtcctgcgaaactaagttgctgcttcagaggcccggactccagctctacttttcattctatatgggctctaagaccctgagaggccggaacaccagcagcgaatatcagattctgacagctcggcgcgaggactccgggctctattggtgtgaagctgctacagaggacggaaacgtgctgaaacggtcccctgaactggaactgcaagtcctgggccttcagctgccaactccagtgtggtttcatgtcctgttctatctggctgtggggattatgttccttgtgaataccgtgctctgggttaccattcggaaagaactcaagcgcaagaaaaaatgggatcttgagataagcctggacagcgggcatgagaagaaagtcatcagttcccttcaagaggacagacatctcgaagaggaactcaaatgtcaagaacaaaaagaagaacaactccaagagggtgtccatcggaaagagccacagggcgctacacgcgccaagagaagcggatctggcgtgaagcagaccctgaatttcgacctgctgaagctggctggcgacgtggaatccaacccaggcccttctagaggccatatgaccgagtacaagcccacggtgcgcctcgccacccgcgacgacgtccccagggccgtacgcaccctcgccgccgcgttcgccgactaccccgccacgcgccacaccgtcgatccggaccgccacatcgagcgggtcaccgagctgcaagaactcttcctcacgcgcgtcgggctcgacatcggcaaggtgtgggtcgcggacgacggcgccgcggtggcggtctggaccacgccggagagcgtcgaagcgggggcggtgttcgccgagatcggcccgcgcatggccgagttgagcggttcccggctggccgcgcagcaacagatggaaggcctcctggcgccgcaccggcccaaggagcccgcgtggttcctggccaccgtcggcgtctcgcccgaccaccagggcaagggtctgggcagcgccgtcgtgctccccggagtggaggcggccgagcgcgccggggtgcccgccttcctggagacctccgcgccccgcaacctccccttctacgagcggctcggcttcaccgtcaccgccgacgtcgaggtgcccgaaggaccgcgcacctggtgcatgacccgcaagcccggtgcctga

SEQ ID NO: 5810 - DNA, 4068 bp, Artificial Sequence
  Synthetic Polynucleotide
atggccttaccagtgaccgccttgctcctgccgctggccttgctgctccacgccgccaggccggaagtgcagctggttgaatctggcggaggactggttcaggctggcggatctctgagactgtcttgtgccgccagcggcagaacctttagcatgggctggtttagacaggcccctggcaaagagagagagttcgtcgccgccatcacatactctggcggcagcccttactacgccgactctgtgaagggcagattcaccatcagccgggacaacgccaagaacaccgtgtacctccagatgaacagcctgaagcctgaggacaccgccgtgtactactgcgccgccaatccaacatacggcagcgactggaacgccgagaattggggccagggaacccaagtgacagtgtctagcctcgagggacagcctaaggccaatcctaccgtgacactgttccctccaagcagcgaagaactccaggccaacaaggccacacttgtgtgcctgatctccgacttctaccctggggctgtgacagtggcttggaaggccgatggatctcctgtgaaagccggcgtggaaaccaccaagccatccaagcagagcaacaacaaatacgccgccagctcctacctgagcctgacacctgagcagtggaagtcccacagatcctacagctgccaagtgacccacgaaggcagcaccgtggaaaagacagtggcccctacagagtgcagcggatccggcatgcggactgaagacctcccaaaggctgtggtgttcctggagcctcaatggtacagggtgctggagaaggacagtgtgactctgaagtgccagggagcctactcccctgaggacaattccacacagtggtttcacaatgagagcctcatctcaagccaggcctccagctacttcattgacgctgccacagtggacgacagtggagagtacaggtgccagacaaacctctccaccctcagtgacccggtgcagctagaagtccatatcggctggctgttgctccaggcccctcggtgggtgttcaaggaggaagaccctattcacctgaggtgtcacagctggaagaacactgctctgcataaggtcacatatttacagaatggcaaaggcaggaagtattttcatcataattctgacttctacattccaaaagccacactcaaagacagcggctcctacttctgcagggggcttgttgggagtaaaaatgtgtcttcagagactgtgaacatcaccatcactcaaggtttggcagtgtcaaccatctcatcattctttccacctggctaccaagtgtccttctgcctggtcatggtgctgctgttcgccgtggataccggcctgtacttcagcgtcaagaccaacatccggtccagcaccagagactggaaggaccacaagttcaagtggcggaaggaccctcaggacaagagggccaagcgatctggatctggagcaacaaacttctcactactcaaacaagcaggtgacgtggaggagaatcccgggcctactagtatggactggatttggcgcatccttttccttgtcggcgctgctaccggcgcgcattccgggcccgaagtgcaactggttgaatccggtggcggcctggtgcaagcaggcggatctctcagacttagctgtgccgcctccggcagaaccttcacaatgggatggtttaggcaggctccagggaaagagagagagttcgtcgccgccatctctctgtctcccacactggcctactacgccgactctgtgaaaggccggttcaccatctccagagataatgccaagaacaccgtggtgctgcaaatgaactctctgaaacccgaggatacagccctgtactattgtgccgctgaccggaagtccgtgatgagcatcagacccgattactggggacagggcacacaagtcacagtgtcctctacgcgtgcctctacaaagggaccctccgtgtttcctctggctcccagcagcaagtctacaagcggaggaacagccgctctgggctgcctggtcaaggattactttcccgagcctgtgaccgtgtcctggaatagcggagcactgacaagcggcgtgcacacctttccagccgtgctgcaaagcagcggcctgtactctctgagcagcgtggtcacagtgcctagctctagcctgggcacccagacctacatctgcaatgtgaaccacaagcctagcaacaccaaggtggacaagagagtggaacccaagagctgtggtacccaagtggtggacacaacaaaagccgtcatcaccctgcaaccaccttgggtttcagtctttcaagaagagacagttaccctgcactgtgaagtcctgcacttgcccggaagcagctccacacagtggttcctcaacggcacagctacccagacaagcaccccttcctaccggatcacatctgcctccgtgaacgattccggcgagtataggtgtcagaggggcctgtctggccgcagcgatcctatccagcttgagattcatcgtggatggttgctcctccaagtgtcctccagggtgttcaccgaaggcgaacctctggcactgaggtgccatgcttggaaagataagctcgtctacaatgtcctctactaccgcaatggcaaggcttttaagttttttcattggaactctaatctcacgatcctgaaaacgaacatctcccacaatgggacataccactgctctggcatgggaaaacatcggtacacctctgccggcatctctgtcacagtcaaagaactgttccctgcaccagtcctgaacgcttccgtgacctctccactgcttgagggaaatctggtcaccctgtcctgcgaaactaagttgctgcttcagaggcccggactccagctctacttttcattctatatgggctctaagaccctgagaggccggaacaccagcagcgaatatcagattctgacagctcggcgcgaggactccgggctctattggtgtgaagctgctacagaggacggaaacgtgctgaaacggtcccctgaactggaactgcaagtcctgggccttcagctgccaactccagtgtggtttcatgtcctgttctatctggctgtggggattatgttccttgtgaataccgtgctctgggttaccattcggaaagaactcaagcgcaagaaaaaatgggatcttgagataagcctggacagcgggcatgagaagaaagtcatcagttcccttcaagaggacagacatctcgaagaggaactcaaatgtcaagaacaaaaagaagaacaactccaagagggtgtccatcggaaagagccacagggcgctacacgcgccaagagaagcggatctggcgtgaagcagaccctgaatttcgacctgctgaagctggctggcgacgtggaatccaacccaggcccttctagaggccatatgaccgagtacaagcccacggtgcgcctcgccacccgcgacgacgtccccagggccgtacgcaccctcgccgccgcgttcgccgactaccccgccacgcgccacaccgtcgatccggaccgccacatcgagcgggtcaccgagctgcaagaactcttcctcacgcgcgtcgggctcgacatcggcaaggtgtgggtcgcggacgacggcgccgcggtggcggtctggaccacgccggagagcgtcgaagcgggggcggtgttcgccgagatcggcccgcgcatggccgagttgagcggttcccggctggccgcgcagcaacagatggaaggcctcctggcgccgcaccggcccaaggagcccgcgtggttcctggccaccgtcggcgtctcgcccgaccaccagggcaagggtctgggcagcgccgtcgtgctccccggagtggaggcggccgagcgcgccggggtgcccgccttcctggagacctccgcgccccgcaacctccccttctacgagcggctcggcttcaccgtcaccgccgacgtcgaggtgcccgaaggaccgcgcacctggtgcatgacccgcaagcccggtgcctga

SEQ ID NO: 5811 - DNA, 4092 bp, Artificial Sequence
  Synthetic Polynucleotide
atggccttaccagtgaccgccttgctcctgccgctggccttgctgctccacgccgccaggccggacatccagatgacacagagccctagcagcctgtctgccagcgtgggagacagagtgaccatcacatgcaaggccagcgaccacatcaacaactggctggcctggtatcagcagaagcctggacaggcccctaagctgctgatctacggcgctaccacactggaaacaggcgtgcccagcagattttctggcagcggctctggcaccgactacaccctgacaatatccagcctccagcctgaggacttcgccacctactactgtcagcagagctggaacaccccttggacattcggccagggcaccaagctggaaatcaagagactcgaggacctgaagaacgtgttcccacctgaggtggccgtgttcgagcctagcgaggccgagatcagccacacccagaaagccaccctcgtgtgcctggctaccggcttctaccccgaccatgtggaactgtcttggtgggtcaacggcaaagaggtgcacagcggcgtgtctaccgacccccagccactgaaagaacagcccgccctgaacgacagccggtactgcctgagcagcagactgagagtgtccgccaccttctggcagaacccccggaaccacttcagatgccaggtgcagttctacggcctgagcgagaacgacgagtggacccaggacagagccaagcccgtgacccagatcgtgtctgccgaagcctggggcagagccgattgcggatccggcatgcggactgaagacctcccaaaggctgtggtgttcctggagcctcaatggtacagggtgctggagaaggacagtgtgactctgaagtgccagggagcctactcccctgaggacaattccacacagtggtttcacaatgagagcctcatctcaagccaggcctccagctacttcattgacgctgccacagtggacgacagtggagagtacaggtgccagacaaacctctccaccctcagtgacccggtgcagctagaagtccatatcggctggctgttgctccaggcccctcggtgggtgttcaaggaggaagaccctattcacctgaggtgtcacagctggaagaacactgctctgcataaggtcacatatttacagaatggcaaaggcaggaagtattttcatcataattctgacttctacattccaaaagccacactcaaagacagcggctcctacttctgcagggggcttgttgggagtaaaaatgtgtcttcagagactgtgaacatcaccatcactcaaggtttggcagtgtcaaccatctcatcattctttccacctggctaccaagtgtccttctgcctggtcatggtgctgctgttcgccgtggataccggcctgtacttcagcgtcaagaccaacatccggtccagcaccagagactggaaggaccacaagttcaagtggcggaaggaccctcaggacaagagggccaagcgatctggatctggagcaacaaacttctcactactcaaacaagcaggtgacgtggaggagaatcccgggcctactagtatggactggatttggcgcatccttttccttgtcggcgctgctaccggcgcgcattccttcgaacaagttcagcttcaacagcctggcgctgagctggtcaaacctggcgcttctgtgaagatgagctgcaaagccagcggctacgccttcagcagctactggatcaactggatgaagcagaaacccggccagggactcgaatggatcggccaaatctatcccggcgacggcgacaccaactacaacggcaagttcaagggcagagccacactgaccgccgatacctctagcagcacagcctacatgcagctgagcagcctgaccagcgaagatagcgccgtgtacttctgtgcccggtccatcacaacagtcgtgggctgcgctatggactattggggccagggaacaagcgtgaccgtgtctagtacgcgtatccagaaccctgatcctgccgtgtaccagctgcgggatagcaagagcagcgacaagagcgtgtgtctgttcaccgacttcgacagccagaccaacgtgtcccagagcaaggactccgacgtgtacatcaccgataagaccgtgctggacatgcggagcatggacttcaagagcaactccgccgtggcctggtccaacaagtccgatttcgcctgcgccaacgccttcaacaacagcattatccccgaggacacattcttcccaagccccgagagcagctgcggtacccaagtggtggacacaacaaaagccgtcatcaccctgcaaccaccttgggtttcagtctttcaagaagagacagttaccctgcactgtgaagtcctgcacttgcccggaagcagctccacacagtggttcctcaacggcacagctacccagacaagcaccccttcctaccggatcacatctgcctccgtgaacgattccggcgagtataggtgtcagaggggcctgtctggccgcagcgatcctatccagcttgagattcatcgtggatggttgctcctccaagtgtcctccagggtgttcaccgaaggcgaacctctggcactgaggtgccatgcttggaaagataagctcgtctacaatgtcctctactaccgcaatggcaaggcttttaagttttttcattggaactctaatctcacgatcctgaaaacgaacatctcccacaatgggacataccactgctctggcatgggaaaacatcggtacacctctgccggcatctctgtcacagtcaaagaactgttccctgcaccagtcctgaacgcttccgtgacctctccactgcttgagggaaatctggtcaccctgtcctgcgaaactaagttgctgcttcagaggcccggactccagctctacttttcattctatatgggctctaagaccctgagaggccggaacaccagcagcgaatatcagattctgacagctcggcgcgaggactccgggctctattggtgtgaagctgctacagaggacggaaacgtgctgaaacggtcccctgaactggaactgcaagtcctgggccttcagctgccaactccagtgtggtttcatgtcctgttctatctggctgtggggattatgttccttgtgaataccgtgctctgggttaccattcggaaagaactcaagcgcaagaaaaaatgggatcttgagataagcctggacagcgggcatgagaagaaagtcatcagttcccttcaagaggacagacatctcgaagaggaactcaaatgtcaagaacaaaaagaagaacaactccaagagggtgtccatcggaaagagccacagggcgctacacgcgccaagagaagcggatctggcgtgaagcagaccctgaatttcgacctgctgaagctggctggcgacgtggaatccaacccaggcccttctagaggccatatgaccgagtacaagcccacggtgcgcctcgccacccgcgacgacgtccccagggccgtacgcaccctcgccgccgcgttcgccgactaccccgccacgcgccacaccgtcgatccggaccgccacatcgagcgggtcaccgagctgcaagaactcttcctcacgcgcgtcgggctcgacatcggcaaggtgtgggtcgcggacgacggcgccgcggtggcggtctggaccacgccggagagcgtcgaagcgggggcggtgttcgccgagatcggcccgcgcatggccgagttgagcggttcccggctggccgcgcagcaacagatggaaggcctcctggcgccgcaccggcccaaggagcccgcgtggttcctggccaccgtcggcgtctcgcccgaccaccagggcaagggtctgggcagcgccgtcgtgctccccggagtggaggcggccgagcgcgccggggtgcccgccttcctggagacctccgcgccccgcaacctccccttctacgagcggctcggcttcaccgtcaccgccgacgtcgaggtgcccgaaggaccgcgcacctggtgcatgacccgcaagcccggtgcctga

SEQ ID NO: 5812 - DNA, 4503 bp, Artificial Sequence
  Synthetic Polynucleotide
atggccttaccagtgaccgccttgctcctgccgctggccttgctgctccacgccgccaggccggaagtgcagctggttgaatctggcggaggactggttcaggctggcggatctctgagactgtcttgtgccgccagcggcagaacctttagcatgggctggtttagacaggcccctggcaaagagagagagttcgtcgccgccatcacatactctggcggcagcccttactacgccgactctgtgaagggcagattcaccatcagccgggacaacgccaagaacaccgtgtacctccagatgaacagcctgaagcctgaggacaccgccgtgtactactgcgccgccaatccaacatacggcagcgactggaacgccgagaattggggccagggaacccaagtgacagtgtctagcggtaccggcggaggcggatctggcggcggaggtagcggtggcggaggatctgaattcgacatccagatgacacagagccctagcagcctgtctgccagcgtgggagacagagtgaccatcacatgcaaggccagcgaccacatcaacaactggctggcctggtatcagcagaagcctggacaggcccctaagctgctgatctacggcgctaccacactggaaacaggcgtgcccagcagattttctggcagcggctctggcaccgactacaccctgacaatatccagcctccagcctgaggacttcgccacctactactgtcagcagagctggaacaccccttggacattcggccagggcaccaagctggaaatcaagagactcgaggacctgaagaacgtgttcccacctgaggtggccgtgttcgagcctagcgaggccgagatcagccacacccagaaagccaccctcgtgtgcctggctaccggcttctaccccgaccatgtggaactgtcttggtgggtcaacggcaaagaggtgcacagcggcgtgtctaccgacccccagccactgaaagaacagcccgccctgaacgacagccggtactgcctgagcagcagactgagagtgtccgccaccttctggcagaacccccggaaccacttcagatgccaggtgcagttctacggcctgagcgagaacgacgagtggacccaggacagagccaagcccgtgacccagatcgtgtctgccgaagcctggggcagagccgattgcggatccggcatgcggactgaagacctcccaaaggctgtggtgttcctggagcctcaatggtacagggtgctggagaaggacagtgtgactctgaagtgccagggagcctactcccctgaggacaattccacacagtggtttcacaatgagagcctcatctcaagccaggcctccagctacttcattgacgctgccacagtggacgacagtggagagtacaggtgccagacaaacctctccaccctcagtgacccggtgcagctagaagtccatatcggctggctgttgctccaggcccctcggtgggtgttcaaggaggaagaccctattcacctgaggtgtcacagctggaagaacactgctctgcataaggtcacatatttacagaatggcaaaggcaggaagtattttcatcataattctgacttctacattccaaaagccacactcaaagacagcggctcctacttctgcagggggcttgttgggagtaaaaatgtgtcttcagagactgtgaacatcaccatcactcaaggtttggcagtgtcaaccatctcatcattctttccacctggctaccaagtgtccttctgcctggtcatggtgctgctgttcgccgtggataccggcctgtacttcagcgtcaagaccaacatccggtccagcaccagagactggaaggaccacaagttcaagtggcggaaggaccctcaggacaagagggccaagcgatctggatctggagcaacaaacttctcactactcaaacaagcaggtgacgtggaggagaatcccgggcctactagtatggactggatttggcgcatccttttccttgtcggcgctgctaccggcgcgcattccttcgaacaagttcagcttcaacagcctggcgctgagctggtcaaacctggcgcttctgtgaagatgagctgcaaagccagcggctacgccttcagcagctactggatcaactggatgaagcagaaacccggccagggactcgaatggatcggccaaatctatcccggcgacggcgacaccaactacaacggcaagttcaagggcagagccacactgaccgccgatacctctagcagcacagcctacatgcagctgagcagcctgaccagcgaagatagcgccgtgtacttctgtgcccggtccatcacaacagtcgtgggctgcgctatggactattggggccagggaacaagcgtgaccgtgtctagtacgcgtatccagaaccctgatcctgccgtgtaccagctgcgggatagcaagagcagcgacaagagcgtgtgtctgttcaccgacttcgacagccagaccaacgtgtcccagagcaaggactccgacgtgtacatcaccgataagaccgtgctggacatgcggagcatggacttcaagagcaactccgccgtggcctggtccaacaagtccgatttcgcctgcgccaacgccttcaacaacagcattatccccgaggacacattcttcccaagccccgagagcagctgcggtacccaagtggtggacacaacaaaagccgtcatcaccctgcaaccaccttgggtttcagtctttcaagaagagacagttaccctgcactgtgaagtcctgcacttgcccggaagcagctccacacagtggttcctcaacggcacagctacccagacaagcaccccttcctaccggatcacatctgcctccgtgaacgattccggcgagtataggtgtcagaggggcctgtctggccgcagcgatcctatccagcttgagattcatcgtggatggttgctcctccaagtgtcctccagggtgttcaccgaaggcgaacctctggcactgaggtgccatgcttggaaagataagctcgtctacaatgtcctctactaccgcaatggcaaggcttttaagttttttcattggaactctaatctcacgatcctgaaaacgaacatctcccacaatgggacataccactgctctggcatgggaaaacatcggtacacctctgccggcatctctgtcacagtcaaagaactgttccctgcaccagtcctgaacgcttccgtgacctctccactgcttgagggaaatctggtcaccctgtcctgcgaaactaagttgctgcttcagaggcccggactccagctctacttttcattctatatgggctctaagaccctgagaggccggaacaccagcagcgaatatcagattctgacagctcggcgcgaggactccgggctctattggtgtgaagctgctacagaggacggaaacgtgctgaaacggtcccctgaactggaactgcaagtcctgggccttcagctgccaactccagtgtggtttcatgtcctgttctatctggctgtggggattatgttccttgtgaataccgtgctctgggttaccattcggaaagaactcaagcgcaagaaaaaatgggatcttgagataagcctggacagcgggcatgagaagaaagtcatcagttcccttcaagaggacagacatctcgaagaggaactcaaatgtcaagaacaaaaagaagaacaactccaagagggtgtccatcggaaagagccacagggcgctacacgcgccaagagaagcggatctggcgtgaagcagaccctgaatttcgacctgctgaagctggctggcgacgtggaatccaacccaggcccttctagaggccatatgaccgagtacaagcccacggtgcgcctcgccacccgcgacgacgtccccagggccgtacgcaccctcgccgccgcgttcgccgactaccccgccacgcgccacaccgtcgatccggaccgccacatcgagcgggtcaccgagctgcaagaactcttcctcacgcgcgtcgggctcgacatcggcaaggtgtgggtcgcggacgacggcgccgcggtggcggtctggaccacgccggagagcgtcgaagcgggggcggtgttcgccgagatcggcccgcgcatggccgagttgagcggttcccggctggccgcgcagcaacagatggaaggcctcctggcgccgcaccggcccaaggagcccgcgtggttcctggccaccgtcggcgtctcgcccgaccaccagggcaagggtctgggcagcgccgtcgtgctccccggagtggaggcggccgagcgcgccggggtgcccgccttcctggagacctccgcgccccgcaacctccccttctacgagcggctcggcttcaccgtcaccgccgacgtcgaggtgcccgaaggaccgcgcacctggtgcatgacccgcaagcccggtgcctga

SEQ ID NO: 5813 - DNA, 4914 bp, Artificial Sequence
  Synthetic Polynucleotide
atggccttaccagtgaccgccttgctcctgccgctggccttgctgctccacgccgccaggccggaagtgcagctggttgaatctggcggaggactggttcaggctggcggatctctgagactgtcttgtgccgccagcggcagaacctttagcatgggctggtttagacaggcccctggcaaagagagagagttcgtcgccgccatcacatactctggcggcagcccttactacgccgactctgtgaagggcagattcaccatcagccgggacaacgccaagaacaccgtgtacctccagatgaacagcctgaagcctgaggacaccgccgtgtactactgcgccgccaatccaacatacggcagcgactggaacgccgagaattggggccagggaacccaagtgacagtgtctagcggtaccggcggaggcggatctggcggcggaggtagcggtggcggaggatctgaattcgacatccagatgacacagagccctagcagcctgtctgccagcgtgggagacagagtgaccatcacatgcaaggccagcgaccacatcaacaactggctggcctggtatcagcagaagcctggacaggcccctaagctgctgatctacggcgctaccacactggaaacaggcgtgcccagcagattttctggcagcggctctggcaccgactacaccctgacaatatccagcctccagcctgaggacttcgccacctactactgtcagcagagctggaacaccccttggacattcggccagggcaccaagctggaaatcaagagactcgaggacctgaagaacgtgttcccacctgaggtggccgtgttcgagcctagcgaggccgagatcagccacacccagaaagccaccctcgtgtgcctggctaccggcttctaccccgaccatgtggaactgtcttggtgggtcaacggcaaagaggtgcacagcggcgtgtctaccgacccccagccactgaaagaacagcccgccctgaacgacagccggtactgcctgagcagcagactgagagtgtccgccaccttctggcagaacccccggaaccacttcagatgccaggtgcagttctacggcctgagcgagaacgacgagtggacccaggacagagccaagcccgtgacccagatcgtgtctgccgaagcctggggcagagccgattgcggatccggcatgcggactgaagacctcccaaaggctgtggtgttcctggagcctcaatggtacagggtgctggagaaggacagtgtgactctgaagtgccagggagcctactcccctgaggacaattccacacagtggtttcacaatgagagcctcatctcaagccaggcctccagctacttcattgacgctgccacagtggacgacagtggagagtacaggtgccagacaaacctctccaccctcagtgacccggtgcagctagaagtccatatcggctggctgttgctccaggcccctcggtgggtgttcaaggaggaagaccctattcacctgaggtgtcacagctggaagaacactgctctgcataaggtcacatatttacagaatggcaaaggcaggaagtattttcatcataattctgacttctacattccaaaagccacactcaaagacagcggctcctacttctgcagggggcttgttgggagtaaaaatgtgtcttcagagactgtgaacatcaccatcactcaaggtttggcagtgtcaaccatctcatcattctttccacctggctaccaagtgtccttctgcctggtcatggtgctgctgttcgccgtggataccggcctgtacttcagcgtcaagaccaacatccggtccagcaccagagactggaaggaccacaagttcaagtggcggaaggaccctcaggacaagagggccaagcgatctggatctggagcaacaaacttctcactactcaaacaagcaggtgacgtggaggagaatcccgggcctactagtatggactggatttggcgcatccttttccttgtcggcgctgctaccggcgcgcattccgggcccgaagtgcaactggttgaatccggtggcggcctggtgcaagcaggcggatctctcagacttagctgtgccgcctccggcagaaccttcacaatgggatggtttaggcaggctccagggaaagagagagagttcgtcgccgccatctctctgtctcccacactggcctactacgccgactctgtgaaaggccggttcaccatctccagagataatgccaagaacaccgtggtgctgcaaatgaactctctgaaacccgaggatacagccctgtactattgtgccgctgaccggaagtccgtgatgagcatcagacccgattactggggacagggcacacaagtcacagtgtcctctggatccggcggcggaggatctggcggaggcggatctgggggcggaggctctttcgaacaagttcagcttcaacagcctggcgctgagctggtcaaacctggcgcttctgtgaagatgagctgcaaagccagcggctacgccttcagcagctactggatcaactggatgaagcagaaacccggccagggactcgaatggatcggccaaatctatcccggcgacggcgacaccaactacaacggcaagttcaagggcagagccacactgaccgccgatacctctagcagcacagcctacatgcagctgagcagcctgaccagcgaagatagcgccgtgtacttctgtgcccggtccatcacaacagtcgtgggctgcgctatggactattggggccagggaacaagcgtgaccgtgtctagtacgcgtatccagaaccctgatcctgccgtgtaccagctgcgggatagcaagagcagcgacaagagcgtgtgtctgttcaccgacttcgacagccagaccaacgtgtcccagagcaaggactccgacgtgtacatcaccgataagaccgtgctggacatgcggagcatggacttcaagagcaactccgccgtggcctggtccaacaagtccgatttcgcctgcgccaacgccttcaacaacagcattatccccgaggacacattcttcccaagccccgagagcagctgcggtacccaagtggtggacacaacaaaagccgtcatcaccctgcaaccaccttgggtttcagtctttcaagaagagacagttaccctgcactgtgaagtcctgcacttgcccggaagcagctccacacagtggttcctcaacggcacagctacccagacaagcaccccttcctaccggatcacatctgcctccgtgaacgattccggcgagtataggtgtcagaggggcctgtctggccgcagcgatcctatccagcttgagattcatcgtggatggttgctcctccaagtgtcctccagggtgttcaccgaaggcgaacctctggcactgaggtgccatgcttggaaagataagctcgtctacaatgtcctctactaccgcaatggcaaggcttttaagttttttcattggaactctaatctcacgatcctgaaaacgaacatctcccacaatgggacataccactgctctggcatgggaaaacatcggtacacctctgccggcatctctgtcacagtcaaagaactgttccctgcaccagtcctgaacgcttccgtgacctctccactgcttgagggaaatctggtcaccctgtcctgcgaaactaagttgctgcttcagaggcccggactccagctctacttttcattctatatgggctctaagaccctgagaggccggaacaccagcagcgaatatcagattctgacagctcggcgcgaggactccgggctctattggtgtgaagctgctacagaggacggaaacgtgctgaaacggtcccctgaactggaactgcaagtcctgggccttcagctgccaactccagtgtggtttcatgtcctgttctatctggctgtggggattatgttccttgtgaataccgtgctctgggttaccattcggaaagaactcaagcgcaagaaaaaatgggatcttgagataagcctggacagcgggcatgagaagaaagtcatcagttcccttcaagaggacagacatctcgaagaggaactcaaatgtcaagaacaaaaagaagaacaactccaagagggtgtccatcggaaagagccacagggcgctacacgcgccaagagaagcggatctggcgtgaagcagaccctgaatttcgacctgctgaagctggctggcgacgtggaatccaacccaggcccttctagaggccatatgaccgagtacaagcccacggtgcgcctcgccacccgcgacgacgtccccagggccgtacgcaccctcgccgccgcgttcgccgactaccccgccacgcgccacaccgtcgatccggaccgccacatcgagcgggtcaccgagctgcaagaactcttcctcacgcgcgtcgggctcgacatcggcaaggtgtgggtcgcggacgacggcgccgcggtggcggtctggaccacgccggagagcgtcgaagcgggggcggtgttcgccgagatcggcccgcgcatggccgagttgagcggttcccggctggccgcgcagcaacagatggaaggcctcctggcgccgcaccggcccaaggagcccgcgtggttcctggccaccgtcggcgtctcgcccgaccaccagggcaagggtctgggcagcgccgtcgtgctccccggagtggaggcggccgagcgcgccggggtgcccgccttcctggagacctccgcgccccgcaacctccccttctacgagcggctcggcttcaccgtcaccgccgacgtcgaggtgcccgaaggaccgcgcacctggtgcatgacccgcaagcccggtgcctga

SEQ ID NO: 5814 - DNA, 4113 bp, Artificial Sequence
  Synthetic Polynucleotide
atggccttaccagtgaccgccttgctcctgccgctggccttgctgctccacgccgccaggccggaagtgcagctggttgaatctggcggaggactggttcaggctggcggatctctgagactgtcttgtgccgccagcggcagaacctttagcatgggctggtttagacaggcccctggcaaagagagagagttcgtcgccgccatcacatactctggcggcagcccttactacgccgactctgtgaagggcagattcaccatcagccgggacaacgccaagaacaccgtgtacctccagatgaacagcctgaagcctgaggacaccgccgtgtactactgcgccgccaatccaacatacggcagcgactggaacgccgagaattggggccagggaacccaagtgacagtgtctagcctcgaggacctgaagaacgtgttcccacctgaggtggccgtgttcgagcctagcgaggccgagatcagccacacccagaaagccaccctcgtgtgcctggctaccggcttctaccccgaccatgtggaactgtcttggtgggtcaacggcaaagaggtgcacagcggcgtgtctaccgacccccagccactgaaagaacagcccgccctgaacgacagccggtactgcctgagcagcagactgagagtgtccgccaccttctggcagaacccccggaaccacttcagatgccaggtgcagttctacggcctgagcgagaacgacgagtggacccaggacagagccaagcccgtgacccagatcgtgtctgccgaagcctggggcagagccgattgcggatccggcatgcggactgaagacctcccaaaggctgtggtgttcctggagcctcaatggtacagggtgctggagaaggacagtgtgactctgaagtgccagggagcctactcccctgaggacaattccacacagtggtttcacaatgagagcctcatctcaagccaggcctccagctacttcattgacgctgccacagtggacgacagtggagagtacaggtgccagacaaacctctccaccctcagtgacccggtgcagctagaagtccatatcggctggctgttgctccaggcccctcggtgggtgttcaaggaggaagaccctattcacctgaggtgtcacagctggaagaacactgctctgcataaggtcacatatttacagaatggcaaaggcaggaagtattttcatcataattctgacttctacattccaaaagccacactcaaagacagcggctcctacttctgcagggggcttgttgggagtaaaaatgtgtcttcagagactgtgaacatcaccatcactcaaggtttggcagtgtcaaccatctcatcattctttccacctggctaccaagtgtccttctgcctggtcatggtgctgctgttcgccgtggataccggcctgtacttcagcgtcaagaccaacatccggtccagcaccagagactggaaggaccacaagttcaagtggcggaaggaccctcaggacaagagggccaagcgatctggatctggagcaacaaacttctcactactcaaacaagcaggtgacgtggaggagaatcccgggcctactagtatggactggatttggcgcatccttttccttgtcggcgctgctaccggcgcgcattccgggcccgaagtgcaactggttgaatccggtggcggcctggtgcaagcaggcggatctctcagacttagctgtgccgcctccggcagaaccttcacaatgggatggtttaggcaggctccagggaaagagagagagttcgtcgccgccatctctctgtctcccacactggcctactacgccgactctgtgaaaggccggttcaccatctccagagataatgccaagaacaccgtggtgctgcaaatgaactctctgaaacccgaggatacagccctgtactattgtgccgctgaccggaagtccgtgatgagcatcagacccgattactggggacagggcacacaagtcacagtgtcctctacgcgtatccagaaccctgatcctgccgtgtaccagctgcgggatagcaagagcagcgacaagagcgtgtgtctgttcaccgacttcgacagccagaccaacgtgtcccagagcaaggactccgacgtgtacatcaccgataagaccgtgctggacatgcggagcatggacttcaagagcaactccgccgtggcctggtccaacaagtccgatttcgcctgcgccaacgccttcaacaacagcattatccccgaggacacattcttcccaagccccgagagcagctgcggtacccaagtggtggacacaacaaaagccgtcatcaccctgcaaccaccttgggtttcagtctttcaagaagagacagttaccctgcactgtgaagtcctgcacttgcccggaagcagctccacacagtggttcctcaacggcacagctacccagacaagcaccccttcctaccggatcacatctgcctccgtgaacgattccggcgagtataggtgtcagaggggcctgtctggccgcagcgatcctatccagcttgagattcatcgtggatggttgctcctccaagtgtcctccagggtgttcaccgaaggcgaacctctggcactgaggtgccatgcttggaaagataagctcgtctacaatgtcctctactaccgcaatggcaaggcttttaagttttttcattggaactctaatctcacgatcctgaaaacgaacatctcccacaatgggacataccactgctctggcatgggaaaacatcggtacacctctgccggcatctctgtcacagtcaaagaactgttccctgcaccagtcctgaacgcttccgtgacctctccactgcttgagggaaatctggtcaccctgtcctgcgaaactaagttgctgcttcagaggcccggactccagctctacttttcattctatatgggctctaagaccctgagaggccggaacaccagcagcgaatatcagattctgacagctcggcgcgaggactccgggctctattggtgtgaagctgctacagaggacggaaacgtgctgaaacggtcccctgaactggaactgcaagtcctgggccttcagctgccaactccagtgtggtttcatgtcctgttctatctggctgtggggattatgttccttgtgaataccgtgctctgggttaccattcggaaagaactcaagcgcaagaaaaaatgggatcttgagataagcctggacagcgggcatgagaagaaagtcatcagttcccttcaagaggacagacatctcgaagaggaactcaaatgtcaagaacaaaaagaagaacaactccaagagggtgtccatcggaaagagccacagggcgctacacgcgccaagagaagcggatctggcgtgaagcagaccctgaatttcgacctgctgaagctggctggcgacgtggaatccaacccaggcccttctagaggccatatgaccgagtacaagcccacggtgcgcctcgccacccgcgacgacgtccccagggccgtacgcaccctcgccgccgcgttcgccgactaccccgccacgcgccacaccgtcgatccggaccgccacatcgagcgggtcaccgagctgcaagaactcttcctcacgcgcgtcgggctcgacatcggcaaggtgtgggtcgcggacgacggcgccgcggtggcggtctggaccacgccggagagcgtcgaagcgggggcggtgttcgccgagatcggcccgcgcatggccgagttgagcggttcccggctggccgcgcagcaacagatggaaggcctcctggcgccgcaccggcccaaggagcccgcgtggttcctggccaccgtcggcgtctcgcccgaccaccagggcaagggtctgggcagcgccgtcgtgctccccggagtggaggcggccgagcgcgccggggtgcccgccttcctggagacctccgcgccccgcaacctccccttctacgagcggctcggcttcaccgtcaccgccgacgtcgaggtgcccgaaggaccgcgcacctggtgcatgacccgcaagcccggtgcctga

SEQ ID NO: 5815 - DNA, 1902 bp, Artificial Sequence; identical to SEQ ID NO: 1638
  Synthetic Polynucleotide

SEQ ID NO: 5816 - DNA, 1881 bp, Artificial Sequence
  Synthetic Polynucleotide
atggccttaccagtgaccgccttgctcctgccgctggccttgctgctccacgccgccaggccggacatccagatgacacagagccctagcagcctgtctgccagcgtgggagacagagtgaccatcacatgcaaggccagcgaccacatcaacaactggctggcctggtatcagcagaagcctggacaggcccctaagctgctgatctacggcgctaccacactggaaacaggcgtgcccagcagattttctggcagcggctctggcaccgactacaccctgacaatatccagcctccagcctgaggacttcgccacctactactgtcagcagagctggaacaccccttggacattcggccagggcaccaagctggaaatcaagagaggcggaggcggaagtggaggcggaggatctggcggcggaggctctcaagttcagcttcaacagcctggcgctgagctggtcaaacctggcgcttctgtgaagatgagctgcaaagccagcggctacgccttcagcagctactggatcaactggatgaagcagaaacccggccagggactcgaatggatcggccaaatctatcccggcgacggcgacaccaactacaacggcaagttcaagggcagagccacactgaccgccgatacctctagcagcacagcctacatgcagctgagcagcctgaccagcgaagatagcgccgtgtacttctgtgcccggtccatcacaacagtcgtgggctgcgctatggactattggggccagggaacaagcgtgaccgtgtctagtacgcgtcaagtggtggacacaacaaaagccgtcatcaccctgcaaccaccttgggtttcagtctttcaagaagagacagttaccctgcactgtgaagtcctgcacttgcccggaagcagctccacacagtggttcctcaacggcacagctacccagacaagcaccccttcctaccggatcacatctgcctccgtgaacgattccggcgagtataggtgtcagaggggcctgtctggccgcagcgatcctatccagcttgagattcatcgtggatggttgctcctccaagtgtcctccagggtgttcaccgaaggcgaacctctggcactgaggtgccatgcttggaaagataagctcgtctacaatgtcctctactaccgcaatggcaaggcttttaagttttttcattggaactctaatctcacgatcctgaaaacgaacatctcccacaatgggacataccactgctctggcatgggaaaacatcggtacacctctgccggcatctctgtcacagtcaaagaactgttccctgcaccagtcctgaacgcttccgtgacctctccactgcttgagggaaatctggtcaccctgtcctgcgaaactaagttgctgcttcagaggcccggactccagctctacttttcattctatatgggctctaagaccctgagaggccggaacaccagcagcgaatatcagattctgacagctcggcgcgaggactccgggctctattggtgtgaagctgctacagaggacggaaacgtgctgaaacggtcccctgaactggaactgcaagtcctgggccttcagctgccaactccagtgtggtttcatgtcctgttctatctggctgtggggattatgttccttgtgaataccgtgctctgggttaccattcggaaagaactcaagcgcaagaaaaaatgggatcttgagataagcctggacagcgggcatgagaagaaagtcatcagttcccttcaagaggacagacatctcgaagaggaactcaaatgtcaagaacaaaaagaagaacaactccaagagggtgtccatcggaaagagccacagggcgctaca

SEQ ID NO: 5817 - DNA, 1881 bp, Artificial Sequence
  Synthetic Polynucleotide
atggccttaccagtgaccgccttgctcctgccgctggccttgctgctccacgccgccaggccggagatcgtgctgacacagagccctgccaccctgtctctgagccctggcgaaagagccaccctgagctgtagagccagccagagcgtgtccagctacctggcctggtatcagcagaagcccggccaggctccccggctgctgatctacgatgccagcaatagagccaccggcatccccgccagattttccggctctggcagcggcaccgacttcaccctgaccatcagctccctggaacccgaggacttcgccgtgtactactgccagcagcggagcaactggcccatcacattcggccagggcacccggctggaaatcaaaggcggaggcggaagtggaggcggaggatctggcggcggaggctctgaagtgcagctggtggaatcaggcggcggactggtgcagcctggcagaagcctgagactgagctgtgccgccagcggcttcaccttcaacgactacgccatgcactgggtgcgccaggcccctggaaaaggactggaatgggtgtccacaatcagctggaacagcggcagcatcggctacgccgatagcgtgaagggccggttcaccatcagccgggacaacgccaagaagtccctgtacctccagatgaacagcctgcgggccgaggacacagccctgtactattgcgccaaggacatccagtacggcaactactactacggcatggacgtgtggggccagggaaccaccgtgaccgtgtcatctacgcgtcaagtggtggacacaacaaaagccgtcatcaccctgcaaccaccttgggtttcagtctttcaagaagagacagttaccctgcactgtgaagtcctgcacttgcccggaagcagctccacacagtggttcctcaacggcacagctacccagacaagcaccccttcctaccggatcacatctgcctccgtgaacgattccggcgagtataggtgtcagaggggcctgtctggccgcagcgatcctatccagcttgagattcatcgtggatggttgctcctccaagtgtcctccagggtgttcaccgaaggcgaacctctggcactgaggtgccatgcttggaaagataagctcgtctacaatgtcctctactaccgcaatggcaaggcttttaagttttttcattggaactctaatctcacgatcctgaaaacgaacatctcccacaatgggacataccactgctctggcatgggaaaacatcggtacacctctgccggcatctctgtcacagtcaaagaactgttccctgcaccagtcctgaacgcttccgtgacctctccactgcttgagggaaatctggtcaccctgtcctgcgaaactaagttgctgcttcagaggcccggactccagctctacttttcattctatatgggctctaagaccctgagaggccggaacaccagcagcgaatatcagattctgacagctcggcgcgaggactccgggctctattggtgtgaagctgctacagaggacggaaacgtgctgaaacggtcccctgaactggaactgcaagtcctgggccttcagctgccaactccagtgtggtttcatgtcctgttctatctggctgtggggattatgttccttgtgaataccgtgctctgggttaccattcggaaagaactcaagcgcaagaaaaaatgggatcttgagataagcctggacagcgggcatgagaagaaagtcatcagttcccttcaagaggacagacatctcgaagaggaactcaaatgtcaagaacaaaaagaagaacaactccaagagggtgtccatcggaaagagccacagggcgctaca

SEQ ID NO: 5818 - DNA, 1503 bp, Artificial Sequence
  Synthetic Polynucleotide
atggccttaccagtgaccgccttgctcctgccgctggccttgctgctccacgccgccaggccggaagtgcagctggttgaatctggcggaggactggttcaggctggcggatctctgagactgtcttgtgccgccagcggcagaacctttagcatgggctggtttagacaggcccctggcaaagagagagagttcgtcgccgccatcacatactctggcggcagcccttactacgccgactctgtgaagggcagattcaccatcagccgggacaacgccaagaacaccgtgtacctccagatgaacagcctgaagcctgaggacaccgccgtgtactactgcgccgccaatccaacatacggcagcgactggaacgccgagaattggggccagggaacccaagtgacagtgtctagcacgcgtcaagtggtggacacaacaaaagccgtcatcaccctgcaaccaccttgggtttcagtctttcaagaagagacagttaccctgcactgtgaagtcctgcacttgcccggaagcagctccacacagtggttcctcaacggcacagctacccagacaagcaccccttcctaccggatcacatctgcctccgtgaacgattccggcgagtataggtgtcagaggggcctgtctggccgcagcgatcctatccagcttgagattcatcgtggatggttgctcctccaagtgtcctccagggtgttcaccgaaggcgaacctctggcactgaggtgccatgcttggaaagataagctcgtctacaatgtcctctactaccgcaatggcaaggcttttaagttttttcattggaactctaatctcacgatcctgaaaacgaacatctcccacaatgggacataccactgctctggcatgggaaaacatcggtacacctctgccggcatctctgtcacagtcaaagaactgttccctgcaccagtcctgaacgcttccgtgacctctccactgcttgagggaaatctggtcaccctgtcctgcgaaactaagttgctgcttcagaggcccggactccagctctacttttcattctatatgggctctaagaccctgagaggccggaacaccagcagcgaatatcagattctgacagctcggcgcgaggactccgggctctattggtgtgaagctgctacagaggacggaaacgtgctgaaacggtcccctgaactggaactgcaagtcctgggccttcagctgccaactccagtgtggtttcatgtcctgttctatctggctgtggggattatgttccttgtgaataccgtgctctgggttaccattcggaaagaactcaagcgcaagaaaaaatgggatcttgagataagcctggacagcgggcatgagaagaaagtcatcagttcccttcaagaggacagacatctcgaagaggaactcaaatgtcaagaacaaaaagaagaacaactccaagagggtgtccatcggaaagagccacagggcgctaca

SEQ ID NO: 5819 - DNA, 1503 bp, Artificial Sequence
  Synthetic Polynucleotide
atggccttaccagtgaccgccttgctcctgccgctggccttgctgctccacgccgccaggccgcagctccagttgcaagagagcggccctggcttggtaaaaccttccgagacccttagcctcacatgcacggttagtgggggcagcatttcctcaggtgattactattggggatggattcggcaacccccgggtaaaggattggagtggattggtcatatttattatagtggagcgacgtactacaacccaagtctcaaatccagggttacaatatccgtcgatacgagcaggaaccaattcagcttgaaactttctagtgtcaccgcagcagacacagccgtctattactgtacgcgggatgactccagtaattggcggtcccgagggcaagggacactggtcacggtctcctcaacgcgtcaagtggtggacacaacaaaagccgtcatcaccctgcaaccaccttgggtttcagtctttcaagaagagacagttaccctgcactgtgaagtcctgcacttgcccggaagcagctccacacagtggttcctcaacggcacagctacccagacaagcaccccttcctaccggatcacatctgcctccgtgaacgattccggcgagtataggtgtcagaggggcctgtctggccgcagcgatcctatccagcttgagattcatcgtggatggttgctcctccaagtgtcctccagggtgttcaccgaaggcgaacctctggcactgaggtgccatgcttggaaagataagctcgtctacaatgtcctctactaccgcaatggcaaggcttttaagttttttcattggaactctaatctcacgatcctgaaaacgaacatctcccacaatgggacataccactgctctggcatgggaaaacatcggtacacctctgccggcatctctgtcacagtcaaagaactgttccctgcaccagtcctgaacgcttccgtgacctctccactgcttgagggaaatctggtcaccctgtcctgcgaaactaagttgctgcttcagaggcccggactccagctctacttttcattctatatgggctctaagaccctgagaggccggaacaccagcagcgaatatcagattctgacagctcggcgcgaggactccgggctctattggtgtgaagctgctacagaggacggaaacgtgctgaaacggtcccctgaactggaactgcaagtcctgggccttcagctgccaactccagtgtggtttcatgtcctgttctatctggctgtggggattatgttccttgtgaataccgtgctctgggttaccattcggaaagaactcaagcgcaagaaaaaatgggatcttgagataagcctggacagcgggcatgagaagaaagtcatcagttcccttcaagaggacagacatctcgaagaggaactcaaatgtcaagaacaaaaagaagaacaactccaagagggtgtccatcggaaagagccacagggcgctaca

SEQ ID NO: 5820 - DNA, 1503 bp, Artificial Sequence
  Synthetic Polynucleotide
atggccttaccagtgaccgccttgctcctgccgctggccttgctgctccacgccgccaggccgcagctccagctgcaagagtctggacctggcctggtcaagcctagcgagacactgagcctgacctgtaccgtgtccggcgatagcatcagcagcggcgattactactggggctggatcagacagcctcctggcaaaggactggaatggatcggccacatctactacagcggcgtgacctactacaaccccagcctgaagtccagagtgaccatcagcgtggacaccagccggaaccagttctccctgaagctgtctagcgtgacagccgccgataccgccgtgtactactgcaccagagaggacagcagcaactggcggagtagaggccagggaacactggtcacagttagctctacgcgtcaagtggtggacacaacaaaagccgtcatcaccctgcaaccaccttgggtttcagtctttcaagaagagacagttaccctgcactgtgaagtcctgcacttgcccggaagcagctccacacagtggttcctcaacggcacagctacccagacaagcaccccttcctaccggatcacatctgcctccgtgaacgattccggcgagtataggtgtcagaggggcctgtctggccgcagcgatcctatccagcttgagattcatcgtggatggttgctcctccaagtgtcctccagggtgttcaccgaaggcgaacctctggcactgaggtgccatgcttggaaagataagctcgtctacaatgtcctctactaccgcaatggcaaggcttttaagttttttcattggaactctaatctcacgatcctgaaaacgaacatctcccacaatgggacataccactgctctggcatgggaaaacatcggtacacctctgccggcatctctgtcacagtcaaagaactgttccctgcaccagtcctgaacgcttccgtgacctctccactgcttgagggaaatctggtcaccctgtcctgcgaaactaagttgctgcttcagaggcccggactccagctctacttttcattctatatgggctctaagaccctgagaggccggaacaccagcagcgaatatcagattctgacagctcggcgcgaggactccgggctctattggtgtgaagctgctacagaggacggaaacgtgctgaaacggtcccctgaactggaactgcaagtcctgggccttcagctgccaactccagtgtggtttcatgtcctgttctatctggctgtggggattatgttccttgtgaataccgtgctctgggttaccattcggaaagaactcaagcgcaagaaaaaatgggatcttgagataagcctggacagcgggcatgagaagaaagtcatcagttcccttcaagaggacagacatctcgaagaggaactcaaatgtcaagaacaaaaagaagaacaactccaagagggtgtccatcggaaagagccacagggcgctaca

SEQ ID NO: 5821 - DNA, 1509 bp, Artificial Sequence
  Synthetic Polynucleotide
atggccttaccagtgaccgccttgctcctgccgctggccttgctgctccacgccgccaggccggaagttcagctgcaagagtctggcggaggactggttcaacctggcggaagcctgagactgtcttgtgccgcctctggcagaaccttcagcagcctgttcatgggctggttcagacaggcccctggcaaagagagagaactggtcgccgccatcagccggtacagcctgtacacctactacgccgacagcgtgaagggcagattcaccatcagcgccgacaacgccaagaacgccgtgtacctccagatgaacagcctgaagccagaggacacagccgtgtactactgcgccagcaaacttgagtacaccagcaacgactacgacagctggggccagggaacccaagtgacagtctcttctacgcgtcaagtggtggacacaacaaaagccgtcatcaccctgcaaccaccttgggtttcagtctttcaagaagagacagttaccctgcactgtgaagtcctgcacttgcccggaagcagctccacacagtggttcctcaacggcacagctacccagacaagcaccccttcctaccggatcacatctgcctccgtgaacgattccggcgagtataggtgtcagaggggcctgtctggccgcagcgatcctatccagcttgagattcatcgtggatggttgctcctccaagtgtcctccagggtgttcaccgaaggcgaacctctggcactgaggtgccatgcttggaaagataagctcgtctacaatgtcctctactaccgcaatggcaaggcttttaagttttttcattggaactctaatctcacgatcctgaaaacgaacatctcccacaatgggacataccactgctctggcatgggaaaacatcggtacacctctgccggcatctctgtcacagtcaaagaactgttccctgcaccagtcctgaacgcttccgtgacctctccactgcttgagggaaatctggtcaccctgtcctgcgaaactaagttgctgcttcagaggcccggactccagctctacttttcattctatatgggctctaagaccctgagaggccggaacaccagcagcgaatatcagattctgacagctcggcgcgaggactccgggctctattggtgtgaagctgctacagaggacggaaacgtgctgaaacggtcccctgaactggaactgcaagtcctgggccttcagctgccaactccagtgtggtttcatgtcctgttctatctggctgtggggattatgttccttgtgaataccgtgctctgggttaccattcggaaagaactcaagcgcaagaaaaaatgggatcttgagataagcctggacagcgggcatgagaagaaagtcatcagttcccttcaagaggacagacatctcgaagaggaactcaaatgtcaagaacaaaaagaagaacaactccaagagggtgtccatcggaaagagccacagggcgctaca

SEQ ID NO: 5822 - DNA, 1533 bp, Artificial Sequence
  Synthetic Polynucleotide
atggccttaccagtgaccgccttgctcctgccgctggccttgctgctccacgccgccaggccggaagtgcagctggttgaatctggcggaggactggttcagcctggcggatctctgagactgtcttgtgccgcctctggcttcgccagcgactactatatcatcggctggttcagacaggcccctggcaaagagagagagggcgtcagctgtatcagcagcagatacgccaacaccaactacgccgacagcgtgaagggcagattcaccatcagccgggacaacgccaagaacaccgtgtacctccagatgaacagcctgaagcctgaggacaccgccgtgtactactgtgccgccgacaccagaagatacacctgtcctgacattgccaccatgcaccggaacttcgattcttggggccagggcacactggtcaccgtttcttctacgcgtcaagtggtggacacaacaaaagccgtcatcaccctgcaaccaccttgggtttcagtctttcaagaagagacagttaccctgcactgtgaagtcctgcacttgcccggaagcagctccacacagtggttcctcaacggcacagctacccagacaagcaccccttcctaccggatcacatctgcctccgtgaacgattccggcgagtataggtgtcagaggggcctgtctggccgcagcgatcctatccagcttgagattcatcgtggatggttgctcctccaagtgtcctccagggtgttcaccgaaggcgaacctctggcactgaggtgccatgcttggaaagataagctcgtctacaatgtcctctactaccgcaatggcaaggcttttaagttttttcattggaactctaatctcacgatcctgaaaacgaacatctcccacaatgggacataccactgctctggcatgggaaaacatcggtacacctctgccggcatctctgtcacagtcaaagaactgttccctgcaccagtcctgaacgcttccgtgacctctccactgcttgagggaaatctggtcaccctgtcctgcgaaactaagttgctgcttcagaggcccggactccagctctacttttcattctatatgggctctaagaccctgagaggccggaacaccagcagcgaatatcagattctgacagctcggcgcgaggactccgggctctattggtgtgaagctgctacagaggacggaaacgtgctgaaacggtcccctgaactggaactgcaagtcctgggccttcagctgccaactccagtgtggtttcatgtcctgttctatctggctgtggggattatgttccttgtgaataccgtgctctgggttaccattcggaaagaactcaagcgcaagaaaaaatgggatcttgagataagcctggacagcgggcatgagaagaaagtcatcagttcccttcaagaggacagacatctcgaagaggaactcaaatgtcaagaacaaaaagaagaacaactccaagagggtgtccatcggaaagagccacagggcgctaca

SEQ ID NO: 5823 - DNA, 1521 bp, Artificial Sequence
  Synthetic Polynucleotide
atggccttaccagtgaccgccttgctcctgccgctggccttgctgctccacgccgccaggccggaagtgcaactggtggaatctggaggctctctggtgcagccagggggaagcctgagactgtcttgtgccgcttccggcttcaccttcgacgactacgccatgagctgggtgcgccaggtgccaggcaaaggcctggaatgggtgtccagcatcaactggagcggcacccacaccgattacgccgactccgtgaaaggcagattcacaatcagcagaaacaacgccaacaataccctgtacctgcagatgaactccctgaagtctgaggatacagcagtgtattattgcgccaagaactggcgggacgccggcaccacttggtttgagaaaagcggctctgccggacagggaacccaagtgacagtgtcctccacgcgtcaagtggtggacacaacaaaagccgtcatcaccctgcaaccaccttgggtttcagtctttcaagaagagacagttaccctgcactgtgaagtcctgcacttgcccggaagcagctccacacagtggttcctcaacggcacagctacccagacaagcaccccttcctaccggatcacatctgcctccgtgaacgattccggcgagtataggtgtcagaggggcctgtctggccgcagcgatcctatccagcttgagattcatcgtggatggttgctcctccaagtgtcctccagggtgttcaccgaaggcgaacctctggcactgaggtgccatgcttggaaagataagctcgtctacaatgtcctctactaccgcaatggcaaggcttttaagttttttcattggaactctaatctcacgatcctgaaaacgaacatctcccacaatgggacataccactgctctggcatgggaaaacatcggtacacctctgccggcatctctgtcacagtcaaagaactgttccctgcaccagtcctgaacgcttccgtgacctctccactgcttgagggaaatctggtcaccctgtcctgcgaaactaagttgctgcttcagaggcccggactccagctctacttttcattctatatgggctctaagaccctgagaggccggaacaccagcagcgaatatcagattctgacagctcggcgcgaggactccgggctctattggtgtgaagctgctacagaggacggaaacgtgctgaaacggtcccctgaactggaactgcaagtcctgggccttcagctgccaactccagtgtggtttcatgtcctgttctatctggctgtggggattatgttccttgtgaataccgtgctctgggttaccattcggaaagaactcaagcgcaagaaaaaatgggatcttgagataagcctggacagcgggcatgagaagaaagtcatcagttcccttcaagaggacagacatctcgaagaggaactcaaatgtcaagaacaaaaagaagaacaactccaagagggtgtccatcggaaagagccacagggcgctaca

SEQ ID NO: 5824 - DNA, 1506 bp, Artificial Sequence
  Synthetic Polynucleotide
atggccttaccagtgaccgccttgctcctgccgctggccttgctgctccacgccgccaggccggaggtgcagctggttgaatctggcggaggactggttcagcctggcggatctctgagactgtcttgtgccgccagcggcttcaacatcaaggatacctgtatcggctgggttcgcagagcccctggcaaagaggaagaactggtcgccaaaatctgcaagtacagcggccacaccagatacgccgacagcgtgaagggcagattcaccatcagcgccgacaccagcaagaacaccgcctacctccagatgaacagcctgagagccgaggacaccgccgtgtactattgtgccgctgtgtccgtcagagatgggcactacaattactggggccagggcaccaccgtgaccgtttcttcaacgcgtcaagtggtggacacaacaaaagccgtcatcaccctgcaaccaccttgggtttcagtctttcaagaagagacagttaccctgcactgtgaagtcctgcacttgcccggaagcagctccacacagtggttcctcaacggcacagctacccagacaagcaccccttcctaccggatcacatctgcctccgtgaacgattccggcgagtataggtgtcagaggggcctgtctggccgcagcgatcctatccagcttgagattcatcgtggatggttgctcctccaagtgtcctccagggtgttcaccgaaggcgaacctctggcactgaggtgccatgcttggaaagataagctcgtctacaatgtcctctactaccgcaatggcaaggcttttaagttttttcattggaactctaatctcacgatcctgaaaacgaacatctcccacaatgggacataccactgctctggcatgggaaaacatcggtacacctctgccggcatctctgtcacagtcaaagaactgttccctgcaccagtcctgaacgcttccgtgacctctccactgcttgagggaaatctggtcaccctgtcctgcgaaactaagttgctgcttcagaggcccggactccagctctacttttcattctatatgggctctaagaccctgagaggccggaacaccagcagcgaatatcagattctgacagctcggcgcgaggactccgggctctattggtgtgaagctgctacagaggacggaaacgtgctgaaacggtcccctgaactggaactgcaagtcctgggccttcagctgccaactccagtgtggtttcatgtcctgttctatctggctgtggggattatgttccttgtgaataccgtgctctgggttaccattcggaaagaactcaagcgcaagaaaaaatgggatcttgagataagcctggacagcgggcatgagaagaaagtcatcagttcccttcaagaggacagacatctcgaagaggaactcaaatgtcaagaacaaaaagaagaacaactccaagagggtgtccatcggaaagagccacagggcgctaca

SEQ ID NO: 5825 - DNA, 1521 bp, Artificial Sequence
  Synthetic Polynucleotide
atggccttaccagtgaccgccttgctcctgccgctggccttgctgctccacgccgccaggccgggctctgacctgggcatcaagctgctgttcgccgctgccaagggccaggacgacgaagtgcggattctgctggctgctggggccgacgtgaacgccaaggatttcgagggctacacccccctgcacgtggccgcctatgatggacacctggaaatcgtggaagtgctgctgaaggctggcgctgatgtgaatgccaaagacagccagggccggacccctctgcatgaagccgcctacagcggccatctggaaattgtggaagtgctgctgaaagccggggcagacgtgaacgctcaggacgacgctggcgagacaccagccgatctggctgcagcttggggccacgaagatatcgccgaggtgctgcagaagacgcgtcaagtggtggacacaacaaaagccgtcatcaccctgcaaccaccttgggtttcagtctttcaagaagagacagttaccctgcactgtgaagtcctgcacttgcccggaagcagctccacacagtggttcctcaacggcacagctacccagacaagcaccccttcctaccggatcacatctgcctccgtgaacgattccggcgagtataggtgtcagaggggcctgtctggccgcagcgatcctatccagcttgagattcatcgtggatggttgctcctccaagtgtcctccagggtgttcaccgaaggcgaacctctggcactgaggtgccatgcttggaaagataagctcgtctacaatgtcctctactaccgcaatggcaaggcttttaagttttttcattggaactctaatctcacgatcctgaaaacgaacatctcccacaatgggacataccactgctctggcatgggaaaacatcggtacacctctgccggcatctctgtcacagtcaaagaactgttccctgcaccagtcctgaacgcttccgtgacctctccactgcttgagggaaatctggtcaccctgtcctgcgaaactaagttgctgcttcagaggcccggactccagctctacttttcattctatatgggctctaagaccctgagaggccggaacaccagcagcgaatatcagattctgacagctcggcgcgaggactccgggctctattggtgtgaagctgctacagaggacggaaacgtgctgaaacggtcccctgaactggaactgcaagtcctgggccttcagctgccaactccagtgtggtttcatgtcctgttctatctggctgtggggattatgttccttgtgaataccgtgctctgggttaccattcggaaagaactcaagcgcaagaaaaaatgggatcttgagataagcctggacagcgggcatgagaagaaagtcatcagttcccttcaagaggacagacatctcgaagaggaactcaaatgtcaagaacaaaaagaagaacaactccaagagggtgtccatcggaaagagccacagggcgctaca

SEQ ID NO: 5826 - DNA, 1323 bp, Artificial Sequence
  Synthetic Polynucleotide
atggccttaccagtgaccgccttgctcctgccgctggccttgctgctccacgccgccaggccggtggacaacaagttcaacaaagagcggtacagcgcctactacgagatttggcaactgcccaacctgaacgtgcggcagaaggccgccttcatcggatctctgcaggacgaccctagccagagcgccaatctgctggccgaggccaagaagctgaacgacgcccaggcccctaaaacgcgtcaagtggtggacacaacaaaagccgtcatcaccctgcaaccaccttgggtttcagtctttcaagaagagacagttaccctgcactgtgaagtcctgcacttgcccggaagcagctccacacagtggttcctcaacggcacagctacccagacaagcaccccttcctaccggatcacatctgcctccgtgaacgattccggcgagtataggtgtcagaggggcctgtctggccgcagcgatcctatccagcttgagattcatcgtggatggttgctcctccaagtgtcctccagggtgttcaccgaaggcgaacctctggcactgaggtgccatgcttggaaagataagctcgtctacaatgtcctctactaccgcaatggcaaggcttttaagttttttcattggaactctaatctcacgatcctgaaaacgaacatctcccacaatgggacataccactgctctggcatgggaaaacatcggtacacctctgccggcatctctgtcacagtcaaagaactgttccctgcaccagtcctgaacgcttccgtgacctctccactgcttgagggaaatctggtcaccctgtcctgcgaaactaagttgctgcttcagaggcccggactccagctctacttttcattctatatgggctctaagaccctgagaggccggaacaccagcagcgaatatcagattctgacagctcggcgcgaggactccgggctctattggtgtgaagctgctacagaggacggaaacgtgctgaaacggtcccctgaactggaactgcaagtcctgggccttcagctgccaactccagtgtggtttcatgtcctgttctatctggctgtggggattatgttccttgtgaataccgtgctctgggttaccattcggaaagaactcaagcgcaagaaaaaatgggatcttgagataagcctggacagcgggcatgagaagaaagtcatcagttcccttcaagaggacagacatctcgaagaggaactcaaatgtcaagaacaaaaagaagaacaactccaagagggtgtccatcggaaagagccacagggcgctaca

SEQ ID NO: 5827 - DNA, 1416 bp, Artificial Sequence
  Synthetic Polynucleotide
atggccttaccagtgaccgccttgctcctgccgctggccttgctgctccacgccgccaggccgctgccagccccgaagaatttggtcgtttcccgtgtcactgaggactctgcacgtctgagctggaccgcaccggacgcggcgttcgacagctttgcaatcggctactgggagtgggatgatgacggcgaggccattgtgctgaccgttccgggtagcgagcgcagctacgatctgaccggtctgaagccgggtacggaatatccggtgtatattgcgggcgtgaagggtggccagtggagcttcccgctgagcgcgatctttaccaccacgcgtcaagtggtggacacaacaaaagccgtcatcaccctgcaaccaccttgggtttcagtctttcaagaagagacagttaccctgcactgtgaagtcctgcacttgcccggaagcagctccacacagtggttcctcaacggcacagctacccagacaagcaccccttcctaccggatcacatctgcctccgtgaacgattccggcgagtataggtgtcagaggggcctgtctggccgcagcgatcctatccagcttgagattcatcgtggatggttgctcctccaagtgtcctccagggtgttcaccgaaggcgaacctctggcactgaggtgccatgcttggaaagataagctcgtctacaatgtcctctactaccgcaatggcaaggcttttaagttttttcattggaactctaatctcacgatcctgaaaacgaacatctcccacaatgggacataccactgctctggcatgggaaaacatcggtacacctctgccggcatctctgtcacagtcaaagaactgttccctgcaccagtcctgaacgcttccgtgacctctccactgcttgagggaaatctggtcaccctgtcctgcgaaactaagttgctgcttcagaggcccggactccagctctacttttcattctatatgggctctaagaccctgagaggccggaacaccagcagcgaatatcagattctgacagctcggcgcgaggactccgggctctattggtgtgaagctgctacagaggacggaaacgtgctgaaacggtcccctgaactggaactgcaagtcctgggccttcagctgccaactccagtgtggtttcatgtcctgttctatctggctgtggggattatgttccttgtgaataccgtgctctgggttaccattcggaaagaactcaagcgcaagaaaaaatgggatcttgagataagcctggacagcgggcatgagaagaaagtcatcagttcccttcaagaggacagacatctcgaagaggaactcaaatgtcaagaacaaaaagaagaacaactccaagagggtgtccatcggaaagagccacagggcgctaca

SEQ ID NO: 5828 - DNA, 1419 bp, Artificial Sequence
  Synthetic Polynucleotide
atggccttaccagtgaccgccttgctcctgccgctggccttgctgctccacgccgccaggccgatgctgcccgctcctaagaatctggtggtgtccagaatcaccgaggacagcgccagactgtcttggacagctcctgatgccgccttcgacagcttccccatccggtacatcgagacactgatctggggcgaagccatctggctggatgtgcctggaagcgagagaagctacgacctgaccggactgaagcctggcacagagtatgccgtggtcatcaccggcgtgaaaggcggcagattctctagccctctggtggcctctttcaccaccacgcgtcaagtggtggacacaacaaaagccgtcatcaccctgcaaccaccttgggtttcagtctttcaagaagagacagttaccctgcactgtgaagtcctgcacttgcccggaagcagctccacacagtggttcctcaacggcacagctacccagacaagcaccccttcctaccggatcacatctgcctccgtgaacgattccggcgagtataggtgtcagaggggcctgtctggccgcagcgatcctatccagcttgagattcatcgtggatggttgctcctccaagtgtcctccagggtgttcaccgaaggcgaacctctggcactgaggtgccatgcttggaaagataagctcgtctacaatgtcctctactaccgcaatggcaaggcttttaagttttttcattggaactctaatctcacgatcctgaaaacgaacatctcccacaatgggacataccactgctctggcatgggaaaacatcggtacacctctgccggcatctctgtcacagtcaaagaactgttccctgcaccagtcctgaacgcttccgtgacctctccactgcttgagggaaatctggtcaccctgtcctgcgaaactaagttgctgcttcagaggcccggactccagctctacttttcattctatatgggctctaagaccctgagaggccggaacaccagcagcgaatatcagattctgacagctcggcgcgaggactccgggctctattggtgtgaagctgctacagaggacggaaacgtgctgaaacggtcccctgaactggaactgcaagtcctgggccttcagctgccaactccagtgtggtttcatgtcctgttctatctggctgtggggattatgttccttgtgaataccgtgctctgggttaccattcggaaagaactcaagcgcaagaaaaaatgggatcttgagataagcctggacagcgggcatgagaagaaagtcatcagttcccttcaagaggacagacatctcgaagaggaactcaaatgtcaagaacaaaaagaagaacaactccaagagggtgtccatcggaaagagccacagggcgctaca

SEQ ID NO: 5829 - DNA, 2070 bp, Artificial Sequence
  Synthetic Polynucleotide
atggccttaccagtgaccgccttgctcctgccgctggccttgctgctccacgccgccaggccgatggccttaccagtgaccgccttgctcctgccgctggccttgctgctccacgccgccaggccgctgttcaatcaagaggtgcagatccctctgaccgagagctactgtggcccctgtcctaagaactggatctgctacaagaacaactgctaccagttcttcgacgagagcaagaattggtacgagagccaggccagctgcatgagccagaatgccagcctgctgaaggtgtacagcaaagaggaccaggacctgctgaaactggtcaagagctaccactggatgggccttgtgcacatccccaccaatggctcttggcagtgggaggacggcagcattctgagccctaacctgctgaccatcatcgagatgcagaagggcgactgcgccctgtacgccagcagctttaagggctacatcgagaattgcagcaccccgaacacctacatctgtatgcagagaaccgttggcggaggcggaagtggaggcggaggatctggcggcggaggctctgacctctttaatcaagaagtccagattccactcaccgaatcctactgcggaccttgtccaaaaaattggatttgttataagaacaactgttatcaattctttgatgagtctaaaaattggtatgagtcccaggcttcctgcatgtctcagaacgcttctctgctgaaagtctactctaaagaagatcaggatctcctgaagctcgtcaagtcttatcattggatggggctcgtccacattcctaccaacggaagctggcaatgggaagatggctccatcctgtctccaaatctgctcacgattattgaaatgcagaaaggggattgtgctctctacgccagctccttcaagggatatattgagaactgtagcacgcccaatacttatatctgtatgcaacggaccgtgacgcgtcaagtggtggacacaacaaaagccgtcatcaccctgcaaccaccttgggtttcagtctttcaagaagagacagttaccctgcactgtgaagtcctgcacttgcccggaagcagctccacacagtggttcctcaacggcacagctacccagacaagcaccccttcctaccggatcacatctgcctccgtgaacgattccggcgagtataggtgtcagaggggcctgtctggccgcagcgatcctatccagcttgagattcatcgtggatggttgctcctccaagtgtcctccagggtgttcaccgaaggcgaacctctggcactgaggtgccatgcttggaaagataagctcgtctacaatgtcctctactaccgcaatggcaaggcttttaagttttttcattggaactctaatctcacgatcctgaaaacgaacatctcccacaatgggacataccactgctctggcatgggaaaacatcggtacacctctgccggcatctctgtcacagtcaaagaactgttccctgcaccagtcctgaacgcttccgtgacctctccactgcttgagggaaatctggtcaccctgtcctgcgaaactaagttgctgcttcagaggcccggactccagctctacttttcattctatatgggctctaagaccctgagaggccggaacaccagcagcgaatatcagattctgacagctcggcgcgaggactccgggctctattggtgtgaagctgctacagaggacggaaacgtgctgaaacggtcccctgaactggaactgcaagtcctgggccttcagctgccaactccagtgtggtttcatgtcctgttctatctggctgtggggattatgttccttgtgaataccgtgctctgggttaccattcggaaagaactcaagcgcaagaaaaaatgggatcttgagataagcctggacagcgggcatgagaagaaagtcatcagttcccttcaagaggacagacatctcgaagaggaactcaaatgtcaagaacaaaaagaagaacaactccaagagggtgtccatcggaaagagccacagggcgctaca

SEQ ID NO: 5830 - DNA, 1710 bp, Artificial Sequence
  Synthetic Polynucleotide
atggccttaccagtgaccgccttgctcctgccgctggccttgctgctccacgccgccaggccgatggagctgactgatttgctcctggcggccatgcttcttgcagtggcaagactaactctgtccagccccgtagctcctgcctgtgaccccagactcctaaataaactgctgcgtgactcccacctccttcacagccgactgagtcagtgtcccgacgtggaccctttgtctatccctgttctgctgcctgctgtggactttagcctgggagaatggaaaacccagacggaacagagcaaggcacaggacattctaggggcagtgtcccttctactggagggagtgatggcagcacgaggacagttggaaccctcctgcctctcatccctcctgggacagctttctgggcaggttcgcctcctcttgggggccctgcagggcctcctaggaacccagcttcctctacagggcaggaccacagctcacaaggaccccaatgccctcttcttgagcttgcaacaactgcttcggggaaaggtgcgcttcctgcttctggtagaaggtcccaccctctgtgtcagacggaccctgccaaccacagctgtcccaagcagtacttctacgcgtcaagtggtggacacaacaaaagccgtcatcaccctgcaaccaccttgggtttcagtctttcaagaagagacagttaccctgcactgtgaagtcctgcacttgcccggaagcagctccacacagtggttcctcaacggcacagctacccagacaagcaccccttcctaccggatcacatctgcctccgtgaacgattccggcgagtataggtgtcagaggggcctgtctggccgcagcgatcctatccagcttgagattcatcgtggatggttgctcctccaagtgtcctccagggtgttcaccgaaggcgaacctctggcactgaggtgccatgcttggaaagataagctcgtctacaatgtcctctactaccgcaatggcaaggcttttaagttttttcattggaactctaatctcacgatcctgaaaacgaacatctcccacaatgggacataccactgctctggcatgggaaaacatcggtacacctctgccggcatctctgtcacagtcaaagaactgttccctgcaccagtcctgaacgcttccgtgacctctccactgcttgagggaaatctggtcaccctgtcctgcgaaactaagttgctgcttcagaggcccggactccagctctacttttcattctatatgggctctaagaccctgagaggccggaacaccagcagcgaatatcagattctgacagctcggcgcgaggactccgggctctattggtgtgaagctgctacagaggacggaaacgtgctgaaacggtcccctgaactggaactgcaagtcctgggccttcagctgccaactccagtgtggtttcatgtcctgttctatctggctgtggggattatgttccttgtgaataccgtgctctgggttaccattcggaaagaactcaagcgcaagaaaaaatgggatcttgagataagcctggacagcgggcatgagaagaaagtcatcagttcccttcaagaggacagacatctcgaagaggaactcaaatgtcaagaacaaaaagaagaacaactccaagagggtgtccatcggaaagagccacagggcgctaca

SEQ ID NO: 5831 - DNA, 1308 bp, Artificial Sequence
  Synthetic Polynucleotide
atggccttaccagtgaccgccttgctcctgccgctggccttgctgctccacgccgccaggccgatggaccccgacctggaaatcagagccgccttcctgcggcagagaaacacagccctgagaacagaggtggccgagctggaacaagaggtgcagcggctggaaaacgaggtgtcccagtacgagacaagatacggccctctcggaggcggaaaaacgcgtacgcgtcaagtggtggacacaacaaaagccgtcatcaccctgcaaccaccttgggtttcagtctttcaagaagagacagttaccctgcactgtgaagtcctgcacttgcccggaagcagctccacacagtggttcctcaacggcacagctacccagacaagcaccccttcctaccggatcacatctgcctccgtgaacgattccggcgagtataggtgtcagaggggcctgtctggccgcagcgatcctatccagcttgagattcatcgtggatggttgctcctccaagtgtcctccagggtgttcaccgaaggcgaacctctggcactgaggtgccatgcttggaaagataagctcgtctacaatgtcctctactaccgcaatggcaaggcttttaagttttttcattggaactctaatctcacgatcctgaaaacgaacatctcccacaatgggacataccactgctctggcatgggaaaacatcggtacacctctgccggcatctctgtcacagtcaaagaactgttccctgcaccagtcctgaacgcttccgtgacctctccactgcttgagggaaatctggtcaccctgtcctgcgaaactaagttgctgcttcagaggcccggactccagctctacttttcattctatatgggctctaagaccctgagaggccggaacaccagcagcgaatatcagattctgacagctcggcgcgaggactccgggctctattggtgtgaagctgctacagaggacggaaacgtgctgaaacggtcccctgaactggaactgcaagtcctgggccttcagctgccaactccagtgtggtttcatgtcctgttctatctggctgtggggattatgttccttgtgaataccgtgctctgggttaccattcggaaagaactcaagcgcaagaaaaaatgggatcttgagataagcctggacagcgggcatgagaagaaagtcatcagttcccttcaagaggacagacatctcgaagaggaactcaaatgtcaagaacaaaaagaagaacaactccaagagggtgtccatcggaaagagccacagggcgctaca

SEQ ID NO: 5832 - DNA, 1233 bp, Artificial Sequence
  Synthetic Polynucleotide
atggccttaccagtgaccgccttgctcctgccgctggccttgctgctccacgccgccaggccggaagttgctgccctcgagaaggaggtagcagctttggaaaaagaagtcgcagcccttgagaaagaagttgcggctctggagaagacgcgtcaagtggtggacacaacaaaagccgtcatcaccctgcaaccaccttgggtttcagtctttcaagaagagacagttaccctgcactgtgaagtcctgcacttgcccggaagcagctccacacagtggttcctcaacggcacagctacccagacaagcaccccttcctaccggatcacatctgcctccgtgaacgattccggcgagtataggtgtcagaggggcctgtctggccgcagcgatcctatccagcttgagattcatcgtggatggttgctcctccaagtgtcctccagggtgttcaccgaaggcgaacctctggcactgaggtgccatgcttggaaagataagctcgtctacaatgtcctctactaccgcaatggcaaggcttttaagttttttcattggaactctaatctcacgatcctgaaaacgaacatctcccacaatgggacataccactgctctggcatgggaaaacatcggtacacctctgccggcatctctgtcacagtcaaagaactgttccctgcaccagtcctgaacgcttccgtgacctctccactgcttgagggaaatctggtcaccctgtcctgcgaaactaagttgctgcttcagaggcccggactccagctctacttttcattctatatgggctctaagaccctgagaggccggaacaccagcagcgaatatcagattctgacagctcggcgcgaggactccgggctctattggtgtgaagctgctacagaggacggaaacgtgctgaaacggtcccctgaactggaactgcaagtcctgggccttcagctgccaactccagtgtggtttcatgtcctgttctatctggctgtggggattatgttccttgtgaataccgtgctctgggttaccattcggaaagaactcaagcgcaagaaaaaatgggatcttgagataagcctggacagcgggcatgagaagaaagtcatcagttcccttcaagaggacagacatctcgaagaggaactcaaatgtcaagaacaaaaagaagaacaactccaagagggtgtccatcggaaagagccacagggcgctaca

SEQ ID NO: 5833 - DNA, 2007 bp, Artificial Sequence
  Synthetic Polynucleotide
atggccttaccagtgaccgccttgctcctgccgctggccttgctgctccacgccgccaggccgctgttcaatcaagaggtgcagatccctctgaccgagagctactgtggcccctgtcctaagaactggatctgctacaagaacaactgctaccagttcttcgacgagagcaagaattggtacgagagccaggccagctgcatgagccagaatgccagcctgctgaaggtgtacagcaaagaggaccaggacctgctgaaactggtcaagagcgcccactggatgggccttgtgcacatccccaccaatggctcttggcagtgggaggacggcagcattctgagccctaacctgctgaccatcatcgagatgcagaagggcgactgcgccctgtacgccagcagctttaagggcttcatcgagaattgcagcaccccgaacacctacatctgtatgcagagaaccgttggcggaggcggaagtggaggcggaggatctggcggcggaggctctgacctctttaatcaagaagtccagattccactcaccgaatcctactgcggaccttgtccaaaaaattggatttgttataagaacaactgttatcaattctttgatgagtctaaaaattggtatgagtcccaggcttcctgcatgtctcagaacgcttctctgctgaaagtctactctaaagaagatcaggatctcctgaagctcgtcaagtctgcccattggatggggctcgtccacattcctaccaacggaagctggcaatgggaagatggctccatcctgtctccaaatctgctcacgattattgaaatgcagaaaggggattgtgctctctacgccagctccttcaagggatttattgagaactgtagcacgcccaatacttatatctgtatgcaacggaccgtgacgcgtcaagtggtggacacaacaaaagccgtcatcaccctgcaaccaccttgggtttcagtctttcaagaagagacagttaccctgcactgtgaagtcctgcacttgcccggaagcagctccacacagtggttcctcaacggcacagctacccagacaagcaccccttcctaccggatcacatctgcctccgtgaacgattccggcgagtataggtgtcagaggggcctgtctggccgcagcgatcctatccagcttgagattcatcgtggatggttgctcctccaagtgtcctccagggtgttcaccgaaggcgaacctctggcactgaggtgccatgcttggaaagataagctcgtctacaatgtcctctactaccgcaatggcaaggcttttaagttttttcattggaactctaatctcacgatcctgaaaacgaacatctcccacaatgggacataccactgctctggcatgggaaaacatcggtacacctctgccggcatctctgtcacagtcaaagaactgttccctgcaccagtcctgaacgcttccgtgacctctccactgcttgagggaaatctggtcaccctgtcctgcgaaactaagttgctgcttcagaggcccggactccagctctacttttcattctatatgggctctaagaccctgagaggccggaacaccagcagcgaatatcagattctgacagctcggcgcgaggactccgggctctattggtgtgaagctgctacagaggacggaaacgtgctgaaacggtcccctgaactggaactgcaagtcctgggccttcagctgccaactccagtgtggtttcatgtcctgttctatctggctgtggggattatgttccttgtgaataccgtgctctgggttaccattcggaaagaactcaagcgcaagaaaaaatgggatcttgagataagcctggacagcgggcatgagaagaaagtcatcagttcccttcaagaggacagacatctcgaagaggaactcaaatgtcaagaacaaaaagaagaacaactccaagagggtgtccatcggaaagagccacagggcgctaca

SEQ ID NO: 5834 - DNA, 2007 bp, Artificial Sequence
  Synthetic Polynucleotide
atggccttaccagtgaccgccttgctcctgccgctggccttgctgctccacgccgccaggccgctgttcaatcaagaggtgcagatccctctgaccgagagctactgtggcccctgtcctaagaactggatctgctacaagaacaactgctaccagttcttcgacgagagcaagaattggtacgagagccaggccagctgcatgagccagaatgccagcctgctgaaggtgtacagcaaagaggaccaggacctgctgaaactggtcaagagcgcccactggatgggccttgtgcacatccccaccaatggctcttggcagtgggaggacggcagcattctgagccctaacctgctgaccatcatcgagatgcagaagggcgactgcgccctgtacgccagcagctttaagggctacatcgagaattgcagcaccccgaacacctacatctgtatgcagagaaccgtttctggcggaggcggctctggaggaggcggaagtggcggcggaggcgacctctttaatcaagaagtccagattccactcaccgaatcctactgcggaccttgtccaaaaaattggatttgttataagaacaactgttatcaattctttgatgagtctaaaaattggtatgagtcccaggcttcctgcatgtctcagaacgcttctctgctgaaagtctactctaaagaagatcaggatctcctgaagctcgtcaagtctgcccattggatggggctcgtccacattcctaccaacggaagctggcaatgggaagatggctccatcctgtctccaaatctgctcacgattattgaaatgcagaaaggggattgtgctctctacgccagctccttcaagggatatattgagaactgtagcacgcccaatacttatatctgtatgcaacggaccgtgacgcgtcaagtggtggacacaacaaaagccgtcatcaccctgcaaccaccttgggtttcagtctttcaagaagagacagttaccctgcactgtgaagtcctgcacttgcccggaagcagctccacacagtggttcctcaacggcacagctacccagacaagcaccccttcctaccggatcacatctgcctccgtgaacgattccggcgagtataggtgtcagaggggcctgtctggccgcagcgatcctatccagcttgagattcatcgtggatggttgctcctccaagtgtcctccagggtgttcaccgaaggcgaacctctggcactgaggtgccatgcttggaaagataagctcgtctacaatgtcctctactaccgcaatggcaaggcttttaagttttttcattggaactctaatctcacgatcctgaaaacgaacatctcccacaatgggacataccactgctctggcatgggaaaacatcggtacacctctgccggcatctctgtcacagtcaaagaactgttccctgcaccagtcctgaacgcttccgtgacctctccactgcttgagggaaatctggtcaccctgtcctgcgaaactaagttgctgcttcagaggcccggactccagctctacttttcattctatatgggctctaagaccctgagaggccggaacaccagcagcgaatatcagattctgacagctcggcgcgaggactccgggctctattggtgtgaagctgctacagaggacggaaacgtgctgaaacggtcccctgaactggaactgcaagtcctgggccttcagctgccaactccagtgtggtttcatgtcctgttctatctggctgtggggattatgttccttgtgaataccgtgctctgggttaccattcggaaagaactcaagcgcaagaaaaaatgggatcttgagataagcctggacagcgggcatgagaagaaagtcatcagttcccttcaagaggacagacatctcgaagaggaactcaaatgtcaagaacaaaaagaagaacaactccaagagggtgtccatcggaaagagccacagggcgctaca

SEQ ID NO: 5835 - DNA, 3774 bp, Artificial Sequence
  Synthetic Polynucleotide
atggccttaccagtgaccgccttgctcctgccgctggccttgctgctccacgccgccaggccggacatccagatgacacagagccctagcagcctgtctgccagcgtgggagacagagtgaccatcacatgcaaggccagcgaccacatcaacaactggctggcctggtatcagcagaagcctggacaggcccctaagctgctgatctacggcgctaccacactggaaacaggcgtgcccagcagattttctggcagcggctctggcaccgactacaccctgacaatatccagcctccagcctgaggacttcgccacctactactgtcagcagagctggaacaccccttggacattcggccagggcaccaagctggaaatcaagagactcgagcaggtggtggataccaccaaggccgtgattaccctccagcctccttgggtgtccgtgttccaagaggaaaccgtgacactgcactgcgaggtgctgcatctgcctggctctagcagcacccagtggtttctgaatggcaccgccacacagaccagcacacccagctacagaatcaccagcgccagcgtgaacgacagcggcgagtacagatgccagagaggactgagcggcagaagcgaccccattcagctggaaatccacagaggctggctgctgctccaggtgtccagcagagtgtttacagagggcgagcccctggctctgagatgtcacgcctggaaggacaagctggtgtacaacgtgctgtactaccggaacggcaaagccttcaagttcttccactggaacagcaacctgaccatcctcaagaccaacatcagccacaacggcacctaccactgtagcggcatgggcaagcacagatacacaagcgccggcatcagcgtgaccgtgaaagagctgtttcccgctcctgtgctgaacgcctctgtgacaagtccactgctggaaggcaaccttgtgaccctgagctgcgagacaaagctgctgctgcaaagacctggcctccagctgtacttcagcttctacatgggcagcaagaccctgcggggcagaaataccagctccgagtaccagatcctgaccgccagaagagaggacagcggcctgtattggtgcgaagccgccaccgaggatggcaatgtgctgaagagaagccccgagctggaactccaggtgctgggactgcaactgcctacacctgtgtggttccacgtgctgttttacctggccgtgggcatcatgtttctggtcaacaccgtcctgtgggtcaccatcagaaaagagctgaagcggaagaagaagtgggacctcgaaatcagcctggactccggccacgaaaagaaagtgatctccagcctgcaagaggaccggcacctggaagaggaactgaagtgccaagagcagaaagaggaacagctgcaagaaggcgtgcaccgcaaagaacctcaaggcgctacaagggccaagcgatctggatctggagcaacaaacttctcactactcaaacaagcaggtgacgtggaggagaatcccgggcctactagtatggactggatttggcgcatccttttccttgtcggcgctgctaccggcgcgcattccttcgaacaagttcagcttcaacagcctggcgctgagctggtcaaacctggcgcttctgtgaagatgagctgcaaagccagcggctacgccttcagcagctactggatcaactggatgaagcagaaacccggccagggactcgaatggatcggccaaatctatcccggcgacggcgacaccaactacaacggcaagttcaagggcagagccacactgaccgccgatacctctagcagcacagcctacatgcagctgagcagcctgaccagcgaagatagcgccgtgtacttctgtgcccggtccatcacaacagtcgtgggctgcgctatggactattggggccagggaacaagcgtgaccgtgtctagtacgcgtcaagtggtggacacaacaaaagccgtcatcaccctgcaaccaccttgggtttcagtctttcaagaagagacagttaccctgcactgtgaagtcctgcacttgcccggaagcagctccacacagtggttcctcaacggcacagctacccagacaagcaccccttcctaccggatcacatctgcctccgtgaacgattccggcgagtataggtgtcagaggggcctgtctggccgcagcgatcctatccagcttgagattcatcgtggatggttgctcctccaagtgtcctccagggtgttcaccgaaggcgaacctctggcactgaggtgccatgcttggaaagataagctcgtctacaatgtcctctactaccgcaatggcaaggcttttaagttttttcattggaactctaatctcacgatcctgaaaacgaacatctcccacaatgggacataccactgctctggcatgggaaaacatcggtacacctctgccggcatctctgtcacagtcaaagaactgttccctgcaccagtcctgaacgcttccgtgacctctccactgcttgagggaaatctggtcaccctgtcctgcgaaactaagttgctgcttcagaggcccggactccagctctacttttcattctatatgggctctaagaccctgagaggccggaacaccagcagcgaatatcagattctgacagctcggcgcgaggactccgggctctattggtgtgaagctgctacagaggacggaaacgtgctgaaacggtcccctgaactggaactgcaagtcctgggccttcagctgccaactccagtgtggtttcatgtcctgttctatctggctgtggggattatgttccttgtgaataccgtgctctgggttaccattcggaaagaactcaagcgcaagaaaaaatgggatcttgagataagcctggacagcgggcatgagaagaaagtcatcagttcccttcaagaggacagacatctcgaagaggaactcaaatgtcaagaacaaaaagaagaacaactccaagagggtgtccatcggaaagagccacagggcgctacacgcgccaagagaagcggatctggcgtgaagcagaccctgaatttcgacctgctgaagctggctggcgacgtggaatccaacccaggcccttctagaggccatatgaccgagtacaagcccacggtgcgcctcgccacccgcgacgacgtccccagggccgtacgcaccctcgccgccgcgttcgccgactaccccgccacgcgccacaccgtcgatccggaccgccacatcgagcgggtcaccgagctgcaagaactcttcctcacgcgcgtcgggctcgacatcggcaaggtgtgggtcgcggacgacggcgccgcggtggcggtctggaccacgccggagagcgtcgaagcgggggcggtgttcgccgagatcggcccgcgcatggccgagttgagcggttcccggctggccgcgcagcaacagatggaaggcctcctggcgccgcaccggcccaaggagcccgcgtggttcctggccaccgtcggcgtctcgcccgaccaccagggcaagggtctgggcagcgccgtcgtgctccccggagtggaggcggccgagcgcgccggggtgcccgccttcctggagacctccgcgccccgcaacctccccttctacgagcggctcggcttcaccgtcaccgccgacgtcgaggtgcccgaaggaccgcgcacctggtgcatgacccgcaagcccggtgcctga

SEQ ID NO: 5836 - DNA, 3936 bp, Artificial Sequence
  Synthetic Polynucleotide
atggccttaccagtgaccgccttgctcctgccgctggccttgctgctccacgccgccaggccggcatgcgaagtgcagctgcttgaaagtggcggcggactgattcagcctggcggatctctgagactgagctgtgccgccagcggcttcaccttttctagccacgccatgacctgggtccgacaggcacctggaaaagggcttgaatgggtgtccgccatcagcggctctggcgattacacacactacgccgacagcgtgaagggcagattcaccatcagcagagacaacagcaagaacaccgtgtacctccagatgaacagcctgagagccgaggacagcgccgtgtattattgcgccaaggatgaggatggcggcagcctgcttggacacagaggacaaggcaccctggtcaccgtttcttccggtaccggcggaggcggatctggcggcggaggtagcggtggcggaggatctgaattcggatctctcgagcaggtggtggataccaccaaggccgtgattaccctccagcctccttgggtgtccgtgttccaagaggaaaccgtgacactgcactgcgaggtgctgcatctgcctggctctagcagcacccagtggtttctgaatggcaccgccacacagaccagcacacccagctacagaatcaccagcgccagcgtgaacgacagcggcgagtacagatgccagagaggactgagcggcagaagcgaccccattcagctggaaatccacagaggctggctgctgctccaggtgtccagcagagtgtttacagagggcgagcccctggctctgagatgtcacgcctggaaggacaagctggtgtacaacgtgctgtactaccggaacggcaaagccttcaagttcttccactggaacagcaacctgaccatcctcaagaccaacatcagccacaacggcacctaccactgtagcggcatgggcaagcacagatacacaagcgccggcatcagcgtgaccgtgaaagagctgtttcccgctcctgtgctgaacgcctctgtgacaagtccactgctggaaggcaaccttgtgaccctgagctgcgagacaaagctgctgctgcaaagacctggcctccagctgtacttcagcttctacatgggcagcaagaccctgcggggcagaaataccagctccgagtaccagatcctgaccgccagaagagaggacagcggcctgtattggtgcgaagccgccaccgaggatggcaatgtgctgaagagaagccccgagctggaactccaggtgctgggactgcaactgcctacacctgtgtggttccacgtgctgttttacctggccgtgggcatcatgtttctggtcaacaccgtcctgtgggtcaccatcagaaaagagctgaagcggaagaagaagtgggacctcgaaatcagcctggactccggccacgaaaagaaagtgatctccagcctgcaagaggaccggcacctggaagaggaactgaagtgccaagagcagaaagaggaacagctgcaagaaggcgtgcaccgcaaagaacctcaaggcgctacaagggccaagcgatctggatctggagcaacaaacttctcactactcaaacaagcaggtgacgtggaggagaatcccgggcctactagtgccaccatggactggatttggcgcatccttttccttgtcggcgctgctaccggcgcccattccgggcccgaagtgcagctggttgaatctggcggaggactggttcaggctggcggatctctgagactgtcttgtgccgccagcggcagaacctttagcatgggctggtttagacaggcccctggcaaagagagagagttcgtcgccgccatcacatactctggcggcagcccttactacgccgactctgtgaagggcagattcaccatcagccgggacaacgccaagaacaccgtgtacctccagatgaacagcctgaagcctgaggacaccgccgtgtactactgcgccgccaatccaacatacggcagcgactggaacgccgagaattggggccagggaacccaagtgacagtgtctagcggatccggcggcggaggatctggcggaggcggatctgggggcggaggctctttcgaaggcagcacgcgtcaagtggtggacacaacaaaagccgtcatcaccctgcaaccaccttgggtttcagtctttcaagaagagacagttaccctgcactgtgaagtcctgcacttgcccggaagcagctccacacagtggttcctcaacggcacagctacccagacaagcaccccttcctaccggatcacatctgcctccgtgaacgattccggcgagtataggtgtcagaggggcctgtctggccgcagcgatcctatccagcttgagattcatcgtggatggttgctcctccaagtgtcctccagggtgttcaccgaaggcgaacctctggcactgaggtgccatgcttggaaagataagctcgtctacaatgtcctctactaccgcaatggcaaggcttttaagttttttcattggaactctaatctcacgatcctgaaaacgaacatctcccacaatgggacataccactgctctggcatgggaaaacatcggtacacctctgccggcatctctgtcacagtcaaagaactgttccctgcaccagtcctgaacgcttccgtgacctctccactgcttgagggaaatctggtcaccctgtcctgcgaaactaagttgctgcttcagaggcccggactccagctctacttttcattctatatgggctctaagaccctgagaggccggaacaccagcagcgaatatcagattctgacagctcggcgcgaggactccgggctctattggtgtgaagctgctacagaggacggaaacgtgctgaaacggtcccctgaactggaactgcaagtcctgggccttcagctgccaactccagtgtggtttcatgtcctgttctatctggctgtggggattatgttccttgtgaataccgtgctctgggttaccattcggaaagaactcaagcgcaagaaaaaatgggatcttgagataagcctggacagcgggcatgagaagaaagtcatcagttcccttcaagaggacagacatctcgaagaggaactcaaatgtcaagaacaaaaagaagaacaactccaagagggtgtccatcggaaagagccacagggcgctacacgcgccaagagaagcggatctggcgtgaagcagaccctgaatttcgacctgctgaagctggctggcgacgtggaatccaacccaggcccttctagaggccatatgaccgagtacaagcccacggtgcgcctcgccacccgcgacgacgtccccagggccgtacgcaccctcgccgccgcgttcgccgactaccccgccacgcgccacaccgtcgatccggaccgccacatcgagcgggtcaccgagctgcaagaactcttcctcacgcgcgtcgggctcgacatcggcaaggtgtgggtcgcggacgacggcgccgcggtggcggtctggaccacgccggagagcgtcgaagcgggggcggtgttcgccgagatcggcccgcgcatggccgagttgagcggttcccggctggccgcgcagcaacagatggaaggcctcctggcgccgcaccggcccaaggagcccgcgtggttcctggccaccgtcggcgtctcgcccgaccaccagggcaagggtctgggcagcgccgtcgtgctccccggagtggaggcggccgagcgcgccggggtgcccgccttcctggagacctccgcgccccgcaacctccccttctacgagcggctcggcttcaccgtcaccgccgacgtcgaggtgcccgaaggaccgcgcacctggtgcatgacccgcaagcccggtgcctga

SEQ ID NO: 5837 - DNA, 4386 bp, Artificial Sequence
  Synthetic Polynucleotide
atggccttaccagtgaccgccttgctcctgccgctggccttgctgctccacgccgccaggccggacatccagatgacacagagccctagcagcctgtctgccagcgtgggagacagagtgaccatcacatgcaaggccagcgaccacatcaacaactggctggcctggtatcagcagaagcctggacaggcccctaagctgctgatctacggcgctaccacactggaaacaggcgtgcccagcagattttctggcagcggctctggcaccgactacaccctgacaatatccagcctccagcctgaggacttcgccacctactactgtcagcagagctggaacaccccttggacattcggccagggcaccaagctggaaatcaagagactcgagggacagcctaaggccaatcctaccgtgacactgttccctccaagcagcgaagaactccaggccaacaaggccacacttgtgtgcctgatctccgacttctaccctggggctgtgacagtggcttggaaggccgatggatctcctgtgaaagccggcgtggaaaccaccaagccatccaagcagagcaacaacaaatacgccgccagctcctacctgagcctgacacctgagcagtggaagtcccacagatcctacagctgccaagtgacccacgaaggcagcaccgtggaaaagacagtggcccctacagagtgcagcggatcccaggtggtggataccaccaaggccgtgattaccctccagcctccttgggtgtccgtgttccaagaggaaaccgtgacactgcactgcgaggtgctgcatctgcctggctctagcagcacccagtggtttctgaatggcaccgccacacagaccagcacacccagctacagaatcaccagcgccagcgtgaacgacagcggcgagtacagatgccagagaggactgagcggcagaagcgaccccattcagctggaaatccacagaggctggctgctgctccaggtgtccagcagagtgtttacagagggcgagcccctggctctgagatgtcacgcctggaaggacaagctggtgtacaacgtgctgtactaccggaacggcaaagccttcaagttcttccactggaacagcaacctgaccatcctcaagaccaacatcagccacaacggcacctaccactgtagcggcatgggcaagcacagatacacaagcgccggcatcagcgtgaccgtgaaagagctgtttcccgctcctgtgctgaacgcctctgtgacaagtccactgctggaaggcaaccttgtgaccctgagctgcgagacaaagctgctgctgcaaagacctggcctccagctgtacttcagcttctacatgggcagcaagaccctgcggggcagaaataccagctccgagtaccagatcctgaccgccagaagagaggacagcggcctgtattggtgcgaagccgccaccgaggatggcaatgtgctgaagagaagccccgagctggaactccaggtgctgggactgcaactgcctacacctgtgtggttccacgtgctgttttacctggccgtgggcatcatgtttctggtcaacaccgtcctgtgggtcaccatcagaaaagagctgaagcggaagaagaagtgggacctcgaaatcagcctggactccggccacgaaaagaaagtgatctccagcctgcaagaggaccggcacctggaagaggaactgaagtgccaagagcagaaagaggaacagctgcaagaaggcgtgcaccgcaaagaacctcaaggcgctacaagggccaagcgatctggatctggagcaacaaacttctcactactcaaacaagcaggtgacgtggaggagaatcccgggcctactagtatggactggatttggcgcatccttttccttgtcggcgctgctaccggcgcgcattccttcgaacaagttcagcttcaacagcctggcgctgagctggtcaaacctggcgcttctgtgaagatgagctgcaaagccagcggctacgccttcagcagctactggatcaactggatgaagcagaaacccggccagggactcgaatggatcggccaaatctatcccggcgacggcgacaccaactacaacggcaagttcaagggcagagccacactgaccgccgatacctctagcagcacagcctacatgcagctgagcagcctgaccagcgaagatagcgccgtgtacttctgtgcccggtccatcacaacagtcgtgggctgcgctatggactattggggccagggaacaagcgtgaccgtgtctagtacgcgtgcctctacaaagggaccctccgtgtttcctctggctcccagcagcaagtctacaagcggaggaacagccgctctgggctgcctggtcaaggattactttcccgagcctgtgaccgtgtcctggaatagcggagcactgacaagcggcgtgcacacctttccagccgtgctgcaaagcagcggcctgtactctctgagcagcgtggtcacagtgcctagctctagcctgggcacccagacctacatctgcaatgtgaaccacaagcctagcaacaccaaggtggacaagagagtggaacccaagagctgtggtacccaagtggtggacacaacaaaagccgtcatcaccctgcaaccaccttgggtttcagtctttcaagaagagacagttaccctgcactgtgaagtcctgcacttgcccggaagcagctccacacagtggttcctcaacggcacagctacccagacaagcaccccttcctaccggatcacatctgcctccgtgaacgattccggcgagtataggtgtcagaggggcctgtctggccgcagcgatcctatccagcttgagattcatcgtggatggttgctcctccaagtgtcctccagggtgttcaccgaaggcgaacctctggcactgaggtgccatgcttggaaagataagctcgtctacaatgtcctctactaccgcaatggcaaggcttttaagttttttcattggaactctaatctcacgatcctgaaaacgaacatctcccacaatgggacataccactgctctggcatgggaaaacatcggtacacctctgccggcatctctgtcacagtcaaagaactgttccctgcaccagtcctgaacgcttccgtgacctctccactgcttgagggaaatctggtcaccctgtcctgcgaaactaagttgctgcttcagaggcccggactccagctctacttttcattctatatgggctctaagaccctgagaggccggaacaccagcagcgaatatcagattctgacagctcggcgcgaggactccgggctctattggtgtgaagctgctacagaggacggaaacgtgctgaaacggtcccctgaactggaactgcaagtcctgggccttcagctgccaactccagtgtggtttcatgtcctgttctatctggctgtggggattatgttccttgtgaataccgtgctctgggttaccattcggaaagaactcaagcgcaagaaaaaatgggatcttgagataagcctggacagcgggcatgagaagaaagtcatcagttcccttcaagaggacagacatctcgaagaggaactcaaatgtcaagaacaaaaagaagaacaactccaagagggtgtccatcggaaagagccacagggcgctacacgcgccaagagaagcggatctggcgtgaagcagaccctgaatttcgacctgctgaagctggctggcgacgtggaatccaacccaggcccttctagaggcgggatccacaccatggctacctacgaggtgctgtgcgaggtggcaagaaagctgggcaccgacgacagagaagtggtgctgttcctgctgaacgtgttcatccctcagcctacactggcccagctgatcggtgcactgagagccctgaaagaggaaggccggctgacctttcctctgctggccgaatgcctgttcagagccggaagaagggatctgctgcgggacctgctgcatctggaccccagatttctggaaagacacctggccggcaccatgagctacttcagcccttaccagctgaccgtgctgcacgttgacggcgaactgtgcgccagagatattcggagcctgatcttcctgagcaaggacaccatcggcagccggtctacccctcagacatttctgcactgggtgtactgcatggaaaacctggacctgctcggccccacagatgtggatgccctgatgtccatgctgagaagcctgagcagagtggacctccagagacaggtgcagacactgatgggactgcacctgagcggacctagccacagccagcactacagacacacccct

SEQ ID NO: 5838 - DNA, 4545 bp, Artificial Sequence
  Synthetic Polynucleotide
atggccttaccagtgaccgccttgctcctgccgctggccttgctgctccacgccgccaggccggacatccagatgacacagagccctagcagcctgtctgccagcgtgggagacagagtgaccatcacatgcaaggccagcgaccacatcaacaactggctggcctggtatcagcagaagcctggacaggcccctaagctgctgatctacggcgctaccacactggaaacaggcgtgcccagcagattttctggcagcggctctggcaccgactacaccctgacaatatccagcctccagcctgaggacttcgccacctactactgtcagcagagctggaacaccccttggacattcggccagggcaccaagctggaaatcaagagactcgagggacagcctaaggccaatcctaccgtgacactgttccctccaagcagcgaagaactccaggccaacaaggccacacttgtgtgcctgatctccgacttctaccctggggctgtgacagtggcttggaaggccgatggatctcctgtgaaagccggcgtggaaaccaccaagccatccaagcagagcaacaacaaatacgccgccagctcctacctgagcctgacacctgagcagtggaagtcccacagatcctacagctgccaagtgacccacgaaggcagcaccgtggaaaagacagtggcccctacagagtgcagcggatcccaggtggtggataccaccaaggccgtgattaccctccagcctccttgggtgtccgtgttccaagaggaaaccgtgacactgcactgcgaggtgctgcatctgcctggctctagcagcacccagtggtttctgaatggcaccgccacacagaccagcacacccagctacagaatcaccagcgccagcgtgaacgacagcggcgagtacagatgccagagaggactgagcggcagaagcgaccccattcagctggaaatccacagaggctggctgctgctccaggtgtccagcagagtgtttacagagggcgagcccctggctctgagatgtcacgcctggaaggacaagctggtgtacaacgtgctgtactaccggaacggcaaagccttcaagttcttccactggaacagcaacctgaccatcctcaagaccaacatcagccacaacggcacctaccactgtagcggcatgggcaagcacagatacacaagcgccggcatcagcgtgaccgtgaaagagctgtttcccgctcctgtgctgaacgcctctgtgacaagtccactgctggaaggcaaccttgtgaccctgagctgcgagacaaagctgctgctgcaaagacctggcctccagctgtacttcagcttctacatgggcagcaagaccctgcggggcagaaataccagctccgagtaccagatcctgaccgccagaagagaggacagcggcctgtattggtgcgaagccgccaccgaggatggcaatgtgctgaagagaagccccgagctggaactccaggtgctgggactgcaactgcctacacctgtgtggttccacgtgctgttttacctggccgtgggcatcatgtttctggtcaacaccgtcctgtgggtcaccatcagaaaagagctgaagcggaagaagaagtgggacctcgaaatcagcctggactccggccacgaaaagaaagtgatctccagcctgcaagaggaccggcacctggaagaggaactgaagtgccaagagcagaaagaggaacagctgcaagaaggcgtgcaccgcaaagaacctcaaggcgctacaagggccaagcgatctggatctggagcaacaaacttctcactactcaaacaagcaggtgacgtggaggagaatcccgggcctactagtatggactggatttggcgcatccttttccttgtcggcgctgctaccggcgcgcattccttcgaacaagttcagcttcaacagcctggcgctgagctggtcaaacctggcgcttctgtgaagatgagctgcaaagccagcggctacgccttcagcagctactggatcaactggatgaagcagaaacccggccagggactcgaatggatcggccaaatctatcccggcgacggcgacaccaactacaacggcaagttcaagggcagagccacactgaccgccgatacctctagcagcacagcctacatgcagctgagcagcctgaccagcgaagatagcgccgtgtacttctgtgcccggtccatcacaacagtcgtgggctgcgctatggactattggggccagggaacaagcgtgaccgtgtctagtacgcgtgcctctacaaagggaccctccgtgtttcctctggctcccagcagcaagtctacaagcggaggaacagccgctctgggctgcctggtcaaggattactttcccgagcctgtgaccgtgtcctggaatagcggagcactgacaagcggcgtgcacacctttccagccgtgctgcaaagcagcggcctgtactctctgagcagcgtggtcacagtgcctagctctagcctgggcacccagacctacatctgcaatgtgaaccacaagcctagcaacaccaaggtggacaagagagtggaacccaagagctgtggtacccaagtggtggacacaacaaaagccgtcatcaccctgcaaccaccttgggtttcagtctttcaagaagagacagttaccctgcactgtgaagtcctgcacttgcccggaagcagctccacacagtggttcctcaacggcacagctacccagacaagcaccccttcctaccggatcacatctgcctccgtgaacgattccggcgagtataggtgtcagaggggcctgtctggccgcagcgatcctatccagcttgagattcatcgtggatggttgctcctccaagtgtcctccagggtgttcaccgaaggcgaacctctggcactgaggtgccatgcttggaaagataagctcgtctacaatgtcctctactaccgcaatggcaaggcttttaagttttttcattggaactctaatctcacgatcctgaaaacgaacatctcccacaatgggacataccactgctctggcatgggaaaacatcggtacacctctgccggcatctctgtcacagtcaaagaactgttccctgcaccagtcctgaacgcttccgtgacctctccactgcttgagggaaatctggtcaccctgtcctgcgaaactaagttgctgcttcagaggcccggactccagctctacttttcattctatatgggctctaagaccctgagaggccggaacaccagcagcgaatatcagattctgacagctcggcgcgaggactccgggctctattggtgtgaagctgctacagaggacggaaacgtgctgaaacggtcccctgaactggaactgcaagtcctgggccttcagctgccaactccagtgtggtttcatgtcctgttctatctggctgtggggattatgttccttgtgaataccgtgctctgggttaccattcggaaagaactcaagcgcaagaaaaaatgggatcttgagataagcctggacagcgggcatgagaagaaagtcatcagttcccttcaagaggacagacatctcgaagaggaactcaaatgtcaagaacaaaaagaagaacaactccaagagggtgtccatcggaaagagccacagggcgctacacgcgccaagagaagcggatctggcgtgaagcagaccctgaatttcgacctgctgaagctggctggcgacgtggaatccaacccaggcccttctagaggcgggatccacaccatgtccgactccaaggaggtccctagccttccatttttgcgacacttgctcgaagagttggacagccatgaggacagcttgctgctgtttctgtgtcacgacgcggccccgggctgcacgacggtcacgcaagctttgtgctcgcttagccaacagcgcaagctgaccctcgcggctctggtcgagatgctctacgtgctgcagcgtatggatcttctcaagagccgcttcgggctcagcaaggagggggccgagcaattgctgggcacaagctttctcacgcgctaccgcaagctcatggtttgcgtgggtgaggagctcgactcgagcgagctacgcgctctacgcttgttcgcgtgcaacctgaatccgagcctgagcacggcgctttctgagagcagccgctttgtcgagcttgtactcgcgcttgaaaacgtaggactcgtctcgccatcgagtgtttccgtgcttgcggacatgttgcgcactcttcggcgcctcgatttgtgccagcagcttgttgagtacgaacaacaagagcaagccaggtaccgttactgttacgcggcctcgccctcattgccagttcgtacgttacgtcgggggcacggcgcgagtgaacacgagcagctgtgcatgcccgtgcaagaatcctctgacagccccgagctgctgcgcacgcccgtacaagaatcctccagcgacagccccgagcaaacgact

SEQ ID NO: 5839 - DNA, 4413 bp, Artificial Sequence
  Synthetic Polynucleotide
atggccttaccagtgaccgccttgctcctgccgctggccttgctgctccacgccgccaggccggacatccagatgacacagagccctagcagcctgtctgccagcgtgggagacagagtgaccatcacatgcaaggccagcgaccacatcaacaactggctggcctggtatcagcagaagcctggacaggcccctaagctgctgatctacggcgctaccacactggaaacaggcgtgcccagcagattttctggcagcggctctggcaccgactacaccctgacaatatccagcctccagcctgaggacttcgccacctactactgtcagcagagctggaacaccccttggacattcggccagggcaccaagctggaaatcaagagactcgagggacagcctaaggccaatcctaccgtgacactgttccctccaagcagcgaagaactccaggccaacaaggccacacttgtgtgcctgatctccgacttctaccctggggctgtgacagtggcttggaaggccgatggatctcctgtgaaagccggcgtggaaaccaccaagccatccaagcagagcaacaacaaatacgccgccagctcctacctgagcctgacacctgagcagtggaagtcccacagatcctacagctgccaagtgacccacgaaggcagcaccgtggaaaagacagtggcccctacagagtgcagcggatcccaggtggtggataccaccaaggccgtgattaccctccagcctccttgggtgtccgtgttccaagaggaaaccgtgacactgcactgcgaggtgctgcatctgcctggctctagcagcacccagtggtttctgaatggcaccgccacacagaccagcacacccagctacagaatcaccagcgccagcgtgaacgacagcggcgagtacagatgccagagaggactgagcggcagaagcgaccccattcagctggaaatccacagaggctggctgctgctccaggtgtccagcagagtgtttacagagggcgagcccctggctctgagatgtcacgcctggaaggacaagctggtgtacaacgtgctgtactaccggaacggcaaagccttcaagttcttccactggaacagcaacctgaccatcctcaagaccaacatcagccacaacggcacctaccactgtagcggcatgggcaagcacagatacacaagcgccggcatcagcgtgaccgtgaaagagctgtttcccgctcctgtgctgaacgcctctgtgacaagtccactgctggaaggcaaccttgtgaccctgagctgcgagacaaagctgctgctgcaaagacctggcctccagctgtacttcagcttctacatgggcagcaagaccctgcggggcagaaataccagctccgagtaccagatcctgaccgccagaagagaggacagcggcctgtattggtgcgaagccgccaccgaggatggcaatgtgctgaagagaagccccgagctggaactccaggtgctgggactgcaactgcctacacctgtgtggttccacgtgctgttttacctggccgtgggcatcatgtttctggtcaacaccgtcctgtgggtcaccatcagaaaagagctgaagcggaagaagaagtgggacctcgaaatcagcctggactccggccacgaaaagaaagtgatctccagcctgcaagaggaccggcacctggaagaggaactgaagtgccaagagcagaaagaggaacagctgcaagaaggcgtgcaccgcaaagaacctcaaggcgctacaagggccaagcgatctggatctggagcaacaaacttctcactactcaaacaagcaggtgacgtggaggagaatcccgggcctactagtatggactggatttggcgcatccttttccttgtcggcgctgctaccggcgcgcattccttcgaacaagttcagcttcaacagcctggcgctgagctggtcaaacctggcgcttctgtgaagatgagctgcaaagccagcggctacgccttcagcagctactggatcaactggatgaagcagaaacccggccagggactcgaatggatcggccaaatctatcccggcgacggcgacaccaactacaacggcaagttcaagggcagagccacactgaccgccgatacctctagcagcacagcctacatgcagctgagcagcctgaccagcgaagatagcgccgtgtacttctgtgcccggtccatcacaacagtcgtgggctgcgctatggactattggggccagggaacaagcgtgaccgtgtctagtacgcgtgcctctacaaagggaccctccgtgtttcctctggctcccagcagcaagtctacaagcggaggaacagccgctctgggctgcctggtcaaggattactttcccgagcctgtgaccgtgtcctggaatagcggagcactgacaagcggcgtgcacacctttccagccgtgctgcaaagcagcggcctgtactctctgagcagcgtggtcacagtgcctagctctagcctgggcacccagacctacatctgcaatgtgaaccacaagcctagcaacaccaaggtggacaagagagtggaacccaagagctgtggtacccaagtggtggacacaacaaaagccgtcatcaccctgcaaccaccttgggtttcagtctttcaagaagagacagttaccctgcactgtgaagtcctgcacttgcccggaagcagctccacacagtggttcctcaacggcacagctacccagacaagcaccccttcctaccggatcacatctgcctccgtgaacgattccggcgagtataggtgtcagaggggcctgtctggccgcagcgatcctatccagcttgagattcatcgtggatggttgctcctccaagtgtcctccagggtgttcaccgaaggcgaacctctggcactgaggtgccatgcttggaaagataagctcgtctacaatgtcctctactaccgcaatggcaaggcttttaagttttttcattggaactctaatctcacgatcctgaaaacgaacatctcccacaatgggacataccactgctctggcatgggaaaacatcggtacacctctgccggcatctctgtcacagtcaaagaactgttccctgcaccagtcctgaacgcttccgtgacctctccactgcttgagggaaatctggtcaccctgtcctgcgaaactaagttgctgcttcagaggcccggactccagctctacttttcattctatatgggctctaagaccctgagaggccggaacaccagcagcgaatatcagattctgacagctcggcgcgaggactccgggctctattggtgtgaagctgctacagaggacggaaacgtgctgaaacggtcccctgaactggaactgcaagtcctgggccttcagctgccaactccagtgtggtttcatgtcctgttctatctggctgtggggattatgttccttgtgaataccgtgctctgggttaccattcggaaagaactcaagcgcaagaaaaaatgggatcttgagataagcctggacagcgggcatgagaagaaagtcatcagttcccttcaagaggacagacatctcgaagaggaactcaaatgtcaagaacaaaaagaagaacaactccaagagggtgtccatcggaaagagccacagggcgctacacgcgccaagagaagcggatctggcgtgaagcagaccctgaatttcgacctgctgaagctggctggcgacgtggaatccaacccaggcccttctagaggccatatgaccgagtacaagcccacggtgcgcctcgccacccgcgacgacgtccccagggccgtacgcaccctcgccgccgcgttcgccgactaccccgccacgcgccacaccgtcgatccggaccgccacatcgagcgggtcaccgagctgcaagaactcttcctcacgcgcgtcgggctcgacatcggcaaggtgtgggtcgcggacgacggcgccgcggtggcggtctggaccacgccggagagcgtcgaagcgggggcggtgttcgccgagatcggcccgcgcatggccgagttgagcggttcccggctggccgcgcagcaacagatggaaggcctcctggcgccgcaccggcccaaggagcccgcgtggttcctggccaccgtcggcgtctcgcccgaccaccagggcaagggtctgggcagcgccgtcgtgctccccggagtggaggcggccgagcgcgccggggtgcccgccttcctggagacctccgcgccccgcaacctccccttctacgagcggctcggcttcaccgtcaccgccgacgtcgaggtgcccgaaggaccgcgcacctggtgcatgacccgcaagcccggtgcctga

SEQ ID NO: 5840 - DNA, 4824 bp, Artificial Sequence
  Synthetic Polynucleotide
atggccttaccagtgaccgccttgctcctgccgctggccttgctgctccacgccgccaggccggaagtgcagctggttgaatctggcggaggactggttcaggctggcggatctctgagactgtcttgtgccgccagcggcagaacctttagcatgggctggtttagacaggcccctggcaaagagagagagttcgtcgccgccatcacatactctggcggcagcccttactacgccgactctgtgaagggcagattcaccatcagccgggacaacgccaagaacaccgtgtacctccagatgaacagcctgaagcctgaggacaccgccgtgtactactgcgccgccaatccaacatacggcagcgactggaacgccgagaattggggccagggaacccaagtgacagtgtctagcggtaccggcggaggcggatctggcggcggaggtagcggtggcggaggatctgaattcgacatccagatgacacagagccctagcagcctgtctgccagcgtgggagacagagtgaccatcacatgcaaggccagcgaccacatcaacaactggctggcctggtatcagcagaagcctggacaggcccctaagctgctgatctacggcgctaccacactggaaacaggcgtgcccagcagattttctggcagcggctctggcaccgactacaccctgacaatatccagcctccagcctgaggacttcgccacctactactgtcagcagagctggaacaccccttggacattcggccagggcaccaagctggaaatcaagagactcgagggacagcctaaggccaatcctaccgtgacactgttccctccaagcagcgaagaactccaggccaacaaggccacacttgtgtgcctgatctccgacttctaccctggggctgtgacagtggcttggaaggccgatggatctcctgtgaaagccggcgtggaaaccaccaagccatccaagcagagcaacaacaaatacgccgccagctcctacctgagcctgacacctgagcagtggaagtcccacagatcctacagctgccaagtgacccacgaaggcagcaccgtggaaaagacagtggcccctacagagtgcagcggatcccaggtggtggataccaccaaggccgtgattaccctccagcctccttgggtgtccgtgttccaagaggaaaccgtgacactgcactgcgaggtgctgcatctgcctggctctagcagcacccagtggtttctgaatggcaccgccacacagaccagcacacccagctacagaatcaccagcgccagcgtgaacgacagcggcgagtacagatgccagagaggactgagcggcagaagcgaccccattcagctggaaatccacagaggctggctgctgctccaggtgtccagcagagtgtttacagagggcgagcccctggctctgagatgtcacgcctggaaggacaagctggtgtacaacgtgctgtactaccggaacggcaaagccttcaagttcttccactggaacagcaacctgaccatcctcaagaccaacatcagccacaacggcacctaccactgtagcggcatgggcaagcacagatacacaagcgccggcatcagcgtgaccgtgaaagagctgtttcccgctcctgtgctgaacgcctctgtgacaagtccactgctggaaggcaaccttgtgaccctgagctgcgagacaaagctgctgctgcaaagacctggcctccagctgtacttcagcttctacatgggcagcaagaccctgcggggcagaaataccagctccgagtaccagatcctgaccgccagaagagaggacagcggcctgtattggtgcgaagccgccaccgaggatggcaatgtgctgaagagaagccccgagctggaactccaggtgctgggactgcaactgcctacacctgtgtggttccacgtgctgttttacctggccgtgggcatcatgtttctggtcaacaccgtcctgtgggtcaccatcagaaaagagctgaagcggaagaagaagtgggacctcgaaatcagcctggactccggccacgaaaagaaagtgatctccagcctgcaagaggaccggcacctggaagaggaactgaagtgccaagagcagaaagaggaacagctgcaagaaggcgtgcaccgcaaagaacctcaaggcgctacaagggccaagcgatctggatctggagcaacaaacttctcactactcaaacaagcaggtgacgtggaggagaatcccgggcctactagtatggactggatttggcgcatccttttccttgtcggcgctgctaccggcgcgcattccttcgaacaagttcagcttcaacagcctggcgctgagctggtcaaacctggcgcttctgtgaagatgagctgcaaagccagcggctacgccttcagcagctactggatcaactggatgaagcagaaacccggccagggactcgaatggatcggccaaatctatcccggcgacggcgacaccaactacaacggcaagttcaagggcagagccacactgaccgccgatacctctagcagcacagcctacatgcagctgagcagcctgaccagcgaagatagcgccgtgtacttctgtgcccggtccatcacaacagtcgtgggctgcgctatggactattggggccagggaacaagcgtgaccgtgtctagtacgcgtgcctctacaaagggaccctccgtgtttcctctggctcccagcagcaagtctacaagcggaggaacagccgctctgggctgcctggtcaaggattactttcccgagcctgtgaccgtgtcctggaatagcggagcactgacaagcggcgtgcacacctttccagccgtgctgcaaagcagcggcctgtactctctgagcagcgtggtcacagtgcctagctctagcctgggcacccagacctacatctgcaatgtgaaccacaagcctagcaacaccaaggtggacaagagagtggaacccaagagctgtggtacccaagtggtggacacaacaaaagccgtcatcaccctgcaaccaccttgggtttcagtctttcaagaagagacagttaccctgcactgtgaagtcctgcacttgcccggaagcagctccacacagtggttcctcaacggcacagctacccagacaagcaccccttcctaccggatcacatctgcctccgtgaacgattccggcgagtataggtgtcagaggggcctgtctggccgcagcgatcctatccagcttgagattcatcgtggatggttgctcctccaagtgtcctccagggtgttcaccgaaggcgaacctctggcactgaggtgccatgcttggaaagataagctcgtctacaatgtcctctactaccgcaatggcaaggcttttaagttttttcattggaactctaatctcacgatcctgaaaacgaacatctcccacaatgggacataccactgctctggcatgggaaaacatcggtacacctctgccggcatctctgtcacagtcaaagaactgttccctgcaccagtcctgaacgcttccgtgacctctccactgcttgagggaaatctggtcaccctgtcctgcgaaactaagttgctgcttcagaggcccggactccagctctacttttcattctatatgggctctaagaccctgagaggccggaacaccagcagcgaatatcagattctgacagctcggcgcgaggactccgggctctattggtgtgaagctgctacagaggacggaaacgtgctgaaacggtcccctgaactggaactgcaagtcctgggccttcagctgccaactccagtgtggtttcatgtcctgttctatctggctgtggggattatgttccttgtgaataccgtgctctgggttaccattcggaaagaactcaagcgcaagaaaaaatgggatcttgagataagcctggacagcgggcatgagaagaaagtcatcagttcccttcaagaggacagacatctcgaagaggaactcaaatgtcaagaacaaaaagaagaacaactccaagagggtgtccatcggaaagagccacagggcgctacacgcgccaagagaagcggatctggcgtgaagcagaccctgaatttcgacctgctgaagctggctggcgacgtggaatccaacccaggcccttctagaggccatatgaccgagtacaagcccacggtgcgcctcgccacccgcgacgacgtccccagggccgtacgcaccctcgccgccgcgttcgccgactaccccgccacgcgccacaccgtcgatccggaccgccacatcgagcgggtcaccgagctgcaagaactcttcctcacgcgcgtcgggctcgacatcggcaaggtgtgggtcgcggacgacggcgccgcggtggcggtctggaccacgccggagagcgtcgaagcgggggcggtgttcgccgagatcggcccgcgcatggccgagttgagcggttcccggctggccgcgcagcaacagatggaaggcctcctggcgccgcaccggcccaaggagcccgcgtggttcctggccaccgtcggcgtctcgcccgaccaccagggcaagggtctgggcagcgccgtcgtgctccccggagtggaggcggccgagcgcgccggggtgcccgccttcctggagacctccgcgccccgcaacctccccttctacgagcggctcggcttcaccgtcaccgccgacgtcgaggtgcccgaaggaccgcgcacctggtgcatgacccgcaagcccggtgcctga

SEQ ID NO: 5841 - DNA, 5235 bp, Artificial Sequence
  Synthetic Polynucleotide
atggccttaccagtgaccgccttgctcctgccgctggccttgctgctccacgccgccaggccggaagtgcagctggttgaatctggcggaggactggttcaggctggcggatctctgagactgtcttgtgccgccagcggcagaacctttagcatgggctggtttagacaggcccctggcaaagagagagagttcgtcgccgccatcacatactctggcggcagcccttactacgccgactctgtgaagggcagattcaccatcagccgggacaacgccaagaacaccgtgtacctccagatgaacagcctgaagcctgaggacaccgccgtgtactactgcgccgccaatccaacatacggcagcgactggaacgccgagaattggggccagggaacccaagtgacagtgtctagcggtaccggcggaggcggatctggcggcggaggtagcggtggcggaggatctgaattcgacatccagatgacacagagccctagcagcctgtctgccagcgtgggagacagagtgaccatcacatgcaaggccagcgaccacatcaacaactggctggcctggtatcagcagaagcctggacaggcccctaagctgctgatctacggcgctaccacactggaaacaggcgtgcccagcagattttctggcagcggctctggcaccgactacaccctgacaatatccagcctccagcctgaggacttcgccacctactactgtcagcagagctggaacaccccttggacattcggccagggcaccaagctggaaatcaagagactcgagggacagcctaaggccaatcctaccgtgacactgttccctccaagcagcgaagaactccaggccaacaaggccacacttgtgtgcctgatctccgacttctaccctggggctgtgacagtggcttggaaggccgatggatctcctgtgaaagccggcgtggaaaccaccaagccatccaagcagagcaacaacaaatacgccgccagctcctacctgagcctgacacctgagcagtggaagtcccacagatcctacagctgccaagtgacccacgaaggcagcaccgtggaaaagacagtggcccctacagagtgcagcggatcccaggtggtggataccaccaaggccgtgattaccctccagcctccttgggtgtccgtgttccaagaggaaaccgtgacactgcactgcgaggtgctgcatctgcctggctctagcagcacccagtggtttctgaatggcaccgccacacagaccagcacacccagctacagaatcaccagcgccagcgtgaacgacagcggcgagtacagatgccagagaggactgagcggcagaagcgaccccattcagctggaaatccacagaggctggctgctgctccaggtgtccagcagagtgtttacagagggcgagcccctggctctgagatgtcacgcctggaaggacaagctggtgtacaacgtgctgtactaccggaacggcaaagccttcaagttcttccactggaacagcaacctgaccatcctcaagaccaacatcagccacaacggcacctaccactgtagcggcatgggcaagcacagatacacaagcgccggcatcagcgtgaccgtgaaagagctgtttcccgctcctgtgctgaacgcctctgtgacaagtccactgctggaaggcaaccttgtgaccctgagctgcgagacaaagctgctgctgcaaagacctggcctccagctgtacttcagcttctacatgggcagcaagaccctgcggggcagaaataccagctccgagtaccagatcctgaccgccagaagagaggacagcggcctgtattggtgcgaagccgccaccgaggatggcaatgtgctgaagagaagccccgagctggaactccaggtgctgggactgcaactgcctacacctgtgtggttccacgtgctgttttacctggccgtgggcatcatgtttctggtcaacaccgtcctgtgggtcaccatcagaaaagagctgaagcggaagaagaagtgggacctcgaaatcagcctggactccggccacgaaaagaaagtgatctccagcctgcaagaggaccggcacctggaagaggaactgaagtgccaagagcagaaagaggaacagctgcaagaaggcgtgcaccgcaaagaacctcaaggcgctacaagggccaagcgatctggatctggagcaacaaacttctcactactcaaacaagcaggtgacgtggaggagaatcccgggcctactagtatggactggatttggcgcatccttttccttgtcggcgctgctaccggcgcgcattccgggcccgaagtgcaactggttgaatccggtggcggcctggtgcaagcaggcggatctctcagacttagctgtgccgcctccggcagaaccttcacaatgggatggtttaggcaggctccagggaaagagagagagttcgtcgccgccatctctctgtctcccacactggcctactacgccgactctgtgaaaggccggttcaccatctccagagataatgccaagaacaccgtggtgctgcaaatgaactctctgaaacccgaggatacagccctgtactattgtgccgctgaccggaagtccgtgatgagcatcagacccgattactggggacagggcacacaagtcacagtgtcctctggatccggcggcggaggatctggcggaggcggatctgggggcggaggctctttcgaacaagttcagcttcaacagcctggcgctgagctggtcaaacctggcgcttctgtgaagatgagctgcaaagccagcggctacgccttcagcagctactggatcaactggatgaagcagaaacccggccagggactcgaatggatcggccaaatctatcccggcgacggcgacaccaactacaacggcaagttcaagggcagagccacactgaccgccgatacctctagcagcacagcctacatgcagctgagcagcctgaccagcgaagatagcgccgtgtacttctgtgcccggtccatcacaacagtcgtgggctgcgctatggactattggggccagggaacaagcgtgaccgtgtctagtacgcgtgcctctacaaagggaccctccgtgtttcctctggctcccagcagcaagtctacaagcggaggaacagccgctctgggctgcctggtcaaggattactttcccgagcctgtgaccgtgtcctggaatagcggagcactgacaagcggcgtgcacacctttccagccgtgctgcaaagcagcggcctgtactctctgagcagcgtggtcacagtgcctagctctagcctgggcacccagacctacatctgcaatgtgaaccacaagcctagcaacaccaaggtggacaagagagtggaacccaagagctgtggtacccaagtggtggacacaacaaaagccgtcatcaccctgcaaccaccttgggtttcagtctttcaagaagagacagttaccctgcactgtgaagtcctgcacttgcccggaagcagctccacacagtggttcctcaacggcacagctacccagacaagcaccccttcctaccggatcacatctgcctccgtgaacgattccggcgagtataggtgtcagaggggcctgtctggccgcagcgatcctatccagcttgagattcatcgtggatggttgctcctccaagtgtcctccagggtgttcaccgaaggcgaacctctggcactgaggtgccatgcttggaaagataagctcgtctacaatgtcctctactaccgcaatggcaaggcttttaagttttttcattggaactctaatctcacgatcctgaaaacgaacatctcccacaatgggacataccactgctctggcatgggaaaacatcggtacacctctgccggcatctctgtcacagtcaaagaactgttccctgcaccagtcctgaacgcttccgtgacctctccactgcttgagggaaatctggtcaccctgtcctgcgaaactaagttgctgcttcagaggcccggactccagctctacttttcattctatatgggctctaagaccctgagaggccggaacaccagcagcgaatatcagattctgacagctcggcgcgaggactccgggctctattggtgtgaagctgctacagaggacggaaacgtgctgaaacggtcccctgaactggaactgcaagtcctgggccttcagctgccaactccagtgtggtttcatgtcctgttctatctggctgtggggattatgttccttgtgaataccgtgctctgggttaccattcggaaagaactcaagcgcaagaaaaaatgggatcttgagataagcctggacagcgggcatgagaagaaagtcatcagttcccttcaagaggacagacatctcgaagaggaactcaaatgtcaagaacaaaaagaagaacaactccaagagggtgtccatcggaaagagccacagggcgctacacgcgccaagagaagcggatctggcgtgaagcagaccctgaatttcgacctgctgaagctggctggcgacgtggaatccaacccaggcccttctagaggccatatgaccgagtacaagcccacggtgcgcctcgccacccgcgacgacgtccccagggccgtacgcaccctcgccgccgcgttcgccgactaccccgccacgcgccacaccgtcgatccggaccgccacatcgagcgggtcaccgagctgcaagaactcttcctcacgcgcgtcgggctcgacatcggcaaggtgtgggtcgcggacgacggcgccgcggtggcggtctggaccacgccggagagcgtcgaagcgggggcggtgttcgccgagatcggcccgcgcatggccgagttgagcggttcccggctggccgcgcagcaacagatggaaggcctcctggcgccgcaccggcccaaggagcccgcgtggttcctggccaccgtcggcgtctcgcccgaccaccagggcaagggtctgggcagcgccgtcgtgctccccggagtggaggcggccgagcgcgccggggtgcccgccttcctggagacctccgcgccccgcaacctccccttctacgagcggctcggcttcaccgtcaccgccgacgtcgaggtgcccgaaggaccgcgcacctggtgcatgacccgcaagcccggtgcctga

SEQ ID NO: 5842 - DNA, 4434 bp, Artificial Sequence
  Synthetic Polynucleotide
atggccttaccagtgaccgccttgctcctgccgctggccttgctgctccacgccgccaggccggaagtgcagctggttgaatctggcggaggactggttcaggctggcggatctctgagactgtcttgtgccgccagcggcagaacctttagcatgggctggtttagacaggcccctggcaaagagagagagttcgtcgccgccatcacatactctggcggcagcccttactacgccgactctgtgaagggcagattcaccatcagccgggacaacgccaagaacaccgtgtacctccagatgaacagcctgaagcctgaggacaccgccgtgtactactgcgccgccaatccaacatacggcagcgactggaacgccgagaattggggccagggaacccaagtgacagtgtctagcctcgagggacagcctaaggccaatcctaccgtgacactgttccctccaagcagcgaagaactccaggccaacaaggccacacttgtgtgcctgatctccgacttctaccctggggctgtgacagtggcttggaaggccgatggatctcctgtgaaagccggcgtggaaaccaccaagccatccaagcagagcaacaacaaatacgccgccagctcctacctgagcctgacacctgagcagtggaagtcccacagatcctacagctgccaagtgacccacgaaggcagcaccgtggaaaagacagtggcccctacagagtgcagcggatcccaggtggtggataccaccaaggccgtgattaccctccagcctccttgggtgtccgtgttccaagaggaaaccgtgacactgcactgcgaggtgctgcatctgcctggctctagcagcacccagtggtttctgaatggcaccgccacacagaccagcacacccagctacagaatcaccagcgccagcgtgaacgacagcggcgagtacagatgccagagaggactgagcggcagaagcgaccccattcagctggaaatccacagaggctggctgctgctccaggtgtccagcagagtgtttacagagggcgagcccctggctctgagatgtcacgcctggaaggacaagctggtgtacaacgtgctgtactaccggaacggcaaagccttcaagttcttccactggaacagcaacctgaccatcctcaagaccaacatcagccacaacggcacctaccactgtagcggcatgggcaagcacagatacacaagcgccggcatcagcgtgaccgtgaaagagctgtttcccgctcctgtgctgaacgcctctgtgacaagtccactgctggaaggcaaccttgtgaccctgagctgcgagacaaagctgctgctgcaaagacctggcctccagctgtacttcagcttctacatgggcagcaagaccctgcggggcagaaataccagctccgagtaccagatcctgaccgccagaagagaggacagcggcctgtattggtgcgaagccgccaccgaggatggcaatgtgctgaagagaagccccgagctggaactccaggtgctgggactgcaactgcctacacctgtgtggttccacgtgctgttttacctggccgtgggcatcatgtttctggtcaacaccgtcctgtgggtcaccatcagaaaagagctgaagcggaagaagaagtgggacctcgaaatcagcctggactccggccacgaaaagaaagtgatctccagcctgcaagaggaccggcacctggaagaggaactgaagtgccaagagcagaaagaggaacagctgcaagaaggcgtgcaccgcaaagaacctcaaggcgctacaagggccaagcgatctggatctggagcaacaaacttctcactactcaaacaagcaggtgacgtggaggagaatcccgggcctactagtatggactggatttggcgcatccttttccttgtcggcgctgctaccggcgcgcattccgggcccgaagtgcaactggttgaatccggtggcggcctggtgcaagcaggcggatctctcagacttagctgtgccgcctccggcagaaccttcacaatgggatggtttaggcaggctccagggaaagagagagagttcgtcgccgccatctctctgtctcccacactggcctactacgccgactctgtgaaaggccggttcaccatctccagagataatgccaagaacaccgtggtgctgcaaatgaactctctgaaacccgaggatacagccctgtactattgtgccgctgaccggaagtccgtgatgagcatcagacccgattactggggacagggcacacaagtcacagtgtcctctacgcgtgcctctacaaagggaccctccgtgtttcctctggctcccagcagcaagtctacaagcggaggaacagccgctctgggctgcctggtcaaggattactttcccgagcctgtgaccgtgtcctggaatagcggagcactgacaagcggcgtgcacacctttccagccgtgctgcaaagcagcggcctgtactctctgagcagcgtggtcacagtgcctagctctagcctgggcacccagacctacatctgcaatgtgaaccacaagcctagcaacaccaaggtggacaagagagtggaacccaagagctgtggtacccaagtggtggacacaacaaaagccgtcatcaccctgcaaccaccttgggtttcagtctttcaagaagagacagttaccctgcactgtgaagtcctgcacttgcccggaagcagctccacacagtggttcctcaacggcacagctacccagacaagcaccccttcctaccggatcacatctgcctccgtgaacgattccggcgagtataggtgtcagaggggcctgtctggccgcagcgatcctatccagcttgagattcatcgtggatggttgctcctccaagtgtcctccagggtgttcaccgaaggcgaacctctggcactgaggtgccatgcttggaaagataagctcgtctacaatgtcctctactaccgcaatggcaaggcttttaagttttttcattggaactctaatctcacgatcctgaaaacgaacatctcccacaatgggacataccactgctctggcatgggaaaacatcggtacacctctgccggcatctctgtcacagtcaaagaactgttccctgcaccagtcctgaacgcttccgtgacctctccactgcttgagggaaatctggtcaccctgtcctgcgaaactaagttgctgcttcagaggcccggactccagctctacttttcattctatatgggctctaagaccctgagaggccggaacaccagcagcgaatatcagattctgacagctcggcgcgaggactccgggctctattggtgtgaagctgctacagaggacggaaacgtgctgaaacggtcccctgaactggaactgcaagtcctgggccttcagctgccaactccagtgtggtttcatgtcctgttctatctggctgtggggattatgttccttgtgaataccgtgctctgggttaccattcggaaagaactcaagcgcaagaaaaaatgggatcttgagataagcctggacagcgggcatgagaagaaagtcatcagttcccttcaagaggacagacatctcgaagaggaactcaaatgtcaagaacaaaaagaagaacaactccaagagggtgtccatcggaaagagccacagggcgctacacgcgccaagagaagcggatctggcgtgaagcagaccctgaatttcgacctgctgaagctggctggcgacgtggaatccaacccaggcccttctagaggccatatgaccgagtacaagcccacggtgcgcctcgccacccgcgacgacgtccccagggccgtacgcaccctcgccgccgcgttcgccgactaccccgccacgcgccacaccgtcgatccggaccgccacatcgagcgggtcaccgagctgcaagaactcttcctcacgcgcgtcgggctcgacatcggcaaggtgtgggtcgcggacgacggcgccgcggtggcggtctggaccacgccggagagcgtcgaagcgggggcggtgttcgccgagatcggcccgcgcatggccgagttgagcggttcccggctggccgcgcagcaacagatggaaggcctcctggcgccgcaccggcccaaggagcccgcgtggttcctggccaccgtcggcgtctcgcccgaccaccagggcaagggtctgggcagcgccgtcgtgctccccggagtggaggcggccgagcgcgccggggtgcccgccttcctggagacctccgcgccccgcaacctccccttctacgagcggctcggcttcaccgtcaccgccgacgtcgaggtgcccgaaggaccgcgcacctggtgcatgacccgcaagcccggtgcctga

SEQ ID NO: 5843 - DNA, 4458 bp, Artificial Sequence
  Synthetic Polynucleotide
atggccttaccagtgaccgccttgctcctgccgctggccttgctgctccacgccgccaggccggacatccagatgacacagagccctagcagcctgtctgccagcgtgggagacagagtgaccatcacatgcaaggccagcgaccacatcaacaactggctggcctggtatcagcagaagcctggacaggcccctaagctgctgatctacggcgctaccacactggaaacaggcgtgcccagcagattttctggcagcggctctggcaccgactacaccctgacaatatccagcctccagcctgaggacttcgccacctactactgtcagcagagctggaacaccccttggacattcggccagggcaccaagctggaaatcaagagactcgaggacctgaagaacgtgttcccacctgaggtggccgtgttcgagcctagcgaggccgagatcagccacacccagaaagccaccctcgtgtgcctggctaccggcttctaccccgaccatgtggaactgtcttggtgggtcaacggcaaagaggtgcacagcggcgtgtctaccgacccccagccactgaaagaacagcccgccctgaacgacagccggtactgcctgagcagcagactgagagtgtccgccaccttctggcagaacccccggaaccacttcagatgccaggtgcagttctacggcctgagcgagaacgacgagtggacccaggacagagccaagcccgtgacccagatcgtgtctgccgaagcctggggcagagccgattgcggatcccaggtggtggataccaccaaggccgtgattaccctccagcctccttgggtgtccgtgttccaagaggaaaccgtgacactgcactgcgaggtgctgcatctgcctggctctagcagcacccagtggtttctgaatggcaccgccacacagaccagcacacccagctacagaatcaccagcgccagcgtgaacgacagcggcgagtacagatgccagagaggactgagcggcagaagcgaccccattcagctggaaatccacagaggctggctgctgctccaggtgtccagcagagtgtttacagagggcgagcccctggctctgagatgtcacgcctggaaggacaagctggtgtacaacgtgctgtactaccggaacggcaaagccttcaagttcttccactggaacagcaacctgaccatcctcaagaccaacatcagccacaacggcacctaccactgtagcggcatgggcaagcacagatacacaagcgccggcatcagcgtgaccgtgaaagagctgtttcccgctcctgtgctgaacgcctctgtgacaagtccactgctggaaggcaaccttgtgaccctgagctgcgagacaaagctgctgctgcaaagacctggcctccagctgtacttcagcttctacatgggcagcaagaccctgcggggcagaaataccagctccgagtaccagatcctgaccgccagaagagaggacagcggcctgtattggtgcgaagccgccaccgaggatggcaatgtgctgaagagaagccccgagctggaactccaggtgctgggactgcaactgcctacacctgtgtggttccacgtgctgttttacctggccgtgggcatcatgtttctggtcaacaccgtcctgtgggtcaccatcagaaaagagctgaagcggaagaagaagtgggacctcgaaatcagcctggactccggccacgaaaagaaagtgatctccagcctgcaagaggaccggcacctggaagaggaactgaagtgccaagagcagaaagaggaacagctgcaagaaggcgtgcaccgcaaagaacctcaaggcgctacaagggccaagcgatctggatctggagcaacaaacttctcactactcaaacaagcaggtgacgtggaggagaatcccgggcctactagtatggactggatttggcgcatccttttccttgtcggcgctgctaccggcgcgcattccttcgaacaagttcagcttcaacagcctggcgctgagctggtcaaacctggcgcttctgtgaagatgagctgcaaagccagcggctacgccttcagcagctactggatcaactggatgaagcagaaacccggccagggactcgaatggatcggccaaatctatcccggcgacggcgacaccaactacaacggcaagttcaagggcagagccacactgaccgccgatacctctagcagcacagcctacatgcagctgagcagcctgaccagcgaagatagcgccgtgtacttctgtgcccggtccatcacaacagtcgtgggctgcgctatggactattggggccagggaacaagcgtgaccgtgtctagtacgcgtatccagaaccctgatcctgccgtgtaccagctgcgggatagcaagagcagcgacaagagcgtgtgtctgttcaccgacttcgacagccagaccaacgtgtcccagagcaaggactccgacgtgtacatcaccgataagaccgtgctggacatgcggagcatggacttcaagagcaactccgccgtggcctggtccaacaagtccgatttcgcctgcgccaacgccttcaacaacagcattatccccgaggacacattcttcccaagccccgagagcagctgcggtacccaagtggtggacacaacaaaagccgtcatcaccctgcaaccaccttgggtttcagtctttcaagaagagacagttaccctgcactgtgaagtcctgcacttgcccggaagcagctccacacagtggttcctcaacggcacagctacccagacaagcaccccttcctaccggatcacatctgcctccgtgaacgattccggcgagtataggtgtcagaggggcctgtctggccgcagcgatcctatccagcttgagattcatcgtggatggttgctcctccaagtgtcctccagggtgttcaccgaaggcgaacctctggcactgaggtgccatgcttggaaagataagctcgtctacaatgtcctctactaccgcaatggcaaggcttttaagttttttcattggaactctaatctcacgatcctgaaaacgaacatctcccacaatgggacataccactgctctggcatgggaaaacatcggtacacctctgccggcatctctgtcacagtcaaagaactgttccctgcaccagtcctgaacgcttccgtgacctctccactgcttgagggaaatctggtcaccctgtcctgcgaaactaagttgctgcttcagaggcccggactccagctctacttttcattctatatgggctctaagaccctgagaggccggaacaccagcagcgaatatcagattctgacagctcggcgcgaggactccgggctctattggtgtgaagctgctacagaggacggaaacgtgctgaaacggtcccctgaactggaactgcaagtcctgggccttcagctgccaactccagtgtggtttcatgtcctgttctatctggctgtggggattatgttccttgtgaataccgtgctctgggttaccattcggaaagaactcaagcgcaagaaaaaatgggatcttgagataagcctggacagcgggcatgagaagaaagtcatcagttcccttcaagaggacagacatctcgaagaggaactcaaatgtcaagaacaaaaagaagaacaactccaagagggtgtccatcggaaagagccacagggcgctacacgcgccaagagaagcggatctggcgtgaagcagaccctgaatttcgacctgctgaagctggctggcgacgtggaatccaacccaggcccttctagaggccatatgaccgagtacaagcccacggtgcgcctcgccacccgcgacgacgtccccagggccgtacgcaccctcgccgccgcgttcgccgactaccccgccacgcgccacaccgtcgatccggaccgccacatcgagcgggtcaccgagctgcaagaactcttcctcacgcgcgtcgggctcgacatcggcaaggtgtgggtcgcggacgacggcgccgcggtggcggtctggaccacgccggagagcgtcgaagcgggggcggtgttcgccgagatcggcccgcgcatggccgagttgagcggttcccggctggccgcgcagcaacagatggaaggcctcctggcgccgcaccggcccaaggagcccgcgtggttcctggccaccgtcggcgtctcgcccgaccaccagggcaagggtctgggcagcgccgtcgtgctccccggagtggaggcggccgagcgcgccggggtgcccgccttcctggagacctccgcgccccgcaacctccccttctacgagcggctcggcttcaccgtcaccgccgacgtcgaggtgcccgaaggaccgcgcacctggtgcatgacccgcaagcccggtgcctga

SEQ ID NO: 5844 - DNA, 4869 bp, Artificial Sequence
  Synthetic Polynucleotide
atggccttaccagtgaccgccttgctcctgccgctggccttgctgctccacgccgccaggccggaagtgcagctggttgaatctggcggaggactggttcaggctggcggatctctgagactgtcttgtgccgccagcggcagaacctttagcatgggctggtttagacaggcccctggcaaagagagagagttcgtcgccgccatcacatactctggcggcagcccttactacgccgactctgtgaagggcagattcaccatcagccgggacaacgccaagaacaccgtgtacctccagatgaacagcctgaagcctgaggacaccgccgtgtactactgcgccgccaatccaacatacggcagcgactggaacgccgagaattggggccagggaacccaagtgacagtgtctagcggtaccggcggaggcggatctggcggcggaggtagcggtggcggaggatctgaattcgacatccagatgacacagagccctagcagcctgtctgccagcgtgggagacagagtgaccatcacatgcaaggccagcgaccacatcaacaactggctggcctggtatcagcagaagcctggacaggcccctaagctgctgatctacggcgctaccacactggaaacaggcgtgcccagcagattttctggcagcggctctggcaccgactacaccctgacaatatccagcctccagcctgaggacttcgccacctactactgtcagcagagctggaacaccccttggacattcggccagggcaccaagctggaaatcaagagactcgaggacctgaagaacgtgttcccacctgaggtggccgtgttcgagcctagcgaggccgagatcagccacacccagaaagccaccctcgtgtgcctggctaccggcttctaccccgaccatgtggaactgtcttggtgggtcaacggcaaagaggtgcacagcggcgtgtctaccgacccccagccactgaaagaacagcccgccctgaacgacagccggtactgcctgagcagcagactgagagtgtccgccaccttctggcagaacccccggaaccacttcagatgccaggtgcagttctacggcctgagcgagaacgacgagtggacccaggacagagccaagcccgtgacccagatcgtgtctgccgaagcctggggcagagccgattgcggatcccaggtggtggataccaccaaggccgtgattaccctccagcctccttgggtgtccgtgttccaagaggaaaccgtgacactgcactgcgaggtgctgcatctgcctggctctagcagcacccagtggtttctgaatggcaccgccacacagaccagcacacccagctacagaatcaccagcgccagcgtgaacgacagcggcgagtacagatgccagagaggactgagcggcagaagcgaccccattcagctggaaatccacagaggctggctgctgctccaggtgtccagcagagtgtttacagagggcgagcccctggctctgagatgtcacgcctggaaggacaagctggtgtacaacgtgctgtactaccggaacggcaaagccttcaagttcttccactggaacagcaacctgaccatcctcaagaccaacatcagccacaacggcacctaccactgtagcggcatgggcaagcacagatacacaagcgccggcatcagcgtgaccgtgaaagagctgtttcccgctcctgtgctgaacgcctctgtgacaagtccactgctggaaggcaaccttgtgaccctgagctgcgagacaaagctgctgctgcaaagacctggcctccagctgtacttcagcttctacatgggcagcaagaccctgcggggcagaaataccagctccgagtaccagatcctgaccgccagaagagaggacagcggcctgtattggtgcgaagccgccaccgaggatggcaatgtgctgaagagaagccccgagctggaactccaggtgctgggactgcaactgcctacacctgtgtggttccacgtgctgttttacctggccgtgggcatcatgtttctggtcaacaccgtcctgtgggtcaccatcagaaaagagctgaagcggaagaagaagtgggacctcgaaatcagcctggactccggccacgaaaagaaagtgatctccagcctgcaagaggaccggcacctggaagaggaactgaagtgccaagagcagaaagaggaacagctgcaagaaggcgtgcaccgcaaagaacctcaaggcgctacaagggccaagcgatctggatctggagcaacaaacttctcactactcaaacaagcaggtgacgtggaggagaatcccgggcctactagtatggactggatttggcgcatccttttccttgtcggcgctgctaccggcgcgcattccttcgaacaagttcagcttcaacagcctggcgctgagctggtcaaacctggcgcttctgtgaagatgagctgcaaagccagcggctacgccttcagcagctactggatcaactggatgaagcagaaacccggccagggactcgaatggatcggccaaatctatcccggcgacggcgacaccaactacaacggcaagttcaagggcagagccacactgaccgccgatacctctagcagcacagcctacatgcagctgagcagcctgaccagcgaagatagcgccgtgtacttctgtgcccggtccatcacaacagtcgtgggctgcgctatggactattggggccagggaacaagcgtgaccgtgtctagtacgcgtatccagaaccctgatcctgccgtgtaccagctgcgggatagcaagagcagcgacaagagcgtgtgtctgttcaccgacttcgacagccagaccaacgtgtcccagagcaaggactccgacgtgtacatcaccgataagaccgtgctggacatgcggagcatggacttcaagagcaactccgccgtggcctggtccaacaagtccgatttcgcctgcgccaacgccttcaacaacagcattatccccgaggacacattcttcccaagccccgagagcagctgcggtacccaagtggtggacacaacaaaagccgtcatcaccctgcaaccaccttgggtttcagtctttcaagaagagacagttaccctgcactgtgaagtcctgcacttgcccggaagcagctccacacagtggttcctcaacggcacagctacccagacaagcaccccttcctaccggatcacatctgcctccgtgaacgattccggcgagtataggtgtcagaggggcctgtctggccgcagcgatcctatccagcttgagattcatcgtggatggttgctcctccaagtgtcctccagggtgttcaccgaaggcgaacctctggcactgaggtgccatgcttggaaagataagctcgtctacaatgtcctctactaccgcaatggcaaggcttttaagttttttcattggaactctaatctcacgatcctgaaaacgaacatctcccacaatgggacataccactgctctggcatgggaaaacatcggtacacctctgccggcatctctgtcacagtcaaagaactgttccctgcaccagtcctgaacgcttccgtgacctctccactgcttgagggaaatctggtcaccctgtcctgcgaaactaagttgctgcttcagaggcccggactccagctctacttttcattctatatgggctctaagaccctgagaggccggaacaccagcagcgaatatcagattctgacagctcggcgcgaggactccgggctctattggtgtgaagctgctacagaggacggaaacgtgctgaaacggtcccctgaactggaactgcaagtcctgggccttcagctgccaactccagtgtggtttcatgtcctgttctatctggctgtggggattatgttccttgtgaataccgtgctctgggttaccattcggaaagaactcaagcgcaagaaaaaatgggatcttgagataagcctggacagcgggcatgagaagaaagtcatcagttcccttcaagaggacagacatctcgaagaggaactcaaatgtcaagaacaaaaagaagaacaactccaagagggtgtccatcggaaagagccacagggcgctacacgcgccaagagaagcggatctggcgtgaagcagaccctgaatttcgacctgctgaagctggctggcgacgtggaatccaacccaggcccttctagaggccatatgaccgagtacaagcccacggtgcgcctcgccacccgcgacgacgtccccagggccgtacgcaccctcgccgccgcgttcgccgactaccccgccacgcgccacaccgtcgatccggaccgccacatcgagcgggtcaccgagctgcaagaactcttcctcacgcgcgtcgggctcgacatcggcaaggtgtgggtcgcggacgacggcgccgcggtggcggtctggaccacgccggagagcgtcgaagcgggggcggtgttcgccgagatcggcccgcgcatggccgagttgagcggttcccggctggccgcgcagcaacagatggaaggcctcctggcgccgcaccggcccaaggagcccgcgtggttcctggccaccgtcggcgtctcgcccgaccaccagggcaagggtctgggcagcgccgtcgtgctccccggagtggaggcggccgagcgcgccggggtgcccgccttcctggagacctccgcgccccgcaacctccccttctacgagcggctcggcttcaccgtcaccgccgacgtcgaggtgcccgaaggaccgcgcacctggtgcatgacccgcaagcccggtgcctga

SEQ ID NO: 5845 - DNA, 5280 bp, Artificial Sequence
  Synthetic Polynucleotide
atggccttaccagtgaccgccttgctcctgccgctggccttgctgctccacgccgccaggccggaagtgcagctggttgaatctggcggaggactggttcaggctggcggatctctgagactgtcttgtgccgccagcggcagaacctttagcatgggctggtttagacaggcccctggcaaagagagagagttcgtcgccgccatcacatactctggcggcagcccttactacgccgactctgtgaagggcagattcaccatcagccgggacaacgccaagaacaccgtgtacctccagatgaacagcctgaagcctgaggacaccgccgtgtactactgcgccgccaatccaacatacggcagcgactggaacgccgagaattggggccagggaacccaagtgacagtgtctagcggtaccggcggaggcggatctggcggcggaggtagcggtggcggaggatctgaattcgacatccagatgacacagagccctagcagcctgtctgccagcgtgggagacagagtgaccatcacatgcaaggccagcgaccacatcaacaactggctggcctggtatcagcagaagcctggacaggcccctaagctgctgatctacggcgctaccacactggaaacaggcgtgcccagcagattttctggcagcggctctggcaccgactacaccctgacaatatccagcctccagcctgaggacttcgccacctactactgtcagcagagctggaacaccccttggacattcggccagggcaccaagctggaaatcaagagactcgaggacctgaagaacgtgttcccacctgaggtggccgtgttcgagcctagcgaggccgagatcagccacacccagaaagccaccctcgtgtgcctggctaccggcttctaccccgaccatgtggaactgtcttggtgggtcaacggcaaagaggtgcacagcggcgtgtctaccgacccccagccactgaaagaacagcccgccctgaacgacagccggtactgcctgagcagcagactgagagtgtccgccaccttctggcagaacccccggaaccacttcagatgccaggtgcagttctacggcctgagcgagaacgacgagtggacccaggacagagccaagcccgtgacccagatcgtgtctgccgaagcctggggcagagccgattgcggatcccaggtggtggataccaccaaggccgtgattaccctccagcctccttgggtgtccgtgttccaagaggaaaccgtgacactgcactgcgaggtgctgcatctgcctggctctagcagcacccagtggtttctgaatggcaccgccacacagaccagcacacccagctacagaatcaccagcgccagcgtgaacgacagcggcgagtacagatgccagagaggactgagcggcagaagcgaccccattcagctggaaatccacagaggctggctgctgctccaggtgtccagcagagtgtttacagagggcgagcccctggctctgagatgtcacgcctggaaggacaagctggtgtacaacgtgctgtactaccggaacggcaaagccttcaagttcttccactggaacagcaacctgaccatcctcaagaccaacatcagccacaacggcacctaccactgtagcggcatgggcaagcacagatacacaagcgccggcatcagcgtgaccgtgaaagagctgtttcccgctcctgtgctgaacgcctctgtgacaagtccactgctggaaggcaaccttgtgaccctgagctgcgagacaaagctgctgctgcaaagacctggcctccagctgtacttcagcttctacatgggcagcaagaccctgcggggcagaaataccagctccgagtaccagatcctgaccgccagaagagaggacagcggcctgtattggtgcgaagccgccaccgaggatggcaatgtgctgaagagaagccccgagctggaactccaggtgctgggactgcaactgcctacacctgtgtggttccacgtgctgttttacctggccgtgggcatcatgtttctggtcaacaccgtcctgtgggtcaccatcagaaaagagctgaagcggaagaagaagtgggacctcgaaatcagcctggactccggccacgaaaagaaagtgatctccagcctgcaagaggaccggcacctggaagaggaactgaagtgccaagagcagaaagaggaacagctgcaagaaggcgtgcaccgcaaagaacctcaaggcgctacaagggccaagcgatctggatctggagcaacaaacttctcactactcaaacaagcaggtgacgtggaggagaatcccgggcctactagtatggactggatttggcgcatccttttccttgtcggcgctgctaccggcgcgcattccgggcccgaagtgcaactggttgaatccggtggcggcctggtgcaagcaggcggatctctcagacttagctgtgccgcctccggcagaaccttcacaatgggatggtttaggcaggctccagggaaagagagagagttcgtcgccgccatctctctgtctcccacactggcctactacgccgactctgtgaaaggccggttcaccatctccagagataatgccaagaacaccgtggtgctgcaaatgaactctctgaaacccgaggatacagccctgtactattgtgccgctgaccggaagtccgtgatgagcatcagacccgattactggggacagggcacacaagtcacagtgtcctctggatccggcggcggaggatctggcggaggcggatctgggggcggaggctctttcgaacaagttcagcttcaacagcctggcgctgagctggtcaaacctggcgcttctgtgaagatgagctgcaaagccagcggctacgccttcagcagctactggatcaactggatgaagcagaaacccggccagggactcgaatggatcggccaaatctatcccggcgacggcgacaccaactacaacggcaagttcaagggcagagccacactgaccgccgatacctctagcagcacagcctacatgcagctgagcagcctgaccagcgaagatagcgccgtgtacttctgtgcccggtccatcacaacagtcgtgggctgcgctatggactattggggccagggaacaagcgtgaccgtgtctagtacgcgtatccagaaccctgatcctgccgtgtaccagctgcgggatagcaagagcagcgacaagagcgtgtgtctgttcaccgacttcgacagccagaccaacgtgtcccagagcaaggactccgacgtgtacatcaccgataagaccgtgctggacatgcggagcatggacttcaagagcaactccgccgtggcctggtccaacaagtccgatttcgcctgcgccaacgccttcaacaacagcattatccccgaggacacattcttcccaagccccgagagcagctgcggtacccaagtggtggacacaacaaaagccgtcatcaccctgcaaccaccttgggtttcagtctttcaagaagagacagttaccctgcactgtgaagtcctgcacttgcccggaagcagctccacacagtggttcctcaacggcacagctacccagacaagcaccccttcctaccggatcacatctgcctccgtgaacgattccggcgagtataggtgtcagaggggcctgtctggccgcagcgatcctatccagcttgagattcatcgtggatggttgctcctccaagtgtcctccagggtgttcaccgaaggcgaacctctggcactgaggtgccatgcttggaaagataagctcgtctacaatgtcctctactaccgcaatggcaaggcttttaagttttttcattggaactctaatctcacgatcctgaaaacgaacatctcccacaatgggacataccactgctctggcatgggaaaacatcggtacacctctgccggcatctctgtcacagtcaaagaactgttccctgcaccagtcctgaacgcttccgtgacctctccactgcttgagggaaatctggtcaccctgtcctgcgaaactaagttgctgcttcagaggcccggactccagctctacttttcattctatatgggctctaagaccctgagaggccggaacaccagcagcgaatatcagattctgacagctcggcgcgaggactccgggctctattggtgtgaagctgctacagaggacggaaacgtgctgaaacggtcccctgaactggaactgcaagtcctgggccttcagctgccaactccagtgtggtttcatgtcctgttctatctggctgtggggattatgttccttgtgaataccgtgctctgggttaccattcggaaagaactcaagcgcaagaaaaaatgggatcttgagataagcctggacagcgggcatgagaagaaagtcatcagttcccttcaagaggacagacatctcgaagaggaactcaaatgtcaagaacaaaaagaagaacaactccaagagggtgtccatcggaaagagccacagggcgctacacgcgccaagagaagcggatctggcgtgaagcagaccctgaatttcgacctgctgaagctggctggcgacgtggaatccaacccaggcccttctagaggccatatgaccgagtacaagcccacggtgcgcctcgccacccgcgacgacgtccccagggccgtacgcaccctcgccgccgcgttcgccgactaccccgccacgcgccacaccgtcgatccggaccgccacatcgagcgggtcaccgagctgcaagaactcttcctcacgcgcgtcgggctcgacatcggcaaggtgtgggtcgcggacgacggcgccgcggtggcggtctggaccacgccggagagcgtcgaagcgggggcggtgttcgccgagatcggcccgcgcatggccgagttgagcggttcccggctggccgcgcagcaacagatggaaggcctcctggcgccgcaccggcccaaggagcccgcgtggttcctggccaccgtcggcgtctcgcccgaccaccagggcaagggtctgggcagcgccgtcgtgctccccggagtggaggcggccgagcgcgccggggtgcccgccttcctggagacctccgcgccccgcaacctccccttctacgagcggctcggcttcaccgtcaccgccgacgtcgaggtgcccgaaggaccgcgcacctggtgcatgacccgcaagcccggtgcctga

SEQ ID NO: 5846 - DNA, 4479 bp, Artificial Sequence
  Synthetic Polynucleotide
atggccttaccagtgaccgccttgctcctgccgctggccttgctgctccacgccgccaggccggaagtgcagctggttgaatctggcggaggactggttcaggctggcggatctctgagactgtcttgtgccgccagcggcagaacctttagcatgggctggtttagacaggcccctggcaaagagagagagttcgtcgccgccatcacatactctggcggcagcccttactacgccgactctgtgaagggcagattcaccatcagccgggacaacgccaagaacaccgtgtacctccagatgaacagcctgaagcctgaggacaccgccgtgtactactgcgccgccaatccaacatacggcagcgactggaacgccgagaattggggccagggaacccaagtgacagtgtctagcctcgaggacctgaagaacgtgttcccacctgaggtggccgtgttcgagcctagcgaggccgagatcagccacacccagaaagccaccctcgtgtgcctggctaccggcttctaccccgaccatgtggaactgtcttggtgggtcaacggcaaagaggtgcacagcggcgtgtctaccgacccccagccactgaaagaacagcccgccctgaacgacagccggtactgcctgagcagcagactgagagtgtccgccaccttctggcagaacccccggaaccacttcagatgccaggtgcagttctacggcctgagcgagaacgacgagtggacccaggacagagccaagcccgtgacccagatcgtgtctgccgaagcctggggcagagccgattgcggatcccaggtggtggataccaccaaggccgtgattaccctccagcctccttgggtgtccgtgttccaagaggaaaccgtgacactgcactgcgaggtgctgcatctgcctggctctagcagcacccagtggtttctgaatggcaccgccacacagaccagcacacccagctacagaatcaccagcgccagcgtgaacgacagcggcgagtacagatgccagagaggactgagcggcagaagcgaccccattcagctggaaatccacagaggctggctgctgctccaggtgtccagcagagtgtttacagagggcgagcccctggctctgagatgtcacgcctggaaggacaagctggtgtacaacgtgctgtactaccggaacggcaaagccttcaagttcttccactggaacagcaacctgaccatcctcaagaccaacatcagccacaacggcacctaccactgtagcggcatgggcaagcacagatacacaagcgccggcatcagcgtgaccgtgaaagagctgtttcccgctcctgtgctgaacgcctctgtgacaagtccactgctggaaggcaaccttgtgaccctgagctgcgagacaaagctgctgctgcaaagacctggcctccagctgtacttcagcttctacatgggcagcaagaccctgcggggcagaaataccagctccgagtaccagatcctgaccgccagaagagaggacagcggcctgtattggtgcgaagccgccaccgaggatggcaatgtgctgaagagaagccccgagctggaactccaggtgctgggactgcaactgcctacacctgtgtggttccacgtgctgttttacctggccgtgggcatcatgtttctggtcaacaccgtcctgtgggtcaccatcagaaaagagctgaagcggaagaagaagtgggacctcgaaatcagcctggactccggccacgaaaagaaagtgatctccagcctgcaagaggaccggcacctggaagaggaactgaagtgccaagagcagaaagaggaacagctgcaagaaggcgtgcaccgcaaagaacctcaaggcgctacaagggccaagcgatctggatctggagcaacaaacttctcactactcaaacaagcaggtgacgtggaggagaatcccgggcctactagtatggactggatttggcgcatccttttccttgtcggcgctgctaccggcgcgcattccgggcccgaagtgcaactggttgaatccggtggcggcctggtgcaagcaggcggatctctcagacttagctgtgccgcctccggcagaaccttcacaatgggatggtttaggcaggctccagggaaagagagagagttcgtcgccgccatctctctgtctcccacactggcctactacgccgactctgtgaaaggccggttcaccatctccagagataatgccaagaacaccgtggtgctgcaaatgaactctctgaaacccgaggatacagccctgtactattgtgccgctgaccggaagtccgtgatgagcatcagacccgattactggggacagggcacacaagtcacagtgtcctctacgcgtatccagaaccctgatcctgccgtgtaccagctgcgggatagcaagagcagcgacaagagcgtgtgtctgttcaccgacttcgacagccagaccaacgtgtcccagagcaaggactccgacgtgtacatcaccgataagaccgtgctggacatgcggagcatggacttcaagagcaactccgccgtggcctggtccaacaagtccgatttcgcctgcgccaacgccttcaacaacagcattatccccgaggacacattcttcccaagccccgagagcagctgcggtacccaagtggtggacacaacaaaagccgtcatcaccctgcaaccaccttgggtttcagtctttcaagaagagacagttaccctgcactgtgaagtcctgcacttgcccggaagcagctccacacagtggttcctcaacggcacagctacccagacaagcaccccttcctaccggatcacatctgcctccgtgaacgattccggcgagtataggtgtcagaggggcctgtctggccgcagcgatcctatccagcttgagattcatcgtggatggttgctcctccaagtgtcctccagggtgttcaccgaaggcgaacctctggcactgaggtgccatgcttggaaagataagctcgtctacaatgtcctctactaccgcaatggcaaggcttttaagttttttcattggaactctaatctcacgatcctgaaaacgaacatctcccacaatgggacataccactgctctggcatgggaaaacatcggtacacctctgccggcatctctgtcacagtcaaagaactgttccctgcaccagtcctgaacgcttccgtgacctctccactgcttgagggaaatctggtcaccctgtcctgcgaaactaagttgctgcttcagaggcccggactccagctctacttttcattctatatgggctctaagaccctgagaggccggaacaccagcagcgaatatcagattctgacagctcggcgcgaggactccgggctctattggtgtgaagctgctacagaggacggaaacgtgctgaaacggtcccctgaactggaactgcaagtcctgggccttcagctgccaactccagtgtggtttcatgtcctgttctatctggctgtggggattatgttccttgtgaataccgtgctctgggttaccattcggaaagaactcaagcgcaagaaaaaatgggatcttgagataagcctggacagcgggcatgagaagaaagtcatcagttcccttcaagaggacagacatctcgaagaggaactcaaatgtcaagaacaaaaagaagaacaactccaagagggtgtccatcggaaagagccacagggcgctacacgcgccaagagaagcggatctggcgtgaagcagaccctgaatttcgacctgctgaagctggctggcgacgtggaatccaacccaggcccttctagaggccatatgaccgagtacaagcccacggtgcgcctcgccacccgcgacgacgtccccagggccgtacgcaccctcgccgccgcgttcgccgactaccccgccacgcgccacaccgtcgatccggaccgccacatcgagcgggtcaccgagctgcaagaactcttcctcacgcgcgtcgggctcgacatcggcaaggtgtgggtcgcggacgacggcgccgcggtggcggtctggaccacgccggagagcgtcgaagcgggggcggtgttcgccgagatcggcccgcgcatggccgagttgagcggttcccggctggccgcgcagcaacagatggaaggcctcctggcgccgcaccggcccaaggagcccgcgtggttcctggccaccgtcggcgtctcgcccgaccaccagggcaagggtctgggcagcgccgtcgtgctccccggagtggaggcggccgagcgcgccggggtgcccgccttcctggagacctccgcgccccgcaacctccccttctacgagcggctcggcttcaccgtcaccgccgacgtcgaggtgcccgaaggaccgcgcacctggtgcatgacccgcaagcccggtgcctga

SEQ ID NO: 5847 - DNA, 2268 bp, Artificial Sequence
  Synthetic Polynucleotide
atggccttaccagtgaccgccttgctcctgccgctggccttgctgctccacgccgccaggccggcatgcgaagtgcagctgcttgaaagtggcggcggactgattcagcctggcggatctctgagactgagctgtgccgccagcggcttcaccttttctagccacgccatgacctgggtccgacaggcacctggaaaagggcttgaatgggtgtccgccatcagcggctctggcgattacacacactacgccgacagcgtgaagggcagattcaccatcagcagagacaacagcaagaacaccgtgtacctccagatgaacagcctgagagccgaggacagcgccgtgtattattgcgccaaggatgaggatggcggcagcctgcttggacacagaggacaaggcaccctggtcaccgtttcttccggtaccggcggaggcggatctggcggcggaggtagcggtggcggaggatctgaattcggatctctcgagcaggtggtggataccaccaaggccgtgattaccctccagcctccttgggtgtccgtgttccaagaggaaaccgtgacactgcactgcgaggtgctgcatctgcctggctctagcagcacccagtggtttctgaatggcaccgccacacagaccagcacacccagctacagaatcaccagcgccagcgtgaacgacagcggcgagtacagatgccagagaggactgagcggcagaagcgaccccattcagctggaaatccacagaggctggctgctgctccaggtgtccagcagagtgtttacagagggcgagcccctggctctgagatgtcacgcctggaaggacaagctggtgtacaacgtgctgtactaccggaacggcaaagccttcaagttcttccactggaacagcaacctgaccatcctcaagaccaacatcagccacaacggcacctaccactgtagcggcatgggcaagcacagatacacaagcgccggcatcagcgtgaccgtgaaagagctgtttcccgctcctgtgctgaacgcctctgtgacaagtccactgctggaaggcaaccttgtgaccctgagctgcgagacaaagctgctgctgcaaagacctggcctccagctgtacttcagcttctacatgggcagcaagaccctgcggggcagaaataccagctccgagtaccagatcctgaccgccagaagagaggacagcggcctgtattggtgcgaagccgccaccgaggatggcaatgtgctgaagagaagccccgagctggaactccaggtgctgggactgcaactgcctacacctgtgtggttccacgtgctgttttacctggccgtgggcatcatgtttctggtcaacaccgtcctgtgggtcaccatcagaaaagagctgaagcggaagaagaagtgggacctcgaaatcagcctggactccggccacgaaaagaaagtgatctccagcctgcaagaggaccggcacctggaagaggaactgaagtgccaagagcagaaagaggaacagctgcaagaaggcgtgcaccgcaaagaacctcaaggcgctacaagggccaagcgatctggatctggagcaacaaacttctcactactcaaacaagcaggtgacgtggaggagaatcccgggcctactagaggccatatgaccgagtacaagcccacggtgcgcctcgccacccgcgacgacgtccccagggccgtacgcaccctcgccgccgcgttcgccgactaccccgccacgcgccacaccgtcgatccggaccgccacatcgagcgggtcaccgagctgcaagaactcttcctcacgcgcgtcgggctcgacatcggcaaggtgtgggtcgcggacgacggcgccgcggtggcggtctggaccacgccggagagcgtcgaagcgggggcggtgttcgccgagatcggcccgcgcatggccgagttgagcggttcccggctggccgcgcagcaacagatggaaggcctcctggcgccgcaccggcccaaggagcccgcgtggttcctggccaccgtcggcgtctcgcccgaccaccagggcaagggtctgggcagcgccgtcgtgctccccggagtggaggcggccgagcgcgccggggtgcccgccttcctggagacctccgcgccccgcaacctccccttctacgagcggctcggcttcaccgtcaccgccgacgtcgaggtgcccgaaggaccgcgcacctggtgcatgacccgcaagcccggtgcctga

SEQ ID NO: 5848 - DNA, 1881 bp, Artificial Sequence; identical to SEQ ID NO: 5816
  Synthetic Polynucleotide

SEQ ID NO: 5849 - DNA, 1881 bp, Artificial Sequence; identical to SEQ ID NO: 5817
  Synthetic Polynucleotide

SEQ ID NO: 5850 - DNA, 1503 bp, Artificial Sequence; identical to SEQ ID NO: 5818
  Synthetic Polynucleotide

SEQ ID NO: 5851 - DNA, 1503 bp, Artificial Sequence; identical to SEQ ID NO: 5819
  Synthetic Polynucleotide

SEQ ID NO: 5852 - DNA, 1503 bp, Artificial Sequence; identical to SEQ ID NO: 5820
  Synthetic Polynucleotide

SEQ ID NO: 5853 - DNA, 1509 bp, Artificial Sequence; identical to SEQ ID NO: 5821
  Synthetic Polynucleotide

SEQ ID NO: 5854 - DNA, 1533 bp, Artificial Sequence; identical to SEQ ID NO: 5822
  Synthetic Polynucleotide

SEQ ID NO: 5855 - DNA, 1521 bp, Artificial Sequence; identical to SEQ ID NO: 5823
  Synthetic Polynucleotide

SEQ ID NO: 5856 - DNA, 1506 bp, Artificial Sequence; identical to SEQ ID NO: 5824
  Synthetic Polynucleotide

SEQ ID NO: 5857 - DNA, 1521 bp, Artificial Sequence; identical to SEQ ID NO: 5825
  Synthetic Polynucleotide

SEQ ID NO: 5858 - DNA, 1323 bp, Artificial Sequence; identical to SEQ ID NO: 5826
  Synthetic Polynucleotide

SEQ ID NO: 5859 - DNA, 1416 bp, Artificial Sequence; identical to SEQ ID NO: 5827
  Synthetic Polynucleotide

SEQ ID NO: 5860 - DNA, 1419 bp, Artificial Sequence; identical to SEQ ID NO: 5828
  Synthetic Polynucleotide

SEQ ID NO: 5861 - DNA, 2070 bp, Artificial Sequence; identical to SEQ ID NO: 5829
  Synthetic Polynucleotide

SEQ ID NO: 5862 - DNA, 1710 bp, Artificial Sequence; identical to SEQ ID NO: 5830
  Synthetic Polynucleotide

SEQ ID NO: 5863 - DNA, 1308 bp, Artificial Sequence; identical to SEQ ID NO: 5831
  Synthetic Polynucleotide

SEQ ID NO: 5864 - DNA, 1233 bp, Artificial Sequence; identical to SEQ ID NO: 5832
  Synthetic Polynucleotide

SEQ ID NO: 5865 - DNA, 2007 bp, Artificial Sequence; identical to SEQ ID NO: 5833
  Synthetic Polynucleotide

SEQ ID NO: 5866 - DNA, 2007 bp, Artificial Sequence; identical to SEQ ID NO: 5834
  Synthetic Polynucleotide

SEQ ID NO: 5867 - DNA, 2742 bp, Artificial Sequence; identical to SEQ ID NO: 2025
  Synthetic Polynucleotide

SEQ ID NO: 5868 - DNA, 2898 bp, Artificial Sequence; identical to SEQ ID NO: 2026
  Synthetic Polynucleotide

SEQ ID NO: 5869 - DNA, 3345 bp, Artificial Sequence; identical to SEQ ID NO: 2027
  Synthetic Polynucleotide

SEQ ID NO: 5870 - DNA, 3504 bp, Artificial Sequence; identical to SEQ ID NO: 2028
  Synthetic Polynucleotide

SEQ ID NO: 5871 - DNA, 3381 bp, Artificial Sequence; identical to SEQ ID NO: 2029
  Synthetic Polynucleotide

SEQ ID NO: 5872 - DNA, 3792 bp, Artificial Sequence; identical to SEQ ID NO: 2030
  Synthetic Polynucleotide

SEQ ID NO: 5873 - DNA, 4203 bp, Artificial Sequence; identical to SEQ ID NO: 2031
  Synthetic Polynucleotide

SEQ ID NO: 5874 - DNA, 3402 bp, Artificial Sequence; identical to SEQ ID NO: 2032
  Synthetic Polynucleotide

SEQ ID NO: 5875 - DNA, 3426 bp, Artificial Sequence; identical to SEQ ID NO: 2033
  Synthetic Polynucleotide

SEQ ID NO: 5876 - DNA, 3837 bp, Artificial Sequence; identical to SEQ ID NO: 2034
  Synthetic Polynucleotide

SEQ ID NO: 5877 - DNA, 4248 bp, Artificial Sequence; identical to SEQ ID NO: 2035
  Synthetic Polynucleotide

SEQ ID NO: 5878 - DNA, 3447 bp, Artificial Sequence; identical to SEQ ID NO: 2036
  Synthetic Polynucleotide

SEQ ID NO: 5879 - DNA, 1758 bp, Artificial Sequence; identical to SEQ ID NO: 2037
  Synthetic Polynucleotide

SEQ ID NO: 5880 - DNA, 1371 bp, Artificial Sequence
  Synthetic Polynucleotide
atggccttaccagtgaccgccttgctcctgccgctggccttgctgctccacgccgccaggccggacatccagatgacacagagccctagcagcctgtctgccagcgtgggagacagagtgaccatcacatgcaaggccagcgaccacatcaacaactggctggcctggtatcagcagaagcctggacaggcccctaagctgctgatctacggcgctaccacactggaaacaggcgtgcccagcagattttctggcagcggctctggcaccgactacaccctgacaatatccagcctccagcctgaggacttcgccacctactactgtcagcagagctggaacaccccttggacattcggccagggcaccaagctggaaatcaagagaggcggaggcggaagtggaggcggaggatctggcggcggaggctctcaagttcagcttcaacagcctggcgctgagctggtcaaacctggcgcttctgtgaagatgagctgcaaagccagcggctacgccttcagcagctactggatcaactggatgaagcagaaacccggccagggactcgaatggatcggccaaatctatcccggcgacggcgacaccaactacaacggcaagttcaagggcagagccacactgaccgccgatacctctagcagcacagcctacatgcagctgagcagcctgaccagcgaagatagcgccgtgtacttctgtgcccggtccatcacaacagtcgtgggctgcgctatggactattggggccagggaacaagcgtgaccgtgtctagtacgcgtacaacacctggcgagagaagtagcctgcctgccttctatcctggcaccagcggctcttgttctggctgtggatctctgagcctgcctctgctggctggactggttgctgctgatgctgtggcctctctgctgattgtgggagccgtgttcctgtgcgccagacctagaagaagccccgctcaagaggacggcaaggtgtacatcaacatgcccggcagaggaagcactagtagagtgaagttcagcagaagcgccgacgcccctgcctaccagcagggacagaaccaactgtacaacgagctgaacctgggcagacgggaagagtacgacgtgctggacaagcggagaggcagggaccctgagatgggcggaaagccccagcggagaaagaacccccaggaaggactgtataacgaactccagaaagacaagatggccgaagcctacagcgagatcggcatgaagggcgagcggagaagaggcaagggccacgatggcctgtaccagggcctgagcaccgccaccaaggacacctatgacgccctgcacatgcaggccctgcctccaaga

SEQ ID NO: 5881 - DNA, 1371 bp, Artificial Sequence
  Synthetic Polynucleotide
atggccttaccagtgaccgccttgctcctgccgctggccttgctgctccacgccgccaggccggagatcgtgctgacacagagccctgccaccctgtctctgagccctggcgaaagagccaccctgagctgtagagccagccagagcgtgtccagctacctggcctggtatcagcagaagcccggccaggctccccggctgctgatctacgatgccagcaatagagccaccggcatccccgccagattttccggctctggcagcggcaccgacttcaccctgaccatcagctccctggaacccgaggacttcgccgtgtactactgccagcagcggagcaactggcccatcacattcggccagggcacccggctggaaatcaaaggcggaggcggaagtggaggcggaggatctggcggcggaggctctgaagtgcagctggtggaatcaggcggcggactggtgcagcctggcagaagcctgagactgagctgtgccgccagcggcttcaccttcaacgactacgccatgcactgggtgcgccaggcccctggaaaaggactggaatgggtgtccacaatcagctggaacagcggcagcatcggctacgccgatagcgtgaagggccggttcaccatcagccgggacaacgccaagaagtccctgtacctccagatgaacagcctgcgggccgaggacacagccctgtactattgcgccaaggacatccagtacggcaactactactacggcatggacgtgtggggccagggaaccaccgtgaccgtgtcatctacgcgtacaacacctggcgagagaagtagcctgcctgccttctatcctggcaccagcggctcttgttctggctgtggatctctgagcctgcctctgctggctggactggttgctgctgatgctgtggcctctctgctgattgtgggagccgtgttcctgtgcgccagacctagaagaagccccgctcaagaggacggcaaggtgtacatcaacatgcccggcagaggaagcactagtagagtgaagttcagcagaagcgccgacgcccctgcctaccagcagggacagaaccaactgtacaacgagctgaacctgggcagacgggaagagtacgacgtgctggacaagcggagaggcagggaccctgagatgggcggaaagccccagcggagaaagaacccccaggaaggactgtataacgaactccagaaagacaagatggccgaagcctacagcgagatcggcatgaagggcgagcggagaagaggcaagggccacgatggcctgtaccagggcctgagcaccgccaccaaggacacctatgacgccctgcacatgcaggccctgcctccaaga

SEQ ID NO: 5882 - DNA, 993 bp, Artificial Sequence
  Synthetic Polynucleotide
atggccttaccagtgaccgccttgctcctgccgctggccttgctgctccacgccgccaggccggaagtgcagctggttgaatctggcggaggactggttcaggctggcggatctctgagactgtcttgtgccgccagcggcagaacctttagcatgggctggtttagacaggcccctggcaaagagagagagttcgtcgccgccatcacatactctggcggcagcccttactacgccgactctgtgaagggcagattcaccatcagccgggacaacgccaagaacaccgtgtacctccagatgaacagcctgaagcctgaggacaccgccgtgtactactgcgccgccaatccaacatacggcagcgactggaacgccgagaattggggccagggaacccaagtgacagtgtctagcacgcgtacaacacctggcgagagaagtagcctgcctgccttctatcctggcaccagcggctcttgttctggctgtggatctctgagcctgcctctgctggctggactggttgctgctgatgctgtggcctctctgctgattgtgggagccgtgttcctgtgcgccagacctagaagaagccccgctcaagaggacggcaaggtgtacatcaacatgcccggcagaggaagcactagtagagtgaagttcagcagaagcgccgacgcccctgcctaccagcagggacagaaccaactgtacaacgagctgaacctgggcagacgggaagagtacgacgtgctggacaagcggagaggcagggaccctgagatgggcggaaagccccagcggagaaagaacccccaggaaggactgtataacgaactccagaaagacaagatggccgaagcctacagcgagatcggcatgaagggcgagcggagaagaggcaagggccacgatggcctgtaccagggcctgagcaccgccaccaaggacacctatgacgccctgcacatgcaggccctgcctccaaga

SEQ ID NO: 5883 - DNA, 993 bp, Artificial Sequence
  Synthetic Polynucleotide
atggccttaccagtgaccgccttgctcctgccgctggccttgctgctccacgccgccaggccgcagctccagttgcaagagagcggccctggcttggtaaaaccttccgagacccttagcctcacatgcacggttagtgggggcagcatttcctcaggtgattactattggggatggattcggcaacccccgggtaaaggattggagtggattggtcatatttattatagtggagcgacgtactacaacccaagtctcaaatccagggttacaatatccgtcgatacgagcaggaaccaattcagcttgaaactttctagtgtcaccgcagcagacacagccgtctattactgtacgcgggatgactccagtaattggcggtcccgagggcaagggacactggtcacggtctcctcaacgcgtacaacacctggcgagagaagtagcctgcctgccttctatcctggcaccagcggctcttgttctggctgtggatctctgagcctgcctctgctggctggactggttgctgctgatgctgtggcctctctgctgattgtgggagccgtgttcctgtgcgccagacctagaagaagccccgctcaagaggacggcaaggtgtacatcaacatgcccggcagaggaagcactagtagagtgaagttcagcagaagcgccgacgcccctgcctaccagcagggacagaaccaactgtacaacgagctgaacctgggcagacgggaagagtacgacgtgctggacaagcggagaggcagggaccctgagatgggcggaaagccccagcggagaaagaacccccaggaaggactgtataacgaactccagaaagacaagatggccgaagcctacagcgagatcggcatgaagggcgagcggagaagaggcaagggccacgatggcctgtaccagggcctgagcaccgccaccaaggacacctatgacgccctgcacatgcaggccctgcctccaaga

SEQ ID NO: 5884 - DNA, 993 bp, Artificial Sequence
  Synthetic Polynucleotide
atggccttaccagtgaccgccttgctcctgccgctggccttgctgctccacgccgccaggccgcagctccagctgcaagagtctggacctggcctggtcaagcctagcgagacactgagcctgacctgtaccgtgtccggcgatagcatcagcagcggcgattactactggggctggatcagacagcctcctggcaaaggactggaatggatcggccacatctactacagcggcgtgacctactacaaccccagcctgaagtccagagtgaccatcagcgtggacaccagccggaaccagttctccctgaagctgtctagcgtgacagccgccgataccgccgtgtactactgcaccagagaggacagcagcaactggcggagtagaggccagggaacactggtcacagttagctctacgcgtacaacacctggcgagagaagtagcctgcctgccttctatcctggcaccagcggctcttgttctggctgtggatctctgagcctgcctctgctggctggactggttgctgctgatgctgtggcctctctgctgattgtgggagccgtgttcctgtgcgccagacctagaagaagccccgctcaagaggacggcaaggtgtacatcaacatgcccggcagaggaagcactagtagagtgaagttcagcagaagcgccgacgcccctgcctaccagcagggacagaaccaactgtacaacgagctgaacctgggcagacgggaagagtacgacgtgctggacaagcggagaggcagggaccctgagatgggcggaaagccccagcggagaaagaacccccaggaaggactgtataacgaactccagaaagacaagatggccgaagcctacagcgagatcggcatgaagggcgagcggagaagaggcaagggccacgatggcctgtaccagggcctgagcaccgccaccaaggacacctatgacgccctgcacatgcaggccctgcctccaaga

SEQ ID NO: 5885 - DNA, 999 bp, Artificial Sequence
  Synthetic Polynucleotide
atggccttaccagtgaccgccttgctcctgccgctggccttgctgctccacgccgccaggccggaagttcagctgcaagagtctggcggaggactggttcaacctggcggaagcctgagactgtcttgtgccgcctctggcagaaccttcagcagcctgttcatgggctggttcagacaggcccctggcaaagagagagaactggtcgccgccatcagccggtacagcctgtacacctactacgccgacagcgtgaagggcagattcaccatcagcgccgacaacgccaagaacgccgtgtacctccagatgaacagcctgaagccagaggacacagccgtgtactactgcgccagcaaacttgagtacaccagcaacgactacgacagctggggccagggaacccaagtgacagtctcttctacgcgtacaacacctggcgagagaagtagcctgcctgccttctatcctggcaccagcggctcttgttctggctgtggatctctgagcctgcctctgctggctggactggttgctgctgatgctgtggcctctctgctgattgtgggagccgtgttcctgtgcgccagacctagaagaagccccgctcaagaggacggcaaggtgtacatcaacatgcccggcagaggaagcactagtagagtgaagttcagcagaagcgccgacgcccctgcctaccagcagggacagaaccaactgtacaacgagctgaacctgggcagacgggaagagtacgacgtgctggacaagcggagaggcagggaccctgagatgggcggaaagccccagcggagaaagaacccccaggaaggactgtataacgaactccagaaagacaagatggccgaagcctacagcgagatcggcatgaagggcgagcggagaagaggcaagggccacgatggcctgtaccagggcctgagcaccgccaccaaggacacctatgacgccctgcacatgcaggccctgcctccaaga

SEQ ID NO: 5886 - DNA, 1023 bp, Artificial Sequence
  Synthetic Polynucleotide
atggccttaccagtgaccgccttgctcctgccgctggccttgctgctccacgccgccaggccggaagtgcagctggttgaatctggcggaggactggttcagcctggcggatctctgagactgtcttgtgccgcctctggcttcgccagcgactactatatcatcggctggttcagacaggcccctggcaaagagagagagggcgtcagctgtatcagcagcagatacgccaacaccaactacgccgacagcgtgaagggcagattcaccatcagccgggacaacgccaagaacaccgtgtacctccagatgaacagcctgaagcctgaggacaccgccgtgtactactgtgccgccgacaccagaagatacacctgtcctgacattgccaccatgcaccggaacttcgattcttggggccagggcacactggtcaccgtttcttctacgcgtacaacacctggcgagagaagtagcctgcctgccttctatcctggcaccagcggctcttgttctggctgtggatctctgagcctgcctctgctggctggactggttgctgctgatgctgtggcctctctgctgattgtgggagccgtgttcctgtgcgccagacctagaagaagccccgctcaagaggacggcaaggtgtacatcaacatgcccggcagaggaagcactagtagagtgaagttcagcagaagcgccgacgcccctgcctaccagcagggacagaaccaactgtacaacgagctgaacctgggcagacgggaagagtacgacgtgctggacaagcggagaggcagggaccctgagatgggcggaaagccccagcggagaaagaacccccaggaaggactgtataacgaactccagaaagacaagatggccgaagcctacagcgagatcggcatgaagggcgagcggagaagaggcaagggccacgatggcctgtaccagggcctgagcaccgccaccaaggacacctatgacgccctgcacatgcaggccctgcctccaaga

SEQ ID NO: 5887 - DNA, 1011 bp, Artificial Sequence
  Synthetic Polynucleotide
atggccttaccagtgaccgccttgctcctgccgctggccttgctgctccacgccgccaggccggaagtgcaactggtggaatctggaggctctctggtgcagccagggggaagcctgagactgtcttgtgccgcttccggcttcaccttcgacgactacgccatgagctgggtgcgccaggtgccaggcaaaggcctggaatgggtgtccagcatcaactggagcggcacccacaccgattacgccgactccgtgaaaggcagattcacaatcagcagaaacaacgccaacaataccctgtacctgcagatgaactccctgaagtctgaggatacagcagtgtattattgcgccaagaactggcgggacgccggcaccacttggtttgagaaaagcggctctgccggacagggaacccaagtgacagtgtcctccacgcgtacaacacctggcgagagaagtagcctgcctgccttctatcctggcaccagcggctcttgttctggctgtggatctctgagcctgcctctgctggctggactggttgctgctgatgctgtggcctctctgctgattgtgggagccgtgttcctgtgcgccagacctagaagaagccccgctcaagaggacggcaaggtgtacatcaacatgcccggcagaggaagcactagtagagtgaagttcagcagaagcgccgacgcccctgcctaccagcagggacagaaccaactgtacaacgagctgaacctgggcagacgggaagagtacgacgtgctggacaagcggagaggcagggaccctgagatgggcggaaagccccagcggagaaagaacccccaggaaggactgtataacgaactccagaaagacaagatggccgaagcctacagcgagatcggcatgaagggcgagcggagaagaggcaagggccacgatggcctgtaccagggcctgagcaccgccaccaaggacacctatgacgccctgcacatgcaggccctgcctccaaga

SEQ ID NO: 5888 - DNA, 996 bp, Artificial Sequence
  Synthetic Polynucleotide
atggccttaccagtgaccgccttgctcctgccgctggccttgctgctccacgccgccaggccggaggtgcagctggttgaatctggcggaggactggttcagcctggcggatctctgagactgtcttgtgccgccagcggcttcaacatcaaggatacctgtatcggctgggttcgcagagcccctggcaaagaggaagaactggtcgccaaaatctgcaagtacagcggccacaccagatacgccgacagcgtgaagggcagattcaccatcagcgccgacaccagcaagaacaccgcctacctccagatgaacagcctgagagccgaggacaccgccgtgtactattgtgccgctgtgtccgtcagagatgggcactacaattactggggccagggcaccaccgtgaccgtttcttcaacgcgtacaacacctggcgagagaagtagcctgcctgccttctatcctggcaccagcggctcttgttctggctgtggatctctgagcctgcctctgctggctggactggttgctgctgatgctgtggcctctctgctgattgtgggagccgtgttcctgtgcgccagacctagaagaagccccgctcaagaggacggcaaggtgtacatcaacatgcccggcagaggaagcactagtagagtgaagttcagcagaagcgccgacgcccctgcctaccagcagggacagaaccaactgtacaacgagctgaacctgggcagacgggaagagtacgacgtgctggacaagcggagaggcagggaccctgagatgggcggaaagccccagcggagaaagaacccccaggaaggactgtataacgaactccagaaagacaagatggccgaagcctacagcgagatcggcatgaagggcgagcggagaagaggcaagggccacgatggcctgtaccagggcctgagcaccgccaccaaggacacctatgacgccctgcacatgcaggccctgcctccaaga

SEQ ID NO: 5889 - DNA, 1011 bp, Artificial Sequence
  Synthetic Polynucleotide
atggccttaccagtgaccgccttgctcctgccgctggccttgctgctccacgccgccaggccgggctctgacctgggcatcaagctgctgttcgccgctgccaagggccaggacgacgaagtgcggattctgctggctgctggggccgacgtgaacgccaaggatttcgagggctacacccccctgcacgtggccgcctatgatggacacctggaaatcgtggaagtgctgctgaaggctggcgctgatgtgaatgccaaagacagccagggccggacccctctgcatgaagccgcctacagcggccatctggaaattgtggaagtgctgctgaaagccggggcagacgtgaacgctcaggacgacgctggcgagacaccagccgatctggctgcagcttggggccacgaagatatcgccgaggtgctgcagaagacgcgtacaacacctggcgagagaagtagcctgcctgccttctatcctggcaccagcggctcttgttctggctgtggatctctgagcctgcctctgctggctggactggttgctgctgatgctgtggcctctctgctgattgtgggagccgtgttcctgtgcgccagacctagaagaagccccgctcaagaggacggcaaggtgtacatcaacatgcccggcagaggaagcactagtagagtgaagttcagcagaagcgccgacgcccctgcctaccagcagggacagaaccaactgtacaacgagctgaacctgggcagacgggaagagtacgacgtgctggacaagcggagaggcagggaccctgagatgggcggaaagccccagcggagaaagaacccccaggaaggactgtataacgaactccagaaagacaagatggccgaagcctacagcgagatcggcatgaagggcgagcggagaagaggcaagggccacgatggcctgtaccagggcctgagcaccgccaccaaggacacctatgacgccctgcacatgcaggccctgcctccaaga

SEQ ID NO: 5890 - DNA, 813 bp, Artificial Sequence
  Synthetic Polynucleotide
atggccttaccagtgaccgccttgctcctgccgctggccttgctgctccacgccgccaggccggtggacaacaagttcaacaaagagcggtacagcgcctactacgagatttggcaactgcccaacctgaacgtgcggcagaaggccgccttcatcggatctctgcaggacgaccctagccagagcgccaatctgctggccgaggccaagaagctgaacgacgcccaggcccctaaaacgcgtacaacacctggcgagagaagtagcctgcctgccttctatcctggcaccagcggctcttgttctggctgtggatctctgagcctgcctctgctggctggactggttgctgctgatgctgtggcctctctgctgattgtgggagccgtgttcctgtgcgccagacctagaagaagccccgctcaagaggacggcaaggtgtacatcaacatgcccggcagaggaagcactagtagagtgaagttcagcagaagcgccgacgcccctgcctaccagcagggacagaaccaactgtacaacgagctgaacctgggcagacgggaagagtacgacgtgctggacaagcggagaggcagggaccctgagatgggcggaaagccccagcggagaaagaacccccaggaaggactgtataacgaactccagaaagacaagatggccgaagcctacagcgagatcggcatgaagggcgagcggagaagaggcaagggccacgatggcctgtaccagggcctgagcaccgccaccaaggacacctatgacgccctgcacatgcaggccctgcctccaaga

SEQ ID NO: 5891 - DNA, 906 bp, Artificial Sequence
  Synthetic Polynucleotide
atggccttaccagtgaccgccttgctcctgccgctggccttgctgctccacgccgccaggccgctgccagccccgaagaatttggtcgtttcccgtgtcactgaggactctgcacgtctgagctggaccgcaccggacgcggcgttcgacagctttgcaatcggctactgggagtgggatgatgacggcgaggccattgtgctgaccgttccgggtagcgagcgcagctacgatctgaccggtctgaagccgggtacggaatatccggtgtatattgcgggcgtgaagggtggccagtggagcttcccgctgagcgcgatctttaccaccacgcgtacaacacctggcgagagaagtagcctgcctgccttctatcctggcaccagcggctcttgttctggctgtggatctctgagcctgcctctgctggctggactggttgctgctgatgctgtggcctctctgctgattgtgggagccgtgttcctgtgcgccagacctagaagaagccccgctcaagaggacggcaaggtgtacatcaacatgcccggcagaggaagcactagtagagtgaagttcagcagaagcgccgacgcccctgcctaccagcagggacagaaccaactgtacaacgagctgaacctgggcagacgggaagagtacgacgtgctggacaagcggagaggcagggaccctgagatgggcggaaagccccagcggagaaagaacccccaggaaggactgtataacgaactccagaaagacaagatggccgaagcctacagcgagatcggcatgaagggcgagcggagaagaggcaagggccacgatggcctgtaccagggcctgagcaccgccaccaaggacacctatgacgccctgcacatgcaggccctgcctccaaga

SEQ ID NO: 5892 - DNA, 909 bp, Artificial Sequence
  Synthetic Polynucleotide
atggccttaccagtgaccgccttgctcctgccgctggccttgctgctccacgccgccaggccgatgctgcccgctcctaagaatctggtggtgtccagaatcaccgaggacagcgccagactgtcttggacagctcctgatgccgccttcgacagcttccccatccggtacatcgagacactgatctggggcgaagccatctggctggatgtgcctggaagcgagagaagctacgacctgaccggactgaagcctggcacagagtatgccgtggtcatcaccggcgtgaaaggcggcagattctctagccctctggtggcctctttcaccaccacgcgtacaacacctggcgagagaagtagcctgcctgccttctatcctggcaccagcggctcttgttctggctgtggatctctgagcctgcctctgctggctggactggttgctgctgatgctgtggcctctctgctgattgtgggagccgtgttcctgtgcgccagacctagaagaagccccgctcaagaggacggcaaggtgtacatcaacatgcccggcagaggaagcactagtagagtgaagttcagcagaagcgccgacgcccctgcctaccagcagggacagaaccaactgtacaacgagctgaacctgggcagacgggaagagtacgacgtgctggacaagcggagaggcagggaccctgagatgggcggaaagccccagcggagaaagaacccccaggaaggactgtataacgaactccagaaagacaagatggccgaagcctacagcgagatcggcatgaagggcgagcggagaagaggcaagggccacgatggcctgtaccagggcctgagcaccgccaccaaggacacctatgacgccctgcacatgcaggccctgcctccaaga

SEQ ID NO: 5893 - DNA, 1560 bp, Artificial Sequence
  Synthetic Polynucleotide
atggccttaccagtgaccgccttgctcctgccgctggccttgctgctccacgccgccaggccgatggccttaccagtgaccgccttgctcctgccgctggccttgctgctccacgccgccaggccgctgttcaatcaagaggtgcagatccctctgaccgagagctactgtggcccctgtcctaagaactggatctgctacaagaacaactgctaccagttcttcgacgagagcaagaattggtacgagagccaggccagctgcatgagccagaatgccagcctgctgaaggtgtacagcaaagaggaccaggacctgctgaaactggtcaagagctaccactggatgggccttgtgcacatccccaccaatggctcttggcagtgggaggacggcagcattctgagccctaacctgctgaccatcatcgagatgcagaagggcgactgcgccctgtacgccagcagctttaagggctacatcgagaattgcagcaccccgaacacctacatctgtatgcagagaaccgttggcggaggcggaagtggaggcggaggatctggcggcggaggctctgacctctttaatcaagaagtccagattccactcaccgaatcctactgcggaccttgtccaaaaaattggatttgttataagaacaactgttatcaattctttgatgagtctaaaaattggtatgagtcccaggcttcctgcatgtctcagaacgcttctctgctgaaagtctactctaaagaagatcaggatctcctgaagctcgtcaagtcttatcattggatggggctcgtccacattcctaccaacggaagctggcaatgggaagatggctccatcctgtctccaaatctgctcacgattattgaaatgcagaaaggggattgtgctctctacgccagctccttcaagggatatattgagaactgtagcacgcccaatacttatatctgtatgcaacggaccgtgacgcgtacaacacctggcgagagaagtagcctgcctgccttctatcctggcaccagcggctcttgttctggctgtggatctctgagcctgcctctgctggctggactggttgctgctgatgctgtggcctctctgctgattgtgggagccgtgttcctgtgcgccagacctagaagaagccccgctcaagaggacggcaaggtgtacatcaacatgcccggcagaggaagcactagtagagtgaagttcagcagaagcgccgacgcccctgcctaccagcagggacagaaccaactgtacaacgagctgaacctgggcagacgggaagagtacgacgtgctggacaagcggagaggcagggaccctgagatgggcggaaagccccagcggagaaagaacccccaggaaggactgtataacgaactccagaaagacaagatggccgaagcctacagcgagatcggcatgaagggcgagcggagaagaggcaagggccacgatggcctgtaccagggcctgagcaccgccaccaaggacacctatgacgccctgcacatgcaggccctgcctccaaga

SEQ ID NO: 5894 - DNA, 1200 bp, Artificial Sequence
  Synthetic Polynucleotide
atggccttaccagtgaccgccttgctcctgccgctggccttgctgctccacgccgccaggccgatggagctgactgatttgctcctggcggccatgcttcttgcagtggcaagactaactctgtccagccccgtagctcctgcctgtgaccccagactcctaaataaactgctgcgtgactcccacctccttcacagccgactgagtcagtgtcccgacgtggaccctttgtctatccctgttctgctgcctgctgtggactttagcctgggagaatggaaaacccagacggaacagagcaaggcacaggacattctaggggcagtgtcccttctactggagggagtgatggcagcacgaggacagttggaaccctcctgcctctcatccctcctgggacagctttctgggcaggttcgcctcctcttgggggccctgcagggcctcctaggaacccagcttcctctacagggcaggaccacagctcacaaggaccccaatgccctcttcttgagcttgcaacaactgcttcggggaaaggtgcgcttcctgcttctggtagaaggtcccaccctctgtgtcagacggaccctgccaaccacagctgtcccaagcagtacttctacgcgtacaacacctggcgagagaagtagcctgcctgccttctatcctggcaccagcggctcttgttctggctgtggatctctgagcctgcctctgctggctggactggttgctgctgatgctgtggcctctctgctgattgtgggagccgtgttcctgtgcgccagacctagaagaagccccgctcaagaggacggcaaggtgtacatcaacatgcccggcagaggaagcactagtagagtgaagttcagcagaagcgccgacgcccctgcctaccagcagggacagaaccaactgtacaacgagctgaacctgggcagacgggaagagtacgacgtgctggacaagcggagaggcagggaccctgagatgggcggaaagccccagcggagaaagaacccccaggaaggactgtataacgaactccagaaagacaagatggccgaagcctacagcgagatcggcatgaagggcgagcggagaagaggcaagggccacgatggcctgtaccagggcctgagcaccgccaccaaggacacctatgacgccctgcacatgcaggccctgcctccaaga

SEQ ID NO: 5895 - DNA, 798 bp, Artificial Sequence
  Synthetic Polynucleotide
atggccttaccagtgaccgccttgctcctgccgctggccttgctgctccacgccgccaggccgatggaccccgacctggaaatcagagccgccttcctgcggcagagaaacacagccctgagaacagaggtggccgagctggaacaagaggtgcagcggctggaaaacgaggtgtcccagtacgagacaagatacggccctctcggaggcggaaaaacgcgtacgcgtacaacacctggcgagagaagtagcctgcctgccttctatcctggcaccagcggctcttgttctggctgtggatctctgagcctgcctctgctggctggactggttgctgctgatgctgtggcctctctgctgattgtgggagccgtgttcctgtgcgccagacctagaagaagccccgctcaagaggacggcaaggtgtacatcaacatgcccggcagaggaagcactagtagagtgaagttcagcagaagcgccgacgcccctgcctaccagcagggacagaaccaactgtacaacgagctgaacctgggcagacgggaagagtacgacgtgctggacaagcggagaggcagggaccctgagatgggcggaaagccccagcggagaaagaacccccaggaaggactgtataacgaactccagaaagacaagatggccgaagcctacagcgagatcggcatgaagggcgagcggagaagaggcaagggccacgatggcctgtaccagggcctgagcaccgccaccaaggacacctatgacgccctgcacatgcaggccctgcctccaaga

SEQ ID NO: 5896 - DNA, 723 bp, Artificial Sequence
  Synthetic Polynucleotide
atggccttaccagtgaccgccttgctcctgccgctggccttgctgctccacgccgccaggccggaagttgctgccctcgagaaggaggtagcagctttggaaaaagaagtcgcagcccttgagaaagaagttgcggctctggagaagacgcgtacaacacctggcgagagaagtagcctgcctgccttctatcctggcaccagcggctcttgttctggctgtggatctctgagcctgcctctgctggctggactggttgctgctgatgctgtggcctctctgctgattgtgggagccgtgttcctgtgcgccagacctagaagaagccccgctcaagaggacggcaaggtgtacatcaacatgcccggcagaggaagcactagtagagtgaagttcagcagaagcgccgacgcccctgcctaccagcagggacagaaccaactgtacaacgagctgaacctgggcagacgggaagagtacgacgtgctggacaagcggagaggcagggaccctgagatgggcggaaagccccagcggagaaagaacccccaggaaggactgtataacgaactccagaaagacaagatggccgaagcctacagcgagatcggcatgaagggcgagcggagaagaggcaagggccacgatggcctgtaccagggcctgagcaccgccaccaaggacacctatgacgccctgcacatgcaggccctgcctccaaga

SEQ ID NO: 5897 - DNA, 1497 bp, Artificial Sequence
  Synthetic Polynucleotide
atggccttaccagtgaccgccttgctcctgccgctggccttgctgctccacgccgccaggccgctgttcaatcaagaggtgcagatccctctgaccgagagctactgtggcccctgtcctaagaactggatctgctacaagaacaactgctaccagttcttcgacgagagcaagaattggtacgagagccaggccagctgcatgagccagaatgccagcctgctgaaggtgtacagcaaagaggaccaggacctgctgaaactggtcaagagcgcccactggatgggccttgtgcacatccccaccaatggctcttggcagtgggaggacggcagcattctgagccctaacctgctgaccatcatcgagatgcagaagggcgactgcgccctgtacgccagcagctttaagggcttcatcgagaattgcagcaccccgaacacctacatctgtatgcagagaaccgttggcggaggcggaagtggaggcggaggatctggcggcggaggctctgacctctttaatcaagaagtccagattccactcaccgaatcctactgcggaccttgtccaaaaaattggatttgttataagaacaactgttatcaattctttgatgagtctaaaaattggtatgagtcccaggcttcctgcatgtctcagaacgcttctctgctgaaagtctactctaaagaagatcaggatctcctgaagctcgtcaagtctgcccattggatggggctcgtccacattcctaccaacggaagctggcaatgggaagatggctccatcctgtctccaaatctgctcacgattattgaaatgcagaaaggggattgtgctctctacgccagctccttcaagggatttattgagaactgtagcacgcccaatacttatatctgtatgcaacggaccgtgacgcgtacaacacctggcgagagaagtagcctgcctgccttctatcctggcaccagcggctcttgttctggctgtggatctctgagcctgcctctgctggctggactggttgctgctgatgctgtggcctctctgctgattgtgggagccgtgttcctgtgcgccagacctagaagaagccccgctcaagaggacggcaaggtgtacatcaacatgcccggcagaggaagcactagtagagtgaagttcagcagaagcgccgacgcccctgcctaccagcagggacagaaccaactgtacaacgagctgaacctgggcagacgggaagagtacgacgtgctggacaagcggagaggcagggaccctgagatgggcggaaagccccagcggagaaagaacccccaggaaggactgtataacgaactccagaaagacaagatggccgaagcctacagcgagatcggcatgaagggcgagcggagaagaggcaagggccacgatggcctgtaccagggcctgagcaccgccaccaaggacacctatgacgccctgcacatgcaggccctgcctccaaga

SEQ ID NO: 5898 - DNA, 1497 bp, Artificial Sequence
  Synthetic Polynucleotide
atggccttaccagtgaccgccttgctcctgccgctggccttgctgctccacgccgccaggccgctgttcaatcaagaggtgcagatccctctgaccgagagctactgtggcccctgtcctaagaactggatctgctacaagaacaactgctaccagttcttcgacgagagcaagaattggtacgagagccaggccagctgcatgagccagaatgccagcctgctgaaggtgtacagcaaagaggaccaggacctgctgaaactggtcaagagcgcccactggatgggccttgtgcacatccccaccaatggctcttggcagtgggaggacggcagcattctgagccctaacctgctgaccatcatcgagatgcagaagggcgactgcgccctgtacgccagcagctttaagggctacatcgagaattgcagcaccccgaacacctacatctgtatgcagagaaccgtttctggcggaggcggctctggaggaggcggaagtggcggcggaggcgacctctttaatcaagaagtccagattccactcaccgaatcctactgcggaccttgtccaaaaaattggatttgttataagaacaactgttatcaattctttgatgagtctaaaaattggtatgagtcccaggcttcctgcatgtctcagaacgcttctctgctgaaagtctactctaaagaagatcaggatctcctgaagctcgtcaagtctgcccattggatggggctcgtccacattcctaccaacggaagctggcaatgggaagatggctccatcctgtctccaaatctgctcacgattattgaaatgcagaaaggggattgtgctctctacgccagctccttcaagggatatattgagaactgtagcacgcccaatacttatatctgtatgcaacggaccgtgacgcgtacaacacctggcgagagaagtagcctgcctgccttctatcctggcaccagcggctcttgttctggctgtggatctctgagcctgcctctgctggctggactggttgctgctgatgctgtggcctctctgctgattgtgggagccgtgttcctgtgcgccagacctagaagaagccccgctcaagaggacggcaaggtgtacatcaacatgcccggcagaggaagcactagtagagtgaagttcagcagaagcgccgacgcccctgcctaccagcagggacagaaccaactgtacaacgagctgaacctgggcagacgggaagagtacgacgtgctggacaagcggagaggcagggaccctgagatgggcggaaagccccagcggagaaagaacccccaggaaggactgtataacgaactccagaaagacaagatggccgaagcctacagcgagatcggcatgaagggcgagcggagaagaggcaagggccacgatggcctgtaccagggcctgagcaccgccaccaaggacacctatgacgccctgcacatgcaggccctgcctccaaga

SEQ ID NO: 5899 - DNA, 3216 bp, Artificial Sequence
  Synthetic Polynucleotide
atggccttaccagtgaccgccttgctcctgccgctggccttgctgctccacgccgccaggccggacatccagatgacacagagccctagcagcctgtctgccagcgtgggagacagagtgaccatcacatgcaaggccagcgaccacatcaacaactggctggcctggtatcagcagaagcctggacaggcccctaagctgctgatctacggcgctaccacactggaaacaggcgtgcccagcagattttctggcagcggctctggcaccgactacaccctgacaatatccagcctccagcctgaggacttcgccacctactactgtcagcagagctggaacaccccttggacattcggccagggcaccaagctggaaatcaagagactcgagacaacacctggcgagagaagtagcctgcctgccttctatcctggcaccagcggctcttgttctggctgtggatctctgagcctgcctctgctggctggactggttgctgctgatgctgtggcctctctgctgattgtgggagccgtgttcctgtgcgccagacctagaagaagccccgctcaagaggacggcaaggtgtacatcaacatgcccggcagaggaagcactagtagagtgaagttcagcagaagcgccgacgcccctgcctaccagcagggacagaaccaactgtacaacgagctgaacctgggcagacgggaagagtacgacgtgctggacaagcggagaggcagggaccctgagatgggcggaaagccccagcggagaaagaacccccaggaaggactgtataacgaactccagaaagacaagatggccgaagcctacagcgagatcggcatgaagggcgagcggagaagaggcaagggccacgatggcctgtaccagggcctgagcaccgccaccaaggacacctatgacgccctgcacatgcaggccctgcctccaagaagggccaagcgatctggatctggagcaacaaacttctcactactcaaacaagcaggtgacgtggaggagaatcccgggcctatggactggatttggcgcatccttttccttgtcggcgctgctaccggcgcgcattccttcgaacaagttcagcttcaacagcctggcgctgagctggtcaaacctggcgcttctgtgaagatgagctgcaaagccagcggctacgccttcagcagctactggatcaactggatgaagcagaaacccggccagggactcgaatggatcggccaaatctatcccggcgacggcgacaccaactacaacggcaagttcaagggcagagccacactgaccgccgatacctctagcagcacagcctacatgcagctgagcagcctgaccagcgaagatagcgccgtgtacttctgtgcccggtccatcacaacagtcgtgggctgcgctatggactattggggccagggaacaagcgtgaccgtgtctagtacgcgtcttcaggacccttgcagcaactgtccagccggaaccttttgtgataacaacagaaatcagatatgcagcccctgtccgccaaactcctttagcagtgctggcggccagcggacatgtgacatttgtcggcagtgcaaaggggttttccgcaccagaaaagagtgctcctccaccagcaatgccgagtgtgactgtaccccaggctttcactgtctcggcgctggatgtagcatgtgtgaacaggactgtaaacaggggcaagaactcacgaagaaagggtgcaaagactgctgttttgggacgttcaacgatcagaagcggggaatctgtaggccctggacaaactgttctctggacggcaagtccgtgctcgtgaatggaacaaaagagcgggacgttgtctgcggcccaagtcctgctgatcttagcccaggcgcttcctctgtgactcctccagctcctgcacgcgaacctggacactctccccagatcatctcattttttctcgctctcacatcaaccgctttgctgttcctgctcttttttctcaccctccggttctccgtggttaagagaggccggaaaaaactcctctatatctttaaacagccctttatgcgcccggtccaaacaacccaagaggaagatggctgctcttgcagattcccggaagaggaagaaggcggctgcgagctgagctctagacgggttaagttttccagatccgcagacgcacccgcttaccaacaagggcagaaccaactctacaatgaacttaatttggggcggagggaagagtacgacgttctggacaaaaggaggggacgagatcccgagatgggcggaaagcctcagcgaaggaagaatccgcaagaggggctttataacgaactccagaaagataaaatggcagaagcctatagtgagattgggatgaagggagaaaggaggaggggtaaaggtcacgatgggttgtaccaaggattgagcacagccactaaagatacctatgatgcgctccacatgcaggccctgccgccaagacgcgccaagagaagcggatctggcgtgaagcagaccctgaatttcgacctgctgaagctggctggcgacgtggaatccaacccaggccctggccatatgaccgagtacaagcccacggtgcgcctcgccacccgcgacgacgtccccagggccgtacgcaccctcgccgccgcgttcgccgactaccccgccacgcgccacaccgtcgatccggaccgccacatcgagcgggtcaccgagctgcaagaactcttcctcacgcgcgtcgggctcgacatcggcaaggtgtgggtcgcggacgacggcgccgcggtggcggtctggaccacgccggagagcgtcgaagcgggggcggtgttcgccgagatcggcccgcgcatggccgagttgagcggttcccggctggccgcgcagcaacagatggaaggcctcctggcgccgcaccggcccaaggagcccgcgtggttcctggccaccgtcggcgtctcgcccgaccaccagggcaagggtctgggcagcgccgtcgtgctccccggagtggaggcggccgagcgcgccggggtgcccgccttcctggagacctccgcgccccgcaacctccccttctacgagcggctcggcttcaccgtcaccgccgacgtcgaggtgcccgaaggaccgcgcacctggtgcatgacccgcaagcccggtgcctga

SEQ ID NO: 5900 - DNA, 3372 bp, Artificial Sequence
  Synthetic Polynucleotide
atggccttaccagtgaccgccttgctcctgccgctggccttgctgctccacgccgccaggccggcatgcgaagtgcagctgcttgaaagtggcggcggactgattcagcctggcggatctctgagactgagctgtgccgccagcggcttcaccttttctagccacgccatgacctgggtccgacaggcacctggaaaagggcttgaatgggtgtccgccatcagcggctctggcgattacacacactacgccgacagcgtgaagggcagattcaccatcagcagagacaacagcaagaacaccgtgtacctccagatgaacagcctgagagccgaggacagcgccgtgtattattgcgccaaggatgaggatggcggcagcctgcttggacacagaggacaaggcaccctggtcaccgtttcttccggtaccggcggaggcggatctggcggcggaggtagcggtggcggaggatctgaattcggatctctcgagacaacacctggcgagagaagtagcctgcctgccttctatcctggcaccagcggctcttgttctggctgtggatctctgagcctgcctctgctggctggactggttgctgctgatgctgtggcctctctgctgattgtgggagccgtgttcctgtgcgccagacctagaagaagccccgctcaagaggacggcaaggtgtacatcaacatgcccggcagaggaagcactagtagagtgaagttcagcagaagcgccgacgcccctgcctaccagcagggacagaaccaactgtacaacgagctgaacctgggcagacgggaagagtacgacgtgctggacaagcggagaggcagggaccctgagatgggcggaaagccccagcggagaaagaacccccaggaaggactgtataacgaactccagaaagacaagatggccgaagcctacagcgagatcggcatgaagggcgagcggagaagaggcaagggccacgatggcctgtaccagggcctgagcaccgccaccaaggacacctatgacgccctgcacatgcaggccctgcctccaagaagggccaagcgatctggatctggagcaacaaacttctcactactcaaacaagcaggtgacgtggaggagaatcccgggcctatggactggatttggcgcatccttttccttgtcggcgctgctaccggcgcgcattccgggcccgaagtgcagctggttgaatctggcggaggactggttcaggctggcggatctctgagactgtcttgtgccgccagcggcagaacctttagcatgggctggtttagacaggcccctggcaaagagagagagttcgtcgccgccatcacatactctggcggcagcccttactacgccgactctgtgaagggcagattcaccatcagccgggacaacgccaagaacaccgtgtacctccagatgaacagcctgaagcctgaggacaccgccgtgtactactgcgccgccaatccaacatacggcagcgactggaacgccgagaattggggccagggaacccaagtgacagtgtctagcggatccggcggcggaggatctggcggaggcggatctgggggcggaggctctttcgaaggcagcacgcgtcttcaggacccttgcagcaactgtccagccggaaccttttgtgataacaacagaaatcagatatgcagcccctgtccgccaaactcctttagcagtgctggcggccagcggacatgtgacatttgtcggcagtgcaaaggggttttccgcaccagaaaagagtgctcctccaccagcaatgccgagtgtgactgtaccccaggctttcactgtctcggcgctggatgtagcatgtgtgaacaggactgtaaacaggggcaagaactcacgaagaaagggtgcaaagactgctgttttgggacgttcaacgatcagaagcggggaatctgtaggccctggacaaactgttctctggacggcaagtccgtgctcgtgaatggaacaaaagagcgggacgttgtctgcggcccaagtcctgctgatcttagcccaggcgcttcctctgtgactcctccagctcctgcacgcgaacctggacactctccccagatcatctcattttttctcgctctcacatcaaccgctttgctgttcctgctcttttttctcaccctccggttctccgtggttaagagaggccggaaaaaactcctctatatctttaaacagccctttatgcgcccggtccaaacaacccaagaggaagatggctgctcttgcagattcccggaagaggaagaaggcggctgcgagctgagctctagacgggttaagttttccagatccgcagacgcacccgcttaccaacaagggcagaaccaactctacaatgaacttaatttggggcggagggaagagtacgacgttctggacaaaaggaggggacgagatcccgagatgggcggaaagcctcagcgaaggaagaatccgcaagaggggctttataacgaactccagaaagataaaatggcagaagcctatagtgagattgggatgaagggagaaaggaggaggggtaaaggtcacgatgggttgtaccaaggattgagcacagccactaaagatacctatgatgcgctccacatgcaggccctgccgccaagacgcgccaagagaagcggatctggcgtgaagcagaccctgaatttcgacctgctgaagctggctggcgacgtggaatccaacccaggccctggccatatgaccgagtacaagcccacggtgcgcctcgccacccgcgacgacgtccccagggccgtacgcaccctcgccgccgcgttcgccgactaccccgccacgcgccacaccgtcgatccggaccgccacatcgagcgggtcaccgagctgcaagaactcttcctcacgcgcgtcgggctcgacatcggcaaggtgtgggtcgcggacgacggcgccgcggtggcggtctggaccacgccggagagcgtcgaagcgggggcggtgttcgccgagatcggcccgcgcatggccgagttgagcggttcccggctggccgcgcagcaacagatggaaggcctcctggcgccgcaccggcccaaggagcccgcgtggttcctggccaccgtcggcgtctcgcccgaccaccagggcaagggtctgggcagcgccgtcgtgctccccggagtggaggcggccgagcgcgccggggtgcccgccttcctggagacctccgcgccccgcaacctccccttctacgagcggctcggcttcaccgtcaccgccgacgtcgaggtgcccgaaggaccgcgcacctggtgcatgacccgcaagcccggtgcctga

SEQ ID NO: 5901 - DNA, 3819 bp, Artificial Sequence
  Synthetic Polynucleotide
atggccttaccagtgaccgccttgctcctgccgctggccttgctgctccacgccgccaggccggacatccagatgacacagagccctagcagcctgtctgccagcgtgggagacagagtgaccatcacatgcaaggccagcgaccacatcaacaactggctggcctggtatcagcagaagcctggacaggcccctaagctgctgatctacggcgctaccacactggaaacaggcgtgcccagcagattttctggcagcggctctggcaccgactacaccctgacaatatccagcctccagcctgaggacttcgccacctactactgtcagcagagctggaacaccccttggacattcggccagggcaccaagctggaaatcaagagactcgagggacagcctaaggccaatcctaccgtgacactgttccctccaagcagcgaagaactccaggccaacaaggccacacttgtgtgcctgatctccgacttctaccctggggctgtgacagtggcttggaaggccgatggatctcctgtgaaagccggcgtggaaaccaccaagccatccaagcagagcaacaacaaatacgccgccagctcctacctgagcctgacacctgagcagtggaagtcccacagatcctacagctgccaagtgacccacgaaggcagcaccgtggaaaagacagtggcccctacagagtgcagcggatccacaacacctggcgagagaagtagcctgcctgccttctatcctggcaccagcggctcttgttctggctgtggatctctgagcctgcctctgctggctggactggttgctgctgatgctgtggcctctctgctgattgtgggagccgtgttcctgtgcgccagacctagaagaagccccgctcaagaggacggcaaggtgtacatcaacatgcccggcagaggaagcactagtagagtgaagttcagcagaagcgccgacgcccctgcctaccagcagggacagaaccaactgtacaacgagctgaacctgggcagacgggaagagtacgacgtgctggacaagcggagaggcagggaccctgagatgggcggaaagccccagcggagaaagaacccccaggaaggactgtataacgaactccagaaagacaagatggccgaagcctacagcgagatcggcatgaagggcgagcggagaagaggcaagggccacgatggcctgtaccagggcctgagcaccgccaccaaggacacctatgacgccctgcacatgcaggccctgcctccaagaagggccaagcgatctggatctggagcaacaaacttctcactactcaaacaagcaggtgacgtggaggagaatcccgggcctatggactggatttggcgcatccttttccttgtcggcgctgctaccggcgcgcattccttcgaacaagttcagcttcaacagcctggcgctgagctggtcaaacctggcgcttctgtgaagatgagctgcaaagccagcggctacgccttcagcagctactggatcaactggatgaagcagaaacccggccagggactcgaatggatcggccaaatctatcccggcgacggcgacaccaactacaacggcaagttcaagggcagagccacactgaccgccgatacctctagcagcacagcctacatgcagctgagcagcctgaccagcgaagatagcgccgtgtacttctgtgcccggtccatcacaacagtcgtgggctgcgctatggactattggggccagggaacaagcgtgaccgtgtctagtacgcgtgcctctacaaagggaccctccgtgtttcctctggctcccagcagcaagtctacaagcggaggaacagccgctctgggctgcctggtcaaggattactttcccgagcctgtgaccgtgtcctggaatagcggagcactgacaagcggcgtgcacacctttccagccgtgctgcaaagcagcggcctgtactctctgagcagcgtggtcacagtgcctagctctagcctgggcacccagacctacatctgcaatgtgaaccacaagcctagcaacaccaaggtggacaagagagtggaacccaagagctgtggtacccttcaggacccttgcagcaactgtccagccggaaccttttgtgataacaacagaaatcagatatgcagcccctgtccgccaaactcctttagcagtgctggcggccagcggacatgtgacatttgtcggcagtgcaaaggggttttccgcaccagaaaagagtgctcctccaccagcaatgccgagtgtgactgtaccccaggctttcactgtctcggcgctggatgtagcatgtgtgaacaggactgtaaacaggggcaagaactcacgaagaaagggtgcaaagactgctgttttgggacgttcaacgatcagaagcggggaatctgtaggccctggacaaactgttctctggacggcaagtccgtgctcgtgaatggaacaaaagagcgggacgttgtctgcggcccaagtcctgctgatcttagcccaggcgcttcctctgtgactcctccagctcctgcacgcgaacctggacactctccccagatcatctcattttttctcgctctcacatcaaccgctttgctgttcctgctcttttttctcaccctccggttctccgtggttaagagaggccggaaaaaactcctctatatctttaaacagccctttatgcgcccggtccaaacaacccaagaggaagatggctgctcttgcagattcccggaagaggaagaaggcggctgcgagctgagctctagacgggttaagttttccagatccgcagacgcacccgcttaccaacaagggcagaaccaactctacaatgaacttaatttggggcggagggaagagtacgacgttctggacaaaaggaggggacgagatcccgagatgggcggaaagcctcagcgaaggaagaatccgcaagaggggctttataacgaactccagaaagataaaatggcagaagcctatagtgagattgggatgaagggagaaaggaggaggggtaaaggtcacgatgggttgtaccaaggattgagcacagccactaaagatacctatgatgcgctccacatgcaggccctgccgccaagacgcgccaagagaagcggatctggcgtgaagcagaccctgaatttcgacctgctgaagctggctggcgacgtggaatccaacccaggccctggccatatggctacctacgaggtgctgtgcgaggtggcaagaaagctgggcaccgacgacagagaagtggtgctgttcctgctgaacgtgttcatccctcagcctacactggcccagctgatcggtgcactgagagccctgaaagaggaaggccggctgacctttcctctgctggccgaatgcctgttcagagccggaagaagggatctgctgcgggacctgctgcatctggaccccagatttctggaaagacacctggccggcaccatgagctacttcagcccttaccagctgaccgtgctgcacgttgacggcgaactgtgcgccagagatattcggagcctgatcttcctgagcaaggacaccatcggcagccggtctacccctcagacatttctgcactgggtgtactgcatggaaaacctggacctgctcggccccacagatgtggatgccctgatgtccatgctgagaagcctgagcagagtggacctccagagacaggtgcagacactgatgggactgcacctgagcggacctagccacagccagcactacagacacacccct

SEQ ID NO: 5902 - DNA, 3978 bp, Artificial Sequence
  Synthetic Polynucleotide
atggccttaccagtgaccgccttgctcctgccgctggccttgctgctccacgccgccaggccggacatccagatgacacagagccctagcagcctgtctgccagcgtgggagacagagtgaccatcacatgcaaggccagcgaccacatcaacaactggctggcctggtatcagcagaagcctggacaggcccctaagctgctgatctacggcgctaccacactggaaacaggcgtgcccagcagattttctggcagcggctctggcaccgactacaccctgacaatatccagcctccagcctgaggacttcgccacctactactgtcagcagagctggaacaccccttggacattcggccagggcaccaagctggaaatcaagagactcgagggacagcctaaggccaatcctaccgtgacactgttccctccaagcagcgaagaactccaggccaacaaggccacacttgtgtgcctgatctccgacttctaccctggggctgtgacagtggcttggaaggccgatggatctcctgtgaaagccggcgtggaaaccaccaagccatccaagcagagcaacaacaaatacgccgccagctcctacctgagcctgacacctgagcagtggaagtcccacagatcctacagctgccaagtgacccacgaaggcagcaccgtggaaaagacagtggcccctacagagtgcagcggatccacaacacctggcgagagaagtagcctgcctgccttctatcctggcaccagcggctcttgttctggctgtggatctctgagcctgcctctgctggctggactggttgctgctgatgctgtggcctctctgctgattgtgggagccgtgttcctgtgcgccagacctagaagaagccccgctcaagaggacggcaaggtgtacatcaacatgcccggcagaggaagcactagtagagtgaagttcagcagaagcgccgacgcccctgcctaccagcagggacagaaccaactgtacaacgagctgaacctgggcagacgggaagagtacgacgtgctggacaagcggagaggcagggaccctgagatgggcggaaagccccagcggagaaagaacccccaggaaggactgtataacgaactccagaaagacaagatggccgaagcctacagcgagatcggcatgaagggcgagcggagaagaggcaagggccacgatggcctgtaccagggcctgagcaccgccaccaaggacacctatgacgccctgcacatgcaggccctgcctccaagaagggccaagcgatctggatctggagcaacaaacttctcactactcaaacaagcaggtgacgtggaggagaatcccgggcctatggactggatttggcgcatccttttccttgtcggcgctgctaccggcgcgcattccttcgaacaagttcagcttcaacagcctggcgctgagctggtcaaacctggcgcttctgtgaagatgagctgcaaagccagcggctacgccttcagcagctactggatcaactggatgaagcagaaacccggccagggactcgaatggatcggccaaatctatcccggcgacggcgacaccaactacaacggcaagttcaagggcagagccacactgaccgccgatacctctagcagcacagcctacatgcagctgagcagcctgaccagcgaagatagcgccgtgtacttctgtgcccggtccatcacaacagtcgtgggctgcgctatggactattggggccagggaacaagcgtgaccgtgtctagtacgcgtgcctctacaaagggaccctccgtgtttcctctggctcccagcagcaagtctacaagcggaggaacagccgctctgggctgcctggtcaaggattactttcccgagcctgtgaccgtgtcctggaatagcggagcactgacaagcggcgtgcacacctttccagccgtgctgcaaagcagcggcctgtactctctgagcagcgtggtcacagtgcctagctctagcctgggcacccagacctacatctgcaatgtgaaccacaagcctagcaacaccaaggtggacaagagagtggaacccaagagctgtggtacccttcaggacccttgcagcaactgtccagccggaaccttttgtgataacaacagaaatcagatatgcagcccctgtccgccaaactcctttagcagtgctggcggccagcggacatgtgacatttgtcggcagtgcaaaggggttttccgcaccagaaaagagtgctcctccaccagcaatgccgagtgtgactgtaccccaggctttcactgtctcggcgctggatgtagcatgtgtgaacaggactgtaaacaggggcaagaactcacgaagaaagggtgcaaagactgctgttttgggacgttcaacgatcagaagcggggaatctgtaggccctggacaaactgttctctggacggcaagtccgtgctcgtgaatggaacaaaagagcgggacgttgtctgcggcccaagtcctgctgatcttagcccaggcgcttcctctgtgactcctccagctcctgcacgcgaacctggacactctccccagatcatctcattttttctcgctctcacatcaaccgctttgctgttcctgctcttttttctcaccctccggttctccgtggttaagagaggccggaaaaaactcctctatatctttaaacagccctttatgcgcccggtccaaacaacccaagaggaagatggctgctcttgcagattcccggaagaggaagaaggcggctgcgagctgagctctagacgggttaagttttccagatccgcagacgcacccgcttaccaacaagggcagaaccaactctacaatgaacttaatttggggcggagggaagagtacgacgttctggacaaaaggaggggacgagatcccgagatgggcggaaagcctcagcgaaggaagaatccgcaagaggggctttataacgaactccagaaagataaaatggcagaagcctatagtgagattgggatgaagggagaaaggaggaggggtaaaggtcacgatgggttgtaccaaggattgagcacagccactaaagatacctatgatgcgctccacatgcaggccctgccgccaagacgcgccaagagaagcggatctggcgtgaagcagaccctgaatttcgacctgctgaagctggctggcgacgtggaatccaacccaggccctggccatatgtccgactccaaggaggtccctagccttccatttttgcgacacttgctcgaagagttggacagccatgaggacagcttgctgctgtttctgtgtcacgacgcggccccgggctgcacgacggtcacgcaagctttgtgctcgcttagccaacagcgcaagctgaccctcgcggctctggtcgagatgctctacgtgctgcagcgtatggatcttctcaagagccgcttcgggctcagcaaggagggggccgagcaattgctgggcacaagctttctcacgcgctaccgcaagctcatggtttgcgtgggtgaggagctcgactcgagcgagctacgcgctctacgcttgttcgcgtgcaacctgaatccgagcctgagcacggcgctttctgagagcagccgctttgtcgagcttgtactcgcgcttgaaaacgtaggactcgtctcgccatcgagtgtttccgtgcttgcggacatgttgcgcactcttcggcgcctcgatttgtgccagcagcttgttgagtacgaacaacaagagcaagccaggtaccgttactgttacgcggcctcgccctcattgccagttcgtacgttacgtcgggggcacggcgcgagtgaacacgagcagctgtgcatgcccgtgcaagaatcctctgacagccccgagctgctgcgcacgcccgtacaagaatcctccagcgacagccccgagcaaacgact

SEQ ID NO: 5903 - DNA, 3855 bp, Artificial Sequence
  Synthetic Polynucleotide
atggccttaccagtgaccgccttgctcctgccgctggccttgctgctccacgccgccaggccggacatccagatgacacagagccctagcagcctgtctgccagcgtgggagacagagtgaccatcacatgcaaggccagcgaccacatcaacaactggctggcctggtatcagcagaagcctggacaggcccctaagctgctgatctacggcgctaccacactggaaacaggcgtgcccagcagattttctggcagcggctctggcaccgactacaccctgacaatatccagcctccagcctgaggacttcgccacctactactgtcagcagagctggaacaccccttggacattcggccagggcaccaagctggaaatcaagagactcgagggacagcctaaggccaatcctaccgtgacactgttccctccaagcagcgaagaactccaggccaacaaggccacacttgtgtgcctgatctccgacttctaccctggggctgtgacagtggcttggaaggccgatggatctcctgtgaaagccggcgtggaaaccaccaagccatccaagcagagcaacaacaaatacgccgccagctcctacctgagcctgacacctgagcagtggaagtcccacagatcctacagctgccaagtgacccacgaaggcagcaccgtggaaaagacagtggcccctacagagtgcagcggatccacaacacctggcgagagaagtagcctgcctgccttctatcctggcaccagcggctcttgttctggctgtggatctctgagcctgcctctgctggctggactggttgctgctgatgctgtggcctctctgctgattgtgggagccgtgttcctgtgcgccagacctagaagaagccccgctcaagaggacggcaaggtgtacatcaacatgcccggcagaggaagcactagtagagtgaagttcagcagaagcgccgacgcccctgcctaccagcagggacagaaccaactgtacaacgagctgaacctgggcagacgggaagagtacgacgtgctggacaagcggagaggcagggaccctgagatgggcggaaagccccagcggagaaagaacccccaggaaggactgtataacgaactccagaaagacaagatggccgaagcctacagcgagatcggcatgaagggcgagcggagaagaggcaagggccacgatggcctgtaccagggcctgagcaccgccaccaaggacacctatgacgccctgcacatgcaggccctgcctccaagaagggccaagcgatctggatctggagcaacaaacttctcactactcaaacaagcaggtgacgtggaggagaatcccgggcctatggactggatttggcgcatccttttccttgtcggcgctgctaccggcgcgcattccttcgaacaagttcagcttcaacagcctggcgctgagctggtcaaacctggcgcttctgtgaagatgagctgcaaagccagcggctacgccttcagcagctactggatcaactggatgaagcagaaacccggccagggactcgaatggatcggccaaatctatcccggcgacggcgacaccaactacaacggcaagttcaagggcagagccacactgaccgccgatacctctagcagcacagcctacatgcagctgagcagcctgaccagcgaagatagcgccgtgtacttctgtgcccggtccatcacaacagtcgtgggctgcgctatggactattggggccagggaacaagcgtgaccgtgtctagtacgcgtgcctctacaaagggaccctccgtgtttcctctggctcccagcagcaagtctacaagcggaggaacagccgctctgggctgcctggtcaaggattactttcccgagcctgtgaccgtgtcctggaatagcggagcactgacaagcggcgtgcacacctttccagccgtgctgcaaagcagcggcctgtactctctgagcagcgtggtcacagtgcctagctctagcctgggcacccagacctacatctgcaatgtgaaccacaagcctagcaacaccaaggtggacaagagagtggaacccaagagctgtggtacccttcaggacccttgcagcaactgtccagccggaaccttttgtgataacaacagaaatcagatatgcagcccctgtccgccaaactcctttagcagtgctggcggccagcggacatgtgacatttgtcggcagtgcaaaggggttttccgcaccagaaaagagtgctcctccaccagcaatgccgagtgtgactgtaccccaggctttcactgtctcggcgctggatgtagcatgtgtgaacaggactgtaaacaggggcaagaactcacgaagaaagggtgcaaagactgctgttttgggacgttcaacgatcagaagcggggaatctgtaggccctggacaaactgttctctggacggcaagtccgtgctcgtgaatggaacaaaagagcgggacgttgtctgcggcccaagtcctgctgatcttagcccaggcgcttcctctgtgactcctccagctcctgcacgcgaacctggacactctccccagatcatctcattttttctcgctctcacatcaaccgctttgctgttcctgctcttttttctcaccctccggttctccgtggttaagagaggccggaaaaaactcctctatatctttaaacagccctttatgcgcccggtccaaacaacccaagaggaagatggctgctcttgcagattcccggaagaggaagaaggcggctgcgagctgagctctagacgggttaagttttccagatccgcagacgcacccgcttaccaacaagggcagaaccaactctacaatgaacttaatttggggcggagggaagagtacgacgttctggacaaaaggaggggacgagatcccgagatgggcggaaagcctcagcgaaggaagaatccgcaagaggggctttataacgaactccagaaagataaaatggcagaagcctatagtgagattgggatgaagggagaaaggaggaggggtaaaggtcacgatgggttgtaccaaggattgagcacagccactaaagatacctatgatgcgctccacatgcaggccctgccgccaagacgcgccaagagaagcggatctggcgtgaagcagaccctgaatttcgacctgctgaagctggctggcgacgtggaatccaacccaggccctggccatatgaccgagtacaagcccacggtgcgcctcgccacccgcgacgacgtccccagggccgtacgcaccctcgccgccgcgttcgccgactaccccgccacgcgccacaccgtcgatccggaccgccacatcgagcgggtcaccgagctgcaagaactcttcctcacgcgcgtcgggctcgacatcggcaaggtgtgggtcgcggacgacggcgccgcggtggcggtctggaccacgccggagagcgtcgaagcgggggcggtgttcgccgagatcggcccgcgcatggccgagttgagcggttcccggctggccgcgcagcaacagatggaaggcctcctggcgccgcaccggcccaaggagcccgcgtggttcctggccaccgtcggcgtctcgcccgaccaccagggcaagggtctgggcagcgccgtcgtgctccccggagtggaggcggccgagcgcgccggggtgcccgccttcctggagacctccgcgccccgcaacctccccttctacgagcggctcggcttcaccgtcaccgccgacgtcgaggtgcccgaaggaccgcgcacctggtgcatgacccgcaagcccggtgcctga

SEQ ID NO: 5904 - DNA, 4266 bp, Artificial Sequence
  Synthetic Polynucleotide
atggccttaccagtgaccgccttgctcctgccgctggccttgctgctccacgccgccaggccggaagtgcagctggttgaatctggcggaggactggttcaggctggcggatctctgagactgtcttgtgccgccagcggcagaacctttagcatgggctggtttagacaggcccctggcaaagagagagagttcgtcgccgccatcacatactctggcggcagcccttactacgccgactctgtgaagggcagattcaccatcagccgggacaacgccaagaacaccgtgtacctccagatgaacagcctgaagcctgaggacaccgccgtgtactactgcgccgccaatccaacatacggcagcgactggaacgccgagaattggggccagggaacccaagtgacagtgtctagcggtaccggcggaggcggatctggcggcggaggtagcggtggcggaggatctgaattcgacatccagatgacacagagccctagcagcctgtctgccagcgtgggagacagagtgaccatcacatgcaaggccagcgaccacatcaacaactggctggcctggtatcagcagaagcctggacaggcccctaagctgctgatctacggcgctaccacactggaaacaggcgtgcccagcagattttctggcagcggctctggcaccgactacaccctgacaatatccagcctccagcctgaggacttcgccacctactactgtcagcagagctggaacaccccttggacattcggccagggcaccaagctggaaatcaagagactcgagggacagcctaaggccaatcctaccgtgacactgttccctccaagcagcgaagaactccaggccaacaaggccacacttgtgtgcctgatctccgacttctaccctggggctgtgacagtggcttggaaggccgatggatctcctgtgaaagccggcgtggaaaccaccaagccatccaagcagagcaacaacaaatacgccgccagctcctacctgagcctgacacctgagcagtggaagtcccacagatcctacagctgccaagtgacccacgaaggcagcaccgtggaaaagacagtggcccctacagagtgcagcggatccacaacacctggcgagagaagtagcctgcctgccttctatcctggcaccagcggctcttgttctggctgtggatctctgagcctgcctctgctggctggactggttgctgctgatgctgtggcctctctgctgattgtgggagccgtgttcctgtgcgccagacctagaagaagccccgctcaagaggacggcaaggtgtacatcaacatgcccggcagaggaagcactagtagagtgaagttcagcagaagcgccgacgcccctgcctaccagcagggacagaaccaactgtacaacgagctgaacctgggcagacgggaagagtacgacgtgctggacaagcggagaggcagggaccctgagatgggcggaaagccccagcggagaaagaacccccaggaaggactgtataacgaactccagaaagacaagatggccgaagcctacagcgagatcggcatgaagggcgagcggagaagaggcaagggccacgatggcctgtaccagggcctgagcaccgccaccaaggacacctatgacgccctgcacatgcaggccctgcctccaagaagggccaagcgatctggatctggagcaacaaacttctcactactcaaacaagcaggtgacgtggaggagaatcccgggcctatggactggatttggcgcatccttttccttgtcggcgctgctaccggcgcgcattccttcgaacaagttcagcttcaacagcctggcgctgagctggtcaaacctggcgcttctgtgaagatgagctgcaaagccagcggctacgccttcagcagctactggatcaactggatgaagcagaaacccggccagggactcgaatggatcggccaaatctatcccggcgacggcgacaccaactacaacggcaagttcaagggcagagccacactgaccgccgatacctctagcagcacagcctacatgcagctgagcagcctgaccagcgaagatagcgccgtgtacttctgtgcccggtccatcacaacagtcgtgggctgcgctatggactattggggccagggaacaagcgtgaccgtgtctagtacgcgtgcctctacaaagggaccctccgtgtttcctctggctcccagcagcaagtctacaagcggaggaacagccgctctgggctgcctggtcaaggattactttcccgagcctgtgaccgtgtcctggaatagcggagcactgacaagcggcgtgcacacctttccagccgtgctgcaaagcagcggcctgtactctctgagcagcgtggtcacagtgcctagctctagcctgggcacccagacctacatctgcaatgtgaaccacaagcctagcaacaccaaggtggacaagagagtggaacccaagagctgtggtacccttcaggacccttgcagcaactgtccagccggaaccttttgtgataacaacagaaatcagatatgcagcccctgtccgccaaactcctttagcagtgctggcggccagcggacatgtgacatttgtcggcagtgcaaaggggttttccgcaccagaaaagagtgctcctccaccagcaatgccgagtgtgactgtaccccaggctttcactgtctcggcgctggatgtagcatgtgtgaacaggactgtaaacaggggcaagaactcacgaagaaagggtgcaaagactgctgttttgggacgttcaacgatcagaagcggggaatctgtaggccctggacaaactgttctctggacggcaagtccgtgctcgtgaatggaacaaaagagcgggacgttgtctgcggcccaagtcctgctgatcttagcccaggcgcttcctctgtgactcctccagctcctgcacgcgaacctggacactctccccagatcatctcattttttctcgctctcacatcaaccgctttgctgttcctgctcttttttctcaccctccggttctccgtggttaagagaggccggaaaaaactcctctatatctttaaacagccctttatgcgcccggtccaaacaacccaagaggaagatggctgctcttgcagattcccggaagaggaagaaggcggctgcgagctgagctctagacgggttaagttttccagatccgcagacgcacccgcttaccaacaagggcagaaccaactctacaatgaacttaatttggggcggagggaagagtacgacgttctggacaaaaggaggggacgagatcccgagatgggcggaaagcctcagcgaaggaagaatccgcaagaggggctttataacgaactccagaaagataaaatggcagaagcctatagtgagattgggatgaagggagaaaggaggaggggtaaaggtcacgatgggttgtaccaaggattgagcacagccactaaagatacctatgatgcgctccacatgcaggccctgccgccaagacgcgccaagagaagcggatctggcgtgaagcagaccctgaatttcgacctgctgaagctggctggcgacgtggaatccaacccaggccctggccatatgaccgagtacaagcccacggtgcgcctcgccacccgcgacgacgtccccagggccgtacgcaccctcgccgccgcgttcgccgactaccccgccacgcgccacaccgtcgatccggaccgccacatcgagcgggtcaccgagctgcaagaactcttcctcacgcgcgtcgggctcgacatcggcaaggtgtgggtcgcggacgacggcgccgcggtggcggtctggaccacgccggagagcgtcgaagcgggggcggtgttcgccgagatcggcccgcgcatggccgagttgagcggttcccggctggccgcgcagcaacagatggaaggcctcctggcgccgcaccggcccaaggagcccgcgtggttcctggccaccgtcggcgtctcgcccgaccaccagggcaagggtctgggcagcgccgtcgtgctccccggagtggaggcggccgagcgcgccggggtgcccgccttcctggagacctccgcgccccgcaacctccccttctacgagcggctcggcttcaccgtcaccgccgacgtcgaggtgcccgaaggaccgcgcacctggtgcatgacccgcaagcccggtgcctga

SEQ ID NO: 5905 - DNA, 4677 bp, Artificial Sequence
  Synthetic Polynucleotide
atggccttaccagtgaccgccttgctcctgccgctggccttgctgctccacgccgccaggccggaagtgcagctggttgaatctggcggaggactggttcaggctggcggatctctgagactgtcttgtgccgccagcggcagaacctttagcatgggctggtttagacaggcccctggcaaagagagagagttcgtcgccgccatcacatactctggcggcagcccttactacgccgactctgtgaagggcagattcaccatcagccgggacaacgccaagaacaccgtgtacctccagatgaacagcctgaagcctgaggacaccgccgtgtactactgcgccgccaatccaacatacggcagcgactggaacgccgagaattggggccagggaacccaagtgacagtgtctagcggtaccggcggaggcggatctggcggcggaggtagcggtggcggaggatctgaattcgacatccagatgacacagagccctagcagcctgtctgccagcgtgggagacagagtgaccatcacatgcaaggccagcgaccacatcaacaactggctggcctggtatcagcagaagcctggacaggcccctaagctgctgatctacggcgctaccacactggaaacaggcgtgcccagcagattttctggcagcggctctggcaccgactacaccctgacaatatccagcctccagcctgaggacttcgccacctactactgtcagcagagctggaacaccccttggacattcggccagggcaccaagctggaaatcaagagactcgagggacagcctaaggccaatcctaccgtgacactgttccctccaagcagcgaagaactccaggccaacaaggccacacttgtgtgcctgatctccgacttctaccctggggctgtgacagtggcttggaaggccgatggatctcctgtgaaagccggcgtggaaaccaccaagccatccaagcagagcaacaacaaatacgccgccagctcctacctgagcctgacacctgagcagtggaagtcccacagatcctacagctgccaagtgacccacgaaggcagcaccgtggaaaagacagtggcccctacagagtgcagcggatccacaacacctggcgagagaagtagcctgcctgccttctatcctggcaccagcggctcttgttctggctgtggatctctgagcctgcctctgctggctggactggttgctgctgatgctgtggcctctctgctgattgtgggagccgtgttcctgtgcgccagacctagaagaagccccgctcaagaggacggcaaggtgtacatcaacatgcccggcagaggaagcactagtagagtgaagttcagcagaagcgccgacgcccctgcctaccagcagggacagaaccaactgtacaacgagctgaacctgggcagacgggaagagtacgacgtgctggacaagcggagaggcagggaccctgagatgggcggaaagccccagcggagaaagaacccccaggaaggactgtataacgaactccagaaagacaagatggccgaagcctacagcgagatcggcatgaagggcgagcggagaagaggcaagggccacgatggcctgtaccagggcctgagcaccgccaccaaggacacctatgacgccctgcacatgcaggccctgcctccaagaagggccaagcgatctggatctggagcaacaaacttctcactactcaaacaagcaggtgacgtggaggagaatcccgggcctatggactggatttggcgcatccttttccttgtcggcgctgctaccggcgcgcattccgggcccgaagtgcaactggttgaatccggtggcggcctggtgcaagcaggcggatctctcagacttagctgtgccgcctccggcagaaccttcacaatgggatggtttaggcaggctccagggaaagagagagagttcgtcgccgccatctctctgtctcccacactggcctactacgccgactctgtgaaaggccggttcaccatctccagagataatgccaagaacaccgtggtgctgcaaatgaactctctgaaacccgaggatacagccctgtactattgtgccgctgaccggaagtccgtgatgagcatcagacccgattactggggacagggcacacaagtcacagtgtcctctggatccggcggcggaggatctggcggaggcggatctgggggcggaggctctttcgaacaagttcagcttcaacagcctggcgctgagctggtcaaacctggcgcttctgtgaagatgagctgcaaagccagcggctacgccttcagcagctactggatcaactggatgaagcagaaacccggccagggactcgaatggatcggccaaatctatcccggcgacggcgacaccaactacaacggcaagttcaagggcagagccacactgaccgccgatacctctagcagcacagcctacatgcagctgagcagcctgaccagcgaagatagcgccgtgtacttctgtgcccggtccatcacaacagtcgtgggctgcgctatggactattggggccagggaacaagcgtgaccgtgtctagtacgcgtgcctctacaaagggaccctccgtgtttcctctggctcccagcagcaagtctacaagcggaggaacagccgctctgggctgcctggtcaaggattactttcccgagcctgtgaccgtgtcctggaatagcggagcactgacaagcggcgtgcacacctttccagccgtgctgcaaagcagcggcctgtactctctgagcagcgtggtcacagtgcctagctctagcctgggcacccagacctacatctgcaatgtgaaccacaagcctagcaacaccaaggtggacaagagagtggaacccaagagctgtggtacccttcaggacccttgcagcaactgtccagccggaaccttttgtgataacaacagaaatcagatatgcagcccctgtccgccaaactcctttagcagtgctggcggccagcggacatgtgacatttgtcggcagtgcaaaggggttttccgcaccagaaaagagtgctcctccaccagcaatgccgagtgtgactgtaccccaggctttcactgtctcggcgctggatgtagcatgtgtgaacaggactgtaaacaggggcaagaactcacgaagaaagggtgcaaagactgctgttttgggacgttcaacgatcagaagcggggaatctgtaggccctggacaaactgttctctggacggcaagtccgtgctcgtgaatggaacaaaagagcgggacgttgtctgcggcccaagtcctgctgatcttagcccaggcgcttcctctgtgactcctccagctcctgcacgcgaacctggacactctccccagatcatctcattttttctcgctctcacatcaaccgctttgctgttcctgctcttttttctcaccctccggttctccgtggttaagagaggccggaaaaaactcctctatatctttaaacagccctttatgcgcccggtccaaacaacccaagaggaagatggctgctcttgcagattcccggaagaggaagaaggcggctgcgagctgagctctagacgggttaagttttccagatccgcagacgcacccgcttaccaacaagggcagaaccaactctacaatgaacttaatttggggcggagggaagagtacgacgttctggacaaaaggaggggacgagatcccgagatgggcggaaagcctcagcgaaggaagaatccgcaagaggggctttataacgaactccagaaagataaaatggcagaagcctatagtgagattgggatgaagggagaaaggaggaggggtaaaggtcacgatgggttgtaccaaggattgagcacagccactaaagatacctatgatgcgctccacatgcaggccctgccgccaagacgcgccaagagaagcggatctggcgtgaagcagaccctgaatttcgacctgctgaagctggctggcgacgtggaatccaacccaggccctggccatatgaccgagtacaagcccacggtgcgcctcgccacccgcgacgacgtccccagggccgtacgcaccctcgccgccgcgttcgccgactaccccgccacgcgccacaccgtcgatccggaccgccacatcgagcgggtcaccgagctgcaagaactcttcctcacgcgcgtcgggctcgacatcggcaaggtgtgggtcgcggacgacggcgccgcggtggcggtctggaccacgccggagagcgtcgaagcgggggcggtgttcgccgagatcggcccgcgcatggccgagttgagcggttcccggctggccgcgcagcaacagatggaaggcctcctggcgccgcaccggcccaaggagcccgcgtggttcctggccaccgtcggcgtctcgcccgaccaccagggcaagggtctgggcagcgccgtcgtgctccccggagtggaggcggccgagcgcgccggggtgcccgccttcctggagacctccgcgccccgcaacctccccttctacgagcggctcggcttcaccgtcaccgccgacgtcgaggtgcccgaaggaccgcgcacctggtgcatgacccgcaagcccggtgcctga

SEQ ID NO: 5906 - DNA, 3876 bp, Artificial Sequence
  Synthetic Polynucleotide
atggccttaccagtgaccgccttgctcctgccgctggccttgctgctccacgccgccaggccggaagtgcagctggttgaatctggcggaggactggttcaggctggcggatctctgagactgtcttgtgccgccagcggcagaacctttagcatgggctggtttagacaggcccctggcaaagagagagagttcgtcgccgccatcacatactctggcggcagcccttactacgccgactctgtgaagggcagattcaccatcagccgggacaacgccaagaacaccgtgtacctccagatgaacagcctgaagcctgaggacaccgccgtgtactactgcgccgccaatccaacatacggcagcgactggaacgccgagaattggggccagggaacccaagtgacagtgtctagcctcgagggacagcctaaggccaatcctaccgtgacactgttccctccaagcagcgaagaactccaggccaacaaggccacacttgtgtgcctgatctccgacttctaccctggggctgtgacagtggcttggaaggccgatggatctcctgtgaaagccggcgtggaaaccaccaagccatccaagcagagcaacaacaaatacgccgccagctcctacctgagcctgacacctgagcagtggaagtcccacagatcctacagctgccaagtgacccacgaaggcagcaccgtggaaaagacagtggcccctacagagtgcagcggatccacaacacctggcgagagaagtagcctgcctgccttctatcctggcaccagcggctcttgttctggctgtggatctctgagcctgcctctgctggctggactggttgctgctgatgctgtggcctctctgctgattgtgggagccgtgttcctgtgcgccagacctagaagaagccccgctcaagaggacggcaaggtgtacatcaacatgcccggcagaggaagcactagtagagtgaagttcagcagaagcgccgacgcccctgcctaccagcagggacagaaccaactgtacaacgagctgaacctgggcagacgggaagagtacgacgtgctggacaagcggagaggcagggaccctgagatgggcggaaagccccagcggagaaagaacccccaggaaggactgtataacgaactccagaaagacaagatggccgaagcctacagcgagatcggcatgaagggcgagcggagaagaggcaagggccacgatggcctgtaccagggcctgagcaccgccaccaaggacacctatgacgccctgcacatgcaggccctgcctccaagaagggccaagcgatctggatctggagcaacaaacttctcactactcaaacaagcaggtgacgtggaggagaatcccgggcctatggactggatttggcgcatccttttccttgtcggcgctgctaccggcgcgcattccgggcccgaagtgcaactggttgaatccggtggcggcctggtgcaagcaggcggatctctcagacttagctgtgccgcctccggcagaaccttcacaatgggatggtttaggcaggctccagggaaagagagagagttcgtcgccgccatctctctgtctcccacactggcctactacgccgactctgtgaaaggccggttcaccatctccagagataatgccaagaacaccgtggtgctgcaaatgaactctctgaaacccgaggatacagccctgtactattgtgccgctgaccggaagtccgtgatgagcatcagacccgattactggggacagggcacacaagtcacagtgtcctctacgcgtgcctctacaaagggaccctccgtgtttcctctggctcccagcagcaagtctacaagcggaggaacagccgctctgggctgcctggtcaaggattactttcccgagcctgtgaccgtgtcctggaatagcggagcactgacaagcggcgtgcacacctttccagccgtgctgcaaagcagcggcctgtactctctgagcagcgtggtcacagtgcctagctctagcctgggcacccagacctacatctgcaatgtgaaccacaagcctagcaacaccaaggtggacaagagagtggaacccaagagctgtggtacccttcaggacccttgcagcaactgtccagccggaaccttttgtgataacaacagaaatcagatatgcagcccctgtccgccaaactcctttagcagtgctggcggccagcggacatgtgacatttgtcggcagtgcaaaggggttttccgcaccagaaaagagtgctcctccaccagcaatgccgagtgtgactgtaccccaggctttcactgtctcggcgctggatgtagcatgtgtgaacaggactgtaaacaggggcaagaactcacgaagaaagggtgcaaagactgctgttttgggacgttcaacgatcagaagcggggaatctgtaggccctggacaaactgttctctggacggcaagtccgtgctcgtgaatggaacaaaagagcgggacgttgtctgcggcccaagtcctgctgatcttagcccaggcgcttcctctgtgactcctccagctcctgcacgcgaacctggacactctccccagatcatctcattttttctcgctctcacatcaaccgctttgctgttcctgctcttttttctcaccctccggttctccgtggttaagagaggccggaaaaaactcctctatatctttaaacagccctttatgcgcccggtccaaacaacccaagaggaagatggctgctcttgcagattcccggaagaggaagaaggcggctgcgagctgagctctagacgggttaagttttccagatccgcagacgcacccgcttaccaacaagggcagaaccaactctacaatgaacttaatttggggcggagggaagagtacgacgttctggacaaaaggaggggacgagatcccgagatgggcggaaagcctcagcgaaggaagaatccgcaagaggggctttataacgaactccagaaagataaaatggcagaagcctatagtgagattgggatgaagggagaaaggaggaggggtaaaggtcacgatgggttgtaccaaggattgagcacagccactaaagatacctatgatgcgctccacatgcaggccctgccgccaagacgcgccaagagaagcggatctggcgtgaagcagaccctgaatttcgacctgctgaagctggctggcgacgtggaatccaacccaggccctggccatatgaccgagtacaagcccacggtgcgcctcgccacccgcgacgacgtccccagggccgtacgcaccctcgccgccgcgttcgccgactaccccgccacgcgccacaccgtcgatccggaccgccacatcgagcgggtcaccgagctgcaagaactcttcctcacgcgcgtcgggctcgacatcggcaaggtgtgggtcgcggacgacggcgccgcggtggcggtctggaccacgccggagagcgtcgaagcgggggcggtgttcgccgagatcggcccgcgcatggccgagttgagcggttcccggctggccgcgcagcaacagatggaaggcctcctggcgccgcaccggcccaaggagcccgcgtggttcctggccaccgtcggcgtctcgcccgaccaccagggcaagggtctgggcagcgccgtcgtgctccccggagtggaggcggccgagcgcgccggggtgcccgccttcctggagacctccgcgccccgcaacctccccttctacgagcggctcggcttcaccgtcaccgccgacgtcgaggtgcccgaaggaccgcgcacctggtgcatgacccgcaagcccggtgcctga

SEQ ID NO: 5907 - DNA, 3900 bp, Artificial Sequence
  Synthetic Polynucleotide
atggccttaccagtgaccgccttgctcctgccgctggccttgctgctccacgccgccaggccggacatccagatgacacagagccctagcagcctgtctgccagcgtgggagacagagtgaccatcacatgcaaggccagcgaccacatcaacaactggctggcctggtatcagcagaagcctggacaggcccctaagctgctgatctacggcgctaccacactggaaacaggcgtgcccagcagattttctggcagcggctctggcaccgactacaccctgacaatatccagcctccagcctgaggacttcgccacctactactgtcagcagagctggaacaccccttggacattcggccagggcaccaagctggaaatcaagagactcgaggacctgaagaacgtgttcccacctgaggtggccgtgttcgagcctagcgaggccgagatcagccacacccagaaagccaccctcgtgtgcctggctaccggcttctaccccgaccatgtggaactgtcttggtgggtcaacggcaaagaggtgcacagcggcgtgtctaccgacccccagccactgaaagaacagcccgccctgaacgacagccggtactgcctgagcagcagactgagagtgtccgccaccttctggcagaacccccggaaccacttcagatgccaggtgcagttctacggcctgagcgagaacgacgagtggacccaggacagagccaagcccgtgacccagatcgtgtctgccgaagcctggggcagagccgattgcggatccacaacacctggcgagagaagtagcctgcctgccttctatcctggcaccagcggctcttgttctggctgtggatctctgagcctgcctctgctggctggactggttgctgctgatgctgtggcctctctgctgattgtgggagccgtgttcctgtgcgccagacctagaagaagccccgctcaagaggacggcaaggtgtacatcaacatgcccggcagaggaagcactagtagagtgaagttcagcagaagcgccgacgcccctgcctaccagcagggacagaaccaactgtacaacgagctgaacctgggcagacgggaagagtacgacgtgctggacaagcggagaggcagggaccctgagatgggcggaaagccccagcggagaaagaacccccaggaaggactgtataacgaactccagaaagacaagatggccgaagcctacagcgagatcggcatgaagggcgagcggagaagaggcaagggccacgatggcctgtaccagggcctgagcaccgccaccaaggacacctatgacgccctgcacatgcaggccctgcctccaagaagggccaagcgatctggatctggagcaacaaacttctcactactcaaacaagcaggtgacgtggaggagaatcccgggcctatggactggatttggcgcatccttttccttgtcggcgctgctaccggcgcgcattccttcgaacaagttcagcttcaacagcctggcgctgagctggtcaaacctggcgcttctgtgaagatgagctgcaaagccagcggctacgccttcagcagctactggatcaactggatgaagcagaaacccggccagggactcgaatggatcggccaaatctatcccggcgacggcgacaccaactacaacggcaagttcaagggcagagccacactgaccgccgatacctctagcagcacagcctacatgcagctgagcagcctgaccagcgaagatagcgccgtgtacttctgtgcccggtccatcacaacagtcgtgggctgcgctatggactattggggccagggaacaagcgtgaccgtgtctagtacgcgtatccagaaccctgatcctgccgtgtaccagctgcgggatagcaagagcagcgacaagagcgtgtgtctgttcaccgacttcgacagccagaccaacgtgtcccagagcaaggactccgacgtgtacatcaccgataagaccgtgctggacatgcggagcatggacttcaagagcaactccgccgtggcctggtccaacaagtccgatttcgcctgcgccaacgccttcaacaacagcattatccccgaggacacattcttcccaagccccgagagcagctgcggtacccttcaggacccttgcagcaactgtccagccggaaccttttgtgataacaacagaaatcagatatgcagcccctgtccgccaaactcctttagcagtgctggcggccagcggacatgtgacatttgtcggcagtgcaaaggggttttccgcaccagaaaagagtgctcctccaccagcaatgccgagtgtgactgtaccccaggctttcactgtctcggcgctggatgtagcatgtgtgaacaggactgtaaacaggggcaagaactcacgaagaaagggtgcaaagactgctgttttgggacgttcaacgatcagaagcggggaatctgtaggccctggacaaactgttctctggacggcaagtccgtgctcgtgaatggaacaaaagagcgggacgttgtctgcggcccaagtcctgctgatcttagcccaggcgcttcctctgtgactcctccagctcctgcacgcgaacctggacactctccccagatcatctcattttttctcgctctcacatcaaccgctttgctgttcctgctcttttttctcaccctccggttctccgtggttaagagaggccggaaaaaactcctctatatctttaaacagccctttatgcgcccggtccaaacaacccaagaggaagatggctgctcttgcagattcccggaagaggaagaaggcggctgcgagctgagctctagacgggttaagttttccagatccgcagacgcacccgcttaccaacaagggcagaaccaactctacaatgaacttaatttggggcggagggaagagtacgacgttctggacaaaaggaggggacgagatcccgagatgggcggaaagcctcagcgaaggaagaatccgcaagaggggctttataacgaactccagaaagataaaatggcagaagcctatagtgagattgggatgaagggagaaaggaggaggggtaaaggtcacgatgggttgtaccaaggattgagcacagccactaaagatacctatgatgcgctccacatgcaggccctgccgccaagacgcgccaagagaagcggatctggcgtgaagcagaccctgaatttcgacctgctgaagctggctggcgacgtggaatccaacccaggccctggccatatgaccgagtacaagcccacggtgcgcctcgccacccgcgacgacgtccccagggccgtacgcaccctcgccgccgcgttcgccgactaccccgccacgcgccacaccgtcgatccggaccgccacatcgagcgggtcaccgagctgcaagaactcttcctcacgcgcgtcgggctcgacatcggcaaggtgtgggtcgcggacgacggcgccgcggtggcggtctggaccacgccggagagcgtcgaagcgggggcggtgttcgccgagatcggcccgcgcatggccgagttgagcggttcccggctggccgcgcagcaacagatggaaggcctcctggcgccgcaccggcccaaggagcccgcgtggttcctggccaccgtcggcgtctcgcccgaccaccagggcaagggtctgggcagcgccgtcgtgctccccggagtggaggcggccgagcgcgccggggtgcccgccttcctggagacctccgcgccccgcaacctccccttctacgagcggctcggcttcaccgtcaccgccgacgtcgaggtgcccgaaggaccgcgcacctggtgcatgacccgcaagcccggtgcctga

SEQ ID NO: 5908 - DNA, 4311 bp, Artificial Sequence
  Synthetic Polynucleotide
atggccttaccagtgaccgccttgctcctgccgctggccttgctgctccacgccgccaggccggaagtgcagctggttgaatctggcggaggactggttcaggctggcggatctctgagactgtcttgtgccgccagcggcagaacctttagcatgggctggtttagacaggcccctggcaaagagagagagttcgtcgccgccatcacatactctggcggcagcccttactacgccgactctgtgaagggcagattcaccatcagccgggacaacgccaagaacaccgtgtacctccagatgaacagcctgaagcctgaggacaccgccgtgtactactgcgccgccaatccaacatacggcagcgactggaacgccgagaattggggccagggaacccaagtgacagtgtctagcggtaccggcggaggcggatctggcggcggaggtagcggtggcggaggatctgaattcgacatccagatgacacagagccctagcagcctgtctgccagcgtgggagacagagtgaccatcacatgcaaggccagcgaccacatcaacaactggctggcctggtatcagcagaagcctggacaggcccctaagctgctgatctacggcgctaccacactggaaacaggcgtgcccagcagattttctggcagcggctctggcaccgactacaccctgacaatatccagcctccagcctgaggacttcgccacctactactgtcagcagagctggaacaccccttggacattcggccagggcaccaagctggaaatcaagagactcgaggacctgaagaacgtgttcccacctgaggtggccgtgttcgagcctagcgaggccgagatcagccacacccagaaagccaccctcgtgtgcctggctaccggcttctaccccgaccatgtggaactgtcttggtgggtcaacggcaaagaggtgcacagcggcgtgtctaccgacccccagccactgaaagaacagcccgccctgaacgacagccggtactgcctgagcagcagactgagagtgtccgccaccttctggcagaacccccggaaccacttcagatgccaggtgcagttctacggcctgagcgagaacgacgagtggacccaggacagagccaagcccgtgacccagatcgtgtctgccgaagcctggggcagagccgattgcggatccacaacacctggcgagagaagtagcctgcctgccttctatcctggcaccagcggctcttgttctggctgtggatctctgagcctgcctctgctggctggactggttgctgctgatgctgtggcctctctgctgattgtgggagccgtgttcctgtgcgccagacctagaagaagccccgctcaagaggacggcaaggtgtacatcaacatgcccggcagaggaagcactagtagagtgaagttcagcagaagcgccgacgcccctgcctaccagcagggacagaaccaactgtacaacgagctgaacctgggcagacgggaagagtacgacgtgctggacaagcggagaggcagggaccctgagatgggcggaaagccccagcggagaaagaacccccaggaaggactgtataacgaactccagaaagacaagatggccgaagcctacagcgagatcggcatgaagggcgagcggagaagaggcaagggccacgatggcctgtaccagggcctgagcaccgccaccaaggacacctatgacgccctgcacatgcaggccctgcctccaagaagggccaagcgatctggatctggagcaacaaacttctcactactcaaacaagcaggtgacgtggaggagaatcccgggcctatggactggatttggcgcatccttttccttgtcggcgctgctaccggcgcgcattccttcgaacaagttcagcttcaacagcctggcgctgagctggtcaaacctggcgcttctgtgaagatgagctgcaaagccagcggctacgccttcagcagctactggatcaactggatgaagcagaaacccggccagggactcgaatggatcggccaaatctatcccggcgacggcgacaccaactacaacggcaagttcaagggcagagccacactgaccgccgatacctctagcagcacagcctacatgcagctgagcagcctgaccagcgaagatagcgccgtgtacttctgtgcccggtccatcacaacagtcgtgggctgcgctatggactattggggccagggaacaagcgtgaccgtgtctagtacgcgtatccagaaccctgatcctgccgtgtaccagctgcgggatagcaagagcagcgacaagagcgtgtgtctgttcaccgacttcgacagccagaccaacgtgtcccagagcaaggactccgacgtgtacatcaccgataagaccgtgctggacatgcggagcatggacttcaagagcaactccgccgtggcctggtccaacaagtccgatttcgcctgcgccaacgccttcaacaacagcattatccccgaggacacattcttcccaagccccgagagcagctgcggtacccttcaggacccttgcagcaactgtccagccggaaccttttgtgataacaacagaaatcagatatgcagcccctgtccgccaaactcctttagcagtgctggcggccagcggacatgtgacatttgtcggcagtgcaaaggggttttccgcaccagaaaagagtgctcctccaccagcaatgccgagtgtgactgtaccccaggctttcactgtctcggcgctggatgtagcatgtgtgaacaggactgtaaacaggggcaagaactcacgaagaaagggtgcaaagactgctgttttgggacgttcaacgatcagaagcggggaatctgtaggccctggacaaactgttctctggacggcaagtccgtgctcgtgaatggaacaaaagagcgggacgttgtctgcggcccaagtcctgctgatcttagcccaggcgcttcctctgtgactcctccagctcctgcacgcgaacctggacactctccccagatcatctcattttttctcgctctcacatcaaccgctttgctgttcctgctcttttttctcaccctccggttctccgtggttaagagaggccggaaaaaactcctctatatctttaaacagccctttatgcgcccggtccaaacaacccaagaggaagatggctgctcttgcagattcccggaagaggaagaaggcggctgcgagctgagctctagacgggttaagttttccagatccgcagacgcacccgcttaccaacaagggcagaaccaactctacaatgaacttaatttggggcggagggaagagtacgacgttctggacaaaaggaggggacgagatcccgagatgggcggaaagcctcagcgaaggaagaatccgcaagaggggctttataacgaactccagaaagataaaatggcagaagcctatagtgagattgggatgaagggagaaaggaggaggggtaaaggtcacgatgggttgtaccaaggattgagcacagccactaaagatacctatgatgcgctccacatgcaggccctgccgccaagacgcgccaagagaagcggatctggcgtgaagcagaccctgaatttcgacctgctgaagctggctggcgacgtggaatccaacccaggccctggccatatgaccgagtacaagcccacggtgcgcctcgccacccgcgacgacgtccccagggccgtacgcaccctcgccgccgcgttcgccgactaccccgccacgcgccacaccgtcgatccggaccgccacatcgagcgggtcaccgagctgcaagaactcttcctcacgcgcgtcgggctcgacatcggcaaggtgtgggtcgcggacgacggcgccgcggtggcggtctggaccacgccggagagcgtcgaagcgggggcggtgttcgccgagatcggcccgcgcatggccgagttgagcggttcccggctggccgcgcagcaacagatggaaggcctcctggcgccgcaccggcccaaggagcccgcgtggttcctggccaccgtcggcgtctcgcccgaccaccagggcaagggtctgggcagcgccgtcgtgctccccggagtggaggcggccgagcgcgccggggtgcccgccttcctggagacctccgcgccccgcaacctccccttctacgagcggctcggcttcaccgtcaccgccgacgtcgaggtgcccgaaggaccgcgcacctggtgcatgacccgcaagcccggtgcctga

SEQ ID NO: 5909 - DNA, 4722 bp, Artificial Sequence
  Synthetic Polynucleotide
atggccttaccagtgaccgccttgctcctgccgctggccttgctgctccacgccgccaggccggaagtgcagctggttgaatctggcggaggactggttcaggctggcggatctctgagactgtcttgtgccgccagcggcagaacctttagcatgggctggtttagacaggcccctggcaaagagagagagttcgtcgccgccatcacatactctggcggcagcccttactacgccgactctgtgaagggcagattcaccatcagccgggacaacgccaagaacaccgtgtacctccagatgaacagcctgaagcctgaggacaccgccgtgtactactgcgccgccaatccaacatacggcagcgactggaacgccgagaattggggccagggaacccaagtgacagtgtctagcggtaccggcggaggcggatctggcggcggaggtagcggtggcggaggatctgaattcgacatccagatgacacagagccctagcagcctgtctgccagcgtgggagacagagtgaccatcacatgcaaggccagcgaccacatcaacaactggctggcctggtatcagcagaagcctggacaggcccctaagctgctgatctacggcgctaccacactggaaacaggcgtgcccagcagattttctggcagcggctctggcaccgactacaccctgacaatatccagcctccagcctgaggacttcgccacctactactgtcagcagagctggaacaccccttggacattcggccagggcaccaagctggaaatcaagagactcgaggacctgaagaacgtgttcccacctgaggtggccgtgttcgagcctagcgaggccgagatcagccacacccagaaagccaccctcgtgtgcctggctaccggcttctaccccgaccatgtggaactgtcttggtgggtcaacggcaaagaggtgcacagcggcgtgtctaccgacccccagccactgaaagaacagcccgccctgaacgacagccggtactgcctgagcagcagactgagagtgtccgccaccttctggcagaacccccggaaccacttcagatgccaggtgcagttctacggcctgagcgagaacgacgagtggacccaggacagagccaagcccgtgacccagatcgtgtctgccgaagcctggggcagagccgattgcggatccacaacacctggcgagagaagtagcctgcctgccttctatcctggcaccagcggctcttgttctggctgtggatctctgagcctgcctctgctggctggactggttgctgctgatgctgtggcctctctgctgattgtgggagccgtgttcctgtgcgccagacctagaagaagccccgctcaagaggacggcaaggtgtacatcaacatgcccggcagaggaagcactagtagagtgaagttcagcagaagcgccgacgcccctgcctaccagcagggacagaaccaactgtacaacgagctgaacctgggcagacgggaagagtacgacgtgctggacaagcggagaggcagggaccctgagatgggcggaaagccccagcggagaaagaacccccaggaaggactgtataacgaactccagaaagacaagatggccgaagcctacagcgagatcggcatgaagggcgagcggagaagaggcaagggccacgatggcctgtaccagggcctgagcaccgccaccaaggacacctatgacgccctgcacatgcaggccctgcctccaagaagggccaagcgatctggatctggagcaacaaacttctcactactcaaacaagcaggtgacgtggaggagaatcccgggcctatggactggatttggcgcatccttttccttgtcggcgctgctaccggcgcgcattccgggcccgaagtgcaactggttgaatccggtggcggcctggtgcaagcaggcggatctctcagacttagctgtgccgcctccggcagaaccttcacaatgggatggtttaggcaggctccagggaaagagagagagttcgtcgccgccatctctctgtctcccacactggcctactacgccgactctgtgaaaggccggttcaccatctccagagataatgccaagaacaccgtggtgctgcaaatgaactctctgaaacccgaggatacagccctgtactattgtgccgctgaccggaagtccgtgatgagcatcagacccgattactggggacagggcacacaagtcacagtgtcctctggatccggcggcggaggatctggcggaggcggatctgggggcggaggctctttcgaacaagttcagcttcaacagcctggcgctgagctggtcaaacctggcgcttctgtgaagatgagctgcaaagccagcggctacgccttcagcagctactggatcaactggatgaagcagaaacccggccagggactcgaatggatcggccaaatctatcccggcgacggcgacaccaactacaacggcaagttcaagggcagagccacactgaccgccgatacctctagcagcacagcctacatgcagctgagcagcctgaccagcgaagatagcgccgtgtacttctgtgcccggtccatcacaacagtcgtgggctgcgctatggactattggggccagggaacaagcgtgaccgtgtctagtacgcgtatccagaaccctgatcctgccgtgtaccagctgcgggatagcaagagcagcgacaagagcgtgtgtctgttcaccgacttcgacagccagaccaacgtgtcccagagcaaggactccgacgtgtacatcaccgataagaccgtgctggacatgcggagcatggacttcaagagcaactccgccgtggcctggtccaacaagtccgatttcgcctgcgccaacgccttcaacaacagcattatccccgaggacacattcttcccaagccccgagagcagctgcggtacccttcaggacccttgcagcaactgtccagccggaaccttttgtgataacaacagaaatcagatatgcagcccctgtccgccaaactcctttagcagtgctggcggccagcggacatgtgacatttgtcggcagtgcaaaggggttttccgcaccagaaaagagtgctcctccaccagcaatgccgagtgtgactgtaccccaggctttcactgtctcggcgctggatgtagcatgtgtgaacaggactgtaaacaggggcaagaactcacgaagaaagggtgcaaagactgctgttttgggacgttcaacgatcagaagcggggaatctgtaggccctggacaaactgttctctggacggcaagtccgtgctcgtgaatggaacaaaagagcgggacgttgtctgcggcccaagtcctgctgatcttagcccaggcgcttcctctgtgactcctccagctcctgcacgcgaacctggacactctccccagatcatctcattttttctcgctctcacatcaaccgctttgctgttcctgctcttttttctcaccctccggttctccgtggttaagagaggccggaaaaaactcctctatatctttaaacagccctttatgcgcccggtccaaacaacccaagaggaagatggctgctcttgcagattcccggaagaggaagaaggcggctgcgagctgagctctagacgggttaagttttccagatccgcagacgcacccgcttaccaacaagggcagaaccaactctacaatgaacttaatttggggcggagggaagagtacgacgttctggacaaaaggaggggacgagatcccgagatgggcggaaagcctcagcgaaggaagaatccgcaagaggggctttataacgaactccagaaagataaaatggcagaagcctatagtgagattgggatgaagggagaaaggaggaggggtaaaggtcacgatgggttgtaccaaggattgagcacagccactaaagatacctatgatgcgctccacatgcaggccctgccgccaagacgcgccaagagaagcggatctggcgtgaagcagaccctgaatttcgacctgctgaagctggctggcgacgtggaatccaacccaggccctggccatatgaccgagtacaagcccacggtgcgcctcgccacccgcgacgacgtccccagggccgtacgcaccctcgccgccgcgttcgccgactaccccgccacgcgccacaccgtcgatccggaccgccacatcgagcgggtcaccgagctgcaagaactcttcctcacgcgcgtcgggctcgacatcggcaaggtgtgggtcgcggacgacggcgccgcggtggcggtctggaccacgccggagagcgtcgaagcgggggcggtgttcgccgagatcggcccgcgcatggccgagttgagcggttcccggctggccgcgcagcaacagatggaaggcctcctggcgccgcaccggcccaaggagcccgcgtggttcctggccaccgtcggcgtctcgcccgaccaccagggcaagggtctgggcagcgccgtcgtgctccccggagtggaggcggccgagcgcgccggggtgcccgccttcctggagacctccgcgccccgcaacctccccttctacgagcggctcggcttcaccgtcaccgccgacgtcgaggtgcccgaaggaccgcgcacctggtgcatgacccgcaagcccggtgcctga

SEQ ID NO: 5910 - DNA, 3921 bp, Artificial Sequence
  Synthetic Polynucleotide
atggccttaccagtgaccgccttgctcctgccgctggccttgctgctccacgccgccaggccggaagtgcagctggttgaatctggcggaggactggttcaggctggcggatctctgagactgtcttgtgccgccagcggcagaacctttagcatgggctggtttagacaggcccctggcaaagagagagagttcgtcgccgccatcacatactctggcggcagcccttactacgccgactctgtgaagggcagattcaccatcagccgggacaacgccaagaacaccgtgtacctccagatgaacagcctgaagcctgaggacaccgccgtgtactactgcgccgccaatccaacatacggcagcgactggaacgccgagaattggggccagggaacccaagtgacagtgtctagcctcgaggacctgaagaacgtgttcccacctgaggtggccgtgttcgagcctagcgaggccgagatcagccacacccagaaagccaccctcgtgtgcctggctaccggcttctaccccgaccatgtggaactgtcttggtgggtcaacggcaaagaggtgcacagcggcgtgtctaccgacccccagccactgaaagaacagcccgccctgaacgacagccggtactgcctgagcagcagactgagagtgtccgccaccttctggcagaacccccggaaccacttcagatgccaggtgcagttctacggcctgagcgagaacgacgagtggacccaggacagagccaagcccgtgacccagatcgtgtctgccgaagcctggggcagagccgattgcggatccacaacacctggcgagagaagtagcctgcctgccttctatcctggcaccagcggctcttgttctggctgtggatctctgagcctgcctctgctggctggactggttgctgctgatgctgtggcctctctgctgattgtgggagccgtgttcctgtgcgccagacctagaagaagccccgctcaagaggacggcaaggtgtacatcaacatgcccggcagaggaagcactagtagagtgaagttcagcagaagcgccgacgcccctgcctaccagcagggacagaaccaactgtacaacgagctgaacctgggcagacgggaagagtacgacgtgctggacaagcggagaggcagggaccctgagatgggcggaaagccccagcggagaaagaacccccaggaaggactgtataacgaactccagaaagacaagatggccgaagcctacagcgagatcggcatgaagggcgagcggagaagaggcaagggccacgatggcctgtaccagggcctgagcaccgccaccaaggacacctatgacgccctgcacatgcaggccctgcctccaagaagggccaagcgatctggatctggagcaacaaacttctcactactcaaacaagcaggtgacgtggaggagaatcccgggcctatggactggatttggcgcatccttttccttgtcggcgctgctaccggcgcgcattccgggcccgaagtgcaactggttgaatccggtggcggcctggtgcaagcaggcggatctctcagacttagctgtgccgcctccggcagaaccttcacaatgggatggtttaggcaggctccagggaaagagagagagttcgtcgccgccatctctctgtctcccacactggcctactacgccgactctgtgaaaggccggttcaccatctccagagataatgccaagaacaccgtggtgctgcaaatgaactctctgaaacccgaggatacagccctgtactattgtgccgctgaccggaagtccgtgatgagcatcagacccgattactggggacagggcacacaagtcacagtgtcctctacgcgtatccagaaccctgatcctgccgtgtaccagctgcgggatagcaagagcagcgacaagagcgtgtgtctgttcaccgacttcgacagccagaccaacgtgtcccagagcaaggactccgacgtgtacatcaccgataagaccgtgctggacatgcggagcatggacttcaagagcaactccgccgtggcctggtccaacaagtccgatttcgcctgcgccaacgccttcaacaacagcattatccccgaggacacattcttcccaagccccgagagcagctgcggtacccttcaggacccttgcagcaactgtccagccggaaccttttgtgataacaacagaaatcagatatgcagcccctgtccgccaaactcctttagcagtgctggcggccagcggacatgtgacatttgtcggcagtgcaaaggggttttccgcaccagaaaagagtgctcctccaccagcaatgccgagtgtgactgtaccccaggctttcactgtctcggcgctggatgtagcatgtgtgaacaggactgtaaacaggggcaagaactcacgaagaaagggtgcaaagactgctgttttgggacgttcaacgatcagaagcggggaatctgtaggccctggacaaactgttctctggacggcaagtccgtgctcgtgaatggaacaaaagagcgggacgttgtctgcggcccaagtcctgctgatcttagcccaggcgcttcctctgtgactcctccagctcctgcacgcgaacctggacactctccccagatcatctcattttttctcgctctcacatcaaccgctttgctgttcctgctcttttttctcaccctccggttctccgtggttaagagaggccggaaaaaactcctctatatctttaaacagccctttatgcgcccggtccaaacaacccaagaggaagatggctgctcttgcagattcccggaagaggaagaaggcggctgcgagctgagctctagacgggttaagttttccagatccgcagacgcacccgcttaccaacaagggcagaaccaactctacaatgaacttaatttggggcggagggaagagtacgacgttctggacaaaaggaggggacgagatcccgagatgggcggaaagcctcagcgaaggaagaatccgcaagaggggctttataacgaactccagaaagataaaatggcagaagcctatagtgagattgggatgaagggagaaaggaggaggggtaaaggtcacgatgggttgtaccaaggattgagcacagccactaaagatacctatgatgcgctccacatgcaggccctgccgccaagacgcgccaagagaagcggatctggcgtgaagcagaccctgaatttcgacctgctgaagctggctggcgacgtggaatccaacccaggccctggccatatgaccgagtacaagcccacggtgcgcctcgccacccgcgacgacgtccccagggccgtacgcaccctcgccgccgcgttcgccgactaccccgccacgcgccacaccgtcgatccggaccgccacatcgagcgggtcaccgagctgcaagaactcttcctcacgcgcgtcgggctcgacatcggcaaggtgtgggtcgcggacgacggcgccgcggtggcggtctggaccacgccggagagcgtcgaagcgggggcggtgttcgccgagatcggcccgcgcatggccgagttgagcggttcccggctggccgcgcagcaacagatggaaggcctcctggcgccgcaccggcccaaggagcccgcgtggttcctggccaccgtcggcgtctcgcccgaccaccagggcaagggtctgggcagcgccgtcgtgctccccggagtggaggcggccgagcgcgccggggtgcccgccttcctggagacctccgcgccccgcaacctccccttctacgagcggctcggcttcaccgtcaccgccgacgtcgaggtgcccgaaggaccgcgcacctggtgcatgacccgcaagcccggtgcctga

SEQ ID NO: 5911 - DNA, 1758 bp, Artificial Sequence; identical to SEQ ID NO: 2037
  Synthetic Polynucleotide

SEQ ID NO: 5912 - DNA, 1371 bp, Artificial Sequence; identical to SEQ ID NO: 5880
  Synthetic Polynucleotide

SEQ ID NO: 5913 - DNA, 1371 bp, Artificial Sequence; identical to SEQ ID NO: 5881
  Synthetic Polynucleotide

SEQ ID NO: 5914 - DNA, 993 bp, Artificial Sequence; identical to SEQ ID NO: 5882
  Synthetic Polynucleotide

SEQ ID NO: 5915 - DNA, 993 bp, Artificial Sequence; identical to SEQ ID NO: 5883
  Synthetic Polynucleotide

SEQ ID NO: 5916 - DNA, 993 bp, Artificial Sequence; identical to SEQ ID NO: 5884
  Synthetic Polynucleotide

SEQ ID NO: 5917 - DNA, 999 bp, Artificial Sequence; identical to SEQ ID NO: 5885
  Synthetic Polynucleotide

SEQ ID NO: 5918 - DNA, 1023 bp, Artificial Sequence; identical to SEQ ID NO: 5886
  Synthetic Polynucleotide

SEQ ID NO: 5919 - DNA, 1011 bp, Artificial Sequence; identical to SEQ ID NO: 5887
  Synthetic Polynucleotide

SEQ ID NO: 5920 - DNA, 996 bp, Artificial Sequence; identical to SEQ ID NO: 5888
  Synthetic Polynucleotide

SEQ ID NO: 5921 - DNA, 1011 bp, Artificial Sequence; identical to SEQ ID NO: 5889
  Synthetic Polynucleotide

SEQ ID NO: 5922 - DNA, 813 bp, Artificial Sequence; identical to SEQ ID NO: 5890
  Synthetic Polynucleotide

SEQ ID NO: 5923 - DNA, 906 bp, Artificial Sequence; identical to SEQ ID NO: 5891
  Synthetic Polynucleotide

SEQ ID NO: 5924 - DNA, 909 bp, Artificial Sequence; identical to SEQ ID NO: 5892
  Synthetic Polynucleotide

SEQ ID NO: 5925 - DNA, 1560 bp, Artificial Sequence; identical to SEQ ID NO: 5893
  Synthetic Polynucleotide

SEQ ID NO: 5926 - DNA, 1200 bp, Artificial Sequence; identical to SEQ ID NO: 5894
  Synthetic Polynucleotide

SEQ ID NO: 5927 - DNA, 798 bp, Artificial Sequence; identical to SEQ ID NO: 5895
  Synthetic Polynucleotide

SEQ ID NO: 5928 - DNA, 723 bp, Artificial Sequence; identical to SEQ ID NO: 5896
  Synthetic Polynucleotide

SEQ ID NO: 5929 - DNA, 1497 bp, Artificial Sequence; identical to SEQ ID NO: 5897
  Synthetic Polynucleotide

SEQ ID NO: 5930 - DNA, 1497 bp, Artificial Sequence; identical to SEQ ID NO: 5898
  Synthetic Polynucleotide

SEQ ID NO: 5931 - DNA, 3690 bp, Artificial Sequence
  Synthetic Polynucleotide
atggccttaccagtgaccgccttgctcctgccgctggccttgctgctccacgccgccaggccggacatccagatgacacagagccctagcagcctgtctgccagcgtgggagacagagtgaccatcacatgcaaggccagcgaccacatcaacaactggctggcctggtatcagcagaagcctggacaggcccctaagctgctgatctacggcgctaccacactggaaacaggcgtgcccagcagattttctggcagcggctctggcaccgactacaccctgacaatatccagcctccagcctgaggacttcgccacctactactgtcagcagagctggaacaccccttggacattcggccagggcaccaagctggaaatcaagagactcgagctgcaagacccttgctctaattgccctgccggcaccttctgcgacaacaaccggaaccagatttgctccccttgtcctcctaacagcttcagctctgccggcggacagagaacctgcgacatctgtagacagtgcaagggcgtgttcagaacccggaaagagtgcagcagcacctccaacgccgagtgcgattgcacacctggcttccattgtctcggagccggctgttctatgtgcgagcaggattgcaagcagggccaagagctgaccaagaagggctgcaaggattgctgcttcggcacctttaacgaccagaagagaggcatctgccggccttggaccaactgtagcctggatggcaagagcgtgctggtcaacggcaccaaagaacgggatgtcgtgtgcggaccttctccagccgatttgtctcctggcgcttctagcgtgacacctcctgctccagctagagagcctggacacagccctcagatcatctcattctttctggccctgacctctacagccctgctgtttctgctgttcttcctgacactgcggttcagcgtggtcaagcggggcagaaagaagctgctgtacatcttcaagcagcctttcatgcggcccgtgcagaccacacaagaagaggacggctgctcctgtcggttccccgaggaagaggaaggcggttgcgaacttagcactagtagagtgaagttcagcagaagcgccgacgcccctgcctaccagcagggacagaaccaactgtacaacgagctgaacctgggcagacgggaagagtacgacgtgctggacaagcggagaggcagggaccctgagatgggcggaaagccccagcggagaaagaacccccaggaaggactgtataacgaactccagaaagacaagatggccgaagcctacagcgagatcggcatgaagggcgagcggagaagaggcaagggccacgatggcctgtaccagggcctgagcaccgccaccaaggacacctatgacgccctgcacatgcaggccctgcctccaagaagggccaagcgatctggatctggagcaacaaacttctcactactcaaacaagcaggtgacgtggaggagaatcccgggcctatggactggatttggcgcatccttttccttgtcggcgctgctaccggcgcgcattccttcgaacaagttcagcttcaacagcctggcgctgagctggtcaaacctggcgcttctgtgaagatgagctgcaaagccagcggctacgccttcagcagctactggatcaactggatgaagcagaaacccggccagggactcgaatggatcggccaaatctatcccggcgacggcgacaccaactacaacggcaagttcaagggcagagccacactgaccgccgatacctctagcagcacagcctacatgcagctgagcagcctgaccagcgaagatagcgccgtgtacttctgtgcccggtccatcacaacagtcgtgggctgcgctatggactattggggccagggaacaagcgtgaccgtgtctagtacgcgtcttcaggacccttgcagcaactgtccagccggaaccttttgtgataacaacagaaatcagatatgcagcccctgtccgccaaactcctttagcagtgctggcggccagcggacatgtgacatttgtcggcagtgcaaaggggttttccgcaccagaaaagagtgctcctccaccagcaatgccgagtgtgactgtaccccaggctttcactgtctcggcgctggatgtagcatgtgtgaacaggactgtaaacaggggcaagaactcacgaagaaagggtgcaaagactgctgttttgggacgttcaacgatcagaagcggggaatctgtaggccctggacaaactgttctctggacggcaagtccgtgctcgtgaatggaacaaaagagcgggacgttgtctgcggcccaagtcctgctgatcttagcccaggcgcttcctctgtgactcctccagctcctgcacgcgaacctggacactctccccagatcatctcattttttctcgctctcacatcaaccgctttgctgttcctgctcttttttctcaccctccggttctccgtggttaagagaggccggaaaaaactcctctatatctttaaacagccctttatgcgcccggtccaaacaacccaagaggaagatggctgctcttgcagattcccggaagaggaagaaggcggctgcgagctgagctctagacgggttaagttttccagatccgcagacgcacccgcttaccaacaagggcagaaccaactctacaatgaacttaatttggggcggagggaagagtacgacgttctggacaaaaggaggggacgagatcccgagatgggcggaaagcctcagcgaaggaagaatccgcaagaggggctttataacgaactccagaaagataaaatggcagaagcctatagtgagattgggatgaagggagaaaggaggaggggtaaaggtcacgatgggttgtaccaaggattgagcacagccactaaagatacctatgatgcgctccacatgcaggccctgccgccaagacgcgccaagagaagcggatctggcgtgaagcagaccctgaatttcgacctgctgaagctggctggcgacgtggaatccaacccaggccctggccatatgaccgagtacaagcccacggtgcgcctcgccacccgcgacgacgtccccagggccgtacgcaccctcgccgccgcgttcgccgactaccccgccacgcgccacaccgtcgatccggaccgccacatcgagcgggtcaccgagctgcaagaactcttcctcacgcgcgtcgggctcgacatcggcaaggtgtgggtcgcggacgacggcgccgcggtggcggtctggaccacgccggagagcgtcgaagcgggggcggtgttcgccgagatcggcccgcgcatggccgagttgagcggttcccggctggccgcgcagcaacagatggaaggcctcctggcgccgcaccggcccaaggagcccgcgtggttcctggccaccgtcggcgtctcgcccgaccaccagggcaagggtctgggcagcgccgtcgtgctccccggagtggaggcggccgagcgcgccggggtgcccgccttcctggagacctccgcgccccgcaacctccccttctacgagcggctcggcttcaccgtcaccgccgacgtcgaggtgcccgaaggaccgcgcacctggtgcatgacccgcaagcccggtgcctga

SEQ ID NO: 5932 - DNA, 3846 bp, Artificial Sequence
  Synthetic Polynucleotide
atggccttaccagtgaccgccttgctcctgccgctggccttgctgctccacgccgccaggccggcatgcgaagtgcagctgcttgaaagtggcggcggactgattcagcctggcggatctctgagactgagctgtgccgccagcggcttcaccttttctagccacgccatgacctgggtccgacaggcacctggaaaagggcttgaatgggtgtccgccatcagcggctctggcgattacacacactacgccgacagcgtgaagggcagattcaccatcagcagagacaacagcaagaacaccgtgtacctccagatgaacagcctgagagccgaggacagcgccgtgtattattgcgccaaggatgaggatggcggcagcctgcttggacacagaggacaaggcaccctggtcaccgtttcttccggtaccggcggaggcggatctggcggcggaggtagcggtggcggaggatctgaattcggatctctcgagctgcaagacccttgctctaattgccctgccggcaccttctgcgacaacaaccggaaccagatttgctccccttgtcctcctaacagcttcagctctgccggcggacagagaacctgcgacatctgtagacagtgcaagggcgtgttcagaacccggaaagagtgcagcagcacctccaacgccgagtgcgattgcacacctggcttccattgtctcggagccggctgttctatgtgcgagcaggattgcaagcagggccaagagctgaccaagaagggctgcaaggattgctgcttcggcacctttaacgaccagaagagaggcatctgccggccttggaccaactgtagcctggatggcaagagcgtgctggtcaacggcaccaaagaacgggatgtcgtgtgcggaccttctccagccgatttgtctcctggcgcttctagcgtgacacctcctgctccagctagagagcctggacacagccctcagatcatctcattctttctggccctgacctctacagccctgctgtttctgctgttcttcctgacactgcggttcagcgtggtcaagcggggcagaaagaagctgctgtacatcttcaagcagcctttcatgcggcccgtgcagaccacacaagaagaggacggctgctcctgtcggttccccgaggaagaggaaggcggttgcgaacttagcactagtagagtgaagttcagcagaagcgccgacgcccctgcctaccagcagggacagaaccaactgtacaacgagctgaacctgggcagacgggaagagtacgacgtgctggacaagcggagaggcagggaccctgagatgggcggaaagccccagcggagaaagaacccccaggaaggactgtataacgaactccagaaagacaagatggccgaagcctacagcgagatcggcatgaagggcgagcggagaagaggcaagggccacgatggcctgtaccagggcctgagcaccgccaccaaggacacctatgacgccctgcacatgcaggccctgcctccaagaagggccaagcgatctggatctggagcaacaaacttctcactactcaaacaagcaggtgacgtggaggagaatcccgggcctatggactggatttggcgcatccttttccttgtcggcgctgctaccggcgcgcattccgggcccgaagtgcagctggttgaatctggcggaggactggttcaggctggcggatctctgagactgtcttgtgccgccagcggcagaacctttagcatgggctggtttagacaggcccctggcaaagagagagagttcgtcgccgccatcacatactctggcggcagcccttactacgccgactctgtgaagggcagattcaccatcagccgggacaacgccaagaacaccgtgtacctccagatgaacagcctgaagcctgaggacaccgccgtgtactactgcgccgccaatccaacatacggcagcgactggaacgccgagaattggggccagggaacccaagtgacagtgtctagcggatccggcggcggaggatctggcggaggcggatctgggggcggaggctctttcgaaggcagcacgcgtcttcaggacccttgcagcaactgtccagccggaaccttttgtgataacaacagaaatcagatatgcagcccctgtccgccaaactcctttagcagtgctggcggccagcggacatgtgacatttgtcggcagtgcaaaggggttttccgcaccagaaaagagtgctcctccaccagcaatgccgagtgtgactgtaccccaggctttcactgtctcggcgctggatgtagcatgtgtgaacaggactgtaaacaggggcaagaactcacgaagaaagggtgcaaagactgctgttttgggacgttcaacgatcagaagcggggaatctgtaggccctggacaaactgttctctggacggcaagtccgtgctcgtgaatggaacaaaagagcgggacgttgtctgcggcccaagtcctgctgatcttagcccaggcgcttcctctgtgactcctccagctcctgcacgcgaacctggacactctccccagatcatctcattttttctcgctctcacatcaaccgctttgctgttcctgctcttttttctcaccctccggttctccgtggttaagagaggccggaaaaaactcctctatatctttaaacagccctttatgcgcccggtccaaacaacccaagaggaagatggctgctcttgcagattcccggaagaggaagaaggcggctgcgagctgagctctagacgggttaagttttccagatccgcagacgcacccgcttaccaacaagggcagaaccaactctacaatgaacttaatttggggcggagggaagagtacgacgttctggacaaaaggaggggacgagatcccgagatgggcggaaagcctcagcgaaggaagaatccgcaagaggggctttataacgaactccagaaagataaaatggcagaagcctatagtgagattgggatgaagggagaaaggaggaggggtaaaggtcacgatgggttgtaccaaggattgagcacagccactaaagatacctatgatgcgctccacatgcaggccctgccgccaagacgcgccaagagaagcggatctggcgtgaagcagaccctgaatttcgacctgctgaagctggctggcgacgtggaatccaacccaggccctggccatatgaccgagtacaagcccacggtgcgcctcgccacccgcgacgacgtccccagggccgtacgcaccctcgccgccgcgttcgccgactaccccgccacgcgccacaccgtcgatccggaccgccacatcgagcgggtcaccgagctgcaagaactcttcctcacgcgcgtcgggctcgacatcggcaaggtgtgggtcgcggacgacggcgccgcggtggcggtctggaccacgccggagagcgtcgaagcgggggcggtgttcgccgagatcggcccgcgcatggccgagttgagcggttcccggctggccgcgcagcaacagatggaaggcctcctggcgccgcaccggcccaaggagcccgcgtggttcctggccaccgtcggcgtctcgcccgaccaccagggcaagggtctgggcagcgccgtcgtgctccccggagtggaggcggccgagcgcgccggggtgcccgccttcctggagacctccgcgccccgcaacctccccttctacgagcggctcggcttcaccgtcaccgccgacgtcgaggtgcccgaaggaccgcgcacctggtgcatgacccgcaagcccggtgcctga

SEQ ID NO: 5933 - DNA, 4293 bp, Artificial Sequence
  Synthetic Polynucleotide
atggccttaccagtgaccgccttgctcctgccgctggccttgctgctccacgccgccaggccggacatccagatgacacagagccctagcagcctgtctgccagcgtgggagacagagtgaccatcacatgcaaggccagcgaccacatcaacaactggctggcctggtatcagcagaagcctggacaggcccctaagctgctgatctacggcgctaccacactggaaacaggcgtgcccagcagattttctggcagcggctctggcaccgactacaccctgacaatatccagcctccagcctgaggacttcgccacctactactgtcagcagagctggaacaccccttggacattcggccagggcaccaagctggaaatcaagagactcgagggacagcctaaggccaatcctaccgtgacactgttccctccaagcagcgaagaactccaggccaacaaggccacacttgtgtgcctgatctccgacttctaccctggggctgtgacagtggcttggaaggccgatggatctcctgtgaaagccggcgtggaaaccaccaagccatccaagcagagcaacaacaaatacgccgccagctcctacctgagcctgacacctgagcagtggaagtcccacagatcctacagctgccaagtgacccacgaaggcagcaccgtggaaaagacagtggcccctacagagtgcagcggatccctgcaagacccttgctctaattgccctgccggcaccttctgcgacaacaaccggaaccagatttgctccccttgtcctcctaacagcttcagctctgccggcggacagagaacctgcgacatctgtagacagtgcaagggcgtgttcagaacccggaaagagtgcagcagcacctccaacgccgagtgcgattgcacacctggcttccattgtctcggagccggctgttctatgtgcgagcaggattgcaagcagggccaagagctgaccaagaagggctgcaaggattgctgcttcggcacctttaacgaccagaagagaggcatctgccggccttggaccaactgtagcctggatggcaagagcgtgctggtcaacggcaccaaagaacgggatgtcgtgtgcggaccttctccagccgatttgtctcctggcgcttctagcgtgacacctcctgctccagctagagagcctggacacagccctcagatcatctcattctttctggccctgacctctacagccctgctgtttctgctgttcttcctgacactgcggttcagcgtggtcaagcggggcagaaagaagctgctgtacatcttcaagcagcctttcatgcggcccgtgcagaccacacaagaagaggacggctgctcctgtcggttccccgaggaagaggaaggcggttgcgaacttagcactagtagagtgaagttcagcagaagcgccgacgcccctgcctaccagcagggacagaaccaactgtacaacgagctgaacctgggcagacgggaagagtacgacgtgctggacaagcggagaggcagggaccctgagatgggcggaaagccccagcggagaaagaacccccaggaaggactgtataacgaactccagaaagacaagatggccgaagcctacagcgagatcggcatgaagggcgagcggagaagaggcaagggccacgatggcctgtaccagggcctgagcaccgccaccaaggacacctatgacgccctgcacatgcaggccctgcctccaagaagggccaagcgatctggatctggagcaacaaacttctcactactcaaacaagcaggtgacgtggaggagaatcccgggcctatggactggatttggcgcatccttttccttgtcggcgctgctaccggcgcgcattccttcgaacaagttcagcttcaacagcctggcgctgagctggtcaaacctggcgcttctgtgaagatgagctgcaaagccagcggctacgccttcagcagctactggatcaactggatgaagcagaaacccggccagggactcgaatggatcggccaaatctatcccggcgacggcgacaccaactacaacggcaagttcaagggcagagccacactgaccgccgatacctctagcagcacagcctacatgcagctgagcagcctgaccagcgaagatagcgccgtgtacttctgtgcccggtccatcacaacagtcgtgggctgcgctatggactattggggccagggaacaagcgtgaccgtgtctagtacgcgtgcctctacaaagggaccctccgtgtttcctctggctcccagcagcaagtctacaagcggaggaacagccgctctgggctgcctggtcaaggattactttcccgagcctgtgaccgtgtcctggaatagcggagcactgacaagcggcgtgcacacctttccagccgtgctgcaaagcagcggcctgtactctctgagcagcgtggtcacagtgcctagctctagcctgggcacccagacctacatctgcaatgtgaaccacaagcctagcaacaccaaggtggacaagagagtggaacccaagagctgtggtacccttcaggacccttgcagcaactgtccagccggaaccttttgtgataacaacagaaatcagatatgcagcccctgtccgccaaactcctttagcagtgctggcggccagcggacatgtgacatttgtcggcagtgcaaaggggttttccgcaccagaaaagagtgctcctccaccagcaatgccgagtgtgactgtaccccaggctttcactgtctcggcgctggatgtagcatgtgtgaacaggactgtaaacaggggcaagaactcacgaagaaagggtgcaaagactgctgttttgggacgttcaacgatcagaagcggggaatctgtaggccctggacaaactgttctctggacggcaagtccgtgctcgtgaatggaacaaaagagcgggacgttgtctgcggcccaagtcctgctgatcttagcccaggcgcttcctctgtgactcctccagctcctgcacgcgaacctggacactctccccagatcatctcattttttctcgctctcacatcaaccgctttgctgttcctgctcttttttctcaccctccggttctccgtggttaagagaggccggaaaaaactcctctatatctttaaacagccctttatgcgcccggtccaaacaacccaagaggaagatggctgctcttgcagattcccggaagaggaagaaggcggctgcgagctgagctctagacgggttaagttttccagatccgcagacgcacccgcttaccaacaagggcagaaccaactctacaatgaacttaatttggggcggagggaagagtacgacgttctggacaaaaggaggggacgagatcccgagatgggcggaaagcctcagcgaaggaagaatccgcaagaggggctttataacgaactccagaaagataaaatggcagaagcctatagtgagattgggatgaagggagaaaggaggaggggtaaaggtcacgatgggttgtaccaaggattgagcacagccactaaagatacctatgatgcgctccacatgcaggccctgccgccaagacgcgccaagagaagcggatctggcgtgaagcagaccctgaatttcgacctgctgaagctggctggcgacgtggaatccaacccaggccctggccatatggctacctacgaggtgctgtgcgaggtggcaagaaagctgggcaccgacgacagagaagtggtgctgttcctgctgaacgtgttcatccctcagcctacactggcccagctgatcggtgcactgagagccctgaaagaggaaggccggctgacctttcctctgctggccgaatgcctgttcagagccggaagaagggatctgctgcgggacctgctgcatctggaccccagatttctggaaagacacctggccggcaccatgagctacttcagcccttaccagctgaccgtgctgcacgttgacggcgaactgtgcgccagagatattcggagcctgatcttcctgagcaaggacaccatcggcagccggtctacccctcagacatttctgcactgggtgtactgcatggaaaacctggacctgctcggccccacagatgtggatgccctgatgtccatgctgagaagcctgagcagagtggacctccagagacaggtgcagacactgatgggactgcacctgagcggacctagccacagccagcactacagacacacccct

SEQ ID NO: 5934 - DNA, 4452 bp, Artificial Sequence
  Synthetic Polynucleotide
atggccttaccagtgaccgccttgctcctgccgctggccttgctgctccacgccgccaggccggacatccagatgacacagagccctagcagcctgtctgccagcgtgggagacagagtgaccatcacatgcaaggccagcgaccacatcaacaactggctggcctggtatcagcagaagcctggacaggcccctaagctgctgatctacggcgctaccacactggaaacaggcgtgcccagcagattttctggcagcggctctggcaccgactacaccctgacaatatccagcctccagcctgaggacttcgccacctactactgtcagcagagctggaacaccccttggacattcggccagggcaccaagctggaaatcaagagactcgagggacagcctaaggccaatcctaccgtgacactgttccctccaagcagcgaagaactccaggccaacaaggccacacttgtgtgcctgatctccgacttctaccctggggctgtgacagtggcttggaaggccgatggatctcctgtgaaagccggcgtggaaaccaccaagccatccaagcagagcaacaacaaatacgccgccagctcctacctgagcctgacacctgagcagtggaagtcccacagatcctacagctgccaagtgacccacgaaggcagcaccgtggaaaagacagtggcccctacagagtgcagcggatccctgcaagacccttgctctaattgccctgccggcaccttctgcgacaacaaccggaaccagatttgctccccttgtcctcctaacagcttcagctctgccggcggacagagaacctgcgacatctgtagacagtgcaagggcgtgttcagaacccggaaagagtgcagcagcacctccaacgccgagtgcgattgcacacctggcttccattgtctcggagccggctgttctatgtgcgagcaggattgcaagcagggccaagagctgaccaagaagggctgcaaggattgctgcttcggcacctttaacgaccagaagagaggcatctgccggccttggaccaactgtagcctggatggcaagagcgtgctggtcaacggcaccaaagaacgggatgtcgtgtgcggaccttctccagccgatttgtctcctggcgcttctagcgtgacacctcctgctccagctagagagcctggacacagccctcagatcatctcattctttctggccctgacctctacagccctgctgtttctgctgttcttcctgacactgcggttcagcgtggtcaagcggggcagaaagaagctgctgtacatcttcaagcagcctttcatgcggcccgtgcagaccacacaagaagaggacggctgctcctgtcggttccccgaggaagaggaaggcggttgcgaacttagcactagtagagtgaagttcagcagaagcgccgacgcccctgcctaccagcagggacagaaccaactgtacaacgagctgaacctgggcagacgggaagagtacgacgtgctggacaagcggagaggcagggaccctgagatgggcggaaagccccagcggagaaagaacccccaggaaggactgtataacgaactccagaaagacaagatggccgaagcctacagcgagatcggcatgaagggcgagcggagaagaggcaagggccacgatggcctgtaccagggcctgagcaccgccaccaaggacacctatgacgccctgcacatgcaggccctgcctccaagaagggccaagcgatctggatctggagcaacaaacttctcactactcaaacaagcaggtgacgtggaggagaatcccgggcctatggactggatttggcgcatccttttccttgtcggcgctgctaccggcgcgcattccttcgaacaagttcagcttcaacagcctggcgctgagctggtcaaacctggcgcttctgtgaagatgagctgcaaagccagcggctacgccttcagcagctactggatcaactggatgaagcagaaacccggccagggactcgaatggatcggccaaatctatcccggcgacggcgacaccaactacaacggcaagttcaagggcagagccacactgaccgccgatacctctagcagcacagcctacatgcagctgagcagcctgaccagcgaagatagcgccgtgtacttctgtgcccggtccatcacaacagtcgtgggctgcgctatggactattggggccagggaacaagcgtgaccgtgtctagtacgcgtgcctctacaaagggaccctccgtgtttcctctggctcccagcagcaagtctacaagcggaggaacagccgctctgggctgcctggtcaaggattactttcccgagcctgtgaccgtgtcctggaatagcggagcactgacaagcggcgtgcacacctttccagccgtgctgcaaagcagcggcctgtactctctgagcagcgtggtcacagtgcctagctctagcctgggcacccagacctacatctgcaatgtgaaccacaagcctagcaacaccaaggtggacaagagagtggaacccaagagctgtggtacccttcaggacccttgcagcaactgtccagccggaaccttttgtgataacaacagaaatcagatatgcagcccctgtccgccaaactcctttagcagtgctggcggccagcggacatgtgacatttgtcggcagtgcaaaggggttttccgcaccagaaaagagtgctcctccaccagcaatgccgagtgtgactgtaccccaggctttcactgtctcggcgctggatgtagcatgtgtgaacaggactgtaaacaggggcaagaactcacgaagaaagggtgcaaagactgctgttttgggacgttcaacgatcagaagcggggaatctgtaggccctggacaaactgttctctggacggcaagtccgtgctcgtgaatggaacaaaagagcgggacgttgtctgcggcccaagtcctgctgatcttagcccaggcgcttcctctgtgactcctccagctcctgcacgcgaacctggacactctccccagatcatctcattttttctcgctctcacatcaaccgctttgctgttcctgctcttttttctcaccctccggttctccgtggttaagagaggccggaaaaaactcctctatatctttaaacagccctttatgcgcccggtccaaacaacccaagaggaagatggctgctcttgcagattcccggaagaggaagaaggcggctgcgagctgagctctagacgggttaagttttccagatccgcagacgcacccgcttaccaacaagggcagaaccaactctacaatgaacttaatttggggcggagggaagagtacgacgttctggacaaaaggaggggacgagatcccgagatgggcggaaagcctcagcgaaggaagaatccgcaagaggggctttataacgaactccagaaagataaaatggcagaagcctatagtgagattgggatgaagggagaaaggaggaggggtaaaggtcacgatgggttgtaccaaggattgagcacagccactaaagatacctatgatgcgctccacatgcaggccctgccgccaagacgcgccaagagaagcggatctggcgtgaagcagaccctgaatttcgacctgctgaagctggctggcgacgtggaatccaacccaggccctggccatatgtccgactccaaggaggtccctagccttccatttttgcgacacttgctcgaagagttggacagccatgaggacagcttgctgctgtttctgtgtcacgacgcggccccgggctgcacgacggtcacgcaagctttgtgctcgcttagccaacagcgcaagctgaccctcgcggctctggtcgagatgctctacgtgctgcagcgtatggatcttctcaagagccgcttcgggctcagcaaggagggggccgagcaattgctgggcacaagctttctcacgcgctaccgcaagctcatggtttgcgtgggtgaggagctcgactcgagcgagctacgcgctctacgcttgttcgcgtgcaacctgaatccgagcctgagcacggcgctttctgagagcagccgctttgtcgagcttgtactcgcgcttgaaaacgtaggactcgtctcgccatcgagtgtttccgtgcttgcggacatgttgcgcactcttcggcgcctcgatttgtgccagcagcttgttgagtacgaacaacaagagcaagccaggtaccgttactgttacgcggcctcgccctcattgccagttcgtacgttacgtcgggggcacggcgcgagtgaacacgagcagctgtgcatgcccgtgcaagaatcctctgacagccccgagctgctgcgcacgcccgtacaagaatcctccagcgacagccccgagcaaacgact

SEQ ID NO: 5935 - DNA, 4329 bp, Artificial Sequence
  Synthetic Polynucleotide
atggccttaccagtgaccgccttgctcctgccgctggccttgctgctccacgccgccaggccggacatccagatgacacagagccctagcagcctgtctgccagcgtgggagacagagtgaccatcacatgcaaggccagcgaccacatcaacaactggctggcctggtatcagcagaagcctggacaggcccctaagctgctgatctacggcgctaccacactggaaacaggcgtgcccagcagattttctggcagcggctctggcaccgactacaccctgacaatatccagcctccagcctgaggacttcgccacctactactgtcagcagagctggaacaccccttggacattcggccagggcaccaagctggaaatcaagagactcgagggacagcctaaggccaatcctaccgtgacactgttccctccaagcagcgaagaactccaggccaacaaggccacacttgtgtgcctgatctccgacttctaccctggggctgtgacagtggcttggaaggccgatggatctcctgtgaaagccggcgtggaaaccaccaagccatccaagcagagcaacaacaaatacgccgccagctcctacctgagcctgacacctgagcagtggaagtcccacagatcctacagctgccaagtgacccacgaaggcagcaccgtggaaaagacagtggcccctacagagtgcagcggatccctgcaagacccttgctctaattgccctgccggcaccttctgcgacaacaaccggaaccagatttgctccccttgtcctcctaacagcttcagctctgccggcggacagagaacctgcgacatctgtagacagtgcaagggcgtgttcagaacccggaaagagtgcagcagcacctccaacgccgagtgcgattgcacacctggcttccattgtctcggagccggctgttctatgtgcgagcaggattgcaagcagggccaagagctgaccaagaagggctgcaaggattgctgcttcggcacctttaacgaccagaagagaggcatctgccggccttggaccaactgtagcctggatggcaagagcgtgctggtcaacggcaccaaagaacgggatgtcgtgtgcggaccttctccagccgatttgtctcctggcgcttctagcgtgacacctcctgctccagctagagagcctggacacagccctcagatcatctcattctttctggccctgacctctacagccctgctgtttctgctgttcttcctgacactgcggttcagcgtggtcaagcggggcagaaagaagctgctgtacatcttcaagcagcctttcatgcggcccgtgcagaccacacaagaagaggacggctgctcctgtcggttccccgaggaagaggaaggcggttgcgaacttagcactagtagagtgaagttcagcagaagcgccgacgcccctgcctaccagcagggacagaaccaactgtacaacgagctgaacctgggcagacgggaagagtacgacgtgctggacaagcggagaggcagggaccctgagatgggcggaaagccccagcggagaaagaacccccaggaaggactgtataacgaactccagaaagacaagatggccgaagcctacagcgagatcggcatgaagggcgagcggagaagaggcaagggccacgatggcctgtaccagggcctgagcaccgccaccaaggacacctatgacgccctgcacatgcaggccctgcctccaagaagggccaagcgatctggatctggagcaacaaacttctcactactcaaacaagcaggtgacgtggaggagaatcccgggcctatggactggatttggcgcatccttttccttgtcggcgctgctaccggcgcgcattccttcgaacaagttcagcttcaacagcctggcgctgagctggtcaaacctggcgcttctgtgaagatgagctgcaaagccagcggctacgccttcagcagctactggatcaactggatgaagcagaaacccggccagggactcgaatggatcggccaaatctatcccggcgacggcgacaccaactacaacggcaagttcaagggcagagccacactgaccgccgatacctctagcagcacagcctacatgcagctgagcagcctgaccagcgaagatagcgccgtgtacttctgtgcccggtccatcacaacagtcgtgggctgcgctatggactattggggccagggaacaagcgtgaccgtgtctagtacgcgtgcctctacaaagggaccctccgtgtttcctctggctcccagcagcaagtctacaagcggaggaacagccgctctgggctgcctggtcaaggattactttcccgagcctgtgaccgtgtcctggaatagcggagcactgacaagcggcgtgcacacctttccagccgtgctgcaaagcagcggcctgtactctctgagcagcgtggtcacagtgcctagctctagcctgggcacccagacctacatctgcaatgtgaaccacaagcctagcaacaccaaggtggacaagagagtggaacccaagagctgtggtacccttcaggacccttgcagcaactgtccagccggaaccttttgtgataacaacagaaatcagatatgcagcccctgtccgccaaactcctttagcagtgctggcggccagcggacatgtgacatttgtcggcagtgcaaaggggttttccgcaccagaaaagagtgctcctccaccagcaatgccgagtgtgactgtaccccaggctttcactgtctcggcgctggatgtagcatgtgtgaacaggactgtaaacaggggcaagaactcacgaagaaagggtgcaaagactgctgttttgggacgttcaacgatcagaagcggggaatctgtaggccctggacaaactgttctctggacggcaagtccgtgctcgtgaatggaacaaaagagcgggacgttgtctgcggcccaagtcctgctgatcttagcccaggcgcttcctctgtgactcctccagctcctgcacgcgaacctggacactctccccagatcatctcattttttctcgctctcacatcaaccgctttgctgttcctgctcttttttctcaccctccggttctccgtggttaagagaggccggaaaaaactcctctatatctttaaacagccctttatgcgcccggtccaaacaacccaagaggaagatggctgctcttgcagattcccggaagaggaagaaggcggctgcgagctgagctctagacgggttaagttttccagatccgcagacgcacccgcttaccaacaagggcagaaccaactctacaatgaacttaatttggggcggagggaagagtacgacgttctggacaaaaggaggggacgagatcccgagatgggcggaaagcctcagcgaaggaagaatccgcaagaggggctttataacgaactccagaaagataaaatggcagaagcctatagtgagattgggatgaagggagaaaggaggaggggtaaaggtcacgatgggttgtaccaaggattgagcacagccactaaagatacctatgatgcgctccacatgcaggccctgccgccaagacgcgccaagagaagcggatctggcgtgaagcagaccctgaatttcgacctgctgaagctggctggcgacgtggaatccaacccaggccctggccatatgaccgagtacaagcccacggtgcgcctcgccacccgcgacgacgtccccagggccgtacgcaccctcgccgccgcgttcgccgactaccccgccacgcgccacaccgtcgatccggaccgccacatcgagcgggtcaccgagctgcaagaactcttcctcacgcgcgtcgggctcgacatcggcaaggtgtgggtcgcggacgacggcgccgcggtggcggtctggaccacgccggagagcgtcgaagcgggggcggtgttcgccgagatcggcccgcgcatggccgagttgagcggttcccggctggccgcgcagcaacagatggaaggcctcctggcgccgcaccggcccaaggagcccgcgtggttcctggccaccgtcggcgtctcgcccgaccaccagggcaagggtctgggcagcgccgtcgtgctccccggagtggaggcggccgagcgcgccggggtgcccgccttcctggagacctccgcgccccgcaacctccccttctacgagcggctcggcttcaccgtcaccgccgacgtcgaggtgcccgaaggaccgcgcacctggtgcatgacccgcaagcccggtgcctga

SEQ ID NO: 5936 - DNA, 4740 bp, Artificial Sequence
  Synthetic Polynucleotide
atggccttaccagtgaccgccttgctcctgccgctggccttgctgctccacgccgccaggccggaagtgcagctggttgaatctggcggaggactggttcaggctggcggatctctgagactgtcttgtgccgccagcggcagaacctttagcatgggctggtttagacaggcccctggcaaagagagagagttcgtcgccgccatcacatactctggcggcagcccttactacgccgactctgtgaagggcagattcaccatcagccgggacaacgccaagaacaccgtgtacctccagatgaacagcctgaagcctgaggacaccgccgtgtactactgcgccgccaatccaacatacggcagcgactggaacgccgagaattggggccagggaacccaagtgacagtgtctagcggtaccggcggaggcggatctggcggcggaggtagcggtggcggaggatctgaattcgacatccagatgacacagagccctagcagcctgtctgccagcgtgggagacagagtgaccatcacatgcaaggccagcgaccacatcaacaactggctggcctggtatcagcagaagcctggacaggcccctaagctgctgatctacggcgctaccacactggaaacaggcgtgcccagcagattttctggcagcggctctggcaccgactacaccctgacaatatccagcctccagcctgaggacttcgccacctactactgtcagcagagctggaacaccccttggacattcggccagggcaccaagctggaaatcaagagactcgagggacagcctaaggccaatcctaccgtgacactgttccctccaagcagcgaagaactccaggccaacaaggccacacttgtgtgcctgatctccgacttctaccctggggctgtgacagtggcttggaaggccgatggatctcctgtgaaagccggcgtggaaaccaccaagccatccaagcagagcaacaacaaatacgccgccagctcctacctgagcctgacacctgagcagtggaagtcccacagatcctacagctgccaagtgacccacgaaggcagcaccgtggaaaagacagtggcccctacagagtgcagcggatccctgcaagacccttgctctaattgccctgccggcaccttctgcgacaacaaccggaaccagatttgctccccttgtcctcctaacagcttcagctctgccggcggacagagaacctgcgacatctgtagacagtgcaagggcgtgttcagaacccggaaagagtgcagcagcacctccaacgccgagtgcgattgcacacctggcttccattgtctcggagccggctgttctatgtgcgagcaggattgcaagcagggccaagagctgaccaagaagggctgcaaggattgctgcttcggcacctttaacgaccagaagagaggcatctgccggccttggaccaactgtagcctggatggcaagagcgtgctggtcaacggcaccaaagaacgggatgtcgtgtgcggaccttctccagccgatttgtctcctggcgcttctagcgtgacacctcctgctccagctagagagcctggacacagccctcagatcatctcattctttctggccctgacctctacagccctgctgtttctgctgttcttcctgacactgcggttcagcgtggtcaagcggggcagaaagaagctgctgtacatcttcaagcagcctttcatgcggcccgtgcagaccacacaagaagaggacggctgctcctgtcggttccccgaggaagaggaaggcggttgcgaacttagcactagtagagtgaagttcagcagaagcgccgacgcccctgcctaccagcagggacagaaccaactgtacaacgagctgaacctgggcagacgggaagagtacgacgtgctggacaagcggagaggcagggaccctgagatgggcggaaagccccagcggagaaagaacccccaggaaggactgtataacgaactccagaaagacaagatggccgaagcctacagcgagatcggcatgaagggcgagcggagaagaggcaagggccacgatggcctgtaccagggcctgagcaccgccaccaaggacacctatgacgccctgcacatgcaggccctgcctccaagaagggccaagcgatctggatctggagcaacaaacttctcactactcaaacaagcaggtgacgtggaggagaatcccgggcctatggactggatttggcgcatccttttccttgtcggcgctgctaccggcgcgcattccttcgaacaagttcagcttcaacagcctggcgctgagctggtcaaacctggcgcttctgtgaagatgagctgcaaagccagcggctacgccttcagcagctactggatcaactggatgaagcagaaacccggccagggactcgaatggatcggccaaatctatcccggcgacggcgacaccaactacaacggcaagttcaagggcagagccacactgaccgccgatacctctagcagcacagcctacatgcagctgagcagcctgaccagcgaagatagcgccgtgtacttctgtgcccggtccatcacaacagtcgtgggctgcgctatggactattggggccagggaacaagcgtgaccgtgtctagtacgcgtgcctctacaaagggaccctccgtgtttcctctggctcccagcagcaagtctacaagcggaggaacagccgctctgggctgcctggtcaaggattactttcccgagcctgtgaccgtgtcctggaatagcggagcactgacaagcggcgtgcacacctttccagccgtgctgcaaagcagcggcctgtactctctgagcagcgtggtcacagtgcctagctctagcctgggcacccagacctacatctgcaatgtgaaccacaagcctagcaacaccaaggtggacaagagagtggaacccaagagctgtggtacccttcaggacccttgcagcaactgtccagccggaaccttttgtgataacaacagaaatcagatatgcagcccctgtccgccaaactcctttagcagtgctggcggccagcggacatgtgacatttgtcggcagtgcaaaggggttttccgcaccagaaaagagtgctcctccaccagcaatgccgagtgtgactgtaccccaggctttcactgtctcggcgctggatgtagcatgtgtgaacaggactgtaaacaggggcaagaactcacgaagaaagggtgcaaagactgctgttttgggacgttcaacgatcagaagcggggaatctgtaggccctggacaaactgttctctggacggcaagtccgtgctcgtgaatggaacaaaagagcgggacgttgtctgcggcccaagtcctgctgatcttagcccaggcgcttcctctgtgactcctccagctcctgcacgcgaacctggacactctccccagatcatctcattttttctcgctctcacatcaaccgctttgctgttcctgctcttttttctcaccctccggttctccgtggttaagagaggccggaaaaaactcctctatatctttaaacagccctttatgcgcccggtccaaacaacccaagaggaagatggctgctcttgcagattcccggaagaggaagaaggcggctgcgagctgagctctagacgggttaagttttccagatccgcagacgcacccgcttaccaacaagggcagaaccaactctacaatgaacttaatttggggcggagggaagagtacgacgttctggacaaaaggaggggacgagatcccgagatgggcggaaagcctcagcgaaggaagaatccgcaagaggggctttataacgaactccagaaagataaaatggcagaagcctatagtgagattgggatgaagggagaaaggaggaggggtaaaggtcacgatgggttgtaccaaggattgagcacagccactaaagatacctatgatgcgctccacatgcaggccctgccgccaagacgcgccaagagaagcggatctggcgtgaagcagaccctgaatttcgacctgctgaagctggctggcgacgtggaatccaacccaggccctggccatatgaccgagtacaagcccacggtgcgcctcgccacccgcgacgacgtccccagggccgtacgcaccctcgccgccgcgttcgccgactaccccgccacgcgccacaccgtcgatccggaccgccacatcgagcgggtcaccgagctgcaagaactcttcctcacgcgcgtcgggctcgacatcggcaaggtgtgggtcgcggacgacggcgccgcggtggcggtctggaccacgccggagagcgtcgaagcgggggcggtgttcgccgagatcggcccgcgcatggccgagttgagcggttcccggctggccgcgcagcaacagatggaaggcctcctggcgccgcaccggcccaaggagcccgcgtggttcctggccaccgtcggcgtctcgcccgaccaccagggcaagggtctgggcagcgccgtcgtgctccccggagtggaggcggccgagcgcgccggggtgcccgccttcctggagacctccgcgccccgcaacctccccttctacgagcggctcggcttcaccgtcaccgccgacgtcgaggtgcccgaaggaccgcgcacctggtgcatgacccgcaagcccggtgcctga

SEQ ID NO: 5937 - DNA, 5151 bp, Artificial Sequence
  Synthetic Polynucleotide
atggccttaccagtgaccgccttgctcctgccgctggccttgctgctccacgccgccaggccggaagtgcagctggttgaatctggcggaggactggttcaggctggcggatctctgagactgtcttgtgccgccagcggcagaacctttagcatgggctggtttagacaggcccctggcaaagagagagagttcgtcgccgccatcacatactctggcggcagcccttactacgccgactctgtgaagggcagattcaccatcagccgggacaacgccaagaacaccgtgtacctccagatgaacagcctgaagcctgaggacaccgccgtgtactactgcgccgccaatccaacatacggcagcgactggaacgccgagaattggggccagggaacccaagtgacagtgtctagcggtaccggcggaggcggatctggcggcggaggtagcggtggcggaggatctgaattcgacatccagatgacacagagccctagcagcctgtctgccagcgtgggagacagagtgaccatcacatgcaaggccagcgaccacatcaacaactggctggcctggtatcagcagaagcctggacaggcccctaagctgctgatctacggcgctaccacactggaaacaggcgtgcccagcagattttctggcagcggctctggcaccgactacaccctgacaatatccagcctccagcctgaggacttcgccacctactactgtcagcagagctggaacaccccttggacattcggccagggcaccaagctggaaatcaagagactcgagggacagcctaaggccaatcctaccgtgacactgttccctccaagcagcgaagaactccaggccaacaaggccacacttgtgtgcctgatctccgacttctaccctggggctgtgacagtggcttggaaggccgatggatctcctgtgaaagccggcgtggaaaccaccaagccatccaagcagagcaacaacaaatacgccgccagctcctacctgagcctgacacctgagcagtggaagtcccacagatcctacagctgccaagtgacccacgaaggcagcaccgtggaaaagacagtggcccctacagagtgcagcggatccctgcaagacccttgctctaattgccctgccggcaccttctgcgacaacaaccggaaccagatttgctccccttgtcctcctaacagcttcagctctgccggcggacagagaacctgcgacatctgtagacagtgcaagggcgtgttcagaacccggaaagagtgcagcagcacctccaacgccgagtgcgattgcacacctggcttccattgtctcggagccggctgttctatgtgcgagcaggattgcaagcagggccaagagctgaccaagaagggctgcaaggattgctgcttcggcacctttaacgaccagaagagaggcatctgccggccttggaccaactgtagcctggatggcaagagcgtgctggtcaacggcaccaaagaacgggatgtcgtgtgcggaccttctccagccgatttgtctcctggcgcttctagcgtgacacctcctgctccagctagagagcctggacacagccctcagatcatctcattctttctggccctgacctctacagccctgctgtttctgctgttcttcctgacactgcggttcagcgtggtcaagcggggcagaaagaagctgctgtacatcttcaagcagcctttcatgcggcccgtgcagaccacacaagaagaggacggctgctcctgtcggttccccgaggaagaggaaggcggttgcgaacttagcactagtagagtgaagttcagcagaagcgccgacgcccctgcctaccagcagggacagaaccaactgtacaacgagctgaacctgggcagacgggaagagtacgacgtgctggacaagcggagaggcagggaccctgagatgggcggaaagccccagcggagaaagaacccccaggaaggactgtataacgaactccagaaagacaagatggccgaagcctacagcgagatcggcatgaagggcgagcggagaagaggcaagggccacgatggcctgtaccagggcctgagcaccgccaccaaggacacctatgacgccctgcacatgcaggccctgcctccaagaagggccaagcgatctggatctggagcaacaaacttctcactactcaaacaagcaggtgacgtggaggagaatcccgggcctatggactggatttggcgcatccttttccttgtcggcgctgctaccggcgcgcattccgggcccgaagtgcaactggttgaatccggtggcggcctggtgcaagcaggcggatctctcagacttagctgtgccgcctccggcagaaccttcacaatgggatggtttaggcaggctccagggaaagagagagagttcgtcgccgccatctctctgtctcccacactggcctactacgccgactctgtgaaaggccggttcaccatctccagagataatgccaagaacaccgtggtgctgcaaatgaactctctgaaacccgaggatacagccctgtactattgtgccgctgaccggaagtccgtgatgagcatcagacccgattactggggacagggcacacaagtcacagtgtcctctggatccggcggcggaggatctggcggaggcggatctgggggcggaggctctttcgaacaagttcagcttcaacagcctggcgctgagctggtcaaacctggcgcttctgtgaagatgagctgcaaagccagcggctacgccttcagcagctactggatcaactggatgaagcagaaacccggccagggactcgaatggatcggccaaatctatcccggcgacggcgacaccaactacaacggcaagttcaagggcagagccacactgaccgccgatacctctagcagcacagcctacatgcagctgagcagcctgaccagcgaagatagcgccgtgtacttctgtgcccggtccatcacaacagtcgtgggctgcgctatggactattggggccagggaacaagcgtgaccgtgtctagtacgcgtgcctctacaaagggaccctccgtgtttcctctggctcccagcagcaagtctacaagcggaggaacagccgctctgggctgcctggtcaaggattactttcccgagcctgtgaccgtgtcctggaatagcggagcactgacaagcggcgtgcacacctttccagccgtgctgcaaagcagcggcctgtactctctgagcagcgtggtcacagtgcctagctctagcctgggcacccagacctacatctgcaatgtgaaccacaagcctagcaacaccaaggtggacaagagagtggaacccaagagctgtggtacccttcaggacccttgcagcaactgtccagccggaaccttttgtgataacaacagaaatcagatatgcagcccctgtccgccaaactcctttagcagtgctggcggccagcggacatgtgacatttgtcggcagtgcaaaggggttttccgcaccagaaaagagtgctcctccaccagcaatgccgagtgtgactgtaccccaggctttcactgtctcggcgctggatgtagcatgtgtgaacaggactgtaaacaggggcaagaactcacgaagaaagggtgcaaagactgctgttttgggacgttcaacgatcagaagcggggaatctgtaggccctggacaaactgttctctggacggcaagtccgtgctcgtgaatggaacaaaagagcgggacgttgtctgcggcccaagtcctgctgatcttagcccaggcgcttcctctgtgactcctccagctcctgcacgcgaacctggacactctccccagatcatctcattttttctcgctctcacatcaaccgctttgctgttcctgctcttttttctcaccctccggttctccgtggttaagagaggccggaaaaaactcctctatatctttaaacagccctttatgcgcccggtccaaacaacccaagaggaagatggctgctcttgcagattcccggaagaggaagaaggcggctgcgagctgagctctagacgggttaagttttccagatccgcagacgcacccgcttaccaacaagggcagaaccaactctacaatgaacttaatttggggcggagggaagagtacgacgttctggacaaaaggaggggacgagatcccgagatgggcggaaagcctcagcgaaggaagaatccgcaagaggggctttataacgaactccagaaagataaaatggcagaagcctatagtgagattgggatgaagggagaaaggaggaggggtaaaggtcacgatgggttgtaccaaggattgagcacagccactaaagatacctatgatgcgctccacatgcaggccctgccgccaagacgcgccaagagaagcggatctggcgtgaagcagaccctgaatttcgacctgctgaagctggctggcgacgtggaatccaacccaggccctggccatatgaccgagtacaagcccacggtgcgcctcgccacccgcgacgacgtccccagggccgtacgcaccctcgccgccgcgttcgccgactaccccgccacgcgccacaccgtcgatccggaccgccacatcgagcgggtcaccgagctgcaagaactcttcctcacgcgcgtcgggctcgacatcggcaaggtgtgggtcgcggacgacggcgccgcggtggcggtctggaccacgccggagagcgtcgaagcgggggcggtgttcgccgagatcggcccgcgcatggccgagttgagcggttcccggctggccgcgcagcaacagatggaaggcctcctggcgccgcaccggcccaaggagcccgcgtggttcctggccaccgtcggcgtctcgcccgaccaccagggcaagggtctgggcagcgccgtcgtgctccccggagtggaggcggccgagcgcgccggggtgcccgccttcctggagacctccgcgccccgcaacctccccttctacgagcggctcggcttcaccgtcaccgccgacgtcgaggtgcccgaaggaccgcgcacctggtgcatgacccgcaagcccggtgcctga

SEQ ID NO: 5938 - DNA, 4350 bp, Artificial Sequence
  Synthetic Polynucleotide
atggccttaccagtgaccgccttgctcctgccgctggccttgctgctccacgccgccaggccggaagtgcagctggttgaatctggcggaggactggttcaggctggcggatctctgagactgtcttgtgccgccagcggcagaacctttagcatgggctggtttagacaggcccctggcaaagagagagagttcgtcgccgccatcacatactctggcggcagcccttactacgccgactctgtgaagggcagattcaccatcagccgggacaacgccaagaacaccgtgtacctccagatgaacagcctgaagcctgaggacaccgccgtgtactactgcgccgccaatccaacatacggcagcgactggaacgccgagaattggggccagggaacccaagtgacagtgtctagcctcgagggacagcctaaggccaatcctaccgtgacactgttccctccaagcagcgaagaactccaggccaacaaggccacacttgtgtgcctgatctccgacttctaccctggggctgtgacagtggcttggaaggccgatggatctcctgtgaaagccggcgtggaaaccaccaagccatccaagcagagcaacaacaaatacgccgccagctcctacctgagcctgacacctgagcagtggaagtcccacagatcctacagctgccaagtgacccacgaaggcagcaccgtggaaaagacagtggcccctacagagtgcagcggatccctgcaagacccttgctctaattgccctgccggcaccttctgcgacaacaaccggaaccagatttgctccccttgtcctcctaacagcttcagctctgccggcggacagagaacctgcgacatctgtagacagtgcaagggcgtgttcagaacccggaaagagtgcagcagcacctccaacgccgagtgcgattgcacacctggcttccattgtctcggagccggctgttctatgtgcgagcaggattgcaagcagggccaagagctgaccaagaagggctgcaaggattgctgcttcggcacctttaacgaccagaagagaggcatctgccggccttggaccaactgtagcctggatggcaagagcgtgctggtcaacggcaccaaagaacgggatgtcgtgtgcggaccttctccagccgatttgtctcctggcgcttctagcgtgacacctcctgctccagctagagagcctggacacagccctcagatcatctcattctttctggccctgacctctacagccctgctgtttctgctgttcttcctgacactgcggttcagcgtggtcaagcggggcagaaagaagctgctgtacatcttcaagcagcctttcatgcggcccgtgcagaccacacaagaagaggacggctgctcctgtcggttccccgaggaagaggaaggcggttgcgaacttagcactagtagagtgaagttcagcagaagcgccgacgcccctgcctaccagcagggacagaaccaactgtacaacgagctgaacctgggcagacgggaagagtacgacgtgctggacaagcggagaggcagggaccctgagatgggcggaaagccccagcggagaaagaacccccaggaaggactgtataacgaactccagaaagacaagatggccgaagcctacagcgagatcggcatgaagggcgagcggagaagaggcaagggccacgatggcctgtaccagggcctgagcaccgccaccaaggacacctatgacgccctgcacatgcaggccctgcctccaagaagggccaagcgatctggatctggagcaacaaacttctcactactcaaacaagcaggtgacgtggaggagaatcccgggcctatggactggatttggcgcatccttttccttgtcggcgctgctaccggcgcgcattccgggcccgaagtgcaactggttgaatccggtggcggcctggtgcaagcaggcggatctctcagacttagctgtgccgcctccggcagaaccttcacaatgggatggtttaggcaggctccagggaaagagagagagttcgtcgccgccatctctctgtctcccacactggcctactacgccgactctgtgaaaggccggttcaccatctccagagataatgccaagaacaccgtggtgctgcaaatgaactctctgaaacccgaggatacagccctgtactattgtgccgctgaccggaagtccgtgatgagcatcagacccgattactggggacagggcacacaagtcacagtgtcctctacgcgtgcctctacaaagggaccctccgtgtttcctctggctcccagcagcaagtctacaagcggaggaacagccgctctgggctgcctggtcaaggattactttcccgagcctgtgaccgtgtcctggaatagcggagcactgacaagcggcgtgcacacctttccagccgtgctgcaaagcagcggcctgtactctctgagcagcgtggtcacagtgcctagctctagcctgggcacccagacctacatctgcaatgtgaaccacaagcctagcaacaccaaggtggacaagagagtggaacccaagagctgtggtacccttcaggacccttgcagcaactgtccagccggaaccttttgtgataacaacagaaatcagatatgcagcccctgtccgccaaactcctttagcagtgctggcggccagcggacatgtgacatttgtcggcagtgcaaaggggttttccgcaccagaaaagagtgctcctccaccagcaatgccgagtgtgactgtaccccaggctttcactgtctcggcgctggatgtagcatgtgtgaacaggactgtaaacaggggcaagaactcacgaagaaagggtgcaaagactgctgttttgggacgttcaacgatcagaagcggggaatctgtaggccctggacaaactgttctctggacggcaagtccgtgctcgtgaatggaacaaaagagcgggacgttgtctgcggcccaagtcctgctgatcttagcccaggcgcttcctctgtgactcctccagctcctgcacgcgaacctggacactctccccagatcatctcattttttctcgctctcacatcaaccgctttgctgttcctgctcttttttctcaccctccggttctccgtggttaagagaggccggaaaaaactcctctatatctttaaacagccctttatgcgcccggtccaaacaacccaagaggaagatggctgctcttgcagattcccggaagaggaagaaggcggctgcgagctgagctctagacgggttaagttttccagatccgcagacgcacccgcttaccaacaagggcagaaccaactctacaatgaacttaatttggggcggagggaagagtacgacgttctggacaaaaggaggggacgagatcccgagatgggcggaaagcctcagcgaaggaagaatccgcaagaggggctttataacgaactccagaaagataaaatggcagaagcctatagtgagattgggatgaagggagaaaggaggaggggtaaaggtcacgatgggttgtaccaaggattgagcacagccactaaagatacctatgatgcgctccacatgcaggccctgccgccaagacgcgccaagagaagcggatctggcgtgaagcagaccctgaatttcgacctgctgaagctggctggcgacgtggaatccaacccaggccctggccatatgaccgagtacaagcccacggtgcgcctcgccacccgcgacgacgtccccagggccgtacgcaccctcgccgccgcgttcgccgactaccccgccacgcgccacaccgtcgatccggaccgccacatcgagcgggtcaccgagctgcaagaactcttcctcacgcgcgtcgggctcgacatcggcaaggtgtgggtcgcggacgacggcgccgcggtggcggtctggaccacgccggagagcgtcgaagcgggggcggtgttcgccgagatcggcccgcgcatggccgagttgagcggttcccggctggccgcgcagcaacagatggaaggcctcctggcgccgcaccggcccaaggagcccgcgtggttcctggccaccgtcggcgtctcgcccgaccaccagggcaagggtctgggcagcgccgtcgtgctccccggagtggaggcggccgagcgcgccggggtgcccgccttcctggagacctccgcgccccgcaacctccccttctacgagcggctcggcttcaccgtcaccgccgacgtcgaggtgcccgaaggaccgcgcacctggtgcatgacccgcaagcccggtgcctga

SEQ ID NO: 5939 - DNA, 4374 bp, Artificial Sequence
  Synthetic Polynucleotide
atggccttaccagtgaccgccttgctcctgccgctggccttgctgctccacgccgccaggccggacatccagatgacacagagccctagcagcctgtctgccagcgtgggagacagagtgaccatcacatgcaaggccagcgaccacatcaacaactggctggcctggtatcagcagaagcctggacaggcccctaagctgctgatctacggcgctaccacactggaaacaggcgtgcccagcagattttctggcagcggctctggcaccgactacaccctgacaatatccagcctccagcctgaggacttcgccacctactactgtcagcagagctggaacaccccttggacattcggccagggcaccaagctggaaatcaagagactcgaggacctgaagaacgtgttcccacctgaggtggccgtgttcgagcctagcgaggccgagatcagccacacccagaaagccaccctcgtgtgcctggctaccggcttctaccccgaccatgtggaactgtcttggtgggtcaacggcaaagaggtgcacagcggcgtgtctaccgacccccagccactgaaagaacagcccgccctgaacgacagccggtactgcctgagcagcagactgagagtgtccgccaccttctggcagaacccccggaaccacttcagatgccaggtgcagttctacggcctgagcgagaacgacgagtggacccaggacagagccaagcccgtgacccagatcgtgtctgccgaagcctggggcagagccgattgcggatccctgcaagacccttgctctaattgccctgccggcaccttctgcgacaacaaccggaaccagatttgctccccttgtcctcctaacagcttcagctctgccggcggacagagaacctgcgacatctgtagacagtgcaagggcgtgttcagaacccggaaagagtgcagcagcacctccaacgccgagtgcgattgcacacctggcttccattgtctcggagccggctgttctatgtgcgagcaggattgcaagcagggccaagagctgaccaagaagggctgcaaggattgctgcttcggcacctttaacgaccagaagagaggcatctgccggccttggaccaactgtagcctggatggcaagagcgtgctggtcaacggcaccaaagaacgggatgtcgtgtgcggaccttctccagccgatttgtctcctggcgcttctagcgtgacacctcctgctccagctagagagcctggacacagccctcagatcatctcattctttctggccctgacctctacagccctgctgtttctgctgttcttcctgacactgcggttcagcgtggtcaagcggggcagaaagaagctgctgtacatcttcaagcagcctttcatgcggcccgtgcagaccacacaagaagaggacggctgctcctgtcggttccccgaggaagaggaaggcggttgcgaacttagcactagtagagtgaagttcagcagaagcgccgacgcccctgcctaccagcagggacagaaccaactgtacaacgagctgaacctgggcagacgggaagagtacgacgtgctggacaagcggagaggcagggaccctgagatgggcggaaagccccagcggagaaagaacccccaggaaggactgtataacgaactccagaaagacaagatggccgaagcctacagcgagatcggcatgaagggcgagcggagaagaggcaagggccacgatggcctgtaccagggcctgagcaccgccaccaaggacacctatgacgccctgcacatgcaggccctgcctccaagaagggccaagcgatctggatctggagcaacaaacttctcactactcaaacaagcaggtgacgtggaggagaatcccgggcctatggactggatttggcgcatccttttccttgtcggcgctgctaccggcgcgcattccttcgaacaagttcagcttcaacagcctggcgctgagctggtcaaacctggcgcttctgtgaagatgagctgcaaagccagcggctacgccttcagcagctactggatcaactggatgaagcagaaacccggccagggactcgaatggatcggccaaatctatcccggcgacggcgacaccaactacaacggcaagttcaagggcagagccacactgaccgccgatacctctagcagcacagcctacatgcagctgagcagcctgaccagcgaagatagcgccgtgtacttctgtgcccggtccatcacaacagtcgtgggctgcgctatggactattggggccagggaacaagcgtgaccgtgtctagtacgcgtatccagaaccctgatcctgccgtgtaccagctgcgggatagcaagagcagcgacaagagcgtgtgtctgttcaccgacttcgacagccagaccaacgtgtcccagagcaaggactccgacgtgtacatcaccgataagaccgtgctggacatgcggagcatggacttcaagagcaactccgccgtggcctggtccaacaagtccgatttcgcctgcgccaacgccttcaacaacagcattatccccgaggacacattcttcccaagccccgagagcagctgcggtacccttcaggacccttgcagcaactgtccagccggaaccttttgtgataacaacagaaatcagatatgcagcccctgtccgccaaactcctttagcagtgctggcggccagcggacatgtgacatttgtcggcagtgcaaaggggttttccgcaccagaaaagagtgctcctccaccagcaatgccgagtgtgactgtaccccaggctttcactgtctcggcgctggatgtagcatgtgtgaacaggactgtaaacaggggcaagaactcacgaagaaagggtgcaaagactgctgttttgggacgttcaacgatcagaagcggggaatctgtaggccctggacaaactgttctctggacggcaagtccgtgctcgtgaatggaacaaaagagcgggacgttgtctgcggcccaagtcctgctgatcttagcccaggcgcttcctctgtgactcctccagctcctgcacgcgaacctggacactctccccagatcatctcattttttctcgctctcacatcaaccgctttgctgttcctgctcttttttctcaccctccggttctccgtggttaagagaggccggaaaaaactcctctatatctttaaacagccctttatgcgcccggtccaaacaacccaagaggaagatggctgctcttgcagattcccggaagaggaagaaggcggctgcgagctgagctctagacgggttaagttttccagatccgcagacgcacccgcttaccaacaagggcagaaccaactctacaatgaacttaatttggggcggagggaagagtacgacgttctggacaaaaggaggggacgagatcccgagatgggcggaaagcctcagcgaaggaagaatccgcaagaggggctttataacgaactccagaaagataaaatggcagaagcctatagtgagattgggatgaagggagaaaggaggaggggtaaaggtcacgatgggttgtaccaaggattgagcacagccactaaagatacctatgatgcgctccacatgcaggccctgccgccaagacgcgccaagagaagcggatctggcgtgaagcagaccctgaatttcgacctgctgaagctggctggcgacgtggaatccaacccaggccctggccatatgaccgagtacaagcccacggtgcgcctcgccacccgcgacgacgtccccagggccgtacgcaccctcgccgccgcgttcgccgactaccccgccacgcgccacaccgtcgatccggaccgccacatcgagcgggtcaccgagctgcaagaactcttcctcacgcgcgtcgggctcgacatcggcaaggtgtgggtcgcggacgacggcgccgcggtggcggtctggaccacgccggagagcgtcgaagcgggggcggtgttcgccgagatcggcccgcgcatggccgagttgagcggttcccggctggccgcgcagcaacagatggaaggcctcctggcgccgcaccggcccaaggagcccgcgtggttcctggccaccgtcggcgtctcgcccgaccaccagggcaagggtctgggcagcgccgtcgtgctccccggagtggaggcggccgagcgcgccggggtgcccgccttcctggagacctccgcgccccgcaacctccccttctacgagcggctcggcttcaccgtcaccgccgacgtcgaggtgcccgaaggaccgcgcacctggtgcatgacccgcaagcccggtgcctga

SEQ ID NO: 5940 - DNA, 4785 bp, Artificial Sequence
  Synthetic Polynucleotide
atggccttaccagtgaccgccttgctcctgccgctggccttgctgctccacgccgccaggccggaagtgcagctggttgaatctggcggaggactggttcaggctggcggatctctgagactgtcttgtgccgccagcggcagaacctttagcatgggctggtttagacaggcccctggcaaagagagagagttcgtcgccgccatcacatactctggcggcagcccttactacgccgactctgtgaagggcagattcaccatcagccgggacaacgccaagaacaccgtgtacctccagatgaacagcctgaagcctgaggacaccgccgtgtactactgcgccgccaatccaacatacggcagcgactggaacgccgagaattggggccagggaacccaagtgacagtgtctagcggtaccggcggaggcggatctggcggcggaggtagcggtggcggaggatctgaattcgacatccagatgacacagagccctagcagcctgtctgccagcgtgggagacagagtgaccatcacatgcaaggccagcgaccacatcaacaactggctggcctggtatcagcagaagcctggacaggcccctaagctgctgatctacggcgctaccacactggaaacaggcgtgcccagcagattttctggcagcggctctggcaccgactacaccctgacaatatccagcctccagcctgaggacttcgccacctactactgtcagcagagctggaacaccccttggacattcggccagggcaccaagctggaaatcaagagactcgaggacctgaagaacgtgttcccacctgaggtggccgtgttcgagcctagcgaggccgagatcagccacacccagaaagccaccctcgtgtgcctggctaccggcttctaccccgaccatgtggaactgtcttggtgggtcaacggcaaagaggtgcacagcggcgtgtctaccgacccccagccactgaaagaacagcccgccctgaacgacagccggtactgcctgagcagcagactgagagtgtccgccaccttctggcagaacccccggaaccacttcagatgccaggtgcagttctacggcctgagcgagaacgacgagtggacccaggacagagccaagcccgtgacccagatcgtgtctgccgaagcctggggcagagccgattgcggatccctgcaagacccttgctctaattgccctgccggcaccttctgcgacaacaaccggaaccagatttgctccccttgtcctcctaacagcttcagctctgccggcggacagagaacctgcgacatctgtagacagtgcaagggcgtgttcagaacccggaaagagtgcagcagcacctccaacgccgagtgcgattgcacacctggcttccattgtctcggagccggctgttctatgtgcgagcaggattgcaagcagggccaagagctgaccaagaagggctgcaaggattgctgcttcggcacctttaacgaccagaagagaggcatctgccggccttggaccaactgtagcctggatggcaagagcgtgctggtcaacggcaccaaagaacgggatgtcgtgtgcggaccttctccagccgatttgtctcctggcgcttctagcgtgacacctcctgctccagctagagagcctggacacagccctcagatcatctcattctttctggccctgacctctacagccctgctgtttctgctgttcttcctgacactgcggttcagcgtggtcaagcggggcagaaagaagctgctgtacatcttcaagcagcctttcatgcggcccgtgcagaccacacaagaagaggacggctgctcctgtcggttccccgaggaagaggaaggcggttgcgaacttagcactagtagagtgaagttcagcagaagcgccgacgcccctgcctaccagcagggacagaaccaactgtacaacgagctgaacctgggcagacgggaagagtacgacgtgctggacaagcggagaggcagggaccctgagatgggcggaaagccccagcggagaaagaacccccaggaaggactgtataacgaactccagaaagacaagatggccgaagcctacagcgagatcggcatgaagggcgagcggagaagaggcaagggccacgatggcctgtaccagggcctgagcaccgccaccaaggacacctatgacgccctgcacatgcaggccctgcctccaagaagggccaagcgatctggatctggagcaacaaacttctcactactcaaacaagcaggtgacgtggaggagaatcccgggcctatggactggatttggcgcatccttttccttgtcggcgctgctaccggcgcgcattccttcgaacaagttcagcttcaacagcctggcgctgagctggtcaaacctggcgcttctgtgaagatgagctgcaaagccagcggctacgccttcagcagctactggatcaactggatgaagcagaaacccggccagggactcgaatggatcggccaaatctatcccggcgacggcgacaccaactacaacggcaagttcaagggcagagccacactgaccgccgatacctctagcagcacagcctacatgcagctgagcagcctgaccagcgaagatagcgccgtgtacttctgtgcccggtccatcacaacagtcgtgggctgcgctatggactattggggccagggaacaagcgtgaccgtgtctagtacgcgtatccagaaccctgatcctgccgtgtaccagctgcgggatagcaagagcagcgacaagagcgtgtgtctgttcaccgacttcgacagccagaccaacgtgtcccagagcaaggactccgacgtgtacatcaccgataagaccgtgctggacatgcggagcatggacttcaagagcaactccgccgtggcctggtccaacaagtccgatttcgcctgcgccaacgccttcaacaacagcattatccccgaggacacattcttcccaagccccgagagcagctgcggtacccttcaggacccttgcagcaactgtccagccggaaccttttgtgataacaacagaaatcagatatgcagcccctgtccgccaaactcctttagcagtgctggcggccagcggacatgtgacatttgtcggcagtgcaaaggggttttccgcaccagaaaagagtgctcctccaccagcaatgccgagtgtgactgtaccccaggctttcactgtctcggcgctggatgtagcatgtgtgaacaggactgtaaacaggggcaagaactcacgaagaaagggtgcaaagactgctgttttgggacgttcaacgatcagaagcggggaatctgtaggccctggacaaactgttctctggacggcaagtccgtgctcgtgaatggaacaaaagagcgggacgttgtctgcggcccaagtcctgctgatcttagcccaggcgcttcctctgtgactcctccagctcctgcacgcgaacctggacactctccccagatcatctcattttttctcgctctcacatcaaccgctttgctgttcctgctcttttttctcaccctccggttctccgtggttaagagaggccggaaaaaactcctctatatctttaaacagccctttatgcgcccggtccaaacaacccaagaggaagatggctgctcttgcagattcccggaagaggaagaaggcggctgcgagctgagctctagacgggttaagttttccagatccgcagacgcacccgcttaccaacaagggcagaaccaactctacaatgaacttaatttggggcggagggaagagtacgacgttctggacaaaaggaggggacgagatcccgagatgggcggaaagcctcagcgaaggaagaatccgcaagaggggctttataacgaactccagaaagataaaatggcagaagcctatagtgagattgggatgaagggagaaaggaggaggggtaaaggtcacgatgggttgtaccaaggattgagcacagccactaaagatacctatgatgcgctccacatgcaggccctgccgccaagacgcgccaagagaagcggatctggcgtgaagcagaccctgaatttcgacctgctgaagctggctggcgacgtggaatccaacccaggccctggccatatgaccgagtacaagcccacggtgcgcctcgccacccgcgacgacgtccccagggccgtacgcaccctcgccgccgcgttcgccgactaccccgccacgcgccacaccgtcgatccggaccgccacatcgagcgggtcaccgagctgcaagaactcttcctcacgcgcgtcgggctcgacatcggcaaggtgtgggtcgcggacgacggcgccgcggtggcggtctggaccacgccggagagcgtcgaagcgggggcggtgttcgccgagatcggcccgcgcatggccgagttgagcggttcccggctggccgcgcagcaacagatggaaggcctcctggcgccgcaccggcccaaggagcccgcgtggttcctggccaccgtcggcgtctcgcccgaccaccagggcaagggtctgggcagcgccgtcgtgctccccggagtggaggcggccgagcgcgccggggtgcccgccttcctggagacctccgcgccccgcaacctccccttctacgagcggctcggcttcaccgtcaccgccgacgtcgaggtgcccgaaggaccgcgcacctggtgcatgacccgcaagcccggtgcctga

SEQ ID NO: 5941 - DNA, 5196 bp, Artificial Sequence
  Synthetic Polynucleotide
atggccttaccagtgaccgccttgctcctgccgctggccttgctgctccacgccgccaggccggaagtgcagctggttgaatctggcggaggactggttcaggctggcggatctctgagactgtcttgtgccgccagcggcagaacctttagcatgggctggtttagacaggcccctggcaaagagagagagttcgtcgccgccatcacatactctggcggcagcccttactacgccgactctgtgaagggcagattcaccatcagccgggacaacgccaagaacaccgtgtacctccagatgaacagcctgaagcctgaggacaccgccgtgtactactgcgccgccaatccaacatacggcagcgactggaacgccgagaattggggccagggaacccaagtgacagtgtctagcggtaccggcggaggcggatctggcggcggaggtagcggtggcggaggatctgaattcgacatccagatgacacagagccctagcagcctgtctgccagcgtgggagacagagtgaccatcacatgcaaggccagcgaccacatcaacaactggctggcctggtatcagcagaagcctggacaggcccctaagctgctgatctacggcgctaccacactggaaacaggcgtgcccagcagattttctggcagcggctctggcaccgactacaccctgacaatatccagcctccagcctgaggacttcgccacctactactgtcagcagagctggaacaccccttggacattcggccagggcaccaagctggaaatcaagagactcgaggacctgaagaacgtgttcccacctgaggtggccgtgttcgagcctagcgaggccgagatcagccacacccagaaagccaccctcgtgtgcctggctaccggcttctaccccgaccatgtggaactgtcttggtgggtcaacggcaaagaggtgcacagcggcgtgtctaccgacccccagccactgaaagaacagcccgccctgaacgacagccggtactgcctgagcagcagactgagagtgtccgccaccttctggcagaacccccggaaccacttcagatgccaggtgcagttctacggcctgagcgagaacgacgagtggacccaggacagagccaagcccgtgacccagatcgtgtctgccgaagcctggggcagagccgattgcggatccctgcaagacccttgctctaattgccctgccggcaccttctgcgacaacaaccggaaccagatttgctccccttgtcctcctaacagcttcagctctgccggcggacagagaacctgcgacatctgtagacagtgcaagggcgtgttcagaacccggaaagagtgcagcagcacctccaacgccgagtgcgattgcacacctggcttccattgtctcggagccggctgttctatgtgcgagcaggattgcaagcagggccaagagctgaccaagaagggctgcaaggattgctgcttcggcacctttaacgaccagaagagaggcatctgccggccttggaccaactgtagcctggatggcaagagcgtgctggtcaacggcaccaaagaacgggatgtcgtgtgcggaccttctccagccgatttgtctcctggcgcttctagcgtgacacctcctgctccagctagagagcctggacacagccctcagatcatctcattctttctggccctgacctctacagccctgctgtttctgctgttcttcctgacactgcggttcagcgtggtcaagcggggcagaaagaagctgctgtacatcttcaagcagcctttcatgcggcccgtgcagaccacacaagaagaggacggctgctcctgtcggttccccgaggaagaggaaggcggttgcgaacttagcactagtagagtgaagttcagcagaagcgccgacgcccctgcctaccagcagggacagaaccaactgtacaacgagctgaacctgggcagacgggaagagtacgacgtgctggacaagcggagaggcagggaccctgagatgggcggaaagccccagcggagaaagaacccccaggaaggactgtataacgaactccagaaagacaagatggccgaagcctacagcgagatcggcatgaagggcgagcggagaagaggcaagggccacgatggcctgtaccagggcctgagcaccgccaccaaggacacctatgacgccctgcacatgcaggccctgcctccaagaagggccaagcgatctggatctggagcaacaaacttctcactactcaaacaagcaggtgacgtggaggagaatcccgggcctatggactggatttggcgcatccttttccttgtcggcgctgctaccggcgcgcattccgggcccgaagtgcaactggttgaatccggtggcggcctggtgcaagcaggcggatctctcagacttagctgtgccgcctccggcagaaccttcacaatgggatggtttaggcaggctccagggaaagagagagagttcgtcgccgccatctctctgtctcccacactggcctactacgccgactctgtgaaaggccggttcaccatctccagagataatgccaagaacaccgtggtgctgcaaatgaactctctgaaacccgaggatacagccctgtactattgtgccgctgaccggaagtccgtgatgagcatcagacccgattactggggacagggcacacaagtcacagtgtcctctggatccggcggcggaggatctggcggaggcggatctgggggcggaggctctttcgaacaagttcagcttcaacagcctggcgctgagctggtcaaacctggcgcttctgtgaagatgagctgcaaagccagcggctacgccttcagcagctactggatcaactggatgaagcagaaacccggccagggactcgaatggatcggccaaatctatcccggcgacggcgacaccaactacaacggcaagttcaagggcagagccacactgaccgccgatacctctagcagcacagcctacatgcagctgagcagcctgaccagcgaagatagcgccgtgtacttctgtgcccggtccatcacaacagtcgtgggctgcgctatggactattggggccagggaacaagcgtgaccgtgtctagtacgcgtatccagaaccctgatcctgccgtgtaccagctgcgggatagcaagagcagcgacaagagcgtgtgtctgttcaccgacttcgacagccagaccaacgtgtcccagagcaaggactccgacgtgtacatcaccgataagaccgtgctggacatgcggagcatggacttcaagagcaactccgccgtggcctggtccaacaagtccgatttcgcctgcgccaacgccttcaacaacagcattatccccgaggacacattcttcccaagccccgagagcagctgcggtacccttcaggacccttgcagcaactgtccagccggaaccttttgtgataacaacagaaatcagatatgcagcccctgtccgccaaactcctttagcagtgctggcggccagcggacatgtgacatttgtcggcagtgcaaaggggttttccgcaccagaaaagagtgctcctccaccagcaatgccgagtgtgactgtaccccaggctttcactgtctcggcgctggatgtagcatgtgtgaacaggactgtaaacaggggcaagaactcacgaagaaagggtgcaaagactgctgttttgggacgttcaacgatcagaagcggggaatctgtaggccctggacaaactgttctctggacggcaagtccgtgctcgtgaatggaacaaaagagcgggacgttgtctgcggcccaagtcctgctgatcttagcccaggcgcttcctctgtgactcctccagctcctgcacgcgaacctggacactctccccagatcatctcattttttctcgctctcacatcaaccgctttgctgttcctgctcttttttctcaccctccggttctccgtggttaagagaggccggaaaaaactcctctatatctttaaacagccctttatgcgcccggtccaaacaacccaagaggaagatggctgctcttgcagattcccggaagaggaagaaggcggctgcgagctgagctctagacgggttaagttttccagatccgcagacgcacccgcttaccaacaagggcagaaccaactctacaatgaacttaatttggggcggagggaagagtacgacgttctggacaaaaggaggggacgagatcccgagatgggcggaaagcctcagcgaaggaagaatccgcaagaggggctttataacgaactccagaaagataaaatggcagaagcctatagtgagattgggatgaagggagaaaggaggaggggtaaaggtcacgatgggttgtaccaaggattgagcacagccactaaagatacctatgatgcgctccacatgcaggccctgccgccaagacgcgccaagagaagcggatctggcgtgaagcagaccctgaatttcgacctgctgaagctggctggcgacgtggaatccaacccaggccctggccatatgaccgagtacaagcccacggtgcgcctcgccacccgcgacgacgtccccagggccgtacgcaccctcgccgccgcgttcgccgactaccccgccacgcgccacaccgtcgatccggaccgccacatcgagcgggtcaccgagctgcaagaactcttcctcacgcgcgtcgggctcgacatcggcaaggtgtgggtcgcggacgacggcgccgcggtggcggtctggaccacgccggagagcgtcgaagcgggggcggtgttcgccgagatcggcccgcgcatggccgagttgagcggttcccggctggccgcgcagcaacagatggaaggcctcctggcgccgcaccggcccaaggagcccgcgtggttcctggccaccgtcggcgtctcgcccgaccaccagggcaagggtctgggcagcgccgtcgtgctccccggagtggaggcggccgagcgcgccggggtgcccgccttcctggagacctccgcgccccgcaacctccccttctacgagcggctcggcttcaccgtcaccgccgacgtcgaggtgcccgaaggaccgcgcacctggtgcatgacccgcaagcccggtgcctga

SEQ ID NO: 5942 - DNA, 4395 bp, Artificial Sequence
  Synthetic Polynucleotide
atggccttaccagtgaccgccttgctcctgccgctggccttgctgctccacgccgccaggccggaagtgcagctggttgaatctggcggaggactggttcaggctggcggatctctgagactgtcttgtgccgccagcggcagaacctttagcatgggctggtttagacaggcccctggcaaagagagagagttcgtcgccgccatcacatactctggcggcagcccttactacgccgactctgtgaagggcagattcaccatcagccgggacaacgccaagaacaccgtgtacctccagatgaacagcctgaagcctgaggacaccgccgtgtactactgcgccgccaatccaacatacggcagcgactggaacgccgagaattggggccagggaacccaagtgacagtgtctagcctcgaggacctgaagaacgtgttcccacctgaggtggccgtgttcgagcctagcgaggccgagatcagccacacccagaaagccaccctcgtgtgcctggctaccggcttctaccccgaccatgtggaactgtcttggtgggtcaacggcaaagaggtgcacagcggcgtgtctaccgacccccagccactgaaagaacagcccgccctgaacgacagccggtactgcctgagcagcagactgagagtgtccgccaccttctggcagaacccccggaaccacttcagatgccaggtgcagttctacggcctgagcgagaacgacgagtggacccaggacagagccaagcccgtgacccagatcgtgtctgccgaagcctggggcagagccgattgcggatccctgcaagacccttgctctaattgccctgccggcaccttctgcgacaacaaccggaaccagatttgctccccttgtcctcctaacagcttcagctctgccggcggacagagaacctgcgacatctgtagacagtgcaagggcgtgttcagaacccggaaagagtgcagcagcacctccaacgccgagtgcgattgcacacctggcttccattgtctcggagccggctgttctatgtgcgagcaggattgcaagcagggccaagagctgaccaagaagggctgcaaggattgctgcttcggcacctttaacgaccagaagagaggcatctgccggccttggaccaactgtagcctggatggcaagagcgtgctggtcaacggcaccaaagaacgggatgtcgtgtgcggaccttctccagccgatttgtctcctggcgcttctagcgtgacacctcctgctccagctagagagcctggacacagccctcagatcatctcattctttctggccctgacctctacagccctgctgtttctgctgttcttcctgacactgcggttcagcgtggtcaagcggggcagaaagaagctgctgtacatcttcaagcagcctttcatgcggcccgtgcagaccacacaagaagaggacggctgctcctgtcggttccccgaggaagaggaaggcggttgcgaacttagcactagtagagtgaagttcagcagaagcgccgacgcccctgcctaccagcagggacagaaccaactgtacaacgagctgaacctgggcagacgggaagagtacgacgtgctggacaagcggagaggcagggaccctgagatgggcggaaagccccagcggagaaagaacccccaggaaggactgtataacgaactccagaaagacaagatggccgaagcctacagcgagatcggcatgaagggcgagcggagaagaggcaagggccacgatggcctgtaccagggcctgagcaccgccaccaaggacacctatgacgccctgcacatgcaggccctgcctccaagaagggccaagcgatctggatctggagcaacaaacttctcactactcaaacaagcaggtgacgtggaggagaatcccgggcctatggactggatttggcgcatccttttccttgtcggcgctgctaccggcgcgcattccgggcccgaagtgcaactggttgaatccggtggcggcctggtgcaagcaggcggatctctcagacttagctgtgccgcctccggcagaaccttcacaatgggatggtttaggcaggctccagggaaagagagagagttcgtcgccgccatctctctgtctcccacactggcctactacgccgactctgtgaaaggccggttcaccatctccagagataatgccaagaacaccgtggtgctgcaaatgaactctctgaaacccgaggatacagccctgtactattgtgccgctgaccggaagtccgtgatgagcatcagacccgattactggggacagggcacacaagtcacagtgtcctctacgcgtatccagaaccctgatcctgccgtgtaccagctgcgggatagcaagagcagcgacaagagcgtgtgtctgttcaccgacttcgacagccagaccaacgtgtcccagagcaaggactccgacgtgtacatcaccgataagaccgtgctggacatgcggagcatggacttcaagagcaactccgccgtggcctggtccaacaagtccgatttcgcctgcgccaacgccttcaacaacagcattatccccgaggacacattcttcccaagccccgagagcagctgcggtacccttcaggacccttgcagcaactgtccagccggaaccttttgtgataacaacagaaatcagatatgcagcccctgtccgccaaactcctttagcagtgctggcggccagcggacatgtgacatttgtcggcagtgcaaaggggttttccgcaccagaaaagagtgctcctccaccagcaatgccgagtgtgactgtaccccaggctttcactgtctcggcgctggatgtagcatgtgtgaacaggactgtaaacaggggcaagaactcacgaagaaagggtgcaaagactgctgttttgggacgttcaacgatcagaagcggggaatctgtaggccctggacaaactgttctctggacggcaagtccgtgctcgtgaatggaacaaaagagcgggacgttgtctgcggcccaagtcctgctgatcttagcccaggcgcttcctctgtgactcctccagctcctgcacgcgaacctggacactctccccagatcatctcattttttctcgctctcacatcaaccgctttgctgttcctgctcttttttctcaccctccggttctccgtggttaagagaggccggaaaaaactcctctatatctttaaacagccctttatgcgcccggtccaaacaacccaagaggaagatggctgctcttgcagattcccggaagaggaagaaggcggctgcgagctgagctctagacgggttaagttttccagatccgcagacgcacccgcttaccaacaagggcagaaccaactctacaatgaacttaatttggggcggagggaagagtacgacgttctggacaaaaggaggggacgagatcccgagatgggcggaaagcctcagcgaaggaagaatccgcaagaggggctttataacgaactccagaaagataaaatggcagaagcctatagtgagattgggatgaagggagaaaggaggaggggtaaaggtcacgatgggttgtaccaaggattgagcacagccactaaagatacctatgatgcgctccacatgcaggccctgccgccaagacgcgccaagagaagcggatctggcgtgaagcagaccctgaatttcgacctgctgaagctggctggcgacgtggaatccaacccaggccctggccatatgaccgagtacaagcccacggtgcgcctcgccacccgcgacgacgtccccagggccgtacgcaccctcgccgccgcgttcgccgactaccccgccacgcgccacaccgtcgatccggaccgccacatcgagcgggtcaccgagctgcaagaactcttcctcacgcgcgtcgggctcgacatcggcaaggtgtgggtcgcggacgacggcgccgcggtggcggtctggaccacgccggagagcgtcgaagcgggggcggtgttcgccgagatcggcccgcgcatggccgagttgagcggttcccggctggccgcgcagcaacagatggaaggcctcctggcgccgcaccggcccaaggagcccgcgtggttcctggccaccgtcggcgtctcgcccgaccaccagggcaagggtctgggcagcgccgtcgtgctccccggagtggaggcggccgagcgcgccggggtgcccgccttcctggagacctccgcgccccgcaacctccccttctacgagcggctcggcttcaccgtcaccgccgacgtcgaggtgcccgaaggaccgcgcacctggtgcatgacccgcaagcccggtgcctga

SEQ ID NO: 5943 - DNA, 2232 bp, Artificial Sequence
  Synthetic Polynucleotide
atggccttaccagtgaccgccttgctcctgccgctggccttgctgctccacgccgccaggccggcatgcgaagtgcagctgcttgaaagtggcggcggactgattcagcctggcggatctctgagactgagctgtgccgccagcggcttcaccttttctagccacgccatgacctgggtccgacaggcacctggaaaagggcttgaatgggtgtccgccatcagcggctctggcgattacacacactacgccgacagcgtgaagggcagattcaccatcagcagagacaacagcaagaacaccgtgtacctccagatgaacagcctgagagccgaggacagcgccgtgtattattgcgccaaggatgaggatggcggcagcctgcttggacacagaggacaaggcaccctggtcaccgtttcttccggtaccggcggaggcggatctggcggcggaggtagcggtggcggaggatctgaattcggatctctcgagctgcaagacccttgctctaattgccctgccggcaccttctgcgacaacaaccggaaccagatttgctccccttgtcctcctaacagcttcagctctgccggcggacagagaacctgcgacatctgtagacagtgcaagggcgtgttcagaacccggaaagagtgcagcagcacctccaacgccgagtgcgattgcacacctggcttccattgtctcggagccggctgttctatgtgcgagcaggattgcaagcagggccaagagctgaccaagaagggctgcaaggattgctgcttcggcacctttaacgaccagaagagaggcatctgccggccttggaccaactgtagcctggatggcaagagcgtgctggtcaacggcaccaaagaacgggatgtcgtgtgcggaccttctccagccgatttgtctcctggcgcttctagcgtgacacctcctgctccagctagagagcctggacacagccctcagatcatctcattctttctggccctgacctctacagccctgctgtttctgctgttcttcctgacactgcggttcagcgtggtcaagcggggcagaaagaagctgctgtacatcttcaagcagcctttcatgcggcccgtgcagaccacacaagaagaggacggctgctcctgtcggttccccgaggaagaggaaggcggttgcgaacttagcactagtagagtgaagttcagcagaagcgccgacgcccctgcctaccagcagggacagaaccaactgtacaacgagctgaacctgggcagacgggaagagtacgacgtgctggacaagcggagaggcagggaccctgagatgggcggaaagccccagcggagaaagaacccccaggaaggactgtataacgaactccagaaagacaagatggccgaagcctacagcgagatcggcatgaagggcgagcggagaagaggcaagggccacgatggcctgtaccagggcctgagcaccgccaccaaggacacctatgacgccctgcacatgcaggccctgcctccaagaagggccaagcgatctggatctggagcaacaaacttctcactactcaaacaagcaggtgacgtggaggagaatcccgggcctactagaggccatatgaccgagtacaagcccacggtgcgcctcgccacccgcgacgacgtccccagggccgtacgcaccctcgccgccgcgttcgccgactaccccgccacgcgccacaccgtcgatccggaccgccacatcgagcgggtcaccgagctgcaagaactcttcctcacgcgcgtcgggctcgacatcggcaaggtgtgggtcgcggacgacggcgccgcggtggcggtctggaccacgccggagagcgtcgaagcgggggcggtgttcgccgagatcggcccgcgcatggccgagttgagcggttcccggctggccgcgcagcaacagatggaaggcctcctggcgccgcaccggcccaaggagcccgcgtggttcctggccaccgtcggcgtctcgcccgaccaccagggcaagggtctgggcagcgccgtcgtgctccccggagtggaggcggccgagcgcgccggggtgcccgccttcctggagacctccgcgccccgcaacctccccttctacgagcggctcggcttcaccgtcaccgccgacgtcgaggtgcccgaaggaccgcgcacctggtgcatgacccgcaagcccggtgcctga

SEQ ID NO: 5944 - DNA, 1845 bp, Artificial Sequence
  Synthetic Polynucleotide
atggccttaccagtgaccgccttgctcctgccgctggccttgctgctccacgccgccaggccggacatccagatgacacagagccctagcagcctgtctgccagcgtgggagacagagtgaccatcacatgcaaggccagcgaccacatcaacaactggctggcctggtatcagcagaagcctggacaggcccctaagctgctgatctacggcgctaccacactggaaacaggcgtgcccagcagattttctggcagcggctctggcaccgactacaccctgacaatatccagcctccagcctgaggacttcgccacctactactgtcagcagagctggaacaccccttggacattcggccagggcaccaagctggaaatcaagagaggcggaggcggaagtggaggcggaggatctggcggcggaggctctcaagttcagcttcaacagcctggcgctgagctggtcaaacctggcgcttctgtgaagatgagctgcaaagccagcggctacgccttcagcagctactggatcaactggatgaagcagaaacccggccagggactcgaatggatcggccaaatctatcccggcgacggcgacaccaactacaacggcaagttcaagggcagagccacactgaccgccgatacctctagcagcacagcctacatgcagctgagcagcctgaccagcgaagatagcgccgtgtacttctgtgcccggtccatcacaacagtcgtgggctgcgctatggactattggggccagggaacaagcgtgaccgtgtctagtacgcgtctgcaagacccttgctctaattgccctgccggcaccttctgcgacaacaaccggaaccagatttgctccccttgtcctcctaacagcttcagctctgccggcggacagagaacctgcgacatctgtagacagtgcaagggcgtgttcagaacccggaaagagtgcagcagcacctccaacgccgagtgcgattgcacacctggcttccattgtctcggagccggctgttctatgtgcgagcaggattgcaagcagggccaagagctgaccaagaagggctgcaaggattgctgcttcggcacctttaacgaccagaagagaggcatctgccggccttggaccaactgtagcctggatggcaagagcgtgctggtcaacggcaccaaagaacgggatgtcgtgtgcggaccttctccagccgatttgtctcctggcgcttctagcgtgacacctcctgctccagctagagagcctggacacagccctcagatcatctcattctttctggccctgacctctacagccctgctgtttctgctgttcttcctgacactgcggttcagcgtggtcaagcggggcagaaagaagctgctgtacatcttcaagcagcctttcatgcggcccgtgcagaccacacaagaagaggacggctgctcctgtcggttccccgaggaagaggaaggcggttgcgaacttagcactagtagagtgaagttcagcagaagcgccgacgcccctgcctaccagcagggacagaaccaactgtacaacgagctgaacctgggcagacgggaagagtacgacgtgctggacaagcggagaggcagggaccctgagatgggcggaaagccccagcggagaaagaacccccaggaaggactgtataacgaactccagaaagacaagatggccgaagcctacagcgagatcggcatgaagggcgagcggagaagaggcaagggccacgatggcctgtaccagggcctgagcaccgccaccaaggacacctatgacgccctgcacatgcaggccctgcctccaaga

SEQ ID NO: 5945 - DNA, 1845 bp, Artificial Sequence
  Synthetic Polynucleotide
atggccttaccagtgaccgccttgctcctgccgctggccttgctgctccacgccgccaggccggagatcgtgctgacacagagccctgccaccctgtctctgagccctggcgaaagagccaccctgagctgtagagccagccagagcgtgtccagctacctggcctggtatcagcagaagcccggccaggctccccggctgctgatctacgatgccagcaatagagccaccggcatccccgccagattttccggctctggcagcggcaccgacttcaccctgaccatcagctccctggaacccgaggacttcgccgtgtactactgccagcagcggagcaactggcccatcacattcggccagggcacccggctggaaatcaaaggcggaggcggaagtggaggcggaggatctggcggcggaggctctgaagtgcagctggtggaatcaggcggcggactggtgcagcctggcagaagcctgagactgagctgtgccgccagcggcttcaccttcaacgactacgccatgcactgggtgcgccaggcccctggaaaaggactggaatgggtgtccacaatcagctggaacagcggcagcatcggctacgccgatagcgtgaagggccggttcaccatcagccgggacaacgccaagaagtccctgtacctccagatgaacagcctgcgggccgaggacacagccctgtactattgcgccaaggacatccagtacggcaactactactacggcatggacgtgtggggccagggaaccaccgtgaccgtgtcatctacgcgtctgcaagacccttgctctaattgccctgccggcaccttctgcgacaacaaccggaaccagatttgctccccttgtcctcctaacagcttcagctctgccggcggacagagaacctgcgacatctgtagacagtgcaagggcgtgttcagaacccggaaagagtgcagcagcacctccaacgccgagtgcgattgcacacctggcttccattgtctcggagccggctgttctatgtgcgagcaggattgcaagcagggccaagagctgaccaagaagggctgcaaggattgctgcttcggcacctttaacgaccagaagagaggcatctgccggccttggaccaactgtagcctggatggcaagagcgtgctggtcaacggcaccaaagaacgggatgtcgtgtgcggaccttctccagccgatttgtctcctggcgcttctagcgtgacacctcctgctccagctagagagcctggacacagccctcagatcatctcattctttctggccctgacctctacagccctgctgtttctgctgttcttcctgacactgcggttcagcgtggtcaagcggggcagaaagaagctgctgtacatcttcaagcagcctttcatgcggcccgtgcagaccacacaagaagaggacggctgctcctgtcggttccccgaggaagaggaaggcggttgcgaacttagcactagtagagtgaagttcagcagaagcgccgacgcccctgcctaccagcagggacagaaccaactgtacaacgagctgaacctgggcagacgggaagagtacgacgtgctggacaagcggagaggcagggaccctgagatgggcggaaagccccagcggagaaagaacccccaggaaggactgtataacgaactccagaaagacaagatggccgaagcctacagcgagatcggcatgaagggcgagcggagaagaggcaagggccacgatggcctgtaccagggcctgagcaccgccaccaaggacacctatgacgccctgcacatgcaggccctgcctccaaga

SEQ ID NO: 5946 - DNA, 1467 bp, Artificial Sequence
  Synthetic Polynucleotide
atggccttaccagtgaccgccttgctcctgccgctggccttgctgctccacgccgccaggccggaagtgcagctggttgaatctggcggaggactggttcaggctggcggatctctgagactgtcttgtgccgccagcggcagaacctttagcatgggctggtttagacaggcccctggcaaagagagagagttcgtcgccgccatcacatactctggcggcagcccttactacgccgactctgtgaagggcagattcaccatcagccgggacaacgccaagaacaccgtgtacctccagatgaacagcctgaagcctgaggacaccgccgtgtactactgcgccgccaatccaacatacggcagcgactggaacgccgagaattggggccagggaacccaagtgacagtgtctagcacgcgtctgcaagacccttgctctaattgccctgccggcaccttctgcgacaacaaccggaaccagatttgctccccttgtcctcctaacagcttcagctctgccggcggacagagaacctgcgacatctgtagacagtgcaagggcgtgttcagaacccggaaagagtgcagcagcacctccaacgccgagtgcgattgcacacctggcttccattgtctcggagccggctgttctatgtgcgagcaggattgcaagcagggccaagagctgaccaagaagggctgcaaggattgctgcttcggcacctttaacgaccagaagagaggcatctgccggccttggaccaactgtagcctggatggcaagagcgtgctggtcaacggcaccaaagaacgggatgtcgtgtgcggaccttctccagccgatttgtctcctggcgcttctagcgtgacacctcctgctccagctagagagcctggacacagccctcagatcatctcattctttctggccctgacctctacagccctgctgtttctgctgttcttcctgacactgcggttcagcgtggtcaagcggggcagaaagaagctgctgtacatcttcaagcagcctttcatgcggcccgtgcagaccacacaagaagaggacggctgctcctgtcggttccccgaggaagaggaaggcggttgcgaacttagcactagtagagtgaagttcagcagaagcgccgacgcccctgcctaccagcagggacagaaccaactgtacaacgagctgaacctgggcagacgggaagagtacgacgtgctggacaagcggagaggcagggaccctgagatgggcggaaagccccagcggagaaagaacccccaggaaggactgtataacgaactccagaaagacaagatggccgaagcctacagcgagatcggcatgaagggcgagcggagaagaggcaagggccacgatggcctgtaccagggcctgagcaccgccaccaaggacacctatgacgccctgcacatgcaggccctgcctccaaga

SEQ ID NO: 5947 - DNA, 1467 bp, Artificial Sequence
  Synthetic Polynucleotide
atggccttaccagtgaccgccttgctcctgccgctggccttgctgctccacgccgccaggccgcagctccagttgcaagagagcggccctggcttggtaaaaccttccgagacccttagcctcacatgcacggttagtgggggcagcatttcctcaggtgattactattggggatggattcggcaacccccgggtaaaggattggagtggattggtcatatttattatagtggagcgacgtactacaacccaagtctcaaatccagggttacaatatccgtcgatacgagcaggaaccaattcagcttgaaactttctagtgtcaccgcagcagacacagccgtctattactgtacgcgggatgactccagtaattggcggtcccgagggcaagggacactggtcacggtctcctcaacgcgtctgcaagacccttgctctaattgccctgccggcaccttctgcgacaacaaccggaaccagatttgctccccttgtcctcctaacagcttcagctctgccggcggacagagaacctgcgacatctgtagacagtgcaagggcgtgttcagaacccggaaagagtgcagcagcacctccaacgccgagtgcgattgcacacctggcttccattgtctcggagccggctgttctatgtgcgagcaggattgcaagcagggccaagagctgaccaagaagggctgcaaggattgctgcttcggcacctttaacgaccagaagagaggcatctgccggccttggaccaactgtagcctggatggcaagagcgtgctggtcaacggcaccaaagaacgggatgtcgtgtgcggaccttctccagccgatttgtctcctggcgcttctagcgtgacacctcctgctccagctagagagcctggacacagccctcagatcatctcattctttctggccctgacctctacagccctgctgtttctgctgttcttcctgacactgcggttcagcgtggtcaagcggggcagaaagaagctgctgtacatcttcaagcagcctttcatgcggcccgtgcagaccacacaagaagaggacggctgctcctgtcggttccccgaggaagaggaaggcggttgcgaacttagcactagtagagtgaagttcagcagaagcgccgacgcccctgcctaccagcagggacagaaccaactgtacaacgagctgaacctgggcagacgggaagagtacgacgtgctggacaagcggagaggcagggaccctgagatgggcggaaagccccagcggagaaagaacccccaggaaggactgtataacgaactccagaaagacaagatggccgaagcctacagcgagatcggcatgaagggcgagcggagaagaggcaagggccacgatggcctgtaccagggcctgagcaccgccaccaaggacacctatgacgccctgcacatgcaggccctgcctccaaga

SEQ ID NO: 5948 - DNA, 1467 bp, Artificial Sequence
  Synthetic Polynucleotide
atggccttaccagtgaccgccttgctcctgccgctggccttgctgctccacgccgccaggccgcagctccagctgcaagagtctggacctggcctggtcaagcctagcgagacactgagcctgacctgtaccgtgtccggcgatagcatcagcagcggcgattactactggggctggatcagacagcctcctggcaaaggactggaatggatcggccacatctactacagcggcgtgacctactacaaccccagcctgaagtccagagtgaccatcagcgtggacaccagccggaaccagttctccctgaagctgtctagcgtgacagccgccgataccgccgtgtactactgcaccagagaggacagcagcaactggcggagtagaggccagggaacactggtcacagttagctctacgcgtctgcaagacccttgctctaattgccctgccggcaccttctgcgacaacaaccggaaccagatttgctccccttgtcctcctaacagcttcagctctgccggcggacagagaacctgcgacatctgtagacagtgcaagggcgtgttcagaacccggaaagagtgcagcagcacctccaacgccgagtgcgattgcacacctggcttccattgtctcggagccggctgttctatgtgcgagcaggattgcaagcagggccaagagctgaccaagaagggctgcaaggattgctgcttcggcacctttaacgaccagaagagaggcatctgccggccttggaccaactgtagcctggatggcaagagcgtgctggtcaacggcaccaaagaacgggatgtcgtgtgcggaccttctccagccgatttgtctcctggcgcttctagcgtgacacctcctgctccagctagagagcctggacacagccctcagatcatctcattctttctggccctgacctctacagccctgctgtttctgctgttcttcctgacactgcggttcagcgtggtcaagcggggcagaaagaagctgctgtacatcttcaagcagcctttcatgcggcccgtgcagaccacacaagaagaggacggctgctcctgtcggttccccgaggaagaggaaggcggttgcgaacttagcactagtagagtgaagttcagcagaagcgccgacgcccctgcctaccagcagggacagaaccaactgtacaacgagctgaacctgggcagacgggaagagtacgacgtgctggacaagcggagaggcagggaccctgagatgggcggaaagccccagcggagaaagaacccccaggaaggactgtataacgaactccagaaagacaagatggccgaagcctacagcgagatcggcatgaagggcgagcggagaagaggcaagggccacgatggcctgtaccagggcctgagcaccgccaccaaggacacctatgacgccctgcacatgcaggccctgcctccaaga

SEQ ID NO: 5949 - DNA, 1473 bp, Artificial Sequence
  Synthetic Polynucleotide
atggccttaccagtgaccgccttgctcctgccgctggccttgctgctccacgccgccaggccggaagttcagctgcaagagtctggcggaggactggttcaacctggcggaagcctgagactgtcttgtgccgcctctggcagaaccttcagcagcctgttcatgggctggttcagacaggcccctggcaaagagagagaactggtcgccgccatcagccggtacagcctgtacacctactacgccgacagcgtgaagggcagattcaccatcagcgccgacaacgccaagaacgccgtgtacctccagatgaacagcctgaagccagaggacacagccgtgtactactgcgccagcaaacttgagtacaccagcaacgactacgacagctggggccagggaacccaagtgacagtctcttctacgcgtctgcaagacccttgctctaattgccctgccggcaccttctgcgacaacaaccggaaccagatttgctccccttgtcctcctaacagcttcagctctgccggcggacagagaacctgcgacatctgtagacagtgcaagggcgtgttcagaacccggaaagagtgcagcagcacctccaacgccgagtgcgattgcacacctggcttccattgtctcggagccggctgttctatgtgcgagcaggattgcaagcagggccaagagctgaccaagaagggctgcaaggattgctgcttcggcacctttaacgaccagaagagaggcatctgccggccttggaccaactgtagcctggatggcaagagcgtgctggtcaacggcaccaaagaacgggatgtcgtgtgcggaccttctccagccgatttgtctcctggcgcttctagcgtgacacctcctgctccagctagagagcctggacacagccctcagatcatctcattctttctggccctgacctctacagccctgctgtttctgctgttcttcctgacactgcggttcagcgtggtcaagcggggcagaaagaagctgctgtacatcttcaagcagcctttcatgcggcccgtgcagaccacacaagaagaggacggctgctcctgtcggttccccgaggaagaggaaggcggttgcgaacttagcactagtagagtgaagttcagcagaagcgccgacgcccctgcctaccagcagggacagaaccaactgtacaacgagctgaacctgggcagacgggaagagtacgacgtgctggacaagcggagaggcagggaccctgagatgggcggaaagccccagcggagaaagaacccccaggaaggactgtataacgaactccagaaagacaagatggccgaagcctacagcgagatcggcatgaagggcgagcggagaagaggcaagggccacgatggcctgtaccagggcctgagcaccgccaccaaggacacctatgacgccctgcacatgcaggccctgcctccaaga

SEQ ID NO: 5950 - DNA, 1497 bp, Artificial Sequence
  Synthetic Polynucleotide
atggccttaccagtgaccgccttgctcctgccgctggccttgctgctccacgccgccaggccggaagtgcagctggttgaatctggcggaggactggttcagcctggcggatctctgagactgtcttgtgccgcctctggcttcgccagcgactactatatcatcggctggttcagacaggcccctggcaaagagagagagggcgtcagctgtatcagcagcagatacgccaacaccaactacgccgacagcgtgaagggcagattcaccatcagccgggacaacgccaagaacaccgtgtacctccagatgaacagcctgaagcctgaggacaccgccgtgtactactgtgccgccgacaccagaagatacacctgtcctgacattgccaccatgcaccggaacttcgattcttggggccagggcacactggtcaccgtttcttctacgcgtctgcaagacccttgctctaattgccctgccggcaccttctgcgacaacaaccggaaccagatttgctccccttgtcctcctaacagcttcagctctgccggcggacagagaacctgcgacatctgtagacagtgcaagggcgtgttcagaacccggaaagagtgcagcagcacctccaacgccgagtgcgattgcacacctggcttccattgtctcggagccggctgttctatgtgcgagcaggattgcaagcagggccaagagctgaccaagaagggctgcaaggattgctgcttcggcacctttaacgaccagaagagaggcatctgccggccttggaccaactgtagcctggatggcaagagcgtgctggtcaacggcaccaaagaacgggatgtcgtgtgcggaccttctccagccgatttgtctcctggcgcttctagcgtgacacctcctgctccagctagagagcctggacacagccctcagatcatctcattctttctggccctgacctctacagccctgctgtttctgctgttcttcctgacactgcggttcagcgtggtcaagcggggcagaaagaagctgctgtacatcttcaagcagcctttcatgcggcccgtgcagaccacacaagaagaggacggctgctcctgtcggttccccgaggaagaggaaggcggttgcgaacttagcactagtagagtgaagttcagcagaagcgccgacgcccctgcctaccagcagggacagaaccaactgtacaacgagctgaacctgggcagacgggaagagtacgacgtgctggacaagcggagaggcagggaccctgagatgggcggaaagccccagcggagaaagaacccccaggaaggactgtataacgaactccagaaagacaagatggccgaagcctacagcgagatcggcatgaagggcgagcggagaagaggcaagggccacgatggcctgtaccagggcctgagcaccgccaccaaggacacctatgacgccctgcacatgcaggccctgcctccaaga

SEQ ID NO: 5951 - DNA, 1485 bp, Artificial Sequence
  Synthetic Polynucleotide
atggccttaccagtgaccgccttgctcctgccgctggccttgctgctccacgccgccaggccggaagtgcaactggtggaatctggaggctctctggtgcagccagggggaagcctgagactgtcttgtgccgcttccggcttcaccttcgacgactacgccatgagctgggtgcgccaggtgccaggcaaaggcctggaatgggtgtccagcatcaactggagcggcacccacaccgattacgccgactccgtgaaaggcagattcacaatcagcagaaacaacgccaacaataccctgtacctgcagatgaactccctgaagtctgaggatacagcagtgtattattgcgccaagaactggcgggacgccggcaccacttggtttgagaaaagcggctctgccggacagggaacccaagtgacagtgtcctccacgcgtctgcaagacccttgctctaattgccctgccggcaccttctgcgacaacaaccggaaccagatttgctccccttgtcctcctaacagcttcagctctgccggcggacagagaacctgcgacatctgtagacagtgcaagggcgtgttcagaacccggaaagagtgcagcagcacctccaacgccgagtgcgattgcacacctggcttccattgtctcggagccggctgttctatgtgcgagcaggattgcaagcagggccaagagctgaccaagaagggctgcaaggattgctgcttcggcacctttaacgaccagaagagaggcatctgccggccttggaccaactgtagcctggatggcaagagcgtgctggtcaacggcaccaaagaacgggatgtcgtgtgcggaccttctccagccgatttgtctcctggcgcttctagcgtgacacctcctgctccagctagagagcctggacacagccctcagatcatctcattctttctggccctgacctctacagccctgctgtttctgctgttcttcctgacactgcggttcagcgtggtcaagcggggcagaaagaagctgctgtacatcttcaagcagcctttcatgcggcccgtgcagaccacacaagaagaggacggctgctcctgtcggttccccgaggaagaggaaggcggttgcgaacttagcactagtagagtgaagttcagcagaagcgccgacgcccctgcctaccagcagggacagaaccaactgtacaacgagctgaacctgggcagacgggaagagtacgacgtgctggacaagcggagaggcagggaccctgagatgggcggaaagccccagcggagaaagaacccccaggaaggactgtataacgaactccagaaagacaagatggccgaagcctacagcgagatcggcatgaagggcgagcggagaagaggcaagggccacgatggcctgtaccagggcctgagcaccgccaccaaggacacctatgacgccctgcacatgcaggccctgcctccaaga

SEQ ID NO: 5952 - DNA, 1470 bp, Artificial Sequence
  Synthetic Polynucleotide
atggccttaccagtgaccgccttgctcctgccgctggccttgctgctccacgccgccaggccggaggtgcagctggttgaatctggcggaggactggttcagcctggcggatctctgagactgtcttgtgccgccagcggcttcaacatcaaggatacctgtatcggctgggttcgcagagcccctggcaaagaggaagaactggtcgccaaaatctgcaagtacagcggccacaccagatacgccgacagcgtgaagggcagattcaccatcagcgccgacaccagcaagaacaccgcctacctccagatgaacagcctgagagccgaggacaccgccgtgtactattgtgccgctgtgtccgtcagagatgggcactacaattactggggccagggcaccaccgtgaccgtttcttcaacgcgtctgcaagacccttgctctaattgccctgccggcaccttctgcgacaacaaccggaaccagatttgctccccttgtcctcctaacagcttcagctctgccggcggacagagaacctgcgacatctgtagacagtgcaagggcgtgttcagaacccggaaagagtgcagcagcacctccaacgccgagtgcgattgcacacctggcttccattgtctcggagccggctgttctatgtgcgagcaggattgcaagcagggccaagagctgaccaagaagggctgcaaggattgctgcttcggcacctttaacgaccagaagagaggcatctgccggccttggaccaactgtagcctggatggcaagagcgtgctggtcaacggcaccaaagaacgggatgtcgtgtgcggaccttctccagccgatttgtctcctggcgcttctagcgtgacacctcctgctccagctagagagcctggacacagccctcagatcatctcattctttctggccctgacctctacagccctgctgtttctgctgttcttcctgacactgcggttcagcgtggtcaagcggggcagaaagaagctgctgtacatcttcaagcagcctttcatgcggcccgtgcagaccacacaagaagaggacggctgctcctgtcggttccccgaggaagaggaaggcggttgcgaacttagcactagtagagtgaagttcagcagaagcgccgacgcccctgcctaccagcagggacagaaccaactgtacaacgagctgaacctgggcagacgggaagagtacgacgtgctggacaagcggagaggcagggaccctgagatgggcggaaagccccagcggagaaagaacccccaggaaggactgtataacgaactccagaaagacaagatggccgaagcctacagcgagatcggcatgaagggcgagcggagaagaggcaagggccacgatggcctgtaccagggcctgagcaccgccaccaaggacacctatgacgccctgcacatgcaggccctgcctccaaga

SEQ ID NO: 5953 - DNA, 1485 bp, Artificial Sequence
  Synthetic Polynucleotide
atggccttaccagtgaccgccttgctcctgccgctggccttgctgctccacgccgccaggccgggctctgacctgggcatcaagctgctgttcgccgctgccaagggccaggacgacgaagtgcggattctgctggctgctggggccgacgtgaacgccaaggatttcgagggctacacccccctgcacgtggccgcctatgatggacacctggaaatcgtggaagtgctgctgaaggctggcgctgatgtgaatgccaaagacagccagggccggacccctctgcatgaagccgcctacagcggccatctggaaattgtggaagtgctgctgaaagccggggcagacgtgaacgctcaggacgacgctggcgagacaccagccgatctggctgcagcttggggccacgaagatatcgccgaggtgctgcagaagacgcgtctgcaagacccttgctctaattgccctgccggcaccttctgcgacaacaaccggaaccagatttgctccccttgtcctcctaacagcttcagctctgccggcggacagagaacctgcgacatctgtagacagtgcaagggcgtgttcagaacccggaaagagtgcagcagcacctccaacgccgagtgcgattgcacacctggcttccattgtctcggagccggctgttctatgtgcgagcaggattgcaagcagggccaagagctgaccaagaagggctgcaaggattgctgcttcggcacctttaacgaccagaagagaggcatctgccggccttggaccaactgtagcctggatggcaagagcgtgctggtcaacggcaccaaagaacgggatgtcgtgtgcggaccttctccagccgatttgtctcctggcgcttctagcgtgacacctcctgctccagctagagagcctggacacagccctcagatcatctcattctttctggccctgacctctacagccctgctgtttctgctgttcttcctgacactgcggttcagcgtggtcaagcggggcagaaagaagctgctgtacatcttcaagcagcctttcatgcggcccgtgcagaccacacaagaagaggacggctgctcctgtcggttccccgaggaagaggaaggcggttgcgaacttagcactagtagagtgaagttcagcagaagcgccgacgcccctgcctaccagcagggacagaaccaactgtacaacgagctgaacctgggcagacgggaagagtacgacgtgctggacaagcggagaggcagggaccctgagatgggcggaaagccccagcggagaaagaacccccaggaaggactgtataacgaactccagaaagacaagatggccgaagcctacagcgagatcggcatgaagggcgagcggagaagaggcaagggccacgatggcctgtaccagggcctgagcaccgccaccaaggacacctatgacgccctgcacatgcaggccctgcctccaaga

SEQ ID NO: 5954 - DNA, 1287 bp, Artificial Sequence
  Synthetic Polynucleotide
atggccttaccagtgaccgccttgctcctgccgctggccttgctgctccacgccgccaggccggtggacaacaagttcaacaaagagcggtacagcgcctactacgagatttggcaactgcccaacctgaacgtgcggcagaaggccgccttcatcggatctctgcaggacgaccctagccagagcgccaatctgctggccgaggccaagaagctgaacgacgcccaggcccctaaaacgcgtctgcaagacccttgctctaattgccctgccggcaccttctgcgacaacaaccggaaccagatttgctccccttgtcctcctaacagcttcagctctgccggcggacagagaacctgcgacatctgtagacagtgcaagggcgtgttcagaacccggaaagagtgcagcagcacctccaacgccgagtgcgattgcacacctggcttccattgtctcggagccggctgttctatgtgcgagcaggattgcaagcagggccaagagctgaccaagaagggctgcaaggattgctgcttcggcacctttaacgaccagaagagaggcatctgccggccttggaccaactgtagcctggatggcaagagcgtgctggtcaacggcaccaaagaacgggatgtcgtgtgcggaccttctccagccgatttgtctcctggcgcttctagcgtgacacctcctgctccagctagagagcctggacacagccctcagatcatctcattctttctggccctgacctctacagccctgctgtttctgctgttcttcctgacactgcggttcagcgtggtcaagcggggcagaaagaagctgctgtacatcttcaagcagcctttcatgcggcccgtgcagaccacacaagaagaggacggctgctcctgtcggttccccgaggaagaggaaggcggttgcgaacttagcactagtagagtgaagttcagcagaagcgccgacgcccctgcctaccagcagggacagaaccaactgtacaacgagctgaacctgggcagacgggaagagtacgacgtgctggacaagcggagaggcagggaccctgagatgggcggaaagccccagcggagaaagaacccccaggaaggactgtataacgaactccagaaagacaagatggccgaagcctacagcgagatcggcatgaagggcgagcggagaagaggcaagggccacgatggcctgtaccagggcctgagcaccgccaccaaggacacctatgacgccctgcacatgcaggccctgcctccaaga

SEQ ID NO: 5955 - DNA, 1380 bp, Artificial Sequence
  Synthetic Polynucleotide
atggccttaccagtgaccgccttgctcctgccgctggccttgctgctccacgccgccaggccgctgccagccccgaagaatttggtcgtttcccgtgtcactgaggactctgcacgtctgagctggaccgcaccggacgcggcgttcgacagctttgcaatcggctactgggagtgggatgatgacggcgaggccattgtgctgaccgttccgggtagcgagcgcagctacgatctgaccggtctgaagccgggtacggaatatccggtgtatattgcgggcgtgaagggtggccagtggagcttcccgctgagcgcgatctttaccaccacgcgtctgcaagacccttgctctaattgccctgccggcaccttctgcgacaacaaccggaaccagatttgctccccttgtcctcctaacagcttcagctctgccggcggacagagaacctgcgacatctgtagacagtgcaagggcgtgttcagaacccggaaagagtgcagcagcacctccaacgccgagtgcgattgcacacctggcttccattgtctcggagccggctgttctatgtgcgagcaggattgcaagcagggccaagagctgaccaagaagggctgcaaggattgctgcttcggcacctttaacgaccagaagagaggcatctgccggccttggaccaactgtagcctggatggcaagagcgtgctggtcaacggcaccaaagaacgggatgtcgtgtgcggaccttctccagccgatttgtctcctggcgcttctagcgtgacacctcctgctccagctagagagcctggacacagccctcagatcatctcattctttctggccctgacctctacagccctgctgtttctgctgttcttcctgacactgcggttcagcgtggtcaagcggggcagaaagaagctgctgtacatcttcaagcagcctttcatgcggcccgtgcagaccacacaagaagaggacggctgctcctgtcggttccccgaggaagaggaaggcggttgcgaacttagcactagtagagtgaagttcagcagaagcgccgacgcccctgcctaccagcagggacagaaccaactgtacaacgagctgaacctgggcagacgggaagagtacgacgtgctggacaagcggagaggcagggaccctgagatgggcggaaagccccagcggagaaagaacccccaggaaggactgtataacgaactccagaaagacaagatggccgaagcctacagcgagatcggcatgaagggcgagcggagaagaggcaagggccacgatggcctgtaccagggcctgagcaccgccaccaaggacacctatgacgccctgcacatgcaggccctgcctccaaga

SEQ ID NO: 5956 - DNA, 1383 bp, Artificial Sequence
  Synthetic Polynucleotide
atggccttaccagtgaccgccttgctcctgccgctggccttgctgctccacgccgccaggccgatgctgcccgctcctaagaatctggtggtgtccagaatcaccgaggacagcgccagactgtcttggacagctcctgatgccgccttcgacagcttccccatccggtacatcgagacactgatctggggcgaagccatctggctggatgtgcctggaagcgagagaagctacgacctgaccggactgaagcctggcacagagtatgccgtggtcatcaccggcgtgaaaggcggcagattctctagccctctggtggcctctttcaccaccacgcgtctgcaagacccttgctctaattgccctgccggcaccttctgcgacaacaaccggaaccagatttgctccccttgtcctcctaacagcttcagctctgccggcggacagagaacctgcgacatctgtagacagtgcaagggcgtgttcagaacccggaaagagtgcagcagcacctccaacgccgagtgcgattgcacacctggcttccattgtctcggagccggctgttctatgtgcgagcaggattgcaagcagggccaagagctgaccaagaagggctgcaaggattgctgcttcggcacctttaacgaccagaagagaggcatctgccggccttggaccaactgtagcctggatggcaagagcgtgctggtcaacggcaccaaagaacgggatgtcgtgtgcggaccttctccagccgatttgtctcctggcgcttctagcgtgacacctcctgctccagctagagagcctggacacagccctcagatcatctcattctttctggccctgacctctacagccctgctgtttctgctgttcttcctgacactgcggttcagcgtggtcaagcggggcagaaagaagctgctgtacatcttcaagcagcctttcatgcggcccgtgcagaccacacaagaagaggacggctgctcctgtcggttccccgaggaagaggaaggcggttgcgaacttagcactagtagagtgaagttcagcagaagcgccgacgcccctgcctaccagcagggacagaaccaactgtacaacgagctgaacctgggcagacgggaagagtacgacgtgctggacaagcggagaggcagggaccctgagatgggcggaaagccccagcggagaaagaacccccaggaaggactgtataacgaactccagaaagacaagatggccgaagcctacagcgagatcggcatgaagggcgagcggagaagaggcaagggccacgatggcctgtaccagggcctgagcaccgccaccaaggacacctatgacgccctgcacatgcaggccctgcctccaaga

SEQ ID NO: 5957 - DNA, 2034 bp, Artificial Sequence
  Synthetic Polynucleotide
atggccttaccagtgaccgccttgctcctgccgctggccttgctgctccacgccgccaggccgatggccttaccagtgaccgccttgctcctgccgctggccttgctgctccacgccgccaggccgctgttcaatcaagaggtgcagatccctctgaccgagagctactgtggcccctgtcctaagaactggatctgctacaagaacaactgctaccagttcttcgacgagagcaagaattggtacgagagccaggccagctgcatgagccagaatgccagcctgctgaaggtgtacagcaaagaggaccaggacctgctgaaactggtcaagagctaccactggatgggccttgtgcacatccccaccaatggctcttggcagtgggaggacggcagcattctgagccctaacctgctgaccatcatcgagatgcagaagggcgactgcgccctgtacgccagcagctttaagggctacatcgagaattgcagcaccccgaacacctacatctgtatgcagagaaccgttggcggaggcggaagtggaggcggaggatctggcggcggaggctctgacctctttaatcaagaagtccagattccactcaccgaatcctactgcggaccttgtccaaaaaattggatttgttataagaacaactgttatcaattctttgatgagtctaaaaattggtatgagtcccaggcttcctgcatgtctcagaacgcttctctgctgaaagtctactctaaagaagatcaggatctcctgaagctcgtcaagtcttatcattggatggggctcgtccacattcctaccaacggaagctggcaatgggaagatggctccatcctgtctccaaatctgctcacgattattgaaatgcagaaaggggattgtgctctctacgccagctccttcaagggatatattgagaactgtagcacgcccaatacttatatctgtatgcaacggaccgtgacgcgtctgcaagacccttgctctaattgccctgccggcaccttctgcgacaacaaccggaaccagatttgctccccttgtcctcctaacagcttcagctctgccggcggacagagaacctgcgacatctgtagacagtgcaagggcgtgttcagaacccggaaagagtgcagcagcacctccaacgccgagtgcgattgcacacctggcttccattgtctcggagccggctgttctatgtgcgagcaggattgcaagcagggccaagagctgaccaagaagggctgcaaggattgctgcttcggcacctttaacgaccagaagagaggcatctgccggccttggaccaactgtagcctggatggcaagagcgtgctggtcaacggcaccaaagaacgggatgtcgtgtgcggaccttctccagccgatttgtctcctggcgcttctagcgtgacacctcctgctccagctagagagcctggacacagccctcagatcatctcattctttctggccctgacctctacagccctgctgtttctgctgttcttcctgacactgcggttcagcgtggtcaagcggggcagaaagaagctgctgtacatcttcaagcagcctttcatgcggcccgtgcagaccacacaagaagaggacggctgctcctgtcggttccccgaggaagaggaaggcggttgcgaacttagcactagtagagtgaagttcagcagaagcgccgacgcccctgcctaccagcagggacagaaccaactgtacaacgagctgaacctgggcagacgggaagagtacgacgtgctggacaagcggagaggcagggaccctgagatgggcggaaagccccagcggagaaagaacccccaggaaggactgtataacgaactccagaaagacaagatggccgaagcctacagcgagatcggcatgaagggcgagcggagaagaggcaagggccacgatggcctgtaccagggcctgagcaccgccaccaaggacacctatgacgccctgcacatgcaggccctgcctccaaga

SEQ ID NO: 5958 - DNA, 1674 bp, Artificial Sequence
  Synthetic Polynucleotide
atggccttaccagtgaccgccttgctcctgccgctggccttgctgctccacgccgccaggccgatggagctgactgatttgctcctggcggccatgcttcttgcagtggcaagactaactctgtccagccccgtagctcctgcctgtgaccccagactcctaaataaactgctgcgtgactcccacctccttcacagccgactgagtcagtgtcccgacgtggaccctttgtctatccctgttctgctgcctgctgtggactttagcctgggagaatggaaaacccagacggaacagagcaaggcacaggacattctaggggcagtgtcccttctactggagggagtgatggcagcacgaggacagttggaaccctcctgcctctcatccctcctgggacagctttctgggcaggttcgcctcctcttgggggccctgcagggcctcctaggaacccagcttcctctacagggcaggaccacagctcacaaggaccccaatgccctcttcttgagcttgcaacaactgcttcggggaaaggtgcgcttcctgcttctggtagaaggtcccaccctctgtgtcagacggaccctgccaaccacagctgtcccaagcagtacttctacgcgtctgcaagacccttgctctaattgccctgccggcaccttctgcgacaacaaccggaaccagatttgctccccttgtcctcctaacagcttcagctctgccggcggacagagaacctgcgacatctgtagacagtgcaagggcgtgttcagaacccggaaagagtgcagcagcacctccaacgccgagtgcgattgcacacctggcttccattgtctcggagccggctgttctatgtgcgagcaggattgcaagcagggccaagagctgaccaagaagggctgcaaggattgctgcttcggcacctttaacgaccagaagagaggcatctgccggccttggaccaactgtagcctggatggcaagagcgtgctggtcaacggcaccaaagaacgggatgtcgtgtgcggaccttctccagccgatttgtctcctggcgcttctagcgtgacacctcctgctccagctagagagcctggacacagccctcagatcatctcattctttctggccctgacctctacagccctgctgtttctgctgttcttcctgacactgcggttcagcgtggtcaagcggggcagaaagaagctgctgtacatcttcaagcagcctttcatgcggcccgtgcagaccacacaagaagaggacggctgctcctgtcggttccccgaggaagaggaaggcggttgcgaacttagcactagtagagtgaagttcagcagaagcgccgacgcccctgcctaccagcagggacagaaccaactgtacaacgagctgaacctgggcagacgggaagagtacgacgtgctggacaagcggagaggcagggaccctgagatgggcggaaagccccagcggagaaagaacccccaggaaggactgtataacgaactccagaaagacaagatggccgaagcctacagcgagatcggcatgaagggcgagcggagaagaggcaagggccacgatggcctgtaccagggcctgagcaccgccaccaaggacacctatgacgccctgcacatgcaggccctgcctccaaga

SEQ ID NO: 5959 - DNA, 1272 bp, Artificial Sequence
  Synthetic Polynucleotide
atggccttaccagtgaccgccttgctcctgccgctggccttgctgctccacgccgccaggccgatggaccccgacctggaaatcagagccgccttcctgcggcagagaaacacagccctgagaacagaggtggccgagctggaacaagaggtgcagcggctggaaaacgaggtgtcccagtacgagacaagatacggccctctcggaggcggaaaaacgcgtacgcgtctgcaagacccttgctctaattgccctgccggcaccttctgcgacaacaaccggaaccagatttgctccccttgtcctcctaacagcttcagctctgccggcggacagagaacctgcgacatctgtagacagtgcaagggcgtgttcagaacccggaaagagtgcagcagcacctccaacgccgagtgcgattgcacacctggcttccattgtctcggagccggctgttctatgtgcgagcaggattgcaagcagggccaagagctgaccaagaagggctgcaaggattgctgcttcggcacctttaacgaccagaagagaggcatctgccggccttggaccaactgtagcctggatggcaagagcgtgctggtcaacggcaccaaagaacgggatgtcgtgtgcggaccttctccagccgatttgtctcctggcgcttctagcgtgacacctcctgctccagctagagagcctggacacagccctcagatcatctcattctttctggccctgacctctacagccctgctgtttctgctgttcttcctgacactgcggttcagcgtggtcaagcggggcagaaagaagctgctgtacatcttcaagcagcctttcatgcggcccgtgcagaccacacaagaagaggacggctgctcctgtcggttccccgaggaagaggaaggcggttgcgaacttagcactagtagagtgaagttcagcagaagcgccgacgcccctgcctaccagcagggacagaaccaactgtacaacgagctgaacctgggcagacgggaagagtacgacgtgctggacaagcggagaggcagggaccctgagatgggcggaaagccccagcggagaaagaacccccaggaaggactgtataacgaactccagaaagacaagatggccgaagcctacagcgagatcggcatgaagggcgagcggagaagaggcaagggccacgatggcctgtaccagggcctgagcaccgccaccaaggacacctatgacgccctgcacatgcaggccctgcctccaaga

SEQ ID NO: 5960 - DNA, 1197 bp, Artificial Sequence
  Synthetic Polynucleotide
atggccttaccagtgaccgccttgctcctgccgctggccttgctgctccacgccgccaggccggaagttgctgccctcgagaaggaggtagcagctttggaaaaagaagtcgcagcccttgagaaagaagttgcggctctggagaagacgcgtctgcaagacccttgctctaattgccctgccggcaccttctgcgacaacaaccggaaccagatttgctccccttgtcctcctaacagcttcagctctgccggcggacagagaacctgcgacatctgtagacagtgcaagggcgtgttcagaacccggaaagagtgcagcagcacctccaacgccgagtgcgattgcacacctggcttccattgtctcggagccggctgttctatgtgcgagcaggattgcaagcagggccaagagctgaccaagaagggctgcaaggattgctgcttcggcacctttaacgaccagaagagaggcatctgccggccttggaccaactgtagcctggatggcaagagcgtgctggtcaacggcaccaaagaacgggatgtcgtgtgcggaccttctccagccgatttgtctcctggcgcttctagcgtgacacctcctgctccagctagagagcctggacacagccctcagatcatctcattctttctggccctgacctctacagccctgctgtttctgctgttcttcctgacactgcggttcagcgtggtcaagcggggcagaaagaagctgctgtacatcttcaagcagcctttcatgcggcccgtgcagaccacacaagaagaggacggctgctcctgtcggttccccgaggaagaggaaggcggttgcgaacttagcactagtagagtgaagttcagcagaagcgccgacgcccctgcctaccagcagggacagaaccaactgtacaacgagctgaacctgggcagacgggaagagtacgacgtgctggacaagcggagaggcagggaccctgagatgggcggaaagccccagcggagaaagaacccccaggaaggactgtataacgaactccagaaagacaagatggccgaagcctacagcgagatcggcatgaagggcgagcggagaagaggcaagggccacgatggcctgtaccagggcctgagcaccgccaccaaggacacctatgacgccctgcacatgcaggccctgcctccaaga

SEQ ID NO: 5961 - DNA, 1971 bp, Artificial Sequence
  Synthetic Polynucleotide
atggccttaccagtgaccgccttgctcctgccgctggccttgctgctccacgccgccaggccgctgttcaatcaagaggtgcagatccctctgaccgagagctactgtggcccctgtcctaagaactggatctgctacaagaacaactgctaccagttcttcgacgagagcaagaattggtacgagagccaggccagctgcatgagccagaatgccagcctgctgaaggtgtacagcaaagaggaccaggacctgctgaaactggtcaagagcgcccactggatgggccttgtgcacatccccaccaatggctcttggcagtgggaggacggcagcattctgagccctaacctgctgaccatcatcgagatgcagaagggcgactgcgccctgtacgccagcagctttaagggcttcatcgagaattgcagcaccccgaacacctacatctgtatgcagagaaccgttggcggaggcggaagtggaggcggaggatctggcggcggaggctctgacctctttaatcaagaagtccagattccactcaccgaatcctactgcggaccttgtccaaaaaattggatttgttataagaacaactgttatcaattctttgatgagtctaaaaattggtatgagtcccaggcttcctgcatgtctcagaacgcttctctgctgaaagtctactctaaagaagatcaggatctcctgaagctcgtcaagtctgcccattggatggggctcgtccacattcctaccaacggaagctggcaatgggaagatggctccatcctgtctccaaatctgctcacgattattgaaatgcagaaaggggattgtgctctctacgccagctccttcaagggatttattgagaactgtagcacgcccaatacttatatctgtatgcaacggaccgtgacgcgtctgcaagacccttgctctaattgccctgccggcaccttctgcgacaacaaccggaaccagatttgctccccttgtcctcctaacagcttcagctctgccggcggacagagaacctgcgacatctgtagacagtgcaagggcgtgttcagaacccggaaagagtgcagcagcacctccaacgccgagtgcgattgcacacctggcttccattgtctcggagccggctgttctatgtgcgagcaggattgcaagcagggccaagagctgaccaagaagggctgcaaggattgctgcttcggcacctttaacgaccagaagagaggcatctgccggccttggaccaactgtagcctggatggcaagagcgtgctggtcaacggcaccaaagaacgggatgtcgtgtgcggaccttctccagccgatttgtctcctggcgcttctagcgtgacacctcctgctccagctagagagcctggacacagccctcagatcatctcattctttctggccctgacctctacagccctgctgtttctgctgttcttcctgacactgcggttcagcgtggtcaagcggggcagaaagaagctgctgtacatcttcaagcagcctttcatgcggcccgtgcagaccacacaagaagaggacggctgctcctgtcggttccccgaggaagaggaaggcggttgcgaacttagcactagtagagtgaagttcagcagaagcgccgacgcccctgcctaccagcagggacagaaccaactgtacaacgagctgaacctgggcagacgggaagagtacgacgtgctggacaagcggagaggcagggaccctgagatgggcggaaagccccagcggagaaagaacccccaggaaggactgtataacgaactccagaaagacaagatggccgaagcctacagcgagatcggcatgaagggcgagcggagaagaggcaagggccacgatggcctgtaccagggcctgagcaccgccaccaaggacacctatgacgccctgcacatgcaggccctgcctccaaga

SEQ ID NO: 5962 - DNA, 1971 bp, Artificial Sequence
  Synthetic Polynucleotide
atggccttaccagtgaccgccttgctcctgccgctggccttgctgctccacgccgccaggccgctgttcaatcaagaggtgcagatccctctgaccgagagctactgtggcccctgtcctaagaactggatctgctacaagaacaactgctaccagttcttcgacgagagcaagaattggtacgagagccaggccagctgcatgagccagaatgccagcctgctgaaggtgtacagcaaagaggaccaggacctgctgaaactggtcaagagcgcccactggatgggccttgtgcacatccccaccaatggctcttggcagtgggaggacggcagcattctgagccctaacctgctgaccatcatcgagatgcagaagggcgactgcgccctgtacgccagcagctttaagggctacatcgagaattgcagcaccccgaacacctacatctgtatgcagagaaccgtttctggcggaggcggctctggaggaggcggaagtggcggcggaggcgacctctttaatcaagaagtccagattccactcaccgaatcctactgcggaccttgtccaaaaaattggatttgttataagaacaactgttatcaattctttgatgagtctaaaaattggtatgagtcccaggcttcctgcatgtctcagaacgcttctctgctgaaagtctactctaaagaagatcaggatctcctgaagctcgtcaagtctgcccattggatggggctcgtccacattcctaccaacggaagctggcaatgggaagatggctccatcctgtctccaaatctgctcacgattattgaaatgcagaaaggggattgtgctctctacgccagctccttcaagggatatattgagaactgtagcacgcccaatacttatatctgtatgcaacggaccgtgacgcgtctgcaagacccttgctctaattgccctgccggcaccttctgcgacaacaaccggaaccagatttgctccccttgtcctcctaacagcttcagctctgccggcggacagagaacctgcgacatctgtagacagtgcaagggcgtgttcagaacccggaaagagtgcagcagcacctccaacgccgagtgcgattgcacacctggcttccattgtctcggagccggctgttctatgtgcgagcaggattgcaagcagggccaagagctgaccaagaagggctgcaaggattgctgcttcggcacctttaacgaccagaagagaggcatctgccggccttggaccaactgtagcctggatggcaagagcgtgctggtcaacggcaccaaagaacgggatgtcgtgtgcggaccttctccagccgatttgtctcctggcgcttctagcgtgacacctcctgctccagctagagagcctggacacagccctcagatcatctcattctttctggccctgacctctacagccctgctgtttctgctgttcttcctgacactgcggttcagcgtggtcaagcggggcagaaagaagctgctgtacatcttcaagcagcctttcatgcggcccgtgcagaccacacaagaagaggacggctgctcctgtcggttccccgaggaagaggaaggcggttgcgaacttagcactagtagagtgaagttcagcagaagcgccgacgcccctgcctaccagcagggacagaaccaactgtacaacgagctgaacctgggcagacgggaagagtacgacgtgctggacaagcggagaggcagggaccctgagatgggcggaaagccccagcggagaaagaacccccaggaaggactgtataacgaactccagaaagacaagatggccgaagcctacagcgagatcggcatgaagggcgagcggagaagaggcaagggccacgatggcctgtaccagggcctgagcaccgccaccaaggacacctatgacgccctgcacatgcaggccctgcctccaaga

SEQ ID NO: 5963 - DNA, 3126 bp, Artificial Sequence
  Synthetic Polynucleotide
atggccttaccagtgaccgccttgctcctgccgctggccttgctgctccacgccgccaggccggacatccagatgacacagagccctagcagcctgtctgccagcgtgggagacagagtgaccatcacatgcaaggccagcgaccacatcaacaactggctggcctggtatcagcagaagcctggacaggcccctaagctgctgatctacggcgctaccacactggaaacaggcgtgcccagcagattttctggcagcggctctggcaccgactacaccctgacaatatccagcctccagcctgaggacttcgccacctactactgtcagcagagctggaacaccccttggacattcggccagggcaccaagctggaaatcaagagactcgagacaacacctggcgagagaagtagcctgcctgccttctatcctggcaccagcggctcttgttctggctgtggatctctgagcctgcctctgctggctggactggttgctgctgatgctgtggcctctctgctgattgtgggagccgtgttcctgtgcgccagacctagaagaagccccgctcaagaggacggcaaggtgtacatcaacatgcccggcagaggaagcactagtagagtgaagttcagcagaagcgccgacgcccctgcctaccagcagggacagaaccaactgtacaacgagctgaacctgggcagacgggaagagtacgacgtgctggacaagcggagaggcagggaccctgagatgggcggaaagccccagcggagaaagaacccccaggaaggactgtataacgaactccagaaagacaagatggccgaagcctacagcgagatcggcatgaagggcgagcggagaagaggcaagggccacgatggcctgtaccagggcctgagcaccgccaccaaggacacctatgacgccctgcacatgcaggccctgcctccaagaagggccaagcgatctggatctggagcaacaaacttctcactactcaaacaagcaggtgacgtggaggagaatcccgggcctatggactggatttggcgcatccttttccttgtcggcgctgctaccggcgcgcattccttcgaacaagttcagcttcaacagcctggcgctgagctggtcaaacctggcgcttctgtgaagatgagctgcaaagccagcggctacgccttcagcagctactggatcaactggatgaagcagaaacccggccagggactcgaatggatcggccaaatctatcccggcgacggcgacaccaactacaacggcaagttcaagggcagagccacactgaccgccgatacctctagcagcacagcctacatgcagctgagcagcctgaccagcgaagatagcgccgtgtacttctgtgcccggtccatcacaacagtcgtgggctgcgctatggactattggggccagggaacaagcgtgaccgtgtctagtacgcgtaacaaaattcttgtgaagcagtccccaatgctcgtcgcctatgataatgccgtgaatctgtcctgcaaatactcctacaatctgtttagccgcgagtttagggcctcactgcacaagggccttgacagcgccgtggaagtctgtgtggtctatggaaattactcccagcaactgcaagtgtactctaagacggggttcaactgtgatggaaaactgggaaacgagtccgtgacgttttacctccaaaatctctatgtcaatcaaacggacatctatttctgcaaaattgaagtcatgtatcctccgccgtacctcgataacgagaaaagcaatgggacgatcattcacgtcaagggaaaacatctctgccccagtcctctgttccctgggccttccaaaccattttgggttctcgtcgtcgtcggcggagtcctggcttgttattctctgcttgtgacagtcgcctttatcatattctgggtccgctccaagagaagcagactgctccactccgattatatgaatatgacacccaggcggccagggcctacacggaaacactatcaaccctacgctccacctcgggatttcgctgcctacagatcaagctctagacgggttaagttttccagatccgcagacgcacccgcttaccaacaagggcagaaccaactctacaatgaacttaatttggggcggagggaagagtacgacgttctggacaaaaggaggggacgagatcccgagatgggcggaaagcctcagcgaaggaagaatccgcaagaggggctttataacgaactccagaaagataaaatggcagaagcctatagtgagattgggatgaagggagaaaggaggaggggtaaaggtcacgatgggttgtaccaaggattgagcacagccactaaagatacctatgatgcgctccacatgcaggccctgccgccaagacgcgccaagagaagcggatctggcgtgaagcagaccctgaatttcgacctgctgaagctggctggcgacgtggaatccaacccaggccctggccatatgaccgagtacaagcccacggtgcgcctcgccacccgcgacgacgtccccagggccgtacgcaccctcgccgccgcgttcgccgactaccccgccacgcgccacaccgtcgatccggaccgccacatcgagcgggtcaccgagctgcaagaactcttcctcacgcgcgtcgggctcgacatcggcaaggtgtgggtcgcggacgacggcgccgcggtggcggtctggaccacgccggagagcgtcgaagcgggggcggtgttcgccgagatcggcccgcgcatggccgagttgagcggttcccggctggccgcgcagcaacagatggaaggcctcctggcgccgcaccggcccaaggagcccgcgtggttcctggccaccgtcggcgtctcgcccgaccaccagggcaagggtctgggcagcgccgtcgtgctccccggagtggaggcggccgagcgcgccggggtgcccgccttcctggagacctccgcgccccgcaacctccccttctacgagcggctcggcttcaccgtcaccgccgacgtcgaggtgcccgaaggaccgcgcacctggtgcatgacccgcaagcccggtgcctga

SEQ ID NO: 5964 - DNA, 3282 bp, Artificial Sequence
  Synthetic Polynucleotide
atggccttaccagtgaccgccttgctcctgccgctggccttgctgctccacgccgccaggccggcatgcgaagtgcagctgcttgaaagtggcggcggactgattcagcctggcggatctctgagactgagctgtgccgccagcggcttcaccttttctagccacgccatgacctgggtccgacaggcacctggaaaagggcttgaatgggtgtccgccatcagcggctctggcgattacacacactacgccgacagcgtgaagggcagattcaccatcagcagagacaacagcaagaacaccgtgtacctccagatgaacagcctgagagccgaggacagcgccgtgtattattgcgccaaggatgaggatggcggcagcctgcttggacacagaggacaaggcaccctggtcaccgtttcttccggtaccggcggaggcggatctggcggcggaggtagcggtggcggaggatctgaattcggatctctcgagacaacacctggcgagagaagtagcctgcctgccttctatcctggcaccagcggctcttgttctggctgtggatctctgagcctgcctctgctggctggactggttgctgctgatgctgtggcctctctgctgattgtgggagccgtgttcctgtgcgccagacctagaagaagccccgctcaagaggacggcaaggtgtacatcaacatgcccggcagaggaagcactagtagagtgaagttcagcagaagcgccgacgcccctgcctaccagcagggacagaaccaactgtacaacgagctgaacctgggcagacgggaagagtacgacgtgctggacaagcggagaggcagggaccctgagatgggcggaaagccccagcggagaaagaacccccaggaaggactgtataacgaactccagaaagacaagatggccgaagcctacagcgagatcggcatgaagggcgagcggagaagaggcaagggccacgatggcctgtaccagggcctgagcaccgccaccaaggacacctatgacgccctgcacatgcaggccctgcctccaagaagggccaagcgatctggatctggagcaacaaacttctcactactcaaacaagcaggtgacgtggaggagaatcccgggcctatggactggatttggcgcatccttttccttgtcggcgctgctaccggcgcgcattccgggcccgaagtgcagctggttgaatctggcggaggactggttcaggctggcggatctctgagactgtcttgtgccgccagcggcagaacctttagcatgggctggtttagacaggcccctggcaaagagagagagttcgtcgccgccatcacatactctggcggcagcccttactacgccgactctgtgaagggcagattcaccatcagccgggacaacgccaagaacaccgtgtacctccagatgaacagcctgaagcctgaggacaccgccgtgtactactgcgccgccaatccaacatacggcagcgactggaacgccgagaattggggccagggaacccaagtgacagtgtctagcggatccggcggcggaggatctggcggaggcggatctgggggcggaggctctttcgaaggcagcacgcgtaacaaaattcttgtgaagcagtccccaatgctcgtcgcctatgataatgccgtgaatctgtcctgcaaatactcctacaatctgtttagccgcgagtttagggcctcactgcacaagggccttgacagcgccgtggaagtctgtgtggtctatggaaattactcccagcaactgcaagtgtactctaagacggggttcaactgtgatggaaaactgggaaacgagtccgtgacgttttacctccaaaatctctatgtcaatcaaacggacatctatttctgcaaaattgaagtcatgtatcctccgccgtacctcgataacgagaaaagcaatgggacgatcattcacgtcaagggaaaacatctctgccccagtcctctgttccctgggccttccaaaccattttgggttctcgtcgtcgtcggcggagtcctggcttgttattctctgcttgtgacagtcgcctttatcatattctgggtccgctccaagagaagcagactgctccactccgattatatgaatatgacacccaggcggccagggcctacacggaaacactatcaaccctacgctccacctcgggatttcgctgcctacagatcaagctctagacgggttaagttttccagatccgcagacgcacccgcttaccaacaagggcagaaccaactctacaatgaacttaatttggggcggagggaagagtacgacgttctggacaaaaggaggggacgagatcccgagatgggcggaaagcctcagcgaaggaagaatccgcaagaggggctttataacgaactccagaaagataaaatggcagaagcctatagtgagattgggatgaagggagaaaggaggaggggtaaaggtcacgatgggttgtaccaaggattgagcacagccactaaagatacctatgatgcgctccacatgcaggccctgccgccaagacgcgccaagagaagcggatctggcgtgaagcagaccctgaatttcgacctgctgaagctggctggcgacgtggaatccaacccaggccctggccatatgaccgagtacaagcccacggtgcgcctcgccacccgcgacgacgtccccagggccgtacgcaccctcgccgccgcgttcgccgactaccccgccacgcgccacaccgtcgatccggaccgccacatcgagcgggtcaccgagctgcaagaactcttcctcacgcgcgtcgggctcgacatcggcaaggtgtgggtcgcggacgacggcgccgcggtggcggtctggaccacgccggagagcgtcgaagcgggggcggtgttcgccgagatcggcccgcgcatggccgagttgagcggttcccggctggccgcgcagcaacagatggaaggcctcctggcgccgcaccggcccaaggagcccgcgtggttcctggccaccgtcggcgtctcgcccgaccaccagggcaagggtctgggcagcgccgtcgtgctccccggagtggaggcggccgagcgcgccggggtgcccgccttcctggagacctccgcgccccgcaacctccccttctacgagcggctcggcttcaccgtcaccgccgacgtcgaggtgcccgaaggaccgcgcacctggtgcatgacccgcaagcccggtgcctga

SEQ ID NO: 5965 - DNA, 3729 bp, Artificial Sequence
  Synthetic Polynucleotide
atggccttaccagtgaccgccttgctcctgccgctggccttgctgctccacgccgccaggccggacatccagatgacacagagccctagcagcctgtctgccagcgtgggagacagagtgaccatcacatgcaaggccagcgaccacatcaacaactggctggcctggtatcagcagaagcctggacaggcccctaagctgctgatctacggcgctaccacactggaaacaggcgtgcccagcagattttctggcagcggctctggcaccgactacaccctgacaatatccagcctccagcctgaggacttcgccacctactactgtcagcagagctggaacaccccttggacattcggccagggcaccaagctggaaatcaagagactcgagggacagcctaaggccaatcctaccgtgacactgttccctccaagcagcgaagaactccaggccaacaaggccacacttgtgtgcctgatctccgacttctaccctggggctgtgacagtggcttggaaggccgatggatctcctgtgaaagccggcgtggaaaccaccaagccatccaagcagagcaacaacaaatacgccgccagctcctacctgagcctgacacctgagcagtggaagtcccacagatcctacagctgccaagtgacccacgaaggcagcaccgtggaaaagacagtggcccctacagagtgcagcggatccacaacacctggcgagagaagtagcctgcctgccttctatcctggcaccagcggctcttgttctggctgtggatctctgagcctgcctctgctggctggactggttgctgctgatgctgtggcctctctgctgattgtgggagccgtgttcctgtgcgccagacctagaagaagccccgctcaagaggacggcaaggtgtacatcaacatgcccggcagaggaagcactagtagagtgaagttcagcagaagcgccgacgcccctgcctaccagcagggacagaaccaactgtacaacgagctgaacctgggcagacgggaagagtacgacgtgctggacaagcggagaggcagggaccctgagatgggcggaaagccccagcggagaaagaacccccaggaaggactgtataacgaactccagaaagacaagatggccgaagcctacagcgagatcggcatgaagggcgagcggagaagaggcaagggccacgatggcctgtaccagggcctgagcaccgccaccaaggacacctatgacgccctgcacatgcaggccctgcctccaagaagggccaagcgatctggatctggagcaacaaacttctcactactcaaacaagcaggtgacgtggaggagaatcccgggcctatggactggatttggcgcatccttttccttgtcggcgctgctaccggcgcgcattccttcgaacaagttcagcttcaacagcctggcgctgagctggtcaaacctggcgcttctgtgaagatgagctgcaaagccagcggctacgccttcagcagctactggatcaactggatgaagcagaaacccggccagggactcgaatggatcggccaaatctatcccggcgacggcgacaccaactacaacggcaagttcaagggcagagccacactgaccgccgatacctctagcagcacagcctacatgcagctgagcagcctgaccagcgaagatagcgccgtgtacttctgtgcccggtccatcacaacagtcgtgggctgcgctatggactattggggccagggaacaagcgtgaccgtgtctagtacgcgtgcctctacaaagggaccctccgtgtttcctctggctcccagcagcaagtctacaagcggaggaacagccgctctgggctgcctggtcaaggattactttcccgagcctgtgaccgtgtcctggaatagcggagcactgacaagcggcgtgcacacctttccagccgtgctgcaaagcagcggcctgtactctctgagcagcgtggtcacagtgcctagctctagcctgggcacccagacctacatctgcaatgtgaaccacaagcctagcaacaccaaggtggacaagagagtggaacccaagagctgtggtaccaacaaaattcttgtgaagcagtccccaatgctcgtcgcctatgataatgccgtgaatctgtcctgcaaatactcctacaatctgtttagccgcgagtttagggcctcactgcacaagggccttgacagcgccgtggaagtctgtgtggtctatggaaattactcccagcaactgcaagtgtactctaagacggggttcaactgtgatggaaaactgggaaacgagtccgtgacgttttacctccaaaatctctatgtcaatcaaacggacatctatttctgcaaaattgaagtcatgtatcctccgccgtacctcgataacgagaaaagcaatgggacgatcattcacgtcaagggaaaacatctctgccccagtcctctgttccctgggccttccaaaccattttgggttctcgtcgtcgtcggcggagtcctggcttgttattctctgcttgtgacagtcgcctttatcatattctgggtccgctccaagagaagcagactgctccactccgattatatgaatatgacacccaggcggccagggcctacacggaaacactatcaaccctacgctccacctcgggatttcgctgcctacagatcaagctctagacgggttaagttttccagatccgcagacgcacccgcttaccaacaagggcagaaccaactctacaatgaacttaatttggggcggagggaagagtacgacgttctggacaaaaggaggggacgagatcccgagatgggcggaaagcctcagcgaaggaagaatccgcaagaggggctttataacgaactccagaaagataaaatggcagaagcctatagtgagattgggatgaagggagaaaggaggaggggtaaaggtcacgatgggttgtaccaaggattgagcacagccactaaagatacctatgatgcgctccacatgcaggccctgccgccaagacgcgccaagagaagcggatctggcgtgaagcagaccctgaatttcgacctgctgaagctggctggcgacgtggaatccaacccaggccctggccatatggctacctacgaggtgctgtgcgaggtggcaagaaagctgggcaccgacgacagagaagtggtgctgttcctgctgaacgtgttcatccctcagcctacactggcccagctgatcggtgcactgagagccctgaaagaggaaggccggctgacctttcctctgctggccgaatgcctgttcagagccggaagaagggatctgctgcgggacctgctgcatctggaccccagatttctggaaagacacctggccggcaccatgagctacttcagcccttaccagctgaccgtgctgcacgttgacggcgaactgtgcgccagagatattcggagcctgatcttcctgagcaaggacaccatcggcagccggtctacccctcagacatttctgcactgggtgtactgcatggaaaacctggacctgctcggccccacagatgtggatgccctgatgtccatgctgagaagcctgagcagagtggacctccagagacaggtgcagacactgatgggactgcacctgagcggacctagccacagccagcactacagacacacccct

SEQ ID NO: 5966 - DNA, 3888 bp, Artificial Sequence
  Synthetic Polynucleotide
atggccttaccagtgaccgccttgctcctgccgctggccttgctgctccacgccgccaggccggacatccagatgacacagagccctagcagcctgtctgccagcgtgggagacagagtgaccatcacatgcaaggccagcgaccacatcaacaactggctggcctggtatcagcagaagcctggacaggcccctaagctgctgatctacggcgctaccacactggaaacaggcgtgcccagcagattttctggcagcggctctggcaccgactacaccctgacaatatccagcctccagcctgaggacttcgccacctactactgtcagcagagctggaacaccccttggacattcggccagggcaccaagctggaaatcaagagactcgagggacagcctaaggccaatcctaccgtgacactgttccctccaagcagcgaagaactccaggccaacaaggccacacttgtgtgcctgatctccgacttctaccctggggctgtgacagtggcttggaaggccgatggatctcctgtgaaagccggcgtggaaaccaccaagccatccaagcagagcaacaacaaatacgccgccagctcctacctgagcctgacacctgagcagtggaagtcccacagatcctacagctgccaagtgacccacgaaggcagcaccgtggaaaagacagtggcccctacagagtgcagcggatccacaacacctggcgagagaagtagcctgcctgccttctatcctggcaccagcggctcttgttctggctgtggatctctgagcctgcctctgctggctggactggttgctgctgatgctgtggcctctctgctgattgtgggagccgtgttcctgtgcgccagacctagaagaagccccgctcaagaggacggcaaggtgtacatcaacatgcccggcagaggaagcactagtagagtgaagttcagcagaagcgccgacgcccctgcctaccagcagggacagaaccaactgtacaacgagctgaacctgggcagacgggaagagtacgacgtgctggacaagcggagaggcagggaccctgagatgggcggaaagccccagcggagaaagaacccccaggaaggactgtataacgaactccagaaagacaagatggccgaagcctacagcgagatcggcatgaagggcgagcggagaagaggcaagggccacgatggcctgtaccagggcctgagcaccgccaccaaggacacctatgacgccctgcacatgcaggccctgcctccaagaagggccaagcgatctggatctggagcaacaaacttctcactactcaaacaagcaggtgacgtggaggagaatcccgggcctatggactggatttggcgcatccttttccttgtcggcgctgctaccggcgcgcattccttcgaacaagttcagcttcaacagcctggcgctgagctggtcaaacctggcgcttctgtgaagatgagctgcaaagccagcggctacgccttcagcagctactggatcaactggatgaagcagaaacccggccagggactcgaatggatcggccaaatctatcccggcgacggcgacaccaactacaacggcaagttcaagggcagagccacactgaccgccgatacctctagcagcacagcctacatgcagctgagcagcctgaccagcgaagatagcgccgtgtacttctgtgcccggtccatcacaacagtcgtgggctgcgctatggactattggggccagggaacaagcgtgaccgtgtctagtacgcgtgcctctacaaagggaccctccgtgtttcctctggctcccagcagcaagtctacaagcggaggaacagccgctctgggctgcctggtcaaggattactttcccgagcctgtgaccgtgtcctggaatagcggagcactgacaagcggcgtgcacacctttccagccgtgctgcaaagcagcggcctgtactctctgagcagcgtggtcacagtgcctagctctagcctgggcacccagacctacatctgcaatgtgaaccacaagcctagcaacaccaaggtggacaagagagtggaacccaagagctgtggtaccaacaaaattcttgtgaagcagtccccaatgctcgtcgcctatgataatgccgtgaatctgtcctgcaaatactcctacaatctgtttagccgcgagtttagggcctcactgcacaagggccttgacagcgccgtggaagtctgtgtggtctatggaaattactcccagcaactgcaagtgtactctaagacggggttcaactgtgatggaaaactgggaaacgagtccgtgacgttttacctccaaaatctctatgtcaatcaaacggacatctatttctgcaaaattgaagtcatgtatcctccgccgtacctcgataacgagaaaagcaatgggacgatcattcacgtcaagggaaaacatctctgccccagtcctctgttccctgggccttccaaaccattttgggttctcgtcgtcgtcggcggagtcctggcttgttattctctgcttgtgacagtcgcctttatcatattctgggtccgctccaagagaagcagactgctccactccgattatatgaatatgacacccaggcggccagggcctacacggaaacactatcaaccctacgctccacctcgggatttcgctgcctacagatcaagctctagacgggttaagttttccagatccgcagacgcacccgcttaccaacaagggcagaaccaactctacaatgaacttaatttggggcggagggaagagtacgacgttctggacaaaaggaggggacgagatcccgagatgggcggaaagcctcagcgaaggaagaatccgcaagaggggctttataacgaactccagaaagataaaatggcagaagcctatagtgagattgggatgaagggagaaaggaggaggggtaaaggtcacgatgggttgtaccaaggattgagcacagccactaaagatacctatgatgcgctccacatgcaggccctgccgccaagacgcgccaagagaagcggatctggcgtgaagcagaccctgaatttcgacctgctgaagctggctggcgacgtggaatccaacccaggccctggccatatgtccgactccaaggaggtccctagccttccatttttgcgacacttgctcgaagagttggacagccatgaggacagcttgctgctgtttctgtgtcacgacgcggccccgggctgcacgacggtcacgcaagctttgtgctcgcttagccaacagcgcaagctgaccctcgcggctctggtcgagatgctctacgtgctgcagcgtatggatcttctcaagagccgcttcgggctcagcaaggagggggccgagcaattgctgggcacaagctttctcacgcgctaccgcaagctcatggtttgcgtgggtgaggagctcgactcgagcgagctacgcgctctacgcttgttcgcgtgcaacctgaatccgagcctgagcacggcgctttctgagagcagccgctttgtcgagcttgtactcgcgcttgaaaacgtaggactcgtctcgccatcgagtgtttccgtgcttgcggacatgttgcgcactcttcggcgcctcgatttgtgccagcagcttgttgagtacgaacaacaagagcaagccaggtaccgttactgttacgcggcctcgccctcattgccagttcgtacgttacgtcgggggcacggcgcgagtgaacacgagcagctgtgcatgcccgtgcaagaatcctctgacagccccgagctgctgcgcacgcccgtacaagaatcctccagcgacagccccgagcaaacgact

SEQ ID NO: 5967 - DNA, 3765 bp, Artificial Sequence
  Synthetic Polynucleotide
atggccttaccagtgaccgccttgctcctgccgctggccttgctgctccacgccgccaggccggacatccagatgacacagagccctagcagcctgtctgccagcgtgggagacagagtgaccatcacatgcaaggccagcgaccacatcaacaactggctggcctggtatcagcagaagcctggacaggcccctaagctgctgatctacggcgctaccacactggaaacaggcgtgcccagcagattttctggcagcggctctggcaccgactacaccctgacaatatccagcctccagcctgaggacttcgccacctactactgtcagcagagctggaacaccccttggacattcggccagggcaccaagctggaaatcaagagactcgagggacagcctaaggccaatcctaccgtgacactgttccctccaagcagcgaagaactccaggccaacaaggccacacttgtgtgcctgatctccgacttctaccctggggctgtgacagtggcttggaaggccgatggatctcctgtgaaagccggcgtggaaaccaccaagccatccaagcagagcaacaacaaatacgccgccagctcctacctgagcctgacacctgagcagtggaagtcccacagatcctacagctgccaagtgacccacgaaggcagcaccgtggaaaagacagtggcccctacagagtgcagcggatccacaacacctggcgagagaagtagcctgcctgccttctatcctggcaccagcggctcttgttctggctgtggatctctgagcctgcctctgctggctggactggttgctgctgatgctgtggcctctctgctgattgtgggagccgtgttcctgtgcgccagacctagaagaagccccgctcaagaggacggcaaggtgtacatcaacatgcccggcagaggaagcactagtagagtgaagttcagcagaagcgccgacgcccctgcctaccagcagggacagaaccaactgtacaacgagctgaacctgggcagacgggaagagtacgacgtgctggacaagcggagaggcagggaccctgagatgggcggaaagccccagcggagaaagaacccccaggaaggactgtataacgaactccagaaagacaagatggccgaagcctacagcgagatcggcatgaagggcgagcggagaagaggcaagggccacgatggcctgtaccagggcctgagcaccgccaccaaggacacctatgacgccctgcacatgcaggccctgcctccaagaagggccaagcgatctggatctggagcaacaaacttctcactactcaaacaagcaggtgacgtggaggagaatcccgggcctatggactggatttggcgcatccttttccttgtcggcgctgctaccggcgcgcattccttcgaacaagttcagcttcaacagcctggcgctgagctggtcaaacctggcgcttctgtgaagatgagctgcaaagccagcggctacgccttcagcagctactggatcaactggatgaagcagaaacccggccagggactcgaatggatcggccaaatctatcccggcgacggcgacaccaactacaacggcaagttcaagggcagagccacactgaccgccgatacctctagcagcacagcctacatgcagctgagcagcctgaccagcgaagatagcgccgtgtacttctgtgcccggtccatcacaacagtcgtgggctgcgctatggactattggggccagggaacaagcgtgaccgtgtctagtacgcgtgcctctacaaagggaccctccgtgtttcctctggctcccagcagcaagtctacaagcggaggaacagccgctctgggctgcctggtcaaggattactttcccgagcctgtgaccgtgtcctggaatagcggagcactgacaagcggcgtgcacacctttccagccgtgctgcaaagcagcggcctgtactctctgagcagcgtggtcacagtgcctagctctagcctgggcacccagacctacatctgcaatgtgaaccacaagcctagcaacaccaaggtggacaagagagtggaacccaagagctgtggtaccaacaaaattcttgtgaagcagtccccaatgctcgtcgcctatgataatgccgtgaatctgtcctgcaaatactcctacaatctgtttagccgcgagtttagggcctcactgcacaagggccttgacagcgccgtggaagtctgtgtggtctatggaaattactcccagcaactgcaagtgtactctaagacggggttcaactgtgatggaaaactgggaaacgagtccgtgacgttttacctccaaaatctctatgtcaatcaaacggacatctatttctgcaaaattgaagtcatgtatcctccgccgtacctcgataacgagaaaagcaatgggacgatcattcacgtcaagggaaaacatctctgccccagtcctctgttccctgggccttccaaaccattttgggttctcgtcgtcgtcggcggagtcctggcttgttattctctgcttgtgacagtcgcctttatcatattctgggtccgctccaagagaagcagactgctccactccgattatatgaatatgacacccaggcggccagggcctacacggaaacactatcaaccctacgctccacctcgggatttcgctgcctacagatcaagctctagacgggttaagttttccagatccgcagacgcacccgcttaccaacaagggcagaaccaactctacaatgaacttaatttggggcggagggaagagtacgacgttctggacaaaaggaggggacgagatcccgagatgggcggaaagcctcagcgaaggaagaatccgcaagaggggctttataacgaactccagaaagataaaatggcagaagcctatagtgagattgggatgaagggagaaaggaggaggggtaaaggtcacgatgggttgtaccaaggattgagcacagccactaaagatacctatgatgcgctccacatgcaggccctgccgccaagacgcgccaagagaagcggatctggcgtgaagcagaccctgaatttcgacctgctgaagctggctggcgacgtggaatccaacccaggccctggccatatgaccgagtacaagcccacggtgcgcctcgccacccgcgacgacgtccccagggccgtacgcaccctcgccgccgcgttcgccgactaccccgccacgcgccacaccgtcgatccggaccgccacatcgagcgggtcaccgagctgcaagaactcttcctcacgcgcgtcgggctcgacatcggcaaggtgtgggtcgcggacgacggcgccgcggtggcggtctggaccacgccggagagcgtcgaagcgggggcggtgttcgccgagatcggcccgcgcatggccgagttgagcggttcccggctggccgcgcagcaacagatggaaggcctcctggcgccgcaccggcccaaggagcccgcgtggttcctggccaccgtcggcgtctcgcccgaccaccagggcaagggtctgggcagcgccgtcgtgctccccggagtggaggcggccgagcgcgccggggtgcccgccttcctggagacctccgcgccccgcaacctccccttctacgagcggctcggcttcaccgtcaccgccgacgtcgaggtgcccgaaggaccgcgcacctggtgcatgacccgcaagcccggtgcctga

SEQ ID NO: 5968 - DNA, 4176 bp, Artificial Sequence
  Synthetic Polynucleotide
atggccttaccagtgaccgccttgctcctgccgctggccttgctgctccacgccgccaggccggaagtgcagctggttgaatctggcggaggactggttcaggctggcggatctctgagactgtcttgtgccgccagcggcagaacctttagcatgggctggtttagacaggcccctggcaaagagagagagttcgtcgccgccatcacatactctggcggcagcccttactacgccgactctgtgaagggcagattcaccatcagccgggacaacgccaagaacaccgtgtacctccagatgaacagcctgaagcctgaggacaccgccgtgtactactgcgccgccaatccaacatacggcagcgactggaacgccgagaattggggccagggaacccaagtgacagtgtctagcggtaccggcggaggcggatctggcggcggaggtagcggtggcggaggatctgaattcgacatccagatgacacagagccctagcagcctgtctgccagcgtgggagacagagtgaccatcacatgcaaggccagcgaccacatcaacaactggctggcctggtatcagcagaagcctggacaggcccctaagctgctgatctacggcgctaccacactggaaacaggcgtgcccagcagattttctggcagcggctctggcaccgactacaccctgacaatatccagcctccagcctgaggacttcgccacctactactgtcagcagagctggaacaccccttggacattcggccagggcaccaagctggaaatcaagagactcgagggacagcctaaggccaatcctaccgtgacactgttccctccaagcagcgaagaactccaggccaacaaggccacacttgtgtgcctgatctccgacttctaccctggggctgtgacagtggcttggaaggccgatggatctcctgtgaaagccggcgtggaaaccaccaagccatccaagcagagcaacaacaaatacgccgccagctcctacctgagcctgacacctgagcagtggaagtcccacagatcctacagctgccaagtgacccacgaaggcagcaccgtggaaaagacagtggcccctacagagtgcagcggatccacaacacctggcgagagaagtagcctgcctgccttctatcctggcaccagcggctcttgttctggctgtggatctctgagcctgcctctgctggctggactggttgctgctgatgctgtggcctctctgctgattgtgggagccgtgttcctgtgcgccagacctagaagaagccccgctcaagaggacggcaaggtgtacatcaacatgcccggcagaggaagcactagtagagtgaagttcagcagaagcgccgacgcccctgcctaccagcagggacagaaccaactgtacaacgagctgaacctgggcagacgggaagagtacgacgtgctggacaagcggagaggcagggaccctgagatgggcggaaagccccagcggagaaagaacccccaggaaggactgtataacgaactccagaaagacaagatggccgaagcctacagcgagatcggcatgaagggcgagcggagaagaggcaagggccacgatggcctgtaccagggcctgagcaccgccaccaaggacacctatgacgccctgcacatgcaggccctgcctccaagaagggccaagcgatctggatctggagcaacaaacttctcactactcaaacaagcaggtgacgtggaggagaatcccgggcctatggactggatttggcgcatccttttccttgtcggcgctgctaccggcgcgcattccttcgaacaagttcagcttcaacagcctggcgctgagctggtcaaacctggcgcttctgtgaagatgagctgcaaagccagcggctacgccttcagcagctactggatcaactggatgaagcagaaacccggccagggactcgaatggatcggccaaatctatcccggcgacggcgacaccaactacaacggcaagttcaagggcagagccacactgaccgccgatacctctagcagcacagcctacatgcagctgagcagcctgaccagcgaagatagcgccgtgtacttctgtgcccggtccatcacaacagtcgtgggctgcgctatggactattggggccagggaacaagcgtgaccgtgtctagtacgcgtgcctctacaaagggaccctccgtgtttcctctggctcccagcagcaagtctacaagcggaggaacagccgctctgggctgcctggtcaaggattactttcccgagcctgtgaccgtgtcctggaatagcggagcactgacaagcggcgtgcacacctttccagccgtgctgcaaagcagcggcctgtactctctgagcagcgtggtcacagtgcctagctctagcctgggcacccagacctacatctgcaatgtgaaccacaagcctagcaacaccaaggtggacaagagagtggaacccaagagctgtggtaccaacaaaattcttgtgaagcagtccccaatgctcgtcgcctatgataatgccgtgaatctgtcctgcaaatactcctacaatctgtttagccgcgagtttagggcctcactgcacaagggccttgacagcgccgtggaagtctgtgtggtctatggaaattactcccagcaactgcaagtgtactctaagacggggttcaactgtgatggaaaactgggaaacgagtccgtgacgttttacctccaaaatctctatgtcaatcaaacggacatctatttctgcaaaattgaagtcatgtatcctccgccgtacctcgataacgagaaaagcaatgggacgatcattcacgtcaagggaaaacatctctgccccagtcctctgttccctgggccttccaaaccattttgggttctcgtcgtcgtcggcggagtcctggcttgttattctctgcttgtgacagtcgcctttatcatattctgggtccgctccaagagaagcagactgctccactccgattatatgaatatgacacccaggcggccagggcctacacggaaacactatcaaccctacgctccacctcgggatttcgctgcctacagatcaagctctagacgggttaagttttccagatccgcagacgcacccgcttaccaacaagggcagaaccaactctacaatgaacttaatttggggcggagggaagagtacgacgttctggacaaaaggaggggacgagatcccgagatgggcggaaagcctcagcgaaggaagaatccgcaagaggggctttataacgaactccagaaagataaaatggcagaagcctatagtgagattgggatgaagggagaaaggaggaggggtaaaggtcacgatgggttgtaccaaggattgagcacagccactaaagatacctatgatgcgctccacatgcaggccctgccgccaagacgcgccaagagaagcggatctggcgtgaagcagaccctgaatttcgacctgctgaagctggctggcgacgtggaatccaacccaggccctggccatatgaccgagtacaagcccacggtgcgcctcgccacccgcgacgacgtccccagggccgtacgcaccctcgccgccgcgttcgccgactaccccgccacgcgccacaccgtcgatccggaccgccacatcgagcgggtcaccgagctgcaagaactcttcctcacgcgcgtcgggctcgacatcggcaaggtgtgggtcgcggacgacggcgccgcggtggcggtctggaccacgccggagagcgtcgaagcgggggcggtgttcgccgagatcggcccgcgcatggccgagttgagcggttcccggctggccgcgcagcaacagatggaaggcctcctggcgccgcaccggcccaaggagcccgcgtggttcctggccaccgtcggcgtctcgcccgaccaccagggcaagggtctgggcagcgccgtcgtgctccccggagtggaggcggccgagcgcgccggggtgcccgccttcctggagacctccgcgccccgcaacctccccttctacgagcggctcggcttcaccgtcaccgccgacgtcgaggtgcccgaaggaccgcgcacctggtgcatgacccgcaagcccggtgcctga

SEQ ID NO: 5969 - DNA, 4587 bp, Artificial Sequence
  Synthetic Polynucleotide
atggccttaccagtgaccgccttgctcctgccgctggccttgctgctccacgccgccaggccggaagtgcagctggttgaatctggcggaggactggttcaggctggcggatctctgagactgtcttgtgccgccagcggcagaacctttagcatgggctggtttagacaggcccctggcaaagagagagagttcgtcgccgccatcacatactctggcggcagcccttactacgccgactctgtgaagggcagattcaccatcagccgggacaacgccaagaacaccgtgtacctccagatgaacagcctgaagcctgaggacaccgccgtgtactactgcgccgccaatccaacatacggcagcgactggaacgccgagaattggggccagggaacccaagtgacagtgtctagcggtaccggcggaggcggatctggcggcggaggtagcggtggcggaggatctgaattcgacatccagatgacacagagccctagcagcctgtctgccagcgtgggagacagagtgaccatcacatgcaaggccagcgaccacatcaacaactggctggcctggtatcagcagaagcctggacaggcccctaagctgctgatctacggcgctaccacactggaaacaggcgtgcccagcagattttctggcagcggctctggcaccgactacaccctgacaatatccagcctccagcctgaggacttcgccacctactactgtcagcagagctggaacaccccttggacattcggccagggcaccaagctggaaatcaagagactcgagggacagcctaaggccaatcctaccgtgacactgttccctccaagcagcgaagaactccaggccaacaaggccacacttgtgtgcctgatctccgacttctaccctggggctgtgacagtggcttggaaggccgatggatctcctgtgaaagccggcgtggaaaccaccaagccatccaagcagagcaacaacaaatacgccgccagctcctacctgagcctgacacctgagcagtggaagtcccacagatcctacagctgccaagtgacccacgaaggcagcaccgtggaaaagacagtggcccctacagagtgcagcggatccacaacacctggcgagagaagtagcctgcctgccttctatcctggcaccagcggctcttgttctggctgtggatctctgagcctgcctctgctggctggactggttgctgctgatgctgtggcctctctgctgattgtgggagccgtgttcctgtgcgccagacctagaagaagccccgctcaagaggacggcaaggtgtacatcaacatgcccggcagaggaagcactagtagagtgaagttcagcagaagcgccgacgcccctgcctaccagcagggacagaaccaactgtacaacgagctgaacctgggcagacgggaagagtacgacgtgctggacaagcggagaggcagggaccctgagatgggcggaaagccccagcggagaaagaacccccaggaaggactgtataacgaactccagaaagacaagatggccgaagcctacagcgagatcggcatgaagggcgagcggagaagaggcaagggccacgatggcctgtaccagggcctgagcaccgccaccaaggacacctatgacgccctgcacatgcaggccctgcctccaagaagggccaagcgatctggatctggagcaacaaacttctcactactcaaacaagcaggtgacgtggaggagaatcccgggcctatggactggatttggcgcatccttttccttgtcggcgctgctaccggcgcgcattccgggcccgaagtgcaactggttgaatccggtggcggcctggtgcaagcaggcggatctctcagacttagctgtgccgcctccggcagaaccttcacaatgggatggtttaggcaggctccagggaaagagagagagttcgtcgccgccatctctctgtctcccacactggcctactacgccgactctgtgaaaggccggttcaccatctccagagataatgccaagaacaccgtggtgctgcaaatgaactctctgaaacccgaggatacagccctgtactattgtgccgctgaccggaagtccgtgatgagcatcagacccgattactggggacagggcacacaagtcacagtgtcctctggatccggcggcggaggatctggcggaggcggatctgggggcggaggctctttcgaacaagttcagcttcaacagcctggcgctgagctggtcaaacctggcgcttctgtgaagatgagctgcaaagccagcggctacgccttcagcagctactggatcaactggatgaagcagaaacccggccagggactcgaatggatcggccaaatctatcccggcgacggcgacaccaactacaacggcaagttcaagggcagagccacactgaccgccgatacctctagcagcacagcctacatgcagctgagcagcctgaccagcgaagatagcgccgtgtacttctgtgcccggtccatcacaacagtcgtgggctgcgctatggactattggggccagggaacaagcgtgaccgtgtctagtacgcgtgcctctacaaagggaccctccgtgtttcctctggctcccagcagcaagtctacaagcggaggaacagccgctctgggctgcctggtcaaggattactttcccgagcctgtgaccgtgtcctggaatagcggagcactgacaagcggcgtgcacacctttccagccgtgctgcaaagcagcggcctgtactctctgagcagcgtggtcacagtgcctagctctagcctgggcacccagacctacatctgcaatgtgaaccacaagcctagcaacaccaaggtggacaagagagtggaacccaagagctgtggtaccaacaaaattcttgtgaagcagtccccaatgctcgtcgcctatgataatgccgtgaatctgtcctgcaaatactcctacaatctgtttagccgcgagtttagggcctcactgcacaagggccttgacagcgccgtggaagtctgtgtggtctatggaaattactcccagcaactgcaagtgtactctaagacggggttcaactgtgatggaaaactgggaaacgagtccgtgacgttttacctccaaaatctctatgtcaatcaaacggacatctatttctgcaaaattgaagtcatgtatcctccgccgtacctcgataacgagaaaagcaatgggacgatcattcacgtcaagggaaaacatctctgccccagtcctctgttccctgggccttccaaaccattttgggttctcgtcgtcgtcggcggagtcctggcttgttattctctgcttgtgacagtcgcctttatcatattctgggtccgctccaagagaagcagactgctccactccgattatatgaatatgacacccaggcggccagggcctacacggaaacactatcaaccctacgctccacctcgggatttcgctgcctacagatcaagctctagacgggttaagttttccagatccgcagacgcacccgcttaccaacaagggcagaaccaactctacaatgaacttaatttggggcggagggaagagtacgacgttctggacaaaaggaggggacgagatcccgagatgggcggaaagcctcagcgaaggaagaatccgcaagaggggctttataacgaactccagaaagataaaatggcagaagcctatagtgagattgggatgaagggagaaaggaggaggggtaaaggtcacgatgggttgtaccaaggattgagcacagccactaaagatacctatgatgcgctccacatgcaggccctgccgccaagacgcgccaagagaagcggatctggcgtgaagcagaccctgaatttcgacctgctgaagctggctggcgacgtggaatccaacccaggccctggccatatgaccgagtacaagcccacggtgcgcctcgccacccgcgacgacgtccccagggccgtacgcaccctcgccgccgcgttcgccgactaccccgccacgcgccacaccgtcgatccggaccgccacatcgagcgggtcaccgagctgcaagaactcttcctcacgcgcgtcgggctcgacatcggcaaggtgtgggtcgcggacgacggcgccgcggtggcggtctggaccacgccggagagcgtcgaagcgggggcggtgttcgccgagatcggcccgcgcatggccgagttgagcggttcccggctggccgcgcagcaacagatggaaggcctcctggcgccgcaccggcccaaggagcccgcgtggttcctggccaccgtcggcgtctcgcccgaccaccagggcaagggtctgggcagcgccgtcgtgctccccggagtggaggcggccgagcgcgccggggtgcccgccttcctggagacctccgcgccccgcaacctccccttctacgagcggctcggcttcaccgtcaccgccgacgtcgaggtgcccgaaggaccgcgcacctggtgcatgacccgcaagcccggtgcctga

SEQ ID NO: 5970 - DNA, 3786 bp, Artificial Sequence
  Synthetic Polynucleotide
atggccttaccagtgaccgccttgctcctgccgctggccttgctgctccacgccgccaggccggaagtgcagctggttgaatctggcggaggactggttcaggctggcggatctctgagactgtcttgtgccgccagcggcagaacctttagcatgggctggtttagacaggcccctggcaaagagagagagttcgtcgccgccatcacatactctggcggcagcccttactacgccgactctgtgaagggcagattcaccatcagccgggacaacgccaagaacaccgtgtacctccagatgaacagcctgaagcctgaggacaccgccgtgtactactgcgccgccaatccaacatacggcagcgactggaacgccgagaattggggccagggaacccaagtgacagtgtctagcctcgagggacagcctaaggccaatcctaccgtgacactgttccctccaagcagcgaagaactccaggccaacaaggccacacttgtgtgcctgatctccgacttctaccctggggctgtgacagtggcttggaaggccgatggatctcctgtgaaagccggcgtggaaaccaccaagccatccaagcagagcaacaacaaatacgccgccagctcctacctgagcctgacacctgagcagtggaagtcccacagatcctacagctgccaagtgacccacgaaggcagcaccgtggaaaagacagtggcccctacagagtgcagcggatccacaacacctggcgagagaagtagcctgcctgccttctatcctggcaccagcggctcttgttctggctgtggatctctgagcctgcctctgctggctggactggttgctgctgatgctgtggcctctctgctgattgtgggagccgtgttcctgtgcgccagacctagaagaagccccgctcaagaggacggcaaggtgtacatcaacatgcccggcagaggaagcactagtagagtgaagttcagcagaagcgccgacgcccctgcctaccagcagggacagaaccaactgtacaacgagctgaacctgggcagacgggaagagtacgacgtgctggacaagcggagaggcagggaccctgagatgggcggaaagccccagcggagaaagaacccccaggaaggactgtataacgaactccagaaagacaagatggccgaagcctacagcgagatcggcatgaagggcgagcggagaagaggcaagggccacgatggcctgtaccagggcctgagcaccgccaccaaggacacctatgacgccctgcacatgcaggccctgcctccaagaagggccaagcgatctggatctggagcaacaaacttctcactactcaaacaagcaggtgacgtggaggagaatcccgggcctatggactggatttggcgcatccttttccttgtcggcgctgctaccggcgcgcattccgggcccgaagtgcaactggttgaatccggtggcggcctggtgcaagcaggcggatctctcagacttagctgtgccgcctccggcagaaccttcacaatgggatggtttaggcaggctccagggaaagagagagagttcgtcgccgccatctctctgtctcccacactggcctactacgccgactctgtgaaaggccggttcaccatctccagagataatgccaagaacaccgtggtgctgcaaatgaactctctgaaacccgaggatacagccctgtactattgtgccgctgaccggaagtccgtgatgagcatcagacccgattactggggacagggcacacaagtcacagtgtcctctacgcgtgcctctacaaagggaccctccgtgtttcctctggctcccagcagcaagtctacaagcggaggaacagccgctctgggctgcctggtcaaggattactttcccgagcctgtgaccgtgtcctggaatagcggagcactgacaagcggcgtgcacacctttccagccgtgctgcaaagcagcggcctgtactctctgagcagcgtggtcacagtgcctagctctagcctgggcacccagacctacatctgcaatgtgaaccacaagcctagcaacaccaaggtggacaagagagtggaacccaagagctgtggtaccaacaaaattcttgtgaagcagtccccaatgctcgtcgcctatgataatgccgtgaatctgtcctgcaaatactcctacaatctgtttagccgcgagtttagggcctcactgcacaagggccttgacagcgccgtggaagtctgtgtggtctatggaaattactcccagcaactgcaagtgtactctaagacggggttcaactgtgatggaaaactgggaaacgagtccgtgacgttttacctccaaaatctctatgtcaatcaaacggacatctatttctgcaaaattgaagtcatgtatcctccgccgtacctcgataacgagaaaagcaatgggacgatcattcacgtcaagggaaaacatctctgccccagtcctctgttccctgggccttccaaaccattttgggttctcgtcgtcgtcggcggagtcctggcttgttattctctgcttgtgacagtcgcctttatcatattctgggtccgctccaagagaagcagactgctccactccgattatatgaatatgacacccaggcggccagggcctacacggaaacactatcaaccctacgctccacctcgggatttcgctgcctacagatcaagctctagacgggttaagttttccagatccgcagacgcacccgcttaccaacaagggcagaaccaactctacaatgaacttaatttggggcggagggaagagtacgacgttctggacaaaaggaggggacgagatcccgagatgggcggaaagcctcagcgaaggaagaatccgcaagaggggctttataacgaactccagaaagataaaatggcagaagcctatagtgagattgggatgaagggagaaaggaggaggggtaaaggtcacgatgggttgtaccaaggattgagcacagccactaaagatacctatgatgcgctccacatgcaggccctgccgccaagacgcgccaagagaagcggatctggcgtgaagcagaccctgaatttcgacctgctgaagctggctggcgacgtggaatccaacccaggccctggccatatgaccgagtacaagcccacggtgcgcctcgccacccgcgacgacgtccccagggccgtacgcaccctcgccgccgcgttcgccgactaccccgccacgcgccacaccgtcgatccggaccgccacatcgagcgggtcaccgagctgcaagaactcttcctcacgcgcgtcgggctcgacatcggcaaggtgtgggtcgcggacgacggcgccgcggtggcggtctggaccacgccggagagcgtcgaagcgggggcggtgttcgccgagatcggcccgcgcatggccgagttgagcggttcccggctggccgcgcagcaacagatggaaggcctcctggcgccgcaccggcccaaggagcccgcgtggttcctggccaccgtcggcgtctcgcccgaccaccagggcaagggtctgggcagcgccgtcgtgctccccggagtggaggcggccgagcgcgccggggtgcccgccttcctggagacctccgcgccccgcaacctccccttctacgagcggctcggcttcaccgtcaccgccgacgtcgaggtgcccgaaggaccgcgcacctggtgcatgacccgcaagcccggtgcctga

SEQ ID NO: 5971 - DNA, 3810 bp, Artificial Sequence
  Synthetic Polynucleotide
atggccttaccagtgaccgccttgctcctgccgctggccttgctgctccacgccgccaggccggacatccagatgacacagagccctagcagcctgtctgccagcgtgggagacagagtgaccatcacatgcaaggccagcgaccacatcaacaactggctggcctggtatcagcagaagcctggacaggcccctaagctgctgatctacggcgctaccacactggaaacaggcgtgcccagcagattttctggcagcggctctggcaccgactacaccctgacaatatccagcctccagcctgaggacttcgccacctactactgtcagcagagctggaacaccccttggacattcggccagggcaccaagctggaaatcaagagactcgaggacctgaagaacgtgttcccacctgaggtggccgtgttcgagcctagcgaggccgagatcagccacacccagaaagccaccctcgtgtgcctggctaccggcttctaccccgaccatgtggaactgtcttggtgggtcaacggcaaagaggtgcacagcggcgtgtctaccgacccccagccactgaaagaacagcccgccctgaacgacagccggtactgcctgagcagcagactgagagtgtccgccaccttctggcagaacccccggaaccacttcagatgccaggtgcagttctacggcctgagcgagaacgacgagtggacccaggacagagccaagcccgtgacccagatcgtgtctgccgaagcctggggcagagccgattgcggatccacaacacctggcgagagaagtagcctgcctgccttctatcctggcaccagcggctcttgttctggctgtggatctctgagcctgcctctgctggctggactggttgctgctgatgctgtggcctctctgctgattgtgggagccgtgttcctgtgcgccagacctagaagaagccccgctcaagaggacggcaaggtgtacatcaacatgcccggcagaggaagcactagtagagtgaagttcagcagaagcgccgacgcccctgcctaccagcagggacagaaccaactgtacaacgagctgaacctgggcagacgggaagagtacgacgtgctggacaagcggagaggcagggaccctgagatgggcggaaagccccagcggagaaagaacccccaggaaggactgtataacgaactccagaaagacaagatggccgaagcctacagcgagatcggcatgaagggcgagcggagaagaggcaagggccacgatggcctgtaccagggcctgagcaccgccaccaaggacacctatgacgccctgcacatgcaggccctgcctccaagaagggccaagcgatctggatctggagcaacaaacttctcactactcaaacaagcaggtgacgtggaggagaatcccgggcctatggactggatttggcgcatccttttccttgtcggcgctgctaccggcgcgcattccttcgaacaagttcagcttcaacagcctggcgctgagctggtcaaacctggcgcttctgtgaagatgagctgcaaagccagcggctacgccttcagcagctactggatcaactggatgaagcagaaacccggccagggactcgaatggatcggccaaatctatcccggcgacggcgacaccaactacaacggcaagttcaagggcagagccacactgaccgccgatacctctagcagcacagcctacatgcagctgagcagcctgaccagcgaagatagcgccgtgtacttctgtgcccggtccatcacaacagtcgtgggctgcgctatggactattggggccagggaacaagcgtgaccgtgtctagtacgcgtatccagaaccctgatcctgccgtgtaccagctgcgggatagcaagagcagcgacaagagcgtgtgtctgttcaccgacttcgacagccagaccaacgtgtcccagagcaaggactccgacgtgtacatcaccgataagaccgtgctggacatgcggagcatggacttcaagagcaactccgccgtggcctggtccaacaagtccgatttcgcctgcgccaacgccttcaacaacagcattatccccgaggacacattcttcccaagccccgagagcagctgcggtaccaacaaaattcttgtgaagcagtccccaatgctcgtcgcctatgataatgccgtgaatctgtcctgcaaatactcctacaatctgtttagccgcgagtttagggcctcactgcacaagggccttgacagcgccgtggaagtctgtgtggtctatggaaattactcccagcaactgcaagtgtactctaagacggggttcaactgtgatggaaaactgggaaacgagtccgtgacgttttacctccaaaatctctatgtcaatcaaacggacatctatttctgcaaaattgaagtcatgtatcctccgccgtacctcgataacgagaaaagcaatgggacgatcattcacgtcaagggaaaacatctctgccccagtcctctgttccctgggccttccaaaccattttgggttctcgtcgtcgtcggcggagtcctggcttgttattctctgcttgtgacagtcgcctttatcatattctgggtccgctccaagagaagcagactgctccactccgattatatgaatatgacacccaggcggccagggcctacacggaaacactatcaaccctacgctccacctcgggatttcgctgcctacagatcaagctctagacgggttaagttttccagatccgcagacgcacccgcttaccaacaagggcagaaccaactctacaatgaacttaatttggggcggagggaagagtacgacgttctggacaaaaggaggggacgagatcccgagatgggcggaaagcctcagcgaaggaagaatccgcaagaggggctttataacgaactccagaaagataaaatggcagaagcctatagtgagattgggatgaagggagaaaggaggaggggtaaaggtcacgatgggttgtaccaaggattgagcacagccactaaagatacctatgatgcgctccacatgcaggccctgccgccaagacgcgccaagagaagcggatctggcgtgaagcagaccctgaatttcgacctgctgaagctggctggcgacgtggaatccaacccaggccctggccatatgaccgagtacaagcccacggtgcgcctcgccacccgcgacgacgtccccagggccgtacgcaccctcgccgccgcgttcgccgactaccccgccacgcgccacaccgtcgatccggaccgccacatcgagcgggtcaccgagctgcaagaactcttcctcacgcgcgtcgggctcgacatcggcaaggtgtgggtcgcggacgacggcgccgcggtggcggtctggaccacgccggagagcgtcgaagcgggggcggtgttcgccgagatcggcccgcgcatggccgagttgagcggttcccggctggccgcgcagcaacagatggaaggcctcctggcgccgcaccggcccaaggagcccgcgtggttcctggccaccgtcggcgtctcgcccgaccaccagggcaagggtctgggcagcgccgtcgtgctccccggagtggaggcggccgagcgcgccggggtgcccgccttcctggagacctccgcgccccgcaacctccccttctacgagcggctcggcttcaccgtcaccgccgacgtcgaggtgcccgaaggaccgcgcacctggtgcatgacccgcaagcccggtgcctga

SEQ ID NO: 5972 - DNA, 4221 bp, Artificial Sequence
  Synthetic Polynucleotide
atggccttaccagtgaccgccttgctcctgccgctggccttgctgctccacgccgccaggccggaagtgcagctggttgaatctggcggaggactggttcaggctggcggatctctgagactgtcttgtgccgccagcggcagaacctttagcatgggctggtttagacaggcccctggcaaagagagagagttcgtcgccgccatcacatactctggcggcagcccttactacgccgactctgtgaagggcagattcaccatcagccgggacaacgccaagaacaccgtgtacctccagatgaacagcctgaagcctgaggacaccgccgtgtactactgcgccgccaatccaacatacggcagcgactggaacgccgagaattggggccagggaacccaagtgacagtgtctagcggtaccggcggaggcggatctggcggcggaggtagcggtggcggaggatctgaattcgacatccagatgacacagagccctagcagcctgtctgccagcgtgggagacagagtgaccatcacatgcaaggccagcgaccacatcaacaactggctggcctggtatcagcagaagcctggacaggcccctaagctgctgatctacggcgctaccacactggaaacaggcgtgcccagcagattttctggcagcggctctggcaccgactacaccctgacaatatccagcctccagcctgaggacttcgccacctactactgtcagcagagctggaacaccccttggacattcggccagggcaccaagctggaaatcaagagactcgaggacctgaagaacgtgttcccacctgaggtggccgtgttcgagcctagcgaggccgagatcagccacacccagaaagccaccctcgtgtgcctggctaccggcttctaccccgaccatgtggaactgtcttggtgggtcaacggcaaagaggtgcacagcggcgtgtctaccgacccccagccactgaaagaacagcccgccctgaacgacagccggtactgcctgagcagcagactgagagtgtccgccaccttctggcagaacccccggaaccacttcagatgccaggtgcagttctacggcctgagcgagaacgacgagtggacccaggacagagccaagcccgtgacccagatcgtgtctgccgaagcctggggcagagccgattgcggatccacaacacctggcgagagaagtagcctgcctgccttctatcctggcaccagcggctcttgttctggctgtggatctctgagcctgcctctgctggctggactggttgctgctgatgctgtggcctctctgctgattgtgggagccgtgttcctgtgcgccagacctagaagaagccccgctcaagaggacggcaaggtgtacatcaacatgcccggcagaggaagcactagtagagtgaagttcagcagaagcgccgacgcccctgcctaccagcagggacagaaccaactgtacaacgagctgaacctgggcagacgggaagagtacgacgtgctggacaagcggagaggcagggaccctgagatgggcggaaagccccagcggagaaagaacccccaggaaggactgtataacgaactccagaaagacaagatggccgaagcctacagcgagatcggcatgaagggcgagcggagaagaggcaagggccacgatggcctgtaccagggcctgagcaccgccaccaaggacacctatgacgccctgcacatgcaggccctgcctccaagaagggccaagcgatctggatctggagcaacaaacttctcactactcaaacaagcaggtgacgtggaggagaatcccgggcctatggactggatttggcgcatccttttccttgtcggcgctgctaccggcgcgcattccttcgaacaagttcagcttcaacagcctggcgctgagctggtcaaacctggcgcttctgtgaagatgagctgcaaagccagcggctacgccttcagcagctactggatcaactggatgaagcagaaacccggccagggactcgaatggatcggccaaatctatcccggcgacggcgacaccaactacaacggcaagttcaagggcagagccacactgaccgccgatacctctagcagcacagcctacatgcagctgagcagcctgaccagcgaagatagcgccgtgtacttctgtgcccggtccatcacaacagtcgtgggctgcgctatggactattggggccagggaacaagcgtgaccgtgtctagtacgcgtatccagaaccctgatcctgccgtgtaccagctgcgggatagcaagagcagcgacaagagcgtgtgtctgttcaccgacttcgacagccagaccaacgtgtcccagagcaaggactccgacgtgtacatcaccgataagaccgtgctggacatgcggagcatggacttcaagagcaactccgccgtggcctggtccaacaagtccgatttcgcctgcgccaacgccttcaacaacagcattatccccgaggacacattcttcccaagccccgagagcagctgcggtaccaacaaaattcttgtgaagcagtccccaatgctcgtcgcctatgataatgccgtgaatctgtcctgcaaatactcctacaatctgtttagccgcgagtttagggcctcactgcacaagggccttgacagcgccgtggaagtctgtgtggtctatggaaattactcccagcaactgcaagtgtactctaagacggggttcaactgtgatggaaaactgggaaacgagtccgtgacgttttacctccaaaatctctatgtcaatcaaacggacatctatttctgcaaaattgaagtcatgtatcctccgccgtacctcgataacgagaaaagcaatgggacgatcattcacgtcaagggaaaacatctctgccccagtcctctgttccctgggccttccaaaccattttgggttctcgtcgtcgtcggcggagtcctggcttgttattctctgcttgtgacagtcgcctttatcatattctgggtccgctccaagagaagcagactgctccactccgattatatgaatatgacacccaggcggccagggcctacacggaaacactatcaaccctacgctccacctcgggatttcgctgcctacagatcaagctctagacgggttaagttttccagatccgcagacgcacccgcttaccaacaagggcagaaccaactctacaatgaacttaatttggggcggagggaagagtacgacgttctggacaaaaggaggggacgagatcccgagatgggcggaaagcctcagcgaaggaagaatccgcaagaggggctttataacgaactccagaaagataaaatggcagaagcctatagtgagattgggatgaagggagaaaggaggaggggtaaaggtcacgatgggttgtaccaaggattgagcacagccactaaagatacctatgatgcgctccacatgcaggccctgccgccaagacgcgccaagagaagcggatctggcgtgaagcagaccctgaatttcgacctgctgaagctggctggcgacgtggaatccaacccaggccctggccatatgaccgagtacaagcccacggtgcgcctcgccacccgcgacgacgtccccagggccgtacgcaccctcgccgccgcgttcgccgactaccccgccacgcgccacaccgtcgatccggaccgccacatcgagcgggtcaccgagctgcaagaactcttcctcacgcgcgtcgggctcgacatcggcaaggtgtgggtcgcggacgacggcgccgcggtggcggtctggaccacgccggagagcgtcgaagcgggggcggtgttcgccgagatcggcccgcgcatggccgagttgagcggttcccggctggccgcgcagcaacagatggaaggcctcctggcgccgcaccggcccaaggagcccgcgtggttcctggccaccgtcggcgtctcgcccgaccaccagggcaagggtctgggcagcgccgtcgtgctccccggagtggaggcggccgagcgcgccggggtgcccgccttcctggagacctccgcgccccgcaacctccccttctacgagcggctcggcttcaccgtcaccgccgacgtcgaggtgcccgaaggaccgcgcacctggtgcatgacccgcaagcccggtgcctga

SEQ ID NO: 5973 - DNA, 4632 bp, Artificial Sequence
  Synthetic Polynucleotide
atggccttaccagtgaccgccttgctcctgccgctggccttgctgctccacgccgccaggccggaagtgcagctggttgaatctggcggaggactggttcaggctggcggatctctgagactgtcttgtgccgccagcggcagaacctttagcatgggctggtttagacaggcccctggcaaagagagagagttcgtcgccgccatcacatactctggcggcagcccttactacgccgactctgtgaagggcagattcaccatcagccgggacaacgccaagaacaccgtgtacctccagatgaacagcctgaagcctgaggacaccgccgtgtactactgcgccgccaatccaacatacggcagcgactggaacgccgagaattggggccagggaacccaagtgacagtgtctagcggtaccggcggaggcggatctggcggcggaggtagcggtggcggaggatctgaattcgacatccagatgacacagagccctagcagcctgtctgccagcgtgggagacagagtgaccatcacatgcaaggccagcgaccacatcaacaactggctggcctggtatcagcagaagcctggacaggcccctaagctgctgatctacggcgctaccacactggaaacaggcgtgcccagcagattttctggcagcggctctggcaccgactacaccctgacaatatccagcctccagcctgaggacttcgccacctactactgtcagcagagctggaacaccccttggacattcggccagggcaccaagctggaaatcaagagactcgaggacctgaagaacgtgttcccacctgaggtggccgtgttcgagcctagcgaggccgagatcagccacacccagaaagccaccctcgtgtgcctggctaccggcttctaccccgaccatgtggaactgtcttggtgggtcaacggcaaagaggtgcacagcggcgtgtctaccgacccccagccactgaaagaacagcccgccctgaacgacagccggtactgcctgagcagcagactgagagtgtccgccaccttctggcagaacccccggaaccacttcagatgccaggtgcagttctacggcctgagcgagaacgacgagtggacccaggacagagccaagcccgtgacccagatcgtgtctgccgaagcctggggcagagccgattgcggatccacaacacctggcgagagaagtagcctgcctgccttctatcctggcaccagcggctcttgttctggctgtggatctctgagcctgcctctgctggctggactggttgctgctgatgctgtggcctctctgctgattgtgggagccgtgttcctgtgcgccagacctagaagaagccccgctcaagaggacggcaaggtgtacatcaacatgcccggcagaggaagcactagtagagtgaagttcagcagaagcgccgacgcccctgcctaccagcagggacagaaccaactgtacaacgagctgaacctgggcagacgggaagagtacgacgtgctggacaagcggagaggcagggaccctgagatgggcggaaagccccagcggagaaagaacccccaggaaggactgtataacgaactccagaaagacaagatggccgaagcctacagcgagatcggcatgaagggcgagcggagaagaggcaagggccacgatggcctgtaccagggcctgagcaccgccaccaaggacacctatgacgccctgcacatgcaggccctgcctccaagaagggccaagcgatctggatctggagcaacaaacttctcactactcaaacaagcaggtgacgtggaggagaatcccgggcctatggactggatttggcgcatccttttccttgtcggcgctgctaccggcgcgcattccgggcccgaagtgcaactggttgaatccggtggcggcctggtgcaagcaggcggatctctcagacttagctgtgccgcctccggcagaaccttcacaatgggatggtttaggcaggctccagggaaagagagagagttcgtcgccgccatctctctgtctcccacactggcctactacgccgactctgtgaaaggccggttcaccatctccagagataatgccaagaacaccgtggtgctgcaaatgaactctctgaaacccgaggatacagccctgtactattgtgccgctgaccggaagtccgtgatgagcatcagacccgattactggggacagggcacacaagtcacagtgtcctctggatccggcggcggaggatctggcggaggcggatctgggggcggaggctctttcgaacaagttcagcttcaacagcctggcgctgagctggtcaaacctggcgcttctgtgaagatgagctgcaaagccagcggctacgccttcagcagctactggatcaactggatgaagcagaaacccggccagggactcgaatggatcggccaaatctatcccggcgacggcgacaccaactacaacggcaagttcaagggcagagccacactgaccgccgatacctctagcagcacagcctacatgcagctgagcagcctgaccagcgaagatagcgccgtgtacttctgtgcccggtccatcacaacagtcgtgggctgcgctatggactattggggccagggaacaagcgtgaccgtgtctagtacgcgtatccagaaccctgatcctgccgtgtaccagctgcgggatagcaagagcagcgacaagagcgtgtgtctgttcaccgacttcgacagccagaccaacgtgtcccagagcaaggactccgacgtgtacatcaccgataagaccgtgctggacatgcggagcatggacttcaagagcaactccgccgtggcctggtccaacaagtccgatttcgcctgcgccaacgccttcaacaacagcattatccccgaggacacattcttcccaagccccgagagcagctgcggtaccaacaaaattcttgtgaagcagtccccaatgctcgtcgcctatgataatgccgtgaatctgtcctgcaaatactcctacaatctgtttagccgcgagtttagggcctcactgcacaagggccttgacagcgccgtggaagtctgtgtggtctatggaaattactcccagcaactgcaagtgtactctaagacggggttcaactgtgatggaaaactgggaaacgagtccgtgacgttttacctccaaaatctctatgtcaatcaaacggacatctatttctgcaaaattgaagtcatgtatcctccgccgtacctcgataacgagaaaagcaatgggacgatcattcacgtcaagggaaaacatctctgccccagtcctctgttccctgggccttccaaaccattttgggttctcgtcgtcgtcggcggagtcctggcttgttattctctgcttgtgacagtcgcctttatcatattctgggtccgctccaagagaagcagactgctccactccgattatatgaatatgacacccaggcggccagggcctacacggaaacactatcaaccctacgctccacctcgggatttcgctgcctacagatcaagctctagacgggttaagttttccagatccgcagacgcacccgcttaccaacaagggcagaaccaactctacaatgaacttaatttggggcggagggaagagtacgacgttctggacaaaaggaggggacgagatcccgagatgggcggaaagcctcagcgaaggaagaatccgcaagaggggctttataacgaactccagaaagataaaatggcagaagcctatagtgagattgggatgaagggagaaaggaggaggggtaaaggtcacgatgggttgtaccaaggattgagcacagccactaaagatacctatgatgcgctccacatgcaggccctgccgccaagacgcgccaagagaagcggatctggcgtgaagcagaccctgaatttcgacctgctgaagctggctggcgacgtggaatccaacccaggccctggccatatgaccgagtacaagcccacggtgcgcctcgccacccgcgacgacgtccccagggccgtacgcaccctcgccgccgcgttcgccgactaccccgccacgcgccacaccgtcgatccggaccgccacatcgagcgggtcaccgagctgcaagaactcttcctcacgcgcgtcgggctcgacatcggcaaggtgtgggtcgcggacgacggcgccgcggtggcggtctggaccacgccggagagcgtcgaagcgggggcggtgttcgccgagatcggcccgcgcatggccgagttgagcggttcccggctggccgcgcagcaacagatggaaggcctcctggcgccgcaccggcccaaggagcccgcgtggttcctggccaccgtcggcgtctcgcccgaccaccagggcaagggtctgggcagcgccgtcgtgctccccggagtggaggcggccgagcgcgccggggtgcccgccttcctggagacctccgcgccccgcaacctccccttctacgagcggctcggcttcaccgtcaccgccgacgtcgaggtgcccgaaggaccgcgcacctggtgcatgacccgcaagcccggtgcctga

SEQ ID NO: 5974 - DNA, 3831 bp, Artificial Sequence
  Synthetic Polynucleotide
atggccttaccagtgaccgccttgctcctgccgctggccttgctgctccacgccgccaggccggaagtgcagctggttgaatctggcggaggactggttcaggctggcggatctctgagactgtcttgtgccgccagcggcagaacctttagcatgggctggtttagacaggcccctggcaaagagagagagttcgtcgccgccatcacatactctggcggcagcccttactacgccgactctgtgaagggcagattcaccatcagccgggacaacgccaagaacaccgtgtacctccagatgaacagcctgaagcctgaggacaccgccgtgtactactgcgccgccaatccaacatacggcagcgactggaacgccgagaattggggccagggaacccaagtgacagtgtctagcctcgaggacctgaagaacgtgttcccacctgaggtggccgtgttcgagcctagcgaggccgagatcagccacacccagaaagccaccctcgtgtgcctggctaccggcttctaccccgaccatgtggaactgtcttggtgggtcaacggcaaagaggtgcacagcggcgtgtctaccgacccccagccactgaaagaacagcccgccctgaacgacagccggtactgcctgagcagcagactgagagtgtccgccaccttctggcagaacccccggaaccacttcagatgccaggtgcagttctacggcctgagcgagaacgacgagtggacccaggacagagccaagcccgtgacccagatcgtgtctgccgaagcctggggcagagccgattgcggatccacaacacctggcgagagaagtagcctgcctgccttctatcctggcaccagcggctcttgttctggctgtggatctctgagcctgcctctgctggctggactggttgctgctgatgctgtggcctctctgctgattgtgggagccgtgttcctgtgcgccagacctagaagaagccccgctcaagaggacggcaaggtgtacatcaacatgcccggcagaggaagcactagtagagtgaagttcagcagaagcgccgacgcccctgcctaccagcagggacagaaccaactgtacaacgagctgaacctgggcagacgggaagagtacgacgtgctggacaagcggagaggcagggaccctgagatgggcggaaagccccagcggagaaagaacccccaggaaggactgtataacgaactccagaaagacaagatggccgaagcctacagcgagatcggcatgaagggcgagcggagaagaggcaagggccacgatggcctgtaccagggcctgagcaccgccaccaaggacacctatgacgccctgcacatgcaggccctgcctccaagaagggccaagcgatctggatctggagcaacaaacttctcactactcaaacaagcaggtgacgtggaggagaatcccgggcctatggactggatttggcgcatccttttccttgtcggcgctgctaccggcgcgcattccgggcccgaagtgcaactggttgaatccggtggcggcctggtgcaagcaggcggatctctcagacttagctgtgccgcctccggcagaaccttcacaatgggatggtttaggcaggctccagggaaagagagagagttcgtcgccgccatctctctgtctcccacactggcctactacgccgactctgtgaaaggccggttcaccatctccagagataatgccaagaacaccgtggtgctgcaaatgaactctctgaaacccgaggatacagccctgtactattgtgccgctgaccggaagtccgtgatgagcatcagacccgattactggggacagggcacacaagtcacagtgtcctctacgcgtatccagaaccctgatcctgccgtgtaccagctgcgggatagcaagagcagcgacaagagcgtgtgtctgttcaccgacttcgacagccagaccaacgtgtcccagagcaaggactccgacgtgtacatcaccgataagaccgtgctggacatgcggagcatggacttcaagagcaactccgccgtggcctggtccaacaagtccgatttcgcctgcgccaacgccttcaacaacagcattatccccgaggacacattcttcccaagccccgagagcagctgcggtaccaacaaaattcttgtgaagcagtccccaatgctcgtcgcctatgataatgccgtgaatctgtcctgcaaatactcctacaatctgtttagccgcgagtttagggcctcactgcacaagggccttgacagcgccgtggaagtctgtgtggtctatggaaattactcccagcaactgcaagtgtactctaagacggggttcaactgtgatggaaaactgggaaacgagtccgtgacgttttacctccaaaatctctatgtcaatcaaacggacatctatttctgcaaaattgaagtcatgtatcctccgccgtacctcgataacgagaaaagcaatgggacgatcattcacgtcaagggaaaacatctctgccccagtcctctgttccctgggccttccaaaccattttgggttctcgtcgtcgtcggcggagtcctggcttgttattctctgcttgtgacagtcgcctttatcatattctgggtccgctccaagagaagcagactgctccactccgattatatgaatatgacacccaggcggccagggcctacacggaaacactatcaaccctacgctccacctcgggatttcgctgcctacagatcaagctctagacgggttaagttttccagatccgcagacgcacccgcttaccaacaagggcagaaccaactctacaatgaacttaatttggggcggagggaagagtacgacgttctggacaaaaggaggggacgagatcccgagatgggcggaaagcctcagcgaaggaagaatccgcaagaggggctttataacgaactccagaaagataaaatggcagaagcctatagtgagattgggatgaagggagaaaggaggaggggtaaaggtcacgatgggttgtaccaaggattgagcacagccactaaagatacctatgatgcgctccacatgcaggccctgccgccaagacgcgccaagagaagcggatctggcgtgaagcagaccctgaatttcgacctgctgaagctggctggcgacgtggaatccaacccaggccctggccatatgaccgagtacaagcccacggtgcgcctcgccacccgcgacgacgtccccagggccgtacgcaccctcgccgccgcgttcgccgactaccccgccacgcgccacaccgtcgatccggaccgccacatcgagcgggtcaccgagctgcaagaactcttcctcacgcgcgtcgggctcgacatcggcaaggtgtgggtcgcggacgacggcgccgcggtggcggtctggaccacgccggagagcgtcgaagcgggggcggtgttcgccgagatcggcccgcgcatggccgagttgagcggttcccggctggccgcgcagcaacagatggaaggcctcctggcgccgcaccggcccaaggagcccgcgtggttcctggccaccgtcggcgtctcgcccgaccaccagggcaagggtctgggcagcgccgtcgtgctccccggagtggaggcggccgagcgcgccggggtgcccgccttcctggagacctccgcgccccgcaacctccccttctacgagcggctcggcttcaccgtcaccgccgacgtcgaggtgcccgaaggaccgcgcacctggtgcatgacccgcaagcccggtgcctga

SEQ ID NO: 5975 - DNA, 1758 bp, Artificial Sequence; identical to SEQ ID NO: 2037
  Synthetic Polynucleotide

SEQ ID NO: 5976 - DNA, 1371 bp, Artificial Sequence; identical to SEQ ID NO: 5880
  Synthetic Polynucleotide

SEQ ID NO: 5977 - DNA, 1371 bp, Artificial Sequence; identical to SEQ ID NO: 5881
  Synthetic Polynucleotide

SEQ ID NO: 5978 - DNA, 993 bp, Artificial Sequence; identical to SEQ ID NO: 5882
  Synthetic Polynucleotide

SEQ ID NO: 5979 - DNA, 993 bp, Artificial Sequence; identical to SEQ ID NO: 5883
  Synthetic Polynucleotide

SEQ ID NO: 5980 - DNA, 993 bp, Artificial Sequence; identical to SEQ ID NO: 5884
  Synthetic Polynucleotide

SEQ ID NO: 5981 - DNA, 999 bp, Artificial Sequence; identical to SEQ ID NO: 5885
  Synthetic Polynucleotide

SEQ ID NO: 5982 - DNA, 1023 bp, Artificial Sequence; identical to SEQ ID NO: 5886
  Synthetic Polynucleotide

SEQ ID NO: 5983 - DNA, 1011 bp, Artificial Sequence; identical to SEQ ID NO: 5887
  Synthetic Polynucleotide

SEQ ID NO: 5984 - DNA, 996 bp, Artificial Sequence; identical to SEQ ID NO: 5888
  Synthetic Polynucleotide

SEQ ID NO: 5985 - DNA, 1011 bp, Artificial Sequence; identical to SEQ ID NO: 5889
  Synthetic Polynucleotide

SEQ ID NO: 5986 - DNA, 813 bp, Artificial Sequence; identical to SEQ ID NO: 5890
  Synthetic Polynucleotide

SEQ ID NO: 5987 - DNA, 906 bp, Artificial Sequence; identical to SEQ ID NO: 5891
  Synthetic Polynucleotide

SEQ ID NO: 5988 - DNA, 909 bp, Artificial Sequence; identical to SEQ ID NO: 5892
  Synthetic Polynucleotide

SEQ ID NO: 5989 - DNA, 1560 bp, Artificial Sequence; identical to SEQ ID NO: 5893
  Synthetic Polynucleotide

SEQ ID NO: 5990 - DNA, 1200 bp, Artificial Sequence; identical to SEQ ID NO: 5894
  Synthetic Polynucleotide

SEQ ID NO: 5991 - DNA, 798 bp, Artificial Sequence; identical to SEQ ID NO: 5895
  Synthetic Polynucleotide

SEQ ID NO: 5992 - DNA, 723 bp, Artificial Sequence; identical to SEQ ID NO: 5896
  Synthetic Polynucleotide

SEQ ID NO: 5993 - DNA, 1497 bp, Artificial Sequence; identical to SEQ ID NO: 5897
  Synthetic Polynucleotide

SEQ ID NO: 5994 - DNA, 1497 bp, Artificial Sequence; identical to SEQ ID NO: 5898
  Synthetic Polynucleotide

SEQ ID NO: 5995 - DNA, 3510 bp, Artificial Sequence
  Synthetic Polynucleotide
atggccttaccagtgaccgccttgctcctgccgctggccttgctgctccacgccgccaggccggacatccagatgacacagagccctagcagcctgtctgccagcgtgggagacagagtgaccatcacatgcaaggccagcgaccacatcaacaactggctggcctggtatcagcagaagcctggacaggcccctaagctgctgatctacggcgctaccacactggaaacaggcgtgcccagcagattttctggcagcggctctggcaccgactacaccctgacaatatccagcctccagcctgaggacttcgccacctactactgtcagcagagctggaacaccccttggacattcggccagggcaccaagctggaaatcaagagactcgagaacaagatcctggtcaagcagagccctatgctggtggcctacgacaacgccgtgaacctgagctgcaagtacagctacaacctgttcagcagagagttccgggccagcctgcacaaaggactggattctgctgtggaagtgtgcgtggtgtacggcaactacagccagcagctccaggtgtacagcaagaccggcttcaactgcgacggcaagctgggcaatgagagcgtgaccttctacctgcaaaacctgtacgtgaaccagaccgacatctatttctgcaagatcgaagtgatgtacccgcctccttacctggacaacgagaagtccaacggcaccatcatccacgtgaagggcaagcacctgtgtccttctccactgttccccggacctagcaagcctttctgggtgctcgttgttgttggcggcgtgctggcctgttatagcctgctggttaccgtggccttcatcatcttttgggtccgaagcaagcggagccggctgctgcacagcgactacatgaacatgacccctagacggcccggaccaaccagaaagcactaccagccttacgctcctcctagagacttcgccgcctatagaagtagcactagtagagtgaagttcagcagaagcgccgacgcccctgcctaccagcagggacagaaccaactgtacaacgagctgaacctgggcagacgggaagagtacgacgtgctggacaagcggagaggcagggaccctgagatgggcggaaagccccagcggagaaagaacccccaggaaggactgtataacgaactccagaaagacaagatggccgaagcctacagcgagatcggcatgaagggcgagcggagaagaggcaagggccacgatggcctgtaccagggcctgagcaccgccaccaaggacacctatgacgccctgcacatgcaggccctgcctccaagaagggccaagcgatctggatctggagcaacaaacttctcactactcaaacaagcaggtgacgtggaggagaatcccgggcctatggactggatttggcgcatccttttccttgtcggcgctgctaccggcgcgcattccttcgaacaagttcagcttcaacagcctggcgctgagctggtcaaacctggcgcttctgtgaagatgagctgcaaagccagcggctacgccttcagcagctactggatcaactggatgaagcagaaacccggccagggactcgaatggatcggccaaatctatcccggcgacggcgacaccaactacaacggcaagttcaagggcagagccacactgaccgccgatacctctagcagcacagcctacatgcagctgagcagcctgaccagcgaagatagcgccgtgtacttctgtgcccggtccatcacaacagtcgtgggctgcgctatggactattggggccagggaacaagcgtgaccgtgtctagtacgcgtaacaaaattcttgtgaagcagtccccaatgctcgtcgcctatgataatgccgtgaatctgtcctgcaaatactcctacaatctgtttagccgcgagtttagggcctcactgcacaagggccttgacagcgccgtggaagtctgtgtggtctatggaaattactcccagcaactgcaagtgtactctaagacggggttcaactgtgatggaaaactgggaaacgagtccgtgacgttttacctccaaaatctctatgtcaatcaaacggacatctatttctgcaaaattgaagtcatgtatcctccgccgtacctcgataacgagaaaagcaatgggacgatcattcacgtcaagggaaaacatctctgccccagtcctctgttccctgggccttccaaaccattttgggttctcgtcgtcgtcggcggagtcctggcttgttattctctgcttgtgacagtcgcctttatcatattctgggtccgctccaagagaagcagactgctccactccgattatatgaatatgacacccaggcggccagggcctacacggaaacactatcaaccctacgctccacctcgggatttcgctgcctacagatcaagctctagacgggttaagttttccagatccgcagacgcacccgcttaccaacaagggcagaaccaactctacaatgaacttaatttggggcggagggaagagtacgacgttctggacaaaaggaggggacgagatcccgagatgggcggaaagcctcagcgaaggaagaatccgcaagaggggctttataacgaactccagaaagataaaatggcagaagcctatagtgagattgggatgaagggagaaaggaggaggggtaaaggtcacgatgggttgtaccaaggattgagcacagccactaaagatacctatgatgcgctccacatgcaggccctgccgccaagacgcgccaagagaagcggatctggcgtgaagcagaccctgaatttcgacctgctgaagctggctggcgacgtggaatccaacccaggccctggccatatgaccgagtacaagcccacggtgcgcctcgccacccgcgacgacgtccccagggccgtacgcaccctcgccgccgcgttcgccgactaccccgccacgcgccacaccgtcgatccggaccgccacatcgagcgggtcaccgagctgcaagaactcttcctcacgcgcgtcgggctcgacatcggcaaggtgtgggtcgcggacgacggcgccgcggtggcggtctggaccacgccggagagcgtcgaagcgggggcggtgttcgccgagatcggcccgcgcatggccgagttgagcggttcccggctggccgcgcagcaacagatggaaggcctcctggcgccgcaccggcccaaggagcccgcgtggttcctggccaccgtcggcgtctcgcccgaccaccagggcaagggtctgggcagcgccgtcgtgctccccggagtggaggcggccgagcgcgccggggtgcccgccttcctggagacctccgcgccccgcaacctccccttctacgagcggctcggcttcaccgtcaccgccgacgtcgaggtgcccgaaggaccgcgcacctggtgcatgacccgcaagcccggtgcctga

SEQ ID NO: 5996 - DNA, 3666 bp, Artificial Sequence
  Synthetic Polynucleotide
atggccttaccagtgaccgccttgctcctgccgctggccttgctgctccacgccgccaggccggcatgcgaagtgcagctgcttgaaagtggcggcggactgattcagcctggcggatctctgagactgagctgtgccgccagcggcttcaccttttctagccacgccatgacctgggtccgacaggcacctggaaaagggcttgaatgggtgtccgccatcagcggctctggcgattacacacactacgccgacagcgtgaagggcagattcaccatcagcagagacaacagcaagaacaccgtgtacctccagatgaacagcctgagagccgaggacagcgccgtgtattattgcgccaaggatgaggatggcggcagcctgcttggacacagaggacaaggcaccctggtcaccgtttcttccggtaccggcggaggcggatctggcggcggaggtagcggtggcggaggatctgaattcggatctctcgagaacaagatcctggtcaagcagagccctatgctggtggcctacgacaacgccgtgaacctgagctgcaagtacagctacaacctgttcagcagagagttccgggccagcctgcacaaaggactggattctgctgtggaagtgtgcgtggtgtacggcaactacagccagcagctccaggtgtacagcaagaccggcttcaactgcgacggcaagctgggcaatgagagcgtgaccttctacctgcaaaacctgtacgtgaaccagaccgacatctatttctgcaagatcgaagtgatgtacccgcctccttacctggacaacgagaagtccaacggcaccatcatccacgtgaagggcaagcacctgtgtccttctccactgttccccggacctagcaagcctttctgggtgctcgttgttgttggcggcgtgctggcctgttatagcctgctggttaccgtggccttcatcatcttttgggtccgaagcaagcggagccggctgctgcacagcgactacatgaacatgacccctagacggcccggaccaaccagaaagcactaccagccttacgctcctcctagagacttcgccgcctatagaagtagcactagtagagtgaagttcagcagaagcgccgacgcccctgcctaccagcagggacagaaccaactgtacaacgagctgaacctgggcagacgggaagagtacgacgtgctggacaagcggagaggcagggaccctgagatgggcggaaagccccagcggagaaagaacccccaggaaggactgtataacgaactccagaaagacaagatggccgaagcctacagcgagatcggcatgaagggcgagcggagaagaggcaagggccacgatggcctgtaccagggcctgagcaccgccaccaaggacacctatgacgccctgcacatgcaggccctgcctccaagaagggccaagcgatctggatctggagcaacaaacttctcactactcaaacaagcaggtgacgtggaggagaatcccgggcctatggactggatttggcgcatccttttccttgtcggcgctgctaccggcgcgcattccgggcccgaagtgcagctggttgaatctggcggaggactggttcaggctggcggatctctgagactgtcttgtgccgccagcggcagaacctttagcatgggctggtttagacaggcccctggcaaagagagagagttcgtcgccgccatcacatactctggcggcagcccttactacgccgactctgtgaagggcagattcaccatcagccgggacaacgccaagaacaccgtgtacctccagatgaacagcctgaagcctgaggacaccgccgtgtactactgcgccgccaatccaacatacggcagcgactggaacgccgagaattggggccagggaacccaagtgacagtgtctagcggatccggcggcggaggatctggcggaggcggatctgggggcggaggctctttcgaaggcagcacgcgtaacaaaattcttgtgaagcagtccccaatgctcgtcgcctatgataatgccgtgaatctgtcctgcaaatactcctacaatctgtttagccgcgagtttagggcctcactgcacaagggccttgacagcgccgtggaagtctgtgtggtctatggaaattactcccagcaactgcaagtgtactctaagacggggttcaactgtgatggaaaactgggaaacgagtccgtgacgttttacctccaaaatctctatgtcaatcaaacggacatctatttctgcaaaattgaagtcatgtatcctccgccgtacctcgataacgagaaaagcaatgggacgatcattcacgtcaagggaaaacatctctgccccagtcctctgttccctgggccttccaaaccattttgggttctcgtcgtcgtcggcggagtcctggcttgttattctctgcttgtgacagtcgcctttatcatattctgggtccgctccaagagaagcagactgctccactccgattatatgaatatgacacccaggcggccagggcctacacggaaacactatcaaccctacgctccacctcgggatttcgctgcctacagatcaagctctagacgggttaagttttccagatccgcagacgcacccgcttaccaacaagggcagaaccaactctacaatgaacttaatttggggcggagggaagagtacgacgttctggacaaaaggaggggacgagatcccgagatgggcggaaagcctcagcgaaggaagaatccgcaagaggggctttataacgaactccagaaagataaaatggcagaagcctatagtgagattgggatgaagggagaaaggaggaggggtaaaggtcacgatgggttgtaccaaggattgagcacagccactaaagatacctatgatgcgctccacatgcaggccctgccgccaagacgcgccaagagaagcggatctggcgtgaagcagaccctgaatttcgacctgctgaagctggctggcgacgtggaatccaacccaggccctggccatatgaccgagtacaagcccacggtgcgcctcgccacccgcgacgacgtccccagggccgtacgcaccctcgccgccgcgttcgccgactaccccgccacgcgccacaccgtcgatccggaccgccacatcgagcgggtcaccgagctgcaagaactcttcctcacgcgcgtcgggctcgacatcggcaaggtgtgggtcgcggacgacggcgccgcggtggcggtctggaccacgccggagagcgtcgaagcgggggcggtgttcgccgagatcggcccgcgcatggccgagttgagcggttcccggctggccgcgcagcaacagatggaaggcctcctggcgccgcaccggcccaaggagcccgcgtggttcctggccaccgtcggcgtctcgcccgaccaccagggcaagggtctgggcagcgccgtcgtgctccccggagtggaggcggccgagcgcgccggggtgcccgccttcctggagacctccgcgccccgcaacctccccttctacgagcggctcggcttcaccgtcaccgccgacgtcgaggtgcccgaaggaccgcgcacctggtgcatgacccgcaagcccggtgcctga

SEQ ID NO: 5997 - DNA, 4113 bp, Artificial Sequence
  Synthetic Polynucleotide
atggccttaccagtgaccgccttgctcctgccgctggccttgctgctccacgccgccaggccggacatccagatgacacagagccctagcagcctgtctgccagcgtgggagacagagtgaccatcacatgcaaggccagcgaccacatcaacaactggctggcctggtatcagcagaagcctggacaggcccctaagctgctgatctacggcgctaccacactggaaacaggcgtgcccagcagattttctggcagcggctctggcaccgactacaccctgacaatatccagcctccagcctgaggacttcgccacctactactgtcagcagagctggaacaccccttggacattcggccagggcaccaagctggaaatcaagagactcgagggacagcctaaggccaatcctaccgtgacactgttccctccaagcagcgaagaactccaggccaacaaggccacacttgtgtgcctgatctccgacttctaccctggggctgtgacagtggcttggaaggccgatggatctcctgtgaaagccggcgtggaaaccaccaagccatccaagcagagcaacaacaaatacgccgccagctcctacctgagcctgacacctgagcagtggaagtcccacagatcctacagctgccaagtgacccacgaaggcagcaccgtggaaaagacagtggcccctacagagtgcagcggatccaacaagatcctggtcaagcagagccctatgctggtggcctacgacaacgccgtgaacctgagctgcaagtacagctacaacctgttcagcagagagttccgggccagcctgcacaaaggactggattctgctgtggaagtgtgcgtggtgtacggcaactacagccagcagctccaggtgtacagcaagaccggcttcaactgcgacggcaagctgggcaatgagagcgtgaccttctacctgcaaaacctgtacgtgaaccagaccgacatctatttctgcaagatcgaagtgatgtacccgcctccttacctggacaacgagaagtccaacggcaccatcatccacgtgaagggcaagcacctgtgtccttctccactgttccccggacctagcaagcctttctgggtgctcgttgttgttggcggcgtgctggcctgttatagcctgctggttaccgtggccttcatcatcttttgggtccgaagcaagcggagccggctgctgcacagcgactacatgaacatgacccctagacggcccggaccaaccagaaagcactaccagccttacgctcctcctagagacttcgccgcctatagaagtagcactagtagagtgaagttcagcagaagcgccgacgcccctgcctaccagcagggacagaaccaactgtacaacgagctgaacctgggcagacgggaagagtacgacgtgctggacaagcggagaggcagggaccctgagatgggcggaaagccccagcggagaaagaacccccaggaaggactgtataacgaactccagaaagacaagatggccgaagcctacagcgagatcggcatgaagggcgagcggagaagaggcaagggccacgatggcctgtaccagggcctgagcaccgccaccaaggacacctatgacgccctgcacatgcaggccctgcctccaagaagggccaagcgatctggatctggagcaacaaacttctcactactcaaacaagcaggtgacgtggaggagaatcccgggcctatggactggatttggcgcatccttttccttgtcggcgctgctaccggcgcgcattccttcgaacaagttcagcttcaacagcctggcgctgagctggtcaaacctggcgcttctgtgaagatgagctgcaaagccagcggctacgccttcagcagctactggatcaactggatgaagcagaaacccggccagggactcgaatggatcggccaaatctatcccggcgacggcgacaccaactacaacggcaagttcaagggcagagccacactgaccgccgatacctctagcagcacagcctacatgcagctgagcagcctgaccagcgaagatagcgccgtgtacttctgtgcccggtccatcacaacagtcgtgggctgcgctatggactattggggccagggaacaagcgtgaccgtgtctagtacgcgtgcctctacaaagggaccctccgtgtttcctctggctcccagcagcaagtctacaagcggaggaacagccgctctgggctgcctggtcaaggattactttcccgagcctgtgaccgtgtcctggaatagcggagcactgacaagcggcgtgcacacctttccagccgtgctgcaaagcagcggcctgtactctctgagcagcgtggtcacagtgcctagctctagcctgggcacccagacctacatctgcaatgtgaaccacaagcctagcaacaccaaggtggacaagagagtggaacccaagagctgtggtaccaacaaaattcttgtgaagcagtccccaatgctcgtcgcctatgataatgccgtgaatctgtcctgcaaatactcctacaatctgtttagccgcgagtttagggcctcactgcacaagggccttgacagcgccgtggaagtctgtgtggtctatggaaattactcccagcaactgcaagtgtactctaagacggggttcaactgtgatggaaaactgggaaacgagtccgtgacgttttacctccaaaatctctatgtcaatcaaacggacatctatttctgcaaaattgaagtcatgtatcctccgccgtacctcgataacgagaaaagcaatgggacgatcattcacgtcaagggaaaacatctctgccccagtcctctgttccctgggccttccaaaccattttgggttctcgtcgtcgtcggcggagtcctggcttgttattctctgcttgtgacagtcgcctttatcatattctgggtccgctccaagagaagcagactgctccactccgattatatgaatatgacacccaggcggccagggcctacacggaaacactatcaaccctacgctccacctcgggatttcgctgcctacagatcaagctctagacgggttaagttttccagatccgcagacgcacccgcttaccaacaagggcagaaccaactctacaatgaacttaatttggggcggagggaagagtacgacgttctggacaaaaggaggggacgagatcccgagatgggcggaaagcctcagcgaaggaagaatccgcaagaggggctttataacgaactccagaaagataaaatggcagaagcctatagtgagattgggatgaagggagaaaggaggaggggtaaaggtcacgatgggttgtaccaaggattgagcacagccactaaagatacctatgatgcgctccacatgcaggccctgccgccaagacgcgccaagagaagcggatctggcgtgaagcagaccctgaatttcgacctgctgaagctggctggcgacgtggaatccaacccaggccctggccatatggctacctacgaggtgctgtgcgaggtggcaagaaagctgggcaccgacgacagagaagtggtgctgttcctgctgaacgtgttcatccctcagcctacactggcccagctgatcggtgcactgagagccctgaaagaggaaggccggctgacctttcctctgctggccgaatgcctgttcagagccggaagaagggatctgctgcgggacctgctgcatctggaccccagatttctggaaagacacctggccggcaccatgagctacttcagcccttaccagctgaccgtgctgcacgttgacggcgaactgtgcgccagagatattcggagcctgatcttcctgagcaaggacaccatcggcagccggtctacccctcagacatttctgcactgggtgtactgcatggaaaacctggacctgctcggccccacagatgtggatgccctgatgtccatgctgagaagcctgagcagagtggacctccagagacaggtgcagacactgatgggactgcacctgagcggacctagccacagccagcactacagacacacccct

SEQ ID NO: 5998 - DNA, 4272 bp, Artificial Sequence
  Synthetic Polynucleotide
atggccttaccagtgaccgccttgctcctgccgctggccttgctgctccacgccgccaggccggacatccagatgacacagagccctagcagcctgtctgccagcgtgggagacagagtgaccatcacatgcaaggccagcgaccacatcaacaactggctggcctggtatcagcagaagcctggacaggcccctaagctgctgatctacggcgctaccacactggaaacaggcgtgcccagcagattttctggcagcggctctggcaccgactacaccctgacaatatccagcctccagcctgaggacttcgccacctactactgtcagcagagctggaacaccccttggacattcggccagggcaccaagctggaaatcaagagactcgagggacagcctaaggccaatcctaccgtgacactgttccctccaagcagcgaagaactccaggccaacaaggccacacttgtgtgcctgatctccgacttctaccctggggctgtgacagtggcttggaaggccgatggatctcctgtgaaagccggcgtggaaaccaccaagccatccaagcagagcaacaacaaatacgccgccagctcctacctgagcctgacacctgagcagtggaagtcccacagatcctacagctgccaagtgacccacgaaggcagcaccgtggaaaagacagtggcccctacagagtgcagcggatccaacaagatcctggtcaagcagagccctatgctggtggcctacgacaacgccgtgaacctgagctgcaagtacagctacaacctgttcagcagagagttccgggccagcctgcacaaaggactggattctgctgtggaagtgtgcgtggtgtacggcaactacagccagcagctccaggtgtacagcaagaccggcttcaactgcgacggcaagctgggcaatgagagcgtgaccttctacctgcaaaacctgtacgtgaaccagaccgacatctatttctgcaagatcgaagtgatgtacccgcctccttacctggacaacgagaagtccaacggcaccatcatccacgtgaagggcaagcacctgtgtccttctccactgttccccggacctagcaagcctttctgggtgctcgttgttgttggcggcgtgctggcctgttatagcctgctggttaccgtggccttcatcatcttttgggtccgaagcaagcggagccggctgctgcacagcgactacatgaacatgacccctagacggcccggaccaaccagaaagcactaccagccttacgctcctcctagagacttcgccgcctatagaagtagcactagtagagtgaagttcagcagaagcgccgacgcccctgcctaccagcagggacagaaccaactgtacaacgagctgaacctgggcagacgggaagagtacgacgtgctggacaagcggagaggcagggaccctgagatgggcggaaagccccagcggagaaagaacccccaggaaggactgtataacgaactccagaaagacaagatggccgaagcctacagcgagatcggcatgaagggcgagcggagaagaggcaagggccacgatggcctgtaccagggcctgagcaccgccaccaaggacacctatgacgccctgcacatgcaggccctgcctccaagaagggccaagcgatctggatctggagcaacaaacttctcactactcaaacaagcaggtgacgtggaggagaatcccgggcctatggactggatttggcgcatccttttccttgtcggcgctgctaccggcgcgcattccttcgaacaagttcagcttcaacagcctggcgctgagctggtcaaacctggcgcttctgtgaagatgagctgcaaagccagcggctacgccttcagcagctactggatcaactggatgaagcagaaacccggccagggactcgaatggatcggccaaatctatcccggcgacggcgacaccaactacaacggcaagttcaagggcagagccacactgaccgccgatacctctagcagcacagcctacatgcagctgagcagcctgaccagcgaagatagcgccgtgtacttctgtgcccggtccatcacaacagtcgtgggctgcgctatggactattggggccagggaacaagcgtgaccgtgtctagtacgcgtgcctctacaaagggaccctccgtgtttcctctggctcccagcagcaagtctacaagcggaggaacagccgctctgggctgcctggtcaaggattactttcccgagcctgtgaccgtgtcctggaatagcggagcactgacaagcggcgtgcacacctttccagccgtgctgcaaagcagcggcctgtactctctgagcagcgtggtcacagtgcctagctctagcctgggcacccagacctacatctgcaatgtgaaccacaagcctagcaacaccaaggtggacaagagagtggaacccaagagctgtggtaccaacaaaattcttgtgaagcagtccccaatgctcgtcgcctatgataatgccgtgaatctgtcctgcaaatactcctacaatctgtttagccgcgagtttagggcctcactgcacaagggccttgacagcgccgtggaagtctgtgtggtctatggaaattactcccagcaactgcaagtgtactctaagacggggttcaactgtgatggaaaactgggaaacgagtccgtgacgttttacctccaaaatctctatgtcaatcaaacggacatctatttctgcaaaattgaagtcatgtatcctccgccgtacctcgataacgagaaaagcaatgggacgatcattcacgtcaagggaaaacatctctgccccagtcctctgttccctgggccttccaaaccattttgggttctcgtcgtcgtcggcggagtcctggcttgttattctctgcttgtgacagtcgcctttatcatattctgggtccgctccaagagaagcagactgctccactccgattatatgaatatgacacccaggcggccagggcctacacggaaacactatcaaccctacgctccacctcgggatttcgctgcctacagatcaagctctagacgggttaagttttccagatccgcagacgcacccgcttaccaacaagggcagaaccaactctacaatgaacttaatttggggcggagggaagagtacgacgttctggacaaaaggaggggacgagatcccgagatgggcggaaagcctcagcgaaggaagaatccgcaagaggggctttataacgaactccagaaagataaaatggcagaagcctatagtgagattgggatgaagggagaaaggaggaggggtaaaggtcacgatgggttgtaccaaggattgagcacagccactaaagatacctatgatgcgctccacatgcaggccctgccgccaagacgcgccaagagaagcggatctggcgtgaagcagaccctgaatttcgacctgctgaagctggctggcgacgtggaatccaacccaggccctggccatatgtccgactccaaggaggtccctagccttccatttttgcgacacttgctcgaagagttggacagccatgaggacagcttgctgctgtttctgtgtcacgacgcggccccgggctgcacgacggtcacgcaagctttgtgctcgcttagccaacagcgcaagctgaccctcgcggctctggtcgagatgctctacgtgctgcagcgtatggatcttctcaagagccgcttcgggctcagcaaggagggggccgagcaattgctgggcacaagctttctcacgcgctaccgcaagctcatggtttgcgtgggtgaggagctcgactcgagcgagctacgcgctctacgcttgttcgcgtgcaacctgaatccgagcctgagcacggcgctttctgagagcagccgctttgtcgagcttgtactcgcgcttgaaaacgtaggactcgtctcgccatcgagtgtttccgtgcttgcggacatgttgcgcactcttcggcgcctcgatttgtgccagcagcttgttgagtacgaacaacaagagcaagccaggtaccgttactgttacgcggcctcgccctcattgccagttcgtacgttacgtcgggggcacggcgcgagtgaacacgagcagctgtgcatgcccgtgcaagaatcctctgacagccccgagctgctgcgcacgcccgtacaagaatcctccagcgacagccccgagcaaacgact

SEQ ID NO: 5999 - DNA, 4149 bp, Artificial Sequence
  Synthetic Polynucleotide
atggccttaccagtgaccgccttgctcctgccgctggccttgctgctccacgccgccaggccggacatccagatgacacagagccctagcagcctgtctgccagcgtgggagacagagtgaccatcacatgcaaggccagcgaccacatcaacaactggctggcctggtatcagcagaagcctggacaggcccctaagctgctgatctacggcgctaccacactggaaacaggcgtgcccagcagattttctggcagcggctctggcaccgactacaccctgacaatatccagcctccagcctgaggacttcgccacctactactgtcagcagagctggaacaccccttggacattcggccagggcaccaagctggaaatcaagagactcgagggacagcctaaggccaatcctaccgtgacactgttccctccaagcagcgaagaactccaggccaacaaggccacacttgtgtgcctgatctccgacttctaccctggggctgtgacagtggcttggaaggccgatggatctcctgtgaaagccggcgtggaaaccaccaagccatccaagcagagcaacaacaaatacgccgccagctcctacctgagcctgacacctgagcagtggaagtcccacagatcctacagctgccaagtgacccacgaaggcagcaccgtggaaaagacagtggcccctacagagtgcagcggatccaacaagatcctggtcaagcagagccctatgctggtggcctacgacaacgccgtgaacctgagctgcaagtacagctacaacctgttcagcagagagttccgggccagcctgcacaaaggactggattctgctgtggaagtgtgcgtggtgtacggcaactacagccagcagctccaggtgtacagcaagaccggcttcaactgcgacggcaagctgggcaatgagagcgtgaccttctacctgcaaaacctgtacgtgaaccagaccgacatctatttctgcaagatcgaagtgatgtacccgcctccttacctggacaacgagaagtccaacggcaccatcatccacgtgaagggcaagcacctgtgtccttctccactgttccccggacctagcaagcctttctgggtgctcgttgttgttggcggcgtgctggcctgttatagcctgctggttaccgtggccttcatcatcttttgggtccgaagcaagcggagccggctgctgcacagcgactacatgaacatgacccctagacggcccggaccaaccagaaagcactaccagccttacgctcctcctagagacttcgccgcctatagaagtagcactagtagagtgaagttcagcagaagcgccgacgcccctgcctaccagcagggacagaaccaactgtacaacgagctgaacctgggcagacgggaagagtacgacgtgctggacaagcggagaggcagggaccctgagatgggcggaaagccccagcggagaaagaacccccaggaaggactgtataacgaactccagaaagacaagatggccgaagcctacagcgagatcggcatgaagggcgagcggagaagaggcaagggccacgatggcctgtaccagggcctgagcaccgccaccaaggacacctatgacgccctgcacatgcaggccctgcctccaagaagggccaagcgatctggatctggagcaacaaacttctcactactcaaacaagcaggtgacgtggaggagaatcccgggcctatggactggatttggcgcatccttttccttgtcggcgctgctaccggcgcgcattccttcgaacaagttcagcttcaacagcctggcgctgagctggtcaaacctggcgcttctgtgaagatgagctgcaaagccagcggctacgccttcagcagctactggatcaactggatgaagcagaaacccggccagggactcgaatggatcggccaaatctatcccggcgacggcgacaccaactacaacggcaagttcaagggcagagccacactgaccgccgatacctctagcagcacagcctacatgcagctgagcagcctgaccagcgaagatagcgccgtgtacttctgtgcccggtccatcacaacagtcgtgggctgcgctatggactattggggccagggaacaagcgtgaccgtgtctagtacgcgtgcctctacaaagggaccctccgtgtttcctctggctcccagcagcaagtctacaagcggaggaacagccgctctgggctgcctggtcaaggattactttcccgagcctgtgaccgtgtcctggaatagcggagcactgacaagcggcgtgcacacctttccagccgtgctgcaaagcagcggcctgtactctctgagcagcgtggtcacagtgcctagctctagcctgggcacccagacctacatctgcaatgtgaaccacaagcctagcaacaccaaggtggacaagagagtggaacccaagagctgtggtaccaacaaaattcttgtgaagcagtccccaatgctcgtcgcctatgataatgccgtgaatctgtcctgcaaatactcctacaatctgtttagccgcgagtttagggcctcactgcacaagggccttgacagcgccgtggaagtctgtgtggtctatggaaattactcccagcaactgcaagtgtactctaagacggggttcaactgtgatggaaaactgggaaacgagtccgtgacgttttacctccaaaatctctatgtcaatcaaacggacatctatttctgcaaaattgaagtcatgtatcctccgccgtacctcgataacgagaaaagcaatgggacgatcattcacgtcaagggaaaacatctctgccccagtcctctgttccctgggccttccaaaccattttgggttctcgtcgtcgtcggcggagtcctggcttgttattctctgcttgtgacagtcgcctttatcatattctgggtccgctccaagagaagcagactgctccactccgattatatgaatatgacacccaggcggccagggcctacacggaaacactatcaaccctacgctccacctcgggatttcgctgcctacagatcaagctctagacgggttaagttttccagatccgcagacgcacccgcttaccaacaagggcagaaccaactctacaatgaacttaatttggggcggagggaagagtacgacgttctggacaaaaggaggggacgagatcccgagatgggcggaaagcctcagcgaaggaagaatccgcaagaggggctttataacgaactccagaaagataaaatggcagaagcctatagtgagattgggatgaagggagaaaggaggaggggtaaaggtcacgatgggttgtaccaaggattgagcacagccactaaagatacctatgatgcgctccacatgcaggccctgccgccaagacgcgccaagagaagcggatctggcgtgaagcagaccctgaatttcgacctgctgaagctggctggcgacgtggaatccaacccaggccctggccatatgaccgagtacaagcccacggtgcgcctcgccacccgcgacgacgtccccagggccgtacgcaccctcgccgccgcgttcgccgactaccccgccacgcgccacaccgtcgatccggaccgccacatcgagcgggtcaccgagctgcaagaactcttcctcacgcgcgtcgggctcgacatcggcaaggtgtgggtcgcggacgacggcgccgcggtggcggtctggaccacgccggagagcgtcgaagcgggggcggtgttcgccgagatcggcccgcgcatggccgagttgagcggttcccggctggccgcgcagcaacagatggaaggcctcctggcgccgcaccggcccaaggagcccgcgtggttcctggccaccgtcggcgtctcgcccgaccaccagggcaagggtctgggcagcgccgtcgtgctccccggagtggaggcggccgagcgcgccggggtgcccgccttcctggagacctccgcgccccgcaacctccccttctacgagcggctcggcttcaccgtcaccgccgacgtcgaggtgcccgaaggaccgcgcacctggtgcatgacccgcaagcccggtgcctga

SEQ ID NO: 6000 - DNA, 4560 bp, Artificial Sequence
  Synthetic Polynucleotide
atggccttaccagtgaccgccttgctcctgccgctggccttgctgctccacgccgccaggccggaagtgcagctggttgaatctggcggaggactggttcaggctggcggatctctgagactgtcttgtgccgccagcggcagaacctttagcatgggctggtttagacaggcccctggcaaagagagagagttcgtcgccgccatcacatactctggcggcagcccttactacgccgactctgtgaagggcagattcaccatcagccgggacaacgccaagaacaccgtgtacctccagatgaacagcctgaagcctgaggacaccgccgtgtactactgcgccgccaatccaacatacggcagcgactggaacgccgagaattggggccagggaacccaagtgacagtgtctagcggtaccggcggaggcggatctggcggcggaggtagcggtggcggaggatctgaattcgacatccagatgacacagagccctagcagcctgtctgccagcgtgggagacagagtgaccatcacatgcaaggccagcgaccacatcaacaactggctggcctggtatcagcagaagcctggacaggcccctaagctgctgatctacggcgctaccacactggaaacaggcgtgcccagcagattttctggcagcggctctggcaccgactacaccctgacaatatccagcctccagcctgaggacttcgccacctactactgtcagcagagctggaacaccccttggacattcggccagggcaccaagctggaaatcaagagactcgagggacagcctaaggccaatcctaccgtgacactgttccctccaagcagcgaagaactccaggccaacaaggccacacttgtgtgcctgatctccgacttctaccctggggctgtgacagtggcttggaaggccgatggatctcctgtgaaagccggcgtggaaaccaccaagccatccaagcagagcaacaacaaatacgccgccagctcctacctgagcctgacacctgagcagtggaagtcccacagatcctacagctgccaagtgacccacgaaggcagcaccgtggaaaagacagtggcccctacagagtgcagcggatccaacaagatcctggtcaagcagagccctatgctggtggcctacgacaacgccgtgaacctgagctgcaagtacagctacaacctgttcagcagagagttccgggccagcctgcacaaaggactggattctgctgtggaagtgtgcgtggtgtacggcaactacagccagcagctccaggtgtacagcaagaccggcttcaactgcgacggcaagctgggcaatgagagcgtgaccttctacctgcaaaacctgtacgtgaaccagaccgacatctatttctgcaagatcgaagtgatgtacccgcctccttacctggacaacgagaagtccaacggcaccatcatccacgtgaagggcaagcacctgtgtccttctccactgttccccggacctagcaagcctttctgggtgctcgttgttgttggcggcgtgctggcctgttatagcctgctggttaccgtggccttcatcatcttttgggtccgaagcaagcggagccggctgctgcacagcgactacatgaacatgacccctagacggcccggaccaaccagaaagcactaccagccttacgctcctcctagagacttcgccgcctatagaagtagcactagtagagtgaagttcagcagaagcgccgacgcccctgcctaccagcagggacagaaccaactgtacaacgagctgaacctgggcagacgggaagagtacgacgtgctggacaagcggagaggcagggaccctgagatgggcggaaagccccagcggagaaagaacccccaggaaggactgtataacgaactccagaaagacaagatggccgaagcctacagcgagatcggcatgaagggcgagcggagaagaggcaagggccacgatggcctgtaccagggcctgagcaccgccaccaaggacacctatgacgccctgcacatgcaggccctgcctccaagaagggccaagcgatctggatctggagcaacaaacttctcactactcaaacaagcaggtgacgtggaggagaatcccgggcctatggactggatttggcgcatccttttccttgtcggcgctgctaccggcgcgcattccttcgaacaagttcagcttcaacagcctggcgctgagctggtcaaacctggcgcttctgtgaagatgagctgcaaagccagcggctacgccttcagcagctactggatcaactggatgaagcagaaacccggccagggactcgaatggatcggccaaatctatcccggcgacggcgacaccaactacaacggcaagttcaagggcagagccacactgaccgccgatacctctagcagcacagcctacatgcagctgagcagcctgaccagcgaagatagcgccgtgtacttctgtgcccggtccatcacaacagtcgtgggctgcgctatggactattggggccagggaacaagcgtgaccgtgtctagtacgcgtgcctctacaaagggaccctccgtgtttcctctggctcccagcagcaagtctacaagcggaggaacagccgctctgggctgcctggtcaaggattactttcccgagcctgtgaccgtgtcctggaatagcggagcactgacaagcggcgtgcacacctttccagccgtgctgcaaagcagcggcctgtactctctgagcagcgtggtcacagtgcctagctctagcctgggcacccagacctacatctgcaatgtgaaccacaagcctagcaacaccaaggtggacaagagagtggaacccaagagctgtggtaccaacaaaattcttgtgaagcagtccccaatgctcgtcgcctatgataatgccgtgaatctgtcctgcaaatactcctacaatctgtttagccgcgagtttagggcctcactgcacaagggccttgacagcgccgtggaagtctgtgtggtctatggaaattactcccagcaactgcaagtgtactctaagacggggttcaactgtgatggaaaactgggaaacgagtccgtgacgttttacctccaaaatctctatgtcaatcaaacggacatctatttctgcaaaattgaagtcatgtatcctccgccgtacctcgataacgagaaaagcaatgggacgatcattcacgtcaagggaaaacatctctgccccagtcctctgttccctgggccttccaaaccattttgggttctcgtcgtcgtcggcggagtcctggcttgttattctctgcttgtgacagtcgcctttatcatattctgggtccgctccaagagaagcagactgctccactccgattatatgaatatgacacccaggcggccagggcctacacggaaacactatcaaccctacgctccacctcgggatttcgctgcctacagatcaagctctagacgggttaagttttccagatccgcagacgcacccgcttaccaacaagggcagaaccaactctacaatgaacttaatttggggcggagggaagagtacgacgttctggacaaaaggaggggacgagatcccgagatgggcggaaagcctcagcgaaggaagaatccgcaagaggggctttataacgaactccagaaagataaaatggcagaagcctatagtgagattgggatgaagggagaaaggaggaggggtaaaggtcacgatgggttgtaccaaggattgagcacagccactaaagatacctatgatgcgctccacatgcaggccctgccgccaagacgcgccaagagaagcggatctggcgtgaagcagaccctgaatttcgacctgctgaagctggctggcgacgtggaatccaacccaggccctggccatatgaccgagtacaagcccacggtgcgcctcgccacccgcgacgacgtccccagggccgtacgcaccctcgccgccgcgttcgccgactaccccgccacgcgccacaccgtcgatccggaccgccacatcgagcgggtcaccgagctgcaagaactcttcctcacgcgcgtcgggctcgacatcggcaaggtgtgggtcgcggacgacggcgccgcggtggcggtctggaccacgccggagagcgtcgaagcgggggcggtgttcgccgagatcggcccgcgcatggccgagttgagcggttcccggctggccgcgcagcaacagatggaaggcctcctggcgccgcaccggcccaaggagcccgcgtggttcctggccaccgtcggcgtctcgcccgaccaccagggcaagggtctgggcagcgccgtcgtgctccccggagtggaggcggccgagcgcgccggggtgcccgccttcctggagacctccgcgccccgcaacctccccttctacgagcggctcggcttcaccgtcaccgccgacgtcgaggtgcccgaaggaccgcgcacctggtgcatgacccgcaagcccggtgcctga

SEQ ID NO: 6001 - DNA, 4971 bp, Artificial Sequence
  Synthetic Polynucleotide
atggccttaccagtgaccgccttgctcctgccgctggccttgctgctccacgccgccaggccggaagtgcagctggttgaatctggcggaggactggttcaggctggcggatctctgagactgtcttgtgccgccagcggcagaacctttagcatgggctggtttagacaggcccctggcaaagagagagagttcgtcgccgccatcacatactctggcggcagcccttactacgccgactctgtgaagggcagattcaccatcagccgggacaacgccaagaacaccgtgtacctccagatgaacagcctgaagcctgaggacaccgccgtgtactactgcgccgccaatccaacatacggcagcgactggaacgccgagaattggggccagggaacccaagtgacagtgtctagcggtaccggcggaggcggatctggcggcggaggtagcggtggcggaggatctgaattcgacatccagatgacacagagccctagcagcctgtctgccagcgtgggagacagagtgaccatcacatgcaaggccagcgaccacatcaacaactggctggcctggtatcagcagaagcctggacaggcccctaagctgctgatctacggcgctaccacactggaaacaggcgtgcccagcagattttctggcagcggctctggcaccgactacaccctgacaatatccagcctccagcctgaggacttcgccacctactactgtcagcagagctggaacaccccttggacattcggccagggcaccaagctggaaatcaagagactcgagggacagcctaaggccaatcctaccgtgacactgttccctccaagcagcgaagaactccaggccaacaaggccacacttgtgtgcctgatctccgacttctaccctggggctgtgacagtggcttggaaggccgatggatctcctgtgaaagccggcgtggaaaccaccaagccatccaagcagagcaacaacaaatacgccgccagctcctacctgagcctgacacctgagcagtggaagtcccacagatcctacagctgccaagtgacccacgaaggcagcaccgtggaaaagacagtggcccctacagagtgcagcggatccaacaagatcctggtcaagcagagccctatgctggtggcctacgacaacgccgtgaacctgagctgcaagtacagctacaacctgttcagcagagagttccgggccagcctgcacaaaggactggattctgctgtggaagtgtgcgtggtgtacggcaactacagccagcagctccaggtgtacagcaagaccggcttcaactgcgacggcaagctgggcaatgagagcgtgaccttctacctgcaaaacctgtacgtgaaccagaccgacatctatttctgcaagatcgaagtgatgtacccgcctccttacctggacaacgagaagtccaacggcaccatcatccacgtgaagggcaagcacctgtgtccttctccactgttccccggacctagcaagcctttctgggtgctcgttgttgttggcggcgtgctggcctgttatagcctgctggttaccgtggccttcatcatcttttgggtccgaagcaagcggagccggctgctgcacagcgactacatgaacatgacccctagacggcccggaccaaccagaaagcactaccagccttacgctcctcctagagacttcgccgcctatagaagtagcactagtagagtgaagttcagcagaagcgccgacgcccctgcctaccagcagggacagaaccaactgtacaacgagctgaacctgggcagacgggaagagtacgacgtgctggacaagcggagaggcagggaccctgagatgggcggaaagccccagcggagaaagaacccccaggaaggactgtataacgaactccagaaagacaagatggccgaagcctacagcgagatcggcatgaagggcgagcggagaagaggcaagggccacgatggcctgtaccagggcctgagcaccgccaccaaggacacctatgacgccctgcacatgcaggccctgcctccaagaagggccaagcgatctggatctggagcaacaaacttctcactactcaaacaagcaggtgacgtggaggagaatcccgggcctatggactggatttggcgcatccttttccttgtcggcgctgctaccggcgcgcattccgggcccgaagtgcaactggttgaatccggtggcggcctggtgcaagcaggcggatctctcagacttagctgtgccgcctccggcagaaccttcacaatgggatggtttaggcaggctccagggaaagagagagagttcgtcgccgccatctctctgtctcccacactggcctactacgccgactctgtgaaaggccggttcaccatctccagagataatgccaagaacaccgtggtgctgcaaatgaactctctgaaacccgaggatacagccctgtactattgtgccgctgaccggaagtccgtgatgagcatcagacccgattactggggacagggcacacaagtcacagtgtcctctggatccggcggcggaggatctggcggaggcggatctgggggcggaggctctttcgaacaagttcagcttcaacagcctggcgctgagctggtcaaacctggcgcttctgtgaagatgagctgcaaagccagcggctacgccttcagcagctactggatcaactggatgaagcagaaacccggccagggactcgaatggatcggccaaatctatcccggcgacggcgacaccaactacaacggcaagttcaagggcagagccacactgaccgccgatacctctagcagcacagcctacatgcagctgagcagcctgaccagcgaagatagcgccgtgtacttctgtgcccggtccatcacaacagtcgtgggctgcgctatggactattggggccagggaacaagcgtgaccgtgtctagtacgcgtgcctctacaaagggaccctccgtgtttcctctggctcccagcagcaagtctacaagcggaggaacagccgctctgggctgcctggtcaaggattactttcccgagcctgtgaccgtgtcctggaatagcggagcactgacaagcggcgtgcacacctttccagccgtgctgcaaagcagcggcctgtactctctgagcagcgtggtcacagtgcctagctctagcctgggcacccagacctacatctgcaatgtgaaccacaagcctagcaacaccaaggtggacaagagagtggaacccaagagctgtggtaccaacaaaattcttgtgaagcagtccccaatgctcgtcgcctatgataatgccgtgaatctgtcctgcaaatactcctacaatctgtttagccgcgagtttagggcctcactgcacaagggccttgacagcgccgtggaagtctgtgtggtctatggaaattactcccagcaactgcaagtgtactctaagacggggttcaactgtgatggaaaactgggaaacgagtccgtgacgttttacctccaaaatctctatgtcaatcaaacggacatctatttctgcaaaattgaagtcatgtatcctccgccgtacctcgataacgagaaaagcaatgggacgatcattcacgtcaagggaaaacatctctgccccagtcctctgttccctgggccttccaaaccattttgggttctcgtcgtcgtcggcggagtcctggcttgttattctctgcttgtgacagtcgcctttatcatattctgggtccgctccaagagaagcagactgctccactccgattatatgaatatgacacccaggcggccagggcctacacggaaacactatcaaccctacgctccacctcgggatttcgctgcctacagatcaagctctagacgggttaagttttccagatccgcagacgcacccgcttaccaacaagggcagaaccaactctacaatgaacttaatttggggcggagggaagagtacgacgttctggacaaaaggaggggacgagatcccgagatgggcggaaagcctcagcgaaggaagaatccgcaagaggggctttataacgaactccagaaagataaaatggcagaagcctatagtgagattgggatgaagggagaaaggaggaggggtaaaggtcacgatgggttgtaccaaggattgagcacagccactaaagatacctatgatgcgctccacatgcaggccctgccgccaagacgcgccaagagaagcggatctggcgtgaagcagaccctgaatttcgacctgctgaagctggctggcgacgtggaatccaacccaggccctggccatatgaccgagtacaagcccacggtgcgcctcgccacccgcgacgacgtccccagggccgtacgcaccctcgccgccgcgttcgccgactaccccgccacgcgccacaccgtcgatccggaccgccacatcgagcgggtcaccgagctgcaagaactcttcctcacgcgcgtcgggctcgacatcggcaaggtgtgggtcgcggacgacggcgccgcggtggcggtctggaccacgccggagagcgtcgaagcgggggcggtgttcgccgagatcggcccgcgcatggccgagttgagcggttcccggctggccgcgcagcaacagatggaaggcctcctggcgccgcaccggcccaaggagcccgcgtggttcctggccaccgtcggcgtctcgcccgaccaccagggcaagggtctgggcagcgccgtcgtgctccccggagtggaggcggccgagcgcgccggggtgcccgccttcctggagacctccgcgccccgcaacctccccttctacgagcggctcggcttcaccgtcaccgccgacgtcgaggtgcccgaaggaccgcgcacctggtgcatgacccgcaagcccggtgcctga

SEQ ID NO: 6002 - DNA, 4170 bp, Artificial Sequence
  Synthetic Polynucleotide
atggccttaccagtgaccgccttgctcctgccgctggccttgctgctccacgccgccaggccggaagtgcagctggttgaatctggcggaggactggttcaggctggcggatctctgagactgtcttgtgccgccagcggcagaacctttagcatgggctggtttagacaggcccctggcaaagagagagagttcgtcgccgccatcacatactctggcggcagcccttactacgccgactctgtgaagggcagattcaccatcagccgggacaacgccaagaacaccgtgtacctccagatgaacagcctgaagcctgaggacaccgccgtgtactactgcgccgccaatccaacatacggcagcgactggaacgccgagaattggggccagggaacccaagtgacagtgtctagcctcgagggacagcctaaggccaatcctaccgtgacactgttccctccaagcagcgaagaactccaggccaacaaggccacacttgtgtgcctgatctccgacttctaccctggggctgtgacagtggcttggaaggccgatggatctcctgtgaaagccggcgtggaaaccaccaagccatccaagcagagcaacaacaaatacgccgccagctcctacctgagcctgacacctgagcagtggaagtcccacagatcctacagctgccaagtgacccacgaaggcagcaccgtggaaaagacagtggcccctacagagtgcagcggatccaacaagatcctggtcaagcagagccctatgctggtggcctacgacaacgccgtgaacctgagctgcaagtacagctacaacctgttcagcagagagttccgggccagcctgcacaaaggactggattctgctgtggaagtgtgcgtggtgtacggcaactacagccagcagctccaggtgtacagcaagaccggcttcaactgcgacggcaagctgggcaatgagagcgtgaccttctacctgcaaaacctgtacgtgaaccagaccgacatctatttctgcaagatcgaagtgatgtacccgcctccttacctggacaacgagaagtccaacggcaccatcatccacgtgaagggcaagcacctgtgtccttctccactgttccccggacctagcaagcctttctgggtgctcgttgttgttggcggcgtgctggcctgttatagcctgctggttaccgtggccttcatcatcttttgggtccgaagcaagcggagccggctgctgcacagcgactacatgaacatgacccctagacggcccggaccaaccagaaagcactaccagccttacgctcctcctagagacttcgccgcctatagaagtagcactagtagagtgaagttcagcagaagcgccgacgcccctgcctaccagcagggacagaaccaactgtacaacgagctgaacctgggcagacgggaagagtacgacgtgctggacaagcggagaggcagggaccctgagatgggcggaaagccccagcggagaaagaacccccaggaaggactgtataacgaactccagaaagacaagatggccgaagcctacagcgagatcggcatgaagggcgagcggagaagaggcaagggccacgatggcctgtaccagggcctgagcaccgccaccaaggacacctatgacgccctgcacatgcaggccctgcctccaagaagggccaagcgatctggatctggagcaacaaacttctcactactcaaacaagcaggtgacgtggaggagaatcccgggcctatggactggatttggcgcatccttttccttgtcggcgctgctaccggcgcgcattccgggcccgaagtgcaactggttgaatccggtggcggcctggtgcaagcaggcggatctctcagacttagctgtgccgcctccggcagaaccttcacaatgggatggtttaggcaggctccagggaaagagagagagttcgtcgccgccatctctctgtctcccacactggcctactacgccgactctgtgaaaggccggttcaccatctccagagataatgccaagaacaccgtggtgctgcaaatgaactctctgaaacccgaggatacagccctgtactattgtgccgctgaccggaagtccgtgatgagcatcagacccgattactggggacagggcacacaagtcacagtgtcctctacgcgtgcctctacaaagggaccctccgtgtttcctctggctcccagcagcaagtctacaagcggaggaacagccgctctgggctgcctggtcaaggattactttcccgagcctgtgaccgtgtcctggaatagcggagcactgacaagcggcgtgcacacctttccagccgtgctgcaaagcagcggcctgtactctctgagcagcgtggtcacagtgcctagctctagcctgggcacccagacctacatctgcaatgtgaaccacaagcctagcaacaccaaggtggacaagagagtggaacccaagagctgtggtaccaacaaaattcttgtgaagcagtccccaatgctcgtcgcctatgataatgccgtgaatctgtcctgcaaatactcctacaatctgtttagccgcgagtttagggcctcactgcacaagggccttgacagcgccgtggaagtctgtgtggtctatggaaattactcccagcaactgcaagtgtactctaagacggggttcaactgtgatggaaaactgggaaacgagtccgtgacgttttacctccaaaatctctatgtcaatcaaacggacatctatttctgcaaaattgaagtcatgtatcctccgccgtacctcgataacgagaaaagcaatgggacgatcattcacgtcaagggaaaacatctctgccccagtcctctgttccctgggccttccaaaccattttgggttctcgtcgtcgtcggcggagtcctggcttgttattctctgcttgtgacagtcgcctttatcatattctgggtccgctccaagagaagcagactgctccactccgattatatgaatatgacacccaggcggccagggcctacacggaaacactatcaaccctacgctccacctcgggatttcgctgcctacagatcaagctctagacgggttaagttttccagatccgcagacgcacccgcttaccaacaagggcagaaccaactctacaatgaacttaatttggggcggagggaagagtacgacgttctggacaaaaggaggggacgagatcccgagatgggcggaaagcctcagcgaaggaagaatccgcaagaggggctttataacgaactccagaaagataaaatggcagaagcctatagtgagattgggatgaagggagaaaggaggaggggtaaaggtcacgatgggttgtaccaaggattgagcacagccactaaagatacctatgatgcgctccacatgcaggccctgccgccaagacgcgccaagagaagcggatctggcgtgaagcagaccctgaatttcgacctgctgaagctggctggcgacgtggaatccaacccaggccctggccatatgaccgagtacaagcccacggtgcgcctcgccacccgcgacgacgtccccagggccgtacgcaccctcgccgccgcgttcgccgactaccccgccacgcgccacaccgtcgatccggaccgccacatcgagcgggtcaccgagctgcaagaactcttcctcacgcgcgtcgggctcgacatcggcaaggtgtgggtcgcggacgacggcgccgcggtggcggtctggaccacgccggagagcgtcgaagcgggggcggtgttcgccgagatcggcccgcgcatggccgagttgagcggttcccggctggccgcgcagcaacagatggaaggcctcctggcgccgcaccggcccaaggagcccgcgtggttcctggccaccgtcggcgtctcgcccgaccaccagggcaagggtctgggcagcgccgtcgtgctccccggagtggaggcggccgagcgcgccggggtgcccgccttcctggagacctccgcgccccgcaacctccccttctacgagcggctcggcttcaccgtcaccgccgacgtcgaggtgcccgaaggaccgcgcacctggtgcatgacccgcaagcccggtgcctga

SEQ ID NO: 6003 - DNA, 4194 bp, Artificial Sequence
  Synthetic Polynucleotide
atggccttaccagtgaccgccttgctcctgccgctggccttgctgctccacgccgccaggccggacatccagatgacacagagccctagcagcctgtctgccagcgtgggagacagagtgaccatcacatgcaaggccagcgaccacatcaacaactggctggcctggtatcagcagaagcctggacaggcccctaagctgctgatctacggcgctaccacactggaaacaggcgtgcccagcagattttctggcagcggctctggcaccgactacaccctgacaatatccagcctccagcctgaggacttcgccacctactactgtcagcagagctggaacaccccttggacattcggccagggcaccaagctggaaatcaagagactcgaggacctgaagaacgtgttcccacctgaggtggccgtgttcgagcctagcgaggccgagatcagccacacccagaaagccaccctcgtgtgcctggctaccggcttctaccccgaccatgtggaactgtcttggtgggtcaacggcaaagaggtgcacagcggcgtgtctaccgacccccagccactgaaagaacagcccgccctgaacgacagccggtactgcctgagcagcagactgagagtgtccgccaccttctggcagaacccccggaaccacttcagatgccaggtgcagttctacggcctgagcgagaacgacgagtggacccaggacagagccaagcccgtgacccagatcgtgtctgccgaagcctggggcagagccgattgcggatccaacaagatcctggtcaagcagagccctatgctggtggcctacgacaacgccgtgaacctgagctgcaagtacagctacaacctgttcagcagagagttccgggccagcctgcacaaaggactggattctgctgtggaagtgtgcgtggtgtacggcaactacagccagcagctccaggtgtacagcaagaccggcttcaactgcgacggcaagctgggcaatgagagcgtgaccttctacctgcaaaacctgtacgtgaaccagaccgacatctatttctgcaagatcgaagtgatgtacccgcctccttacctggacaacgagaagtccaacggcaccatcatccacgtgaagggcaagcacctgtgtccttctccactgttccccggacctagcaagcctttctgggtgctcgttgttgttggcggcgtgctggcctgttatagcctgctggttaccgtggccttcatcatcttttgggtccgaagcaagcggagccggctgctgcacagcgactacatgaacatgacccctagacggcccggaccaaccagaaagcactaccagccttacgctcctcctagagacttcgccgcctatagaagtagcactagtagagtgaagttcagcagaagcgccgacgcccctgcctaccagcagggacagaaccaactgtacaacgagctgaacctgggcagacgggaagagtacgacgtgctggacaagcggagaggcagggaccctgagatgggcggaaagccccagcggagaaagaacccccaggaaggactgtataacgaactccagaaagacaagatggccgaagcctacagcgagatcggcatgaagggcgagcggagaagaggcaagggccacgatggcctgtaccagggcctgagcaccgccaccaaggacacctatgacgccctgcacatgcaggccctgcctccaagaagggccaagcgatctggatctggagcaacaaacttctcactactcaaacaagcaggtgacgtggaggagaatcccgggcctatggactggatttggcgcatccttttccttgtcggcgctgctaccggcgcgcattccttcgaacaagttcagcttcaacagcctggcgctgagctggtcaaacctggcgcttctgtgaagatgagctgcaaagccagcggctacgccttcagcagctactggatcaactggatgaagcagaaacccggccagggactcgaatggatcggccaaatctatcccggcgacggcgacaccaactacaacggcaagttcaagggcagagccacactgaccgccgatacctctagcagcacagcctacatgcagctgagcagcctgaccagcgaagatagcgccgtgtacttctgtgcccggtccatcacaacagtcgtgggctgcgctatggactattggggccagggaacaagcgtgaccgtgtctagtacgcgtatccagaaccctgatcctgccgtgtaccagctgcgggatagcaagagcagcgacaagagcgtgtgtctgttcaccgacttcgacagccagaccaacgtgtcccagagcaaggactccgacgtgtacatcaccgataagaccgtgctggacatgcggagcatggacttcaagagcaactccgccgtggcctggtccaacaagtccgatttcgcctgcgccaacgccttcaacaacagcattatccccgaggacacattcttcccaagccccgagagcagctgcggtaccaacaaaattcttgtgaagcagtccccaatgctcgtcgcctatgataatgccgtgaatctgtcctgcaaatactcctacaatctgtttagccgcgagtttagggcctcactgcacaagggccttgacagcgccgtggaagtctgtgtggtctatggaaattactcccagcaactgcaagtgtactctaagacggggttcaactgtgatggaaaactgggaaacgagtccgtgacgttttacctccaaaatctctatgtcaatcaaacggacatctatttctgcaaaattgaagtcatgtatcctccgccgtacctcgataacgagaaaagcaatgggacgatcattcacgtcaagggaaaacatctctgccccagtcctctgttccctgggccttccaaaccattttgggttctcgtcgtcgtcggcggagtcctggcttgttattctctgcttgtgacagtcgcctttatcatattctgggtccgctccaagagaagcagactgctccactccgattatatgaatatgacacccaggcggccagggcctacacggaaacactatcaaccctacgctccacctcgggatttcgctgcctacagatcaagctctagacgggttaagttttccagatccgcagacgcacccgcttaccaacaagggcagaaccaactctacaatgaacttaatttggggcggagggaagagtacgacgttctggacaaaaggaggggacgagatcccgagatgggcggaaagcctcagcgaaggaagaatccgcaagaggggctttataacgaactccagaaagataaaatggcagaagcctatagtgagattgggatgaagggagaaaggaggaggggtaaaggtcacgatgggttgtaccaaggattgagcacagccactaaagatacctatgatgcgctccacatgcaggccctgccgccaagacgcgccaagagaagcggatctggcgtgaagcagaccctgaatttcgacctgctgaagctggctggcgacgtggaatccaacccaggccctggccatatgaccgagtacaagcccacggtgcgcctcgccacccgcgacgacgtccccagggccgtacgcaccctcgccgccgcgttcgccgactaccccgccacgcgccacaccgtcgatccggaccgccacatcgagcgggtcaccgagctgcaagaactcttcctcacgcgcgtcgggctcgacatcggcaaggtgtgggtcgcggacgacggcgccgcggtggcggtctggaccacgccggagagcgtcgaagcgggggcggtgttcgccgagatcggcccgcgcatggccgagttgagcggttcccggctggccgcgcagcaacagatggaaggcctcctggcgccgcaccggcccaaggagcccgcgtggttcctggccaccgtcggcgtctcgcccgaccaccagggcaagggtctgggcagcgccgtcgtgctccccggagtggaggcggccgagcgcgccggggtgcccgccttcctggagacctccgcgccccgcaacctccccttctacgagcggctcggcttcaccgtcaccgccgacgtcgaggtgcccgaaggaccgcgcacctggtgcatgacccgcaagcccggtgcctga

SEQ ID NO: 6004 - DNA, 4605 bp, Artificial Sequence
  Synthetic Polynucleotide
atggccttaccagtgaccgccttgctcctgccgctggccttgctgctccacgccgccaggccggaagtgcagctggttgaatctggcggaggactggttcaggctggcggatctctgagactgtcttgtgccgccagcggcagaacctttagcatgggctggtttagacaggcccctggcaaagagagagagttcgtcgccgccatcacatactctggcggcagcccttactacgccgactctgtgaagggcagattcaccatcagccgggacaacgccaagaacaccgtgtacctccagatgaacagcctgaagcctgaggacaccgccgtgtactactgcgccgccaatccaacatacggcagcgactggaacgccgagaattggggccagggaacccaagtgacagtgtctagcggtaccggcggaggcggatctggcggcggaggtagcggtggcggaggatctgaattcgacatccagatgacacagagccctagcagcctgtctgccagcgtgggagacagagtgaccatcacatgcaaggccagcgaccacatcaacaactggctggcctggtatcagcagaagcctggacaggcccctaagctgctgatctacggcgctaccacactggaaacaggcgtgcccagcagattttctggcagcggctctggcaccgactacaccctgacaatatccagcctccagcctgaggacttcgccacctactactgtcagcagagctggaacaccccttggacattcggccagggcaccaagctggaaatcaagagactcgaggacctgaagaacgtgttcccacctgaggtggccgtgttcgagcctagcgaggccgagatcagccacacccagaaagccaccctcgtgtgcctggctaccggcttctaccccgaccatgtggaactgtcttggtgggtcaacggcaaagaggtgcacagcggcgtgtctaccgacccccagccactgaaagaacagcccgccctgaacgacagccggtactgcctgagcagcagactgagagtgtccgccaccttctggcagaacccccggaaccacttcagatgccaggtgcagttctacggcctgagcgagaacgacgagtggacccaggacagagccaagcccgtgacccagatcgtgtctgccgaagcctggggcagagccgattgcggatccaacaagatcctggtcaagcagagccctatgctggtggcctacgacaacgccgtgaacctgagctgcaagtacagctacaacctgttcagcagagagttccgggccagcctgcacaaaggactggattctgctgtggaagtgtgcgtggtgtacggcaactacagccagcagctccaggtgtacagcaagaccggcttcaactgcgacggcaagctgggcaatgagagcgtgaccttctacctgcaaaacctgtacgtgaaccagaccgacatctatttctgcaagatcgaagtgatgtacccgcctccttacctggacaacgagaagtccaacggcaccatcatccacgtgaagggcaagcacctgtgtccttctccactgttccccggacctagcaagcctttctgggtgctcgttgttgttggcggcgtgctggcctgttatagcctgctggttaccgtggccttcatcatcttttgggtccgaagcaagcggagccggctgctgcacagcgactacatgaacatgacccctagacggcccggaccaaccagaaagcactaccagccttacgctcctcctagagacttcgccgcctatagaagtagcactagtagagtgaagttcagcagaagcgccgacgcccctgcctaccagcagggacagaaccaactgtacaacgagctgaacctgggcagacgggaagagtacgacgtgctggacaagcggagaggcagggaccctgagatgggcggaaagccccagcggagaaagaacccccaggaaggactgtataacgaactccagaaagacaagatggccgaagcctacagcgagatcggcatgaagggcgagcggagaagaggcaagggccacgatggcctgtaccagggcctgagcaccgccaccaaggacacctatgacgccctgcacatgcaggccctgcctccaagaagggccaagcgatctggatctggagcaacaaacttctcactactcaaacaagcaggtgacgtggaggagaatcccgggcctatggactggatttggcgcatccttttccttgtcggcgctgctaccggcgcgcattccttcgaacaagttcagcttcaacagcctggcgctgagctggtcaaacctggcgcttctgtgaagatgagctgcaaagccagcggctacgccttcagcagctactggatcaactggatgaagcagaaacccggccagggactcgaatggatcggccaaatctatcccggcgacggcgacaccaactacaacggcaagttcaagggcagagccacactgaccgccgatacctctagcagcacagcctacatgcagctgagcagcctgaccagcgaagatagcgccgtgtacttctgtgcccggtccatcacaacagtcgtgggctgcgctatggactattggggccagggaacaagcgtgaccgtgtctagtacgcgtatccagaaccctgatcctgccgtgtaccagctgcgggatagcaagagcagcgacaagagcgtgtgtctgttcaccgacttcgacagccagaccaacgtgtcccagagcaaggactccgacgtgtacatcaccgataagaccgtgctggacatgcggagcatggacttcaagagcaactccgccgtggcctggtccaacaagtccgatttcgcctgcgccaacgccttcaacaacagcattatccccgaggacacattcttcccaagccccgagagcagctgcggtaccaacaaaattcttgtgaagcagtccccaatgctcgtcgcctatgataatgccgtgaatctgtcctgcaaatactcctacaatctgtttagccgcgagtttagggcctcactgcacaagggccttgacagcgccgtggaagtctgtgtggtctatggaaattactcccagcaactgcaagtgtactctaagacggggttcaactgtgatggaaaactgggaaacgagtccgtgacgttttacctccaaaatctctatgtcaatcaaacggacatctatttctgcaaaattgaagtcatgtatcctccgccgtacctcgataacgagaaaagcaatgggacgatcattcacgtcaagggaaaacatctctgccccagtcctctgttccctgggccttccaaaccattttgggttctcgtcgtcgtcggcggagtcctggcttgttattctctgcttgtgacagtcgcctttatcatattctgggtccgctccaagagaagcagactgctccactccgattatatgaatatgacacccaggcggccagggcctacacggaaacactatcaaccctacgctccacctcgggatttcgctgcctacagatcaagctctagacgggttaagttttccagatccgcagacgcacccgcttaccaacaagggcagaaccaactctacaatgaacttaatttggggcggagggaagagtacgacgttctggacaaaaggaggggacgagatcccgagatgggcggaaagcctcagcgaaggaagaatccgcaagaggggctttataacgaactccagaaagataaaatggcagaagcctatagtgagattgggatgaagggagaaaggaggaggggtaaaggtcacgatgggttgtaccaaggattgagcacagccactaaagatacctatgatgcgctccacatgcaggccctgccgccaagacgcgccaagagaagcggatctggcgtgaagcagaccctgaatttcgacctgctgaagctggctggcgacgtggaatccaacccaggccctggccatatgaccgagtacaagcccacggtgcgcctcgccacccgcgacgacgtccccagggccgtacgcaccctcgccgccgcgttcgccgactaccccgccacgcgccacaccgtcgatccggaccgccacatcgagcgggtcaccgagctgcaagaactcttcctcacgcgcgtcgggctcgacatcggcaaggtgtgggtcgcggacgacggcgccgcggtggcggtctggaccacgccggagagcgtcgaagcgggggcggtgttcgccgagatcggcccgcgcatggccgagttgagcggttcccggctggccgcgcagcaacagatggaaggcctcctggcgccgcaccggcccaaggagcccgcgtggttcctggccaccgtcggcgtctcgcccgaccaccagggcaagggtctgggcagcgccgtcgtgctccccggagtggaggcggccgagcgcgccggggtgcccgccttcctggagacctccgcgccccgcaacctccccttctacgagcggctcggcttcaccgtcaccgccgacgtcgaggtgcccgaaggaccgcgcacctggtgcatgacccgcaagcccggtgcctga

SEQ ID NO: 6005 - DNA, 5016 bp, Artificial Sequence
  Synthetic Polynucleotide
atggccttaccagtgaccgccttgctcctgccgctggccttgctgctccacgccgccaggccggaagtgcagctggttgaatctggcggaggactggttcaggctggcggatctctgagactgtcttgtgccgccagcggcagaacctttagcatgggctggtttagacaggcccctggcaaagagagagagttcgtcgccgccatcacatactctggcggcagcccttactacgccgactctgtgaagggcagattcaccatcagccgggacaacgccaagaacaccgtgtacctccagatgaacagcctgaagcctgaggacaccgccgtgtactactgcgccgccaatccaacatacggcagcgactggaacgccgagaattggggccagggaacccaagtgacagtgtctagcggtaccggcggaggcggatctggcggcggaggtagcggtggcggaggatctgaattcgacatccagatgacacagagccctagcagcctgtctgccagcgtgggagacagagtgaccatcacatgcaaggccagcgaccacatcaacaactggctggcctggtatcagcagaagcctggacaggcccctaagctgctgatctacggcgctaccacactggaaacaggcgtgcccagcagattttctggcagcggctctggcaccgactacaccctgacaatatccagcctccagcctgaggacttcgccacctactactgtcagcagagctggaacaccccttggacattcggccagggcaccaagctggaaatcaagagactcgaggacctgaagaacgtgttcccacctgaggtggccgtgttcgagcctagcgaggccgagatcagccacacccagaaagccaccctcgtgtgcctggctaccggcttctaccccgaccatgtggaactgtcttggtgggtcaacggcaaagaggtgcacagcggcgtgtctaccgacccccagccactgaaagaacagcccgccctgaacgacagccggtactgcctgagcagcagactgagagtgtccgccaccttctggcagaacccccggaaccacttcagatgccaggtgcagttctacggcctgagcgagaacgacgagtggacccaggacagagccaagcccgtgacccagatcgtgtctgccgaagcctggggcagagccgattgcggatccaacaagatcctggtcaagcagagccctatgctggtggcctacgacaacgccgtgaacctgagctgcaagtacagctacaacctgttcagcagagagttccgggccagcctgcacaaaggactggattctgctgtggaagtgtgcgtggtgtacggcaactacagccagcagctccaggtgtacagcaagaccggcttcaactgcgacggcaagctgggcaatgagagcgtgaccttctacctgcaaaacctgtacgtgaaccagaccgacatctatttctgcaagatcgaagtgatgtacccgcctccttacctggacaacgagaagtccaacggcaccatcatccacgtgaagggcaagcacctgtgtccttctccactgttccccggacctagcaagcctttctgggtgctcgttgttgttggcggcgtgctggcctgttatagcctgctggttaccgtggccttcatcatcttttgggtccgaagcaagcggagccggctgctgcacagcgactacatgaacatgacccctagacggcccggaccaaccagaaagcactaccagccttacgctcctcctagagacttcgccgcctatagaagtagcactagtagagtgaagttcagcagaagcgccgacgcccctgcctaccagcagggacagaaccaactgtacaacgagctgaacctgggcagacgggaagagtacgacgtgctggacaagcggagaggcagggaccctgagatgggcggaaagccccagcggagaaagaacccccaggaaggactgtataacgaactccagaaagacaagatggccgaagcctacagcgagatcggcatgaagggcgagcggagaagaggcaagggccacgatggcctgtaccagggcctgagcaccgccaccaaggacacctatgacgccctgcacatgcaggccctgcctccaagaagggccaagcgatctggatctggagcaacaaacttctcactactcaaacaagcaggtgacgtggaggagaatcccgggcctatggactggatttggcgcatccttttccttgtcggcgctgctaccggcgcgcattccgggcccgaagtgcaactggttgaatccggtggcggcctggtgcaagcaggcggatctctcagacttagctgtgccgcctccggcagaaccttcacaatgggatggtttaggcaggctccagggaaagagagagagttcgtcgccgccatctctctgtctcccacactggcctactacgccgactctgtgaaaggccggttcaccatctccagagataatgccaagaacaccgtggtgctgcaaatgaactctctgaaacccgaggatacagccctgtactattgtgccgctgaccggaagtccgtgatgagcatcagacccgattactggggacagggcacacaagtcacagtgtcctctggatccggcggcggaggatctggcggaggcggatctgggggcggaggctctttcgaacaagttcagcttcaacagcctggcgctgagctggtcaaacctggcgcttctgtgaagatgagctgcaaagccagcggctacgccttcagcagctactggatcaactggatgaagcagaaacccggccagggactcgaatggatcggccaaatctatcccggcgacggcgacaccaactacaacggcaagttcaagggcagagccacactgaccgccgatacctctagcagcacagcctacatgcagctgagcagcctgaccagcgaagatagcgccgtgtacttctgtgcccggtccatcacaacagtcgtgggctgcgctatggactattggggccagggaacaagcgtgaccgtgtctagtacgcgtatccagaaccctgatcctgccgtgtaccagctgcgggatagcaagagcagcgacaagagcgtgtgtctgttcaccgacttcgacagccagaccaacgtgtcccagagcaaggactccgacgtgtacatcaccgataagaccgtgctggacatgcggagcatggacttcaagagcaactccgccgtggcctggtccaacaagtccgatttcgcctgcgccaacgccttcaacaacagcattatccccgaggacacattcttcccaagccccgagagcagctgcggtaccaacaaaattcttgtgaagcagtccccaatgctcgtcgcctatgataatgccgtgaatctgtcctgcaaatactcctacaatctgtttagccgcgagtttagggcctcactgcacaagggccttgacagcgccgtggaagtctgtgtggtctatggaaattactcccagcaactgcaagtgtactctaagacggggttcaactgtgatggaaaactgggaaacgagtccgtgacgttttacctccaaaatctctatgtcaatcaaacggacatctatttctgcaaaattgaagtcatgtatcctccgccgtacctcgataacgagaaaagcaatgggacgatcattcacgtcaagggaaaacatctctgccccagtcctctgttccctgggccttccaaaccattttgggttctcgtcgtcgtcggcggagtcctggcttgttattctctgcttgtgacagtcgcctttatcatattctgggtccgctccaagagaagcagactgctccactccgattatatgaatatgacacccaggcggccagggcctacacggaaacactatcaaccctacgctccacctcgggatttcgctgcctacagatcaagctctagacgggttaagttttccagatccgcagacgcacccgcttaccaacaagggcagaaccaactctacaatgaacttaatttggggcggagggaagagtacgacgttctggacaaaaggaggggacgagatcccgagatgggcggaaagcctcagcgaaggaagaatccgcaagaggggctttataacgaactccagaaagataaaatggcagaagcctatagtgagattgggatgaagggagaaaggaggaggggtaaaggtcacgatgggttgtaccaaggattgagcacagccactaaagatacctatgatgcgctccacatgcaggccctgccgccaagacgcgccaagagaagcggatctggcgtgaagcagaccctgaatttcgacctgctgaagctggctggcgacgtggaatccaacccaggccctggccatatgaccgagtacaagcccacggtgcgcctcgccacccgcgacgacgtccccagggccgtacgcaccctcgccgccgcgttcgccgactaccccgccacgcgccacaccgtcgatccggaccgccacatcgagcgggtcaccgagctgcaagaactcttcctcacgcgcgtcgggctcgacatcggcaaggtgtgggtcgcggacgacggcgccgcggtggcggtctggaccacgccggagagcgtcgaagcgggggcggtgttcgccgagatcggcccgcgcatggccgagttgagcggttcccggctggccgcgcagcaacagatggaaggcctcctggcgccgcaccggcccaaggagcccgcgtggttcctggccaccgtcggcgtctcgcccgaccaccagggcaagggtctgggcagcgccgtcgtgctccccggagtggaggcggccgagcgcgccggggtgcccgccttcctggagacctccgcgccccgcaacctccccttctacgagcggctcggcttcaccgtcaccgccgacgtcgaggtgcccgaaggaccgcgcacctggtgcatgacccgcaagcccggtgcctga

SEQ ID NO: 6006 - DNA, 4215 bp, Artificial Sequence
  Synthetic Polynucleotide
atggccttaccagtgaccgccttgctcctgccgctggccttgctgctccacgccgccaggccggaagtgcagctggttgaatctggcggaggactggttcaggctggcggatctctgagactgtcttgtgccgccagcggcagaacctttagcatgggctggtttagacaggcccctggcaaagagagagagttcgtcgccgccatcacatactctggcggcagcccttactacgccgactctgtgaagggcagattcaccatcagccgggacaacgccaagaacaccgtgtacctccagatgaacagcctgaagcctgaggacaccgccgtgtactactgcgccgccaatccaacatacggcagcgactggaacgccgagaattggggccagggaacccaagtgacagtgtctagcctcgaggacctgaagaacgtgttcccacctgaggtggccgtgttcgagcctagcgaggccgagatcagccacacccagaaagccaccctcgtgtgcctggctaccggcttctaccccgaccatgtggaactgtcttggtgggtcaacggcaaagaggtgcacagcggcgtgtctaccgacccccagccactgaaagaacagcccgccctgaacgacagccggtactgcctgagcagcagactgagagtgtccgccaccttctggcagaacccccggaaccacttcagatgccaggtgcagttctacggcctgagcgagaacgacgagtggacccaggacagagccaagcccgtgacccagatcgtgtctgccgaagcctggggcagagccgattgcggatccaacaagatcctggtcaagcagagccctatgctggtggcctacgacaacgccgtgaacctgagctgcaagtacagctacaacctgttcagcagagagttccgggccagcctgcacaaaggactggattctgctgtggaagtgtgcgtggtgtacggcaactacagccagcagctccaggtgtacagcaagaccggcttcaactgcgacggcaagctgggcaatgagagcgtgaccttctacctgcaaaacctgtacgtgaaccagaccgacatctatttctgcaagatcgaagtgatgtacccgcctccttacctggacaacgagaagtccaacggcaccatcatccacgtgaagggcaagcacctgtgtccttctccactgttccccggacctagcaagcctttctgggtgctcgttgttgttggcggcgtgctggcctgttatagcctgctggttaccgtggccttcatcatcttttgggtccgaagcaagcggagccggctgctgcacagcgactacatgaacatgacccctagacggcccggaccaaccagaaagcactaccagccttacgctcctcctagagacttcgccgcctatagaagtagcactagtagagtgaagttcagcagaagcgccgacgcccctgcctaccagcagggacagaaccaactgtacaacgagctgaacctgggcagacgggaagagtacgacgtgctggacaagcggagaggcagggaccctgagatgggcggaaagccccagcggagaaagaacccccaggaaggactgtataacgaactccagaaagacaagatggccgaagcctacagcgagatcggcatgaagggcgagcggagaagaggcaagggccacgatggcctgtaccagggcctgagcaccgccaccaaggacacctatgacgccctgcacatgcaggccctgcctccaagaagggccaagcgatctggatctggagcaacaaacttctcactactcaaacaagcaggtgacgtggaggagaatcccgggcctatggactggatttggcgcatccttttccttgtcggcgctgctaccggcgcgcattccgggcccgaagtgcaactggttgaatccggtggcggcctggtgcaagcaggcggatctctcagacttagctgtgccgcctccggcagaaccttcacaatgggatggtttaggcaggctccagggaaagagagagagttcgtcgccgccatctctctgtctcccacactggcctactacgccgactctgtgaaaggccggttcaccatctccagagataatgccaagaacaccgtggtgctgcaaatgaactctctgaaacccgaggatacagccctgtactattgtgccgctgaccggaagtccgtgatgagcatcagacccgattactggggacagggcacacaagtcacagtgtcctctacgcgtatccagaaccctgatcctgccgtgtaccagctgcgggatagcaagagcagcgacaagagcgtgtgtctgttcaccgacttcgacagccagaccaacgtgtcccagagcaaggactccgacgtgtacatcaccgataagaccgtgctggacatgcggagcatggacttcaagagcaactccgccgtggcctggtccaacaagtccgatttcgcctgcgccaacgccttcaacaacagcattatccccgaggacacattcttcccaagccccgagagcagctgcggtaccaacaaaattcttgtgaagcagtccccaatgctcgtcgcctatgataatgccgtgaatctgtcctgcaaatactcctacaatctgtttagccgcgagtttagggcctcactgcacaagggccttgacagcgccgtggaagtctgtgtggtctatggaaattactcccagcaactgcaagtgtactctaagacggggttcaactgtgatggaaaactgggaaacgagtccgtgacgttttacctccaaaatctctatgtcaatcaaacggacatctatttctgcaaaattgaagtcatgtatcctccgccgtacctcgataacgagaaaagcaatgggacgatcattcacgtcaagggaaaacatctctgccccagtcctctgttccctgggccttccaaaccattttgggttctcgtcgtcgtcggcggagtcctggcttgttattctctgcttgtgacagtcgcctttatcatattctgggtccgctccaagagaagcagactgctccactccgattatatgaatatgacacccaggcggccagggcctacacggaaacactatcaaccctacgctccacctcgggatttcgctgcctacagatcaagctctagacgggttaagttttccagatccgcagacgcacccgcttaccaacaagggcagaaccaactctacaatgaacttaatttggggcggagggaagagtacgacgttctggacaaaaggaggggacgagatcccgagatgggcggaaagcctcagcgaaggaagaatccgcaagaggggctttataacgaactccagaaagataaaatggcagaagcctatagtgagattgggatgaagggagaaaggaggaggggtaaaggtcacgatgggttgtaccaaggattgagcacagccactaaagatacctatgatgcgctccacatgcaggccctgccgccaagacgcgccaagagaagcggatctggcgtgaagcagaccctgaatttcgacctgctgaagctggctggcgacgtggaatccaacccaggccctggccatatgaccgagtacaagcccacggtgcgcctcgccacccgcgacgacgtccccagggccgtacgcaccctcgccgccgcgttcgccgactaccccgccacgcgccacaccgtcgatccggaccgccacatcgagcgggtcaccgagctgcaagaactcttcctcacgcgcgtcgggctcgacatcggcaaggtgtgggtcgcggacgacggcgccgcggtggcggtctggaccacgccggagagcgtcgaagcgggggcggtgttcgccgagatcggcccgcgcatggccgagttgagcggttcccggctggccgcgcagcaacagatggaaggcctcctggcgccgcaccggcccaaggagcccgcgtggttcctggccaccgtcggcgtctcgcccgaccaccagggcaagggtctgggcagcgccgtcgtgctccccggagtggaggcggccgagcgcgccggggtgcccgccttcctggagacctccgcgccccgcaacctccccttctacgagcggctcggcttcaccgtcaccgccgacgtcgaggtgcccgaaggaccgcgcacctggtgcatgacccgcaagcccggtgcctga

SEQ ID NO: 6007 - DNA, 2142 bp, Artificial Sequence
  Synthetic Polynucleotide
atggccttaccagtgaccgccttgctcctgccgctggccttgctgctccacgccgccaggccggcatgcgaagtgcagctgcttgaaagtggcggcggactgattcagcctggcggatctctgagactgagctgtgccgccagcggcttcaccttttctagccacgccatgacctgggtccgacaggcacctggaaaagggcttgaatgggtgtccgccatcagcggctctggcgattacacacactacgccgacagcgtgaagggcagattcaccatcagcagagacaacagcaagaacaccgtgtacctccagatgaacagcctgagagccgaggacagcgccgtgtattattgcgccaaggatgaggatggcggcagcctgcttggacacagaggacaaggcaccctggtcaccgtttcttccggtaccggcggaggcggatctggcggcggaggtagcggtggcggaggatctgaattcggatctctcgagaacaagatcctggtcaagcagagccctatgctggtggcctacgacaacgccgtgaacctgagctgcaagtacagctacaacctgttcagcagagagttccgggccagcctgcacaaaggactggattctgctgtggaagtgtgcgtggtgtacggcaactacagccagcagctccaggtgtacagcaagaccggcttcaactgcgacggcaagctgggcaatgagagcgtgaccttctacctgcaaaacctgtacgtgaaccagaccgacatctatttctgcaagatcgaagtgatgtacccgcctccttacctggacaacgagaagtccaacggcaccatcatccacgtgaagggcaagcacctgtgtccttctccactgttccccggacctagcaagcctttctgggtgctcgttgttgttggcggcgtgctggcctgttatagcctgctggttaccgtggccttcatcatcttttgggtccgaagcaagcggagccggctgctgcacagcgactacatgaacatgacccctagacggcccggaccaaccagaaagcactaccagccttacgctcctcctagagacttcgccgcctatagaagtagcactagtagagtgaagttcagcagaagcgccgacgcccctgcctaccagcagggacagaaccaactgtacaacgagctgaacctgggcagacgggaagagtacgacgtgctggacaagcggagaggcagggaccctgagatgggcggaaagccccagcggagaaagaacccccaggaaggactgtataacgaactccagaaagacaagatggccgaagcctacagcgagatcggcatgaagggcgagcggagaagaggcaagggccacgatggcctgtaccagggcctgagcaccgccaccaaggacacctatgacgccctgcacatgcaggccctgcctccaagaagggccaagcgatctggatctggagcaacaaacttctcactactcaaacaagcaggtgacgtggaggagaatcccgggcctactagaggccatatgaccgagtacaagcccacggtgcgcctcgccacccgcgacgacgtccccagggccgtacgcaccctcgccgccgcgttcgccgactaccccgccacgcgccacaccgtcgatccggaccgccacatcgagcgggtcaccgagctgcaagaactcttcctcacgcgcgtcgggctcgacatcggcaaggtgtgggtcgcggacgacggcgccgcggtggcggtctggaccacgccggagagcgtcgaagcgggggcggtgttcgccgagatcggcccgcgcatggccgagttgagcggttcccggctggccgcgcagcaacagatggaaggcctcctggcgccgcaccggcccaaggagcccgcgtggttcctggccaccgtcggcgtctcgcccgaccaccagggcaagggtctgggcagcgccgtcgtgctccccggagtggaggcggccgagcgcgccggggtgcccgccttcctggagacctccgcgccccgcaacctccccttctacgagcggctcggcttcaccgtcaccgccgacgtcgaggtgcccgaaggaccgcgcacctggtgcatgacccgcaagcccggtgcctga

SEQ ID NO: 6008 - DNA, 1755 bp, Artificial Sequence
  Synthetic Polynucleotide
atggccttaccagtgaccgccttgctcctgccgctggccttgctgctccacgccgccaggccggacatccagatgacacagagccctagcagcctgtctgccagcgtgggagacagagtgaccatcacatgcaaggccagcgaccacatcaacaactggctggcctggtatcagcagaagcctggacaggcccctaagctgctgatctacggcgctaccacactggaaacaggcgtgcccagcagattttctggcagcggctctggcaccgactacaccctgacaatatccagcctccagcctgaggacttcgccacctactactgtcagcagagctggaacaccccttggacattcggccagggcaccaagctggaaatcaagagaggcggaggcggaagtggaggcggaggatctggcggcggaggctctcaagttcagcttcaacagcctggcgctgagctggtcaaacctggcgcttctgtgaagatgagctgcaaagccagcggctacgccttcagcagctactggatcaactggatgaagcagaaacccggccagggactcgaatggatcggccaaatctatcccggcgacggcgacaccaactacaacggcaagttcaagggcagagccacactgaccgccgatacctctagcagcacagcctacatgcagctgagcagcctgaccagcgaagatagcgccgtgtacttctgtgcccggtccatcacaacagtcgtgggctgcgctatggactattggggccagggaacaagcgtgaccgtgtctagtacgcgtaacaagatcctggtcaagcagagccctatgctggtggcctacgacaacgccgtgaacctgagctgcaagtacagctacaacctgttcagcagagagttccgggccagcctgcacaaaggactggattctgctgtggaagtgtgcgtggtgtacggcaactacagccagcagctccaggtgtacagcaagaccggcttcaactgcgacggcaagctgggcaatgagagcgtgaccttctacctgcaaaacctgtacgtgaaccagaccgacatctatttctgcaagatcgaagtgatgtacccgcctccttacctggacaacgagaagtccaacggcaccatcatccacgtgaagggcaagcacctgtgtccttctccactgttccccggacctagcaagcctttctgggtgctcgttgttgttggcggcgtgctggcctgttatagcctgctggttaccgtggccttcatcatcttttgggtccgaagcaagcggagccggctgctgcacagcgactacatgaacatgacccctagacggcccggaccaaccagaaagcactaccagccttacgctcctcctagagacttcgccgcctatagaagtagcactagtagagtgaagttcagcagaagcgccgacgcccctgcctaccagcagggacagaaccaactgtacaacgagctgaacctgggcagacgggaagagtacgacgtgctggacaagcggagaggcagggaccctgagatgggcggaaagccccagcggagaaagaacccccaggaaggactgtataacgaactccagaaagacaagatggccgaagcctacagcgagatcggcatgaagggcgagcggagaagaggcaagggccacgatggcctgtaccagggcctgagcaccgccaccaaggacacctatgacgccctgcacatgcaggccctgcctccaaga

SEQ ID NO: 6009 - DNA, 1755 bp, Artificial Sequence
  Synthetic Polynucleotide
atggccttaccagtgaccgccttgctcctgccgctggccttgctgctccacgccgccaggccggagatcgtgctgacacagagccctgccaccctgtctctgagccctggcgaaagagccaccctgagctgtagagccagccagagcgtgtccagctacctggcctggtatcagcagaagcccggccaggctccccggctgctgatctacgatgccagcaatagagccaccggcatccccgccagattttccggctctggcagcggcaccgacttcaccctgaccatcagctccctggaacccgaggacttcgccgtgtactactgccagcagcggagcaactggcccatcacattcggccagggcacccggctggaaatcaaaggcggaggcggaagtggaggcggaggatctggcggcggaggctctgaagtgcagctggtggaatcaggcggcggactggtgcagcctggcagaagcctgagactgagctgtgccgccagcggcttcaccttcaacgactacgccatgcactgggtgcgccaggcccctggaaaaggactggaatgggtgtccacaatcagctggaacagcggcagcatcggctacgccgatagcgtgaagggccggttcaccatcagccgggacaacgccaagaagtccctgtacctccagatgaacagcctgcgggccgaggacacagccctgtactattgcgccaaggacatccagtacggcaactactactacggcatggacgtgtggggccagggaaccaccgtgaccgtgtcatctacgcgtaacaagatcctggtcaagcagagccctatgctggtggcctacgacaacgccgtgaacctgagctgcaagtacagctacaacctgttcagcagagagttccgggccagcctgcacaaaggactggattctgctgtggaagtgtgcgtggtgtacggcaactacagccagcagctccaggtgtacagcaagaccggcttcaactgcgacggcaagctgggcaatgagagcgtgaccttctacctgcaaaacctgtacgtgaaccagaccgacatctatttctgcaagatcgaagtgatgtacccgcctccttacctggacaacgagaagtccaacggcaccatcatccacgtgaagggcaagcacctgtgtccttctccactgttccccggacctagcaagcctttctgggtgctcgttgttgttggcggcgtgctggcctgttatagcctgctggttaccgtggccttcatcatcttttgggtccgaagcaagcggagccggctgctgcacagcgactacatgaacatgacccctagacggcccggaccaaccagaaagcactaccagccttacgctcctcctagagacttcgccgcctatagaagtagcactagtagagtgaagttcagcagaagcgccgacgcccctgcctaccagcagggacagaaccaactgtacaacgagctgaacctgggcagacgggaagagtacgacgtgctggacaagcggagaggcagggaccctgagatgggcggaaagccccagcggagaaagaacccccaggaaggactgtataacgaactccagaaagacaagatggccgaagcctacagcgagatcggcatgaagggcgagcggagaagaggcaagggccacgatggcctgtaccagggcctgagcaccgccaccaaggacacctatgacgccctgcacatgcaggccctgcctccaaga

SEQ ID NO: 6010 - DNA, 1377 bp, Artificial Sequence
  Synthetic Polynucleotide
atggccttaccagtgaccgccttgctcctgccgctggccttgctgctccacgccgccaggccggaagtgcagctggttgaatctggcggaggactggttcaggctggcggatctctgagactgtcttgtgccgccagcggcagaacctttagcatgggctggtttagacaggcccctggcaaagagagagagttcgtcgccgccatcacatactctggcggcagcccttactacgccgactctgtgaagggcagattcaccatcagccgggacaacgccaagaacaccgtgtacctccagatgaacagcctgaagcctgaggacaccgccgtgtactactgcgccgccaatccaacatacggcagcgactggaacgccgagaattggggccagggaacccaagtgacagtgtctagcacgcgtaacaagatcctggtcaagcagagccctatgctggtggcctacgacaacgccgtgaacctgagctgcaagtacagctacaacctgttcagcagagagttccgggccagcctgcacaaaggactggattctgctgtggaagtgtgcgtggtgtacggcaactacagccagcagctccaggtgtacagcaagaccggcttcaactgcgacggcaagctgggcaatgagagcgtgaccttctacctgcaaaacctgtacgtgaaccagaccgacatctatttctgcaagatcgaagtgatgtacccgcctccttacctggacaacgagaagtccaacggcaccatcatccacgtgaagggcaagcacctgtgtccttctccactgttccccggacctagcaagcctttctgggtgctcgttgttgttggcggcgtgctggcctgttatagcctgctggttaccgtggccttcatcatcttttgggtccgaagcaagcggagccggctgctgcacagcgactacatgaacatgacccctagacggcccggaccaaccagaaagcactaccagccttacgctcctcctagagacttcgccgcctatagaagtagcactagtagagtgaagttcagcagaagcgccgacgcccctgcctaccagcagggacagaaccaactgtacaacgagctgaacctgggcagacgggaagagtacgacgtgctggacaagcggagaggcagggaccctgagatgggcggaaagccccagcggagaaagaacccccaggaaggactgtataacgaactccagaaagacaagatggccgaagcctacagcgagatcggcatgaagggcgagcggagaagaggcaagggccacgatggcctgtaccagggcctgagcaccgccaccaaggacacctatgacgccctgcacatgcaggccctgcctccaaga

SEQ ID NO: 6011 - DNA, 1377 bp, Artificial Sequence
  Synthetic Polynucleotide
atggccttaccagtgaccgccttgctcctgccgctggccttgctgctccacgccgccaggccgcagctccagttgcaagagagcggccctggcttggtaaaaccttccgagacccttagcctcacatgcacggttagtgggggcagcatttcctcaggtgattactattggggatggattcggcaacccccgggtaaaggattggagtggattggtcatatttattatagtggagcgacgtactacaacccaagtctcaaatccagggttacaatatccgtcgatacgagcaggaaccaattcagcttgaaactttctagtgtcaccgcagcagacacagccgtctattactgtacgcgggatgactccagtaattggcggtcccgagggcaagggacactggtcacggtctcctcaacgcgtaacaagatcctggtcaagcagagccctatgctggtggcctacgacaacgccgtgaacctgagctgcaagtacagctacaacctgttcagcagagagttccgggccagcctgcacaaaggactggattctgctgtggaagtgtgcgtggtgtacggcaactacagccagcagctccaggtgtacagcaagaccggcttcaactgcgacggcaagctgggcaatgagagcgtgaccttctacctgcaaaacctgtacgtgaaccagaccgacatctatttctgcaagatcgaagtgatgtacccgcctccttacctggacaacgagaagtccaacggcaccatcatccacgtgaagggcaagcacctgtgtccttctccactgttccccggacctagcaagcctttctgggtgctcgttgttgttggcggcgtgctggcctgttatagcctgctggttaccgtggccttcatcatcttttgggtccgaagcaagcggagccggctgctgcacagcgactacatgaacatgacccctagacggcccggaccaaccagaaagcactaccagccttacgctcctcctagagacttcgccgcctatagaagtagcactagtagagtgaagttcagcagaagcgccgacgcccctgcctaccagcagggacagaaccaactgtacaacgagctgaacctgggcagacgggaagagtacgacgtgctggacaagcggagaggcagggaccctgagatgggcggaaagccccagcggagaaagaacccccaggaaggactgtataacgaactccagaaagacaagatggccgaagcctacagcgagatcggcatgaagggcgagcggagaagaggcaagggccacgatggcctgtaccagggcctgagcaccgccaccaaggacacctatgacgccctgcacatgcaggccctgcctccaaga

SEQ ID NO: 6012 - DNA, 1377 bp, Artificial Sequence
  Synthetic Polynucleotide
atggccttaccagtgaccgccttgctcctgccgctggccttgctgctccacgccgccaggccgcagctccagctgcaagagtctggacctggcctggtcaagcctagcgagacactgagcctgacctgtaccgtgtccggcgatagcatcagcagcggcgattactactggggctggatcagacagcctcctggcaaaggactggaatggatcggccacatctactacagcggcgtgacctactacaaccccagcctgaagtccagagtgaccatcagcgtggacaccagccggaaccagttctccctgaagctgtctagcgtgacagccgccgataccgccgtgtactactgcaccagagaggacagcagcaactggcggagtagaggccagggaacactggtcacagttagctctacgcgtaacaagatcctggtcaagcagagccctatgctggtggcctacgacaacgccgtgaacctgagctgcaagtacagctacaacctgttcagcagagagttccgggccagcctgcacaaaggactggattctgctgtggaagtgtgcgtggtgtacggcaactacagccagcagctccaggtgtacagcaagaccggcttcaactgcgacggcaagctgggcaatgagagcgtgaccttctacctgcaaaacctgtacgtgaaccagaccgacatctatttctgcaagatcgaagtgatgtacccgcctccttacctggacaacgagaagtccaacggcaccatcatccacgtgaagggcaagcacctgtgtccttctccactgttccccggacctagcaagcctttctgggtgctcgttgttgttggcggcgtgctggcctgttatagcctgctggttaccgtggccttcatcatcttttgggtccgaagcaagcggagccggctgctgcacagcgactacatgaacatgacccctagacggcccggaccaaccagaaagcactaccagccttacgctcctcctagagacttcgccgcctatagaagtagcactagtagagtgaagttcagcagaagcgccgacgcccctgcctaccagcagggacagaaccaactgtacaacgagctgaacctgggcagacgggaagagtacgacgtgctggacaagcggagaggcagggaccctgagatgggcggaaagccccagcggagaaagaacccccaggaaggactgtataacgaactccagaaagacaagatggccgaagcctacagcgagatcggcatgaagggcgagcggagaagaggcaagggccacgatggcctgtaccagggcctgagcaccgccaccaaggacacctatgacgccctgcacatgcaggccctgcctccaaga

SEQ ID NO: 6013 - DNA, 1383 bp, Artificial Sequence
  Synthetic Polynucleotide
atggccttaccagtgaccgccttgctcctgccgctggccttgctgctccacgccgccaggccggaagttcagctgcaagagtctggcggaggactggttcaacctggcggaagcctgagactgtcttgtgccgcctctggcagaaccttcagcagcctgttcatgggctggttcagacaggcccctggcaaagagagagaactggtcgccgccatcagccggtacagcctgtacacctactacgccgacagcgtgaagggcagattcaccatcagcgccgacaacgccaagaacgccgtgtacctccagatgaacagcctgaagccagaggacacagccgtgtactactgcgccagcaaacttgagtacaccagcaacgactacgacagctggggccagggaacccaagtgacagtctcttctacgcgtaacaagatcctggtcaagcagagccctatgctggtggcctacgacaacgccgtgaacctgagctgcaagtacagctacaacctgttcagcagagagttccgggccagcctgcacaaaggactggattctgctgtggaagtgtgcgtggtgtacggcaactacagccagcagctccaggtgtacagcaagaccggcttcaactgcgacggcaagctgggcaatgagagcgtgaccttctacctgcaaaacctgtacgtgaaccagaccgacatctatttctgcaagatcgaagtgatgtacccgcctccttacctggacaacgagaagtccaacggcaccatcatccacgtgaagggcaagcacctgtgtccttctccactgttccccggacctagcaagcctttctgggtgctcgttgttgttggcggcgtgctggcctgttatagcctgctggttaccgtggccttcatcatcttttgggtccgaagcaagcggagccggctgctgcacagcgactacatgaacatgacccctagacggcccggaccaaccagaaagcactaccagccttacgctcctcctagagacttcgccgcctatagaagtagcactagtagagtgaagttcagcagaagcgccgacgcccctgcctaccagcagggacagaaccaactgtacaacgagctgaacctgggcagacgggaagagtacgacgtgctggacaagcggagaggcagggaccctgagatgggcggaaagccccagcggagaaagaacccccaggaaggactgtataacgaactccagaaagacaagatggccgaagcctacagcgagatcggcatgaagggcgagcggagaagaggcaagggccacgatggcctgtaccagggcctgagcaccgccaccaaggacacctatgacgccctgcacatgcaggccctgcctccaaga

SEQ ID NO: 6014 - DNA, 1407 bp, Artificial Sequence
  Synthetic Polynucleotide
atggccttaccagtgaccgccttgctcctgccgctggccttgctgctccacgccgccaggccggaagtgcagctggttgaatctggcggaggactggttcagcctggcggatctctgagactgtcttgtgccgcctctggcttcgccagcgactactatatcatcggctggttcagacaggcccctggcaaagagagagagggcgtcagctgtatcagcagcagatacgccaacaccaactacgccgacagcgtgaagggcagattcaccatcagccgggacaacgccaagaacaccgtgtacctccagatgaacagcctgaagcctgaggacaccgccgtgtactactgtgccgccgacaccagaagatacacctgtcctgacattgccaccatgcaccggaacttcgattcttggggccagggcacactggtcaccgtttcttctacgcgtaacaagatcctggtcaagcagagccctatgctggtggcctacgacaacgccgtgaacctgagctgcaagtacagctacaacctgttcagcagagagttccgggccagcctgcacaaaggactggattctgctgtggaagtgtgcgtggtgtacggcaactacagccagcagctccaggtgtacagcaagaccggcttcaactgcgacggcaagctgggcaatgagagcgtgaccttctacctgcaaaacctgtacgtgaaccagaccgacatctatttctgcaagatcgaagtgatgtacccgcctccttacctggacaacgagaagtccaacggcaccatcatccacgtgaagggcaagcacctgtgtccttctccactgttccccggacctagcaagcctttctgggtgctcgttgttgttggcggcgtgctggcctgttatagcctgctggttaccgtggccttcatcatcttttgggtccgaagcaagcggagccggctgctgcacagcgactacatgaacatgacccctagacggcccggaccaaccagaaagcactaccagccttacgctcctcctagagacttcgccgcctatagaagtagcactagtagagtgaagttcagcagaagcgccgacgcccctgcctaccagcagggacagaaccaactgtacaacgagctgaacctgggcagacgggaagagtacgacgtgctggacaagcggagaggcagggaccctgagatgggcggaaagccccagcggagaaagaacccccaggaaggactgtataacgaactccagaaagacaagatggccgaagcctacagcgagatcggcatgaagggcgagcggagaagaggcaagggccacgatggcctgtaccagggcctgagcaccgccaccaaggacacctatgacgccctgcacatgcaggccctgcctccaaga

SEQ ID NO: 6015 - DNA, 1395 bp, Artificial Sequence
  Synthetic Polynucleotide
atggccttaccagtgaccgccttgctcctgccgctggccttgctgctccacgccgccaggccggaagtgcaactggtggaatctggaggctctctggtgcagccagggggaagcctgagactgtcttgtgccgcttccggcttcaccttcgacgactacgccatgagctgggtgcgccaggtgccaggcaaaggcctggaatgggtgtccagcatcaactggagcggcacccacaccgattacgccgactccgtgaaaggcagattcacaatcagcagaaacaacgccaacaataccctgtacctgcagatgaactccctgaagtctgaggatacagcagtgtattattgcgccaagaactggcgggacgccggcaccacttggtttgagaaaagcggctctgccggacagggaacccaagtgacagtgtcctccacgcgtaacaagatcctggtcaagcagagccctatgctggtggcctacgacaacgccgtgaacctgagctgcaagtacagctacaacctgttcagcagagagttccgggccagcctgcacaaaggactggattctgctgtggaagtgtgcgtggtgtacggcaactacagccagcagctccaggtgtacagcaagaccggcttcaactgcgacggcaagctgggcaatgagagcgtgaccttctacctgcaaaacctgtacgtgaaccagaccgacatctatttctgcaagatcgaagtgatgtacccgcctccttacctggacaacgagaagtccaacggcaccatcatccacgtgaagggcaagcacctgtgtccttctccactgttccccggacctagcaagcctttctgggtgctcgttgttgttggcggcgtgctggcctgttatagcctgctggttaccgtggccttcatcatcttttgggtccgaagcaagcggagccggctgctgcacagcgactacatgaacatgacccctagacggcccggaccaaccagaaagcactaccagccttacgctcctcctagagacttcgccgcctatagaagtagcactagtagagtgaagttcagcagaagcgccgacgcccctgcctaccagcagggacagaaccaactgtacaacgagctgaacctgggcagacgggaagagtacgacgtgctggacaagcggagaggcagggaccctgagatgggcggaaagccccagcggagaaagaacccccaggaaggactgtataacgaactccagaaagacaagatggccgaagcctacagcgagatcggcatgaagggcgagcggagaagaggcaagggccacgatggcctgtaccagggcctgagcaccgccaccaaggacacctatgacgccctgcacatgcaggccctgcctccaaga

SEQ ID NO: 6016 - DNA, 1380 bp, Artificial Sequence
  Synthetic Polynucleotide
atggccttaccagtgaccgccttgctcctgccgctggccttgctgctccacgccgccaggccggaggtgcagctggttgaatctggcggaggactggttcagcctggcggatctctgagactgtcttgtgccgccagcggcttcaacatcaaggatacctgtatcggctgggttcgcagagcccctggcaaagaggaagaactggtcgccaaaatctgcaagtacagcggccacaccagatacgccgacagcgtgaagggcagattcaccatcagcgccgacaccagcaagaacaccgcctacctccagatgaacagcctgagagccgaggacaccgccgtgtactattgtgccgctgtgtccgtcagagatgggcactacaattactggggccagggcaccaccgtgaccgtttcttcaacgcgtaacaagatcctggtcaagcagagccctatgctggtggcctacgacaacgccgtgaacctgagctgcaagtacagctacaacctgttcagcagagagttccgggccagcctgcacaaaggactggattctgctgtggaagtgtgcgtggtgtacggcaactacagccagcagctccaggtgtacagcaagaccggcttcaactgcgacggcaagctgggcaatgagagcgtgaccttctacctgcaaaacctgtacgtgaaccagaccgacatctatttctgcaagatcgaagtgatgtacccgcctccttacctggacaacgagaagtccaacggcaccatcatccacgtgaagggcaagcacctgtgtccttctccactgttccccggacctagcaagcctttctgggtgctcgttgttgttggcggcgtgctggcctgttatagcctgctggttaccgtggccttcatcatcttttgggtccgaagcaagcggagccggctgctgcacagcgactacatgaacatgacccctagacggcccggaccaaccagaaagcactaccagccttacgctcctcctagagacttcgccgcctatagaagtagcactagtagagtgaagttcagcagaagcgccgacgcccctgcctaccagcagggacagaaccaactgtacaacgagctgaacctgggcagacgggaagagtacgacgtgctggacaagcggagaggcagggaccctgagatgggcggaaagccccagcggagaaagaacccccaggaaggactgtataacgaactccagaaagacaagatggccgaagcctacagcgagatcggcatgaagggcgagcggagaagaggcaagggccacgatggcctgtaccagggcctgagcaccgccaccaaggacacctatgacgccctgcacatgcaggccctgcctccaaga

SEQ ID NO: 6017 - DNA, 1395 bp, Artificial Sequence
  Synthetic Polynucleotide
atggccttaccagtgaccgccttgctcctgccgctggccttgctgctccacgccgccaggccgggctctgacctgggcatcaagctgctgttcgccgctgccaagggccaggacgacgaagtgcggattctgctggctgctggggccgacgtgaacgccaaggatttcgagggctacacccccctgcacgtggccgcctatgatggacacctggaaatcgtggaagtgctgctgaaggctggcgctgatgtgaatgccaaagacagccagggccggacccctctgcatgaagccgcctacagcggccatctggaaattgtggaagtgctgctgaaagccggggcagacgtgaacgctcaggacgacgctggcgagacaccagccgatctggctgcagcttggggccacgaagatatcgccgaggtgctgcagaagacgcgtaacaagatcctggtcaagcagagccctatgctggtggcctacgacaacgccgtgaacctgagctgcaagtacagctacaacctgttcagcagagagttccgggccagcctgcacaaaggactggattctgctgtggaagtgtgcgtggtgtacggcaactacagccagcagctccaggtgtacagcaagaccggcttcaactgcgacggcaagctgggcaatgagagcgtgaccttctacctgcaaaacctgtacgtgaaccagaccgacatctatttctgcaagatcgaagtgatgtacccgcctccttacctggacaacgagaagtccaacggcaccatcatccacgtgaagggcaagcacctgtgtccttctccactgttccccggacctagcaagcctttctgggtgctcgttgttgttggcggcgtgctggcctgttatagcctgctggttaccgtggccttcatcatcttttgggtccgaagcaagcggagccggctgctgcacagcgactacatgaacatgacccctagacggcccggaccaaccagaaagcactaccagccttacgctcctcctagagacttcgccgcctatagaagtagcactagtagagtgaagttcagcagaagcgccgacgcccctgcctaccagcagggacagaaccaactgtacaacgagctgaacctgggcagacgggaagagtacgacgtgctggacaagcggagaggcagggaccctgagatgggcggaaagccccagcggagaaagaacccccaggaaggactgtataacgaactccagaaagacaagatggccgaagcctacagcgagatcggcatgaagggcgagcggagaagaggcaagggccacgatggcctgtaccagggcctgagcaccgccaccaaggacacctatgacgccctgcacatgcaggccctgcctccaaga

SEQ ID NO: 6018 - DNA, 1197 bp, Artificial Sequence
  Synthetic Polynucleotide
atggccttaccagtgaccgccttgctcctgccgctggccttgctgctccacgccgccaggccggtggacaacaagttcaacaaagagcggtacagcgcctactacgagatttggcaactgcccaacctgaacgtgcggcagaaggccgccttcatcggatctctgcaggacgaccctagccagagcgccaatctgctggccgaggccaagaagctgaacgacgcccaggcccctaaaacgcgtaacaagatcctggtcaagcagagccctatgctggtggcctacgacaacgccgtgaacctgagctgcaagtacagctacaacctgttcagcagagagttccgggccagcctgcacaaaggactggattctgctgtggaagtgtgcgtggtgtacggcaactacagccagcagctccaggtgtacagcaagaccggcttcaactgcgacggcaagctgggcaatgagagcgtgaccttctacctgcaaaacctgtacgtgaaccagaccgacatctatttctgcaagatcgaagtgatgtacccgcctccttacctggacaacgagaagtccaacggcaccatcatccacgtgaagggcaagcacctgtgtccttctccactgttccccggacctagcaagcctttctgggtgctcgttgttgttggcggcgtgctggcctgttatagcctgctggttaccgtggccttcatcatcttttgggtccgaagcaagcggagccggctgctgcacagcgactacatgaacatgacccctagacggcccggaccaaccagaaagcactaccagccttacgctcctcctagagacttcgccgcctatagaagtagcactagtagagtgaagttcagcagaagcgccgacgcccctgcctaccagcagggacagaaccaactgtacaacgagctgaacctgggcagacgggaagagtacgacgtgctggacaagcggagaggcagggaccctgagatgggcggaaagccccagcggagaaagaacccccaggaaggactgtataacgaactccagaaagacaagatggccgaagcctacagcgagatcggcatgaagggcgagcggagaagaggcaagggccacgatggcctgtaccagggcctgagcaccgccaccaaggacacctatgacgccctgcacatgcaggccctgcctccaaga

SEQ ID NO: 6019 - DNA, 1290 bp, Artificial Sequence
  Synthetic Polynucleotide
atggccttaccagtgaccgccttgctcctgccgctggccttgctgctccacgccgccaggccgctgccagccccgaagaatttggtcgtttcccgtgtcactgaggactctgcacgtctgagctggaccgcaccggacgcggcgttcgacagctttgcaatcggctactgggagtgggatgatgacggcgaggccattgtgctgaccgttccgggtagcgagcgcagctacgatctgaccggtctgaagccgggtacggaatatccggtgtatattgcgggcgtgaagggtggccagtggagcttcccgctgagcgcgatctttaccaccacgcgtaacaagatcctggtcaagcagagccctatgctggtggcctacgacaacgccgtgaacctgagctgcaagtacagctacaacctgttcagcagagagttccgggccagcctgcacaaaggactggattctgctgtggaagtgtgcgtggtgtacggcaactacagccagcagctccaggtgtacagcaagaccggcttcaactgcgacggcaagctgggcaatgagagcgtgaccttctacctgcaaaacctgtacgtgaaccagaccgacatctatttctgcaagatcgaagtgatgtacccgcctccttacctggacaacgagaagtccaacggcaccatcatccacgtgaagggcaagcacctgtgtccttctccactgttccccggacctagcaagcctttctgggtgctcgttgttgttggcggcgtgctggcctgttatagcctgctggttaccgtggccttcatcatcttttgggtccgaagcaagcggagccggctgctgcacagcgactacatgaacatgacccctagacggcccggaccaaccagaaagcactaccagccttacgctcctcctagagacttcgccgcctatagaagtagcactagtagagtgaagttcagcagaagcgccgacgcccctgcctaccagcagggacagaaccaactgtacaacgagctgaacctgggcagacgggaagagtacgacgtgctggacaagcggagaggcagggaccctgagatgggcggaaagccccagcggagaaagaacccccaggaaggactgtataacgaactccagaaagacaagatggccgaagcctacagcgagatcggcatgaagggcgagcggagaagaggcaagggccacgatggcctgtaccagggcctgagcaccgccaccaaggacacctatgacgccctgcacatgcaggccctgcctccaaga

SEQ ID NO: 6020 - DNA, 1293 bp, Artificial Sequence
  Synthetic Polynucleotide
atggccttaccagtgaccgccttgctcctgccgctggccttgctgctccacgccgccaggccgatgctgcccgctcctaagaatctggtggtgtccagaatcaccgaggacagcgccagactgtcttggacagctcctgatgccgccttcgacagcttccccatccggtacatcgagacactgatctggggcgaagccatctggctggatgtgcctggaagcgagagaagctacgacctgaccggactgaagcctggcacagagtatgccgtggtcatcaccggcgtgaaaggcggcagattctctagccctctggtggcctctttcaccaccacgcgtaacaagatcctggtcaagcagagccctatgctggtggcctacgacaacgccgtgaacctgagctgcaagtacagctacaacctgttcagcagagagttccgggccagcctgcacaaaggactggattctgctgtggaagtgtgcgtggtgtacggcaactacagccagcagctccaggtgtacagcaagaccggcttcaactgcgacggcaagctgggcaatgagagcgtgaccttctacctgcaaaacctgtacgtgaaccagaccgacatctatttctgcaagatcgaagtgatgtacccgcctccttacctggacaacgagaagtccaacggcaccatcatccacgtgaagggcaagcacctgtgtccttctccactgttccccggacctagcaagcctttctgggtgctcgttgttgttggcggcgtgctggcctgttatagcctgctggttaccgtggccttcatcatcttttgggtccgaagcaagcggagccggctgctgcacagcgactacatgaacatgacccctagacggcccggaccaaccagaaagcactaccagccttacgctcctcctagagacttcgccgcctatagaagtagcactagtagagtgaagttcagcagaagcgccgacgcccctgcctaccagcagggacagaaccaactgtacaacgagctgaacctgggcagacgggaagagtacgacgtgctggacaagcggagaggcagggaccctgagatgggcggaaagccccagcggagaaagaacccccaggaaggactgtataacgaactccagaaagacaagatggccgaagcctacagcgagatcggcatgaagggcgagcggagaagaggcaagggccacgatggcctgtaccagggcctgagcaccgccaccaaggacacctatgacgccctgcacatgcaggccctgcctccaaga

SEQ ID NO: 6021 - DNA, 1944 bp, Artificial Sequence
  Synthetic Polynucleotide
atggccttaccagtgaccgccttgctcctgccgctggccttgctgctccacgccgccaggccgatggccttaccagtgaccgccttgctcctgccgctggccttgctgctccacgccgccaggccgctgttcaatcaagaggtgcagatccctctgaccgagagctactgtggcccctgtcctaagaactggatctgctacaagaacaactgctaccagttcttcgacgagagcaagaattggtacgagagccaggccagctgcatgagccagaatgccagcctgctgaaggtgtacagcaaagaggaccaggacctgctgaaactggtcaagagctaccactggatgggccttgtgcacatccccaccaatggctcttggcagtgggaggacggcagcattctgagccctaacctgctgaccatcatcgagatgcagaagggcgactgcgccctgtacgccagcagctttaagggctacatcgagaattgcagcaccccgaacacctacatctgtatgcagagaaccgttggcggaggcggaagtggaggcggaggatctggcggcggaggctctgacctctttaatcaagaagtccagattccactcaccgaatcctactgcggaccttgtccaaaaaattggatttgttataagaacaactgttatcaattctttgatgagtctaaaaattggtatgagtcccaggcttcctgcatgtctcagaacgcttctctgctgaaagtctactctaaagaagatcaggatctcctgaagctcgtcaagtcttatcattggatggggctcgtccacattcctaccaacggaagctggcaatgggaagatggctccatcctgtctccaaatctgctcacgattattgaaatgcagaaaggggattgtgctctctacgccagctccttcaagggatatattgagaactgtagcacgcccaatacttatatctgtatgcaacggaccgtgacgcgtaacaagatcctggtcaagcagagccctatgctggtggcctacgacaacgccgtgaacctgagctgcaagtacagctacaacctgttcagcagagagttccgggccagcctgcacaaaggactggattctgctgtggaagtgtgcgtggtgtacggcaactacagccagcagctccaggtgtacagcaagaccggcttcaactgcgacggcaagctgggcaatgagagcgtgaccttctacctgcaaaacctgtacgtgaaccagaccgacatctatttctgcaagatcgaagtgatgtacccgcctccttacctggacaacgagaagtccaacggcaccatcatccacgtgaagggcaagcacctgtgtccttctccactgttccccggacctagcaagcctttctgggtgctcgttgttgttggcggcgtgctggcctgttatagcctgctggttaccgtggccttcatcatcttttgggtccgaagcaagcggagccggctgctgcacagcgactacatgaacatgacccctagacggcccggaccaaccagaaagcactaccagccttacgctcctcctagagacttcgccgcctatagaagtagcactagtagagtgaagttcagcagaagcgccgacgcccctgcctaccagcagggacagaaccaactgtacaacgagctgaacctgggcagacgggaagagtacgacgtgctggacaagcggagaggcagggaccctgagatgggcggaaagccccagcggagaaagaacccccaggaaggactgtataacgaactccagaaagacaagatggccgaagcctacagcgagatcggcatgaagggcgagcggagaagaggcaagggccacgatggcctgtaccagggcctgagcaccgccaccaaggacacctatgacgccctgcacatgcaggccctgcctccaaga

SEQ ID NO: 6022 - DNA, 1584 bp, Artificial Sequence
  Synthetic Polynucleotide
atggccttaccagtgaccgccttgctcctgccgctggccttgctgctccacgccgccaggccgatggagctgactgatttgctcctggcggccatgcttcttgcagtggcaagactaactctgtccagccccgtagctcctgcctgtgaccccagactcctaaataaactgctgcgtgactcccacctccttcacagccgactgagtcagtgtcccgacgtggaccctttgtctatccctgttctgctgcctgctgtggactttagcctgggagaatggaaaacccagacggaacagagcaaggcacaggacattctaggggcagtgtcccttctactggagggagtgatggcagcacgaggacagttggaaccctcctgcctctcatccctcctgggacagctttctgggcaggttcgcctcctcttgggggccctgcagggcctcctaggaacccagcttcctctacagggcaggaccacagctcacaaggaccccaatgccctcttcttgagcttgcaacaactgcttcggggaaaggtgcgcttcctgcttctggtagaaggtcccaccctctgtgtcagacggaccctgccaaccacagctgtcccaagcagtacttctacgcgtaacaagatcctggtcaagcagagccctatgctggtggcctacgacaacgccgtgaacctgagctgcaagtacagctacaacctgttcagcagagagttccgggccagcctgcacaaaggactggattctgctgtggaagtgtgcgtggtgtacggcaactacagccagcagctccaggtgtacagcaagaccggcttcaactgcgacggcaagctgggcaatgagagcgtgaccttctacctgcaaaacctgtacgtgaaccagaccgacatctatttctgcaagatcgaagtgatgtacccgcctccttacctggacaacgagaagtccaacggcaccatcatccacgtgaagggcaagcacctgtgtccttctccactgttccccggacctagcaagcctttctgggtgctcgttgttgttggcggcgtgctggcctgttatagcctgctggttaccgtggccttcatcatcttttgggtccgaagcaagcggagccggctgctgcacagcgactacatgaacatgacccctagacggcccggaccaaccagaaagcactaccagccttacgctcctcctagagacttcgccgcctatagaagtagcactagtagagtgaagttcagcagaagcgccgacgcccctgcctaccagcagggacagaaccaactgtacaacgagctgaacctgggcagacgggaagagtacgacgtgctggacaagcggagaggcagggaccctgagatgggcggaaagccccagcggagaaagaacccccaggaaggactgtataacgaactccagaaagacaagatggccgaagcctacagcgagatcggcatgaagggcgagcggagaagaggcaagggccacgatggcctgtaccagggcctgagcaccgccaccaaggacacctatgacgccctgcacatgcaggccctgcctccaaga

SEQ ID NO: 6023 - DNA, 1182 bp, Artificial Sequence
  Synthetic Polynucleotide
atggccttaccagtgaccgccttgctcctgccgctggccttgctgctccacgccgccaggccgatggaccccgacctggaaatcagagccgccttcctgcggcagagaaacacagccctgagaacagaggtggccgagctggaacaagaggtgcagcggctggaaaacgaggtgtcccagtacgagacaagatacggccctctcggaggcggaaaaacgcgtacgcgtaacaagatcctggtcaagcagagccctatgctggtggcctacgacaacgccgtgaacctgagctgcaagtacagctacaacctgttcagcagagagttccgggccagcctgcacaaaggactggattctgctgtggaagtgtgcgtggtgtacggcaactacagccagcagctccaggtgtacagcaagaccggcttcaactgcgacggcaagctgggcaatgagagcgtgaccttctacctgcaaaacctgtacgtgaaccagaccgacatctatttctgcaagatcgaagtgatgtacccgcctccttacctggacaacgagaagtccaacggcaccatcatccacgtgaagggcaagcacctgtgtccttctccactgttccccggacctagcaagcctttctgggtgctcgttgttgttggcggcgtgctggcctgttatagcctgctggttaccgtggccttcatcatcttttgggtccgaagcaagcggagccggctgctgcacagcgactacatgaacatgacccctagacggcccggaccaaccagaaagcactaccagccttacgctcctcctagagacttcgccgcctatagaagtagcactagtagagtgaagttcagcagaagcgccgacgcccctgcctaccagcagggacagaaccaactgtacaacgagctgaacctgggcagacgggaagagtacgacgtgctggacaagcggagaggcagggaccctgagatgggcggaaagccccagcggagaaagaacccccaggaaggactgtataacgaactccagaaagacaagatggccgaagcctacagcgagatcggcatgaagggcgagcggagaagaggcaagggccacgatggcctgtaccagggcctgagcaccgccaccaaggacacctatgacgccctgcacatgcaggccctgcctccaaga

SEQ ID NO: 6024 - DNA, 1107 bp, Artificial Sequence
  Synthetic Polynucleotide
atggccttaccagtgaccgccttgctcctgccgctggccttgctgctccacgccgccaggccggaagttgctgccctcgagaaggaggtagcagctttggaaaaagaagtcgcagcccttgagaaagaagttgcggctctggagaagacgcgtaacaagatcctggtcaagcagagccctatgctggtggcctacgacaacgccgtgaacctgagctgcaagtacagctacaacctgttcagcagagagttccgggccagcctgcacaaaggactggattctgctgtggaagtgtgcgtggtgtacggcaactacagccagcagctccaggtgtacagcaagaccggcttcaactgcgacggcaagctgggcaatgagagcgtgaccttctacctgcaaaacctgtacgtgaaccagaccgacatctatttctgcaagatcgaagtgatgtacccgcctccttacctggacaacgagaagtccaacggcaccatcatccacgtgaagggcaagcacctgtgtccttctccactgttccccggacctagcaagcctttctgggtgctcgttgttgttggcggcgtgctggcctgttatagcctgctggttaccgtggccttcatcatcttttgggtccgaagcaagcggagccggctgctgcacagcgactacatgaacatgacccctagacggcccggaccaaccagaaagcactaccagccttacgctcctcctagagacttcgccgcctatagaagtagcactagtagagtgaagttcagcagaagcgccgacgcccctgcctaccagcagggacagaaccaactgtacaacgagctgaacctgggcagacgggaagagtacgacgtgctggacaagcggagaggcagggaccctgagatgggcggaaagccccagcggagaaagaacccccaggaaggactgtataacgaactccagaaagacaagatggccgaagcctacagcgagatcggcatgaagggcgagcggagaagaggcaagggccacgatggcctgtaccagggcctgagcaccgccaccaaggacacctatgacgccctgcacatgcaggccctgcctccaaga

SEQ ID NO: 6025 - DNA, 1881 bp, Artificial Sequence
  Synthetic Polynucleotide
atggccttaccagtgaccgccttgctcctgccgctggccttgctgctccacgccgccaggccgctgttcaatcaagaggtgcagatccctctgaccgagagctactgtggcccctgtcctaagaactggatctgctacaagaacaactgctaccagttcttcgacgagagcaagaattggtacgagagccaggccagctgcatgagccagaatgccagcctgctgaaggtgtacagcaaagaggaccaggacctgctgaaactggtcaagagcgcccactggatgggccttgtgcacatccccaccaatggctcttggcagtgggaggacggcagcattctgagccctaacctgctgaccatcatcgagatgcagaagggcgactgcgccctgtacgccagcagctttaagggcttcatcgagaattgcagcaccccgaacacctacatctgtatgcagagaaccgttggcggaggcggaagtggaggcggaggatctggcggcggaggctctgacctctttaatcaagaagtccagattccactcaccgaatcctactgcggaccttgtccaaaaaattggatttgttataagaacaactgttatcaattctttgatgagtctaaaaattggtatgagtcccaggcttcctgcatgtctcagaacgcttctctgctgaaagtctactctaaagaagatcaggatctcctgaagctcgtcaagtctgcccattggatggggctcgtccacattcctaccaacggaagctggcaatgggaagatggctccatcctgtctccaaatctgctcacgattattgaaatgcagaaaggggattgtgctctctacgccagctccttcaagggatttattgagaactgtagcacgcccaatacttatatctgtatgcaacggaccgtgacgcgtaacaagatcctggtcaagcagagccctatgctggtggcctacgacaacgccgtgaacctgagctgcaagtacagctacaacctgttcagcagagagttccgggccagcctgcacaaaggactggattctgctgtggaagtgtgcgtggtgtacggcaactacagccagcagctccaggtgtacagcaagaccggcttcaactgcgacggcaagctgggcaatgagagcgtgaccttctacctgcaaaacctgtacgtgaaccagaccgacatctatttctgcaagatcgaagtgatgtacccgcctccttacctggacaacgagaagtccaacggcaccatcatccacgtgaagggcaagcacctgtgtccttctccactgttccccggacctagcaagcctttctgggtgctcgttgttgttggcggcgtgctggcctgttatagcctgctggttaccgtggccttcatcatcttttgggtccgaagcaagcggagccggctgctgcacagcgactacatgaacatgacccctagacggcccggaccaaccagaaagcactaccagccttacgctcctcctagagacttcgccgcctatagaagtagcactagtagagtgaagttcagcagaagcgccgacgcccctgcctaccagcagggacagaaccaactgtacaacgagctgaacctgggcagacgggaagagtacgacgtgctggacaagcggagaggcagggaccctgagatgggcggaaagccccagcggagaaagaacccccaggaaggactgtataacgaactccagaaagacaagatggccgaagcctacagcgagatcggcatgaagggcgagcggagaagaggcaagggccacgatggcctgtaccagggcctgagcaccgccaccaaggacacctatgacgccctgcacatgcaggccctgcctccaaga

SEQ ID NO: 6026 - DNA, 1881 bp, Artificial Sequence
  Synthetic Polynucleotide
atggccttaccagtgaccgccttgctcctgccgctggccttgctgctccacgccgccaggccgctgttcaatcaagaggtgcagatccctctgaccgagagctactgtggcccctgtcctaagaactggatctgctacaagaacaactgctaccagttcttcgacgagagcaagaattggtacgagagccaggccagctgcatgagccagaatgccagcctgctgaaggtgtacagcaaagaggaccaggacctgctgaaactggtcaagagcgcccactggatgggccttgtgcacatccccaccaatggctcttggcagtgggaggacggcagcattctgagccctaacctgctgaccatcatcgagatgcagaagggcgactgcgccctgtacgccagcagctttaagggctacatcgagaattgcagcaccccgaacacctacatctgtatgcagagaaccgtttctggcggaggcggctctggaggaggcggaagtggcggcggaggcgacctctttaatcaagaagtccagattccactcaccgaatcctactgcggaccttgtccaaaaaattggatttgttataagaacaactgttatcaattctttgatgagtctaaaaattggtatgagtcccaggcttcctgcatgtctcagaacgcttctctgctgaaagtctactctaaagaagatcaggatctcctgaagctcgtcaagtctgcccattggatggggctcgtccacattcctaccaacggaagctggcaatgggaagatggctccatcctgtctccaaatctgctcacgattattgaaatgcagaaaggggattgtgctctctacgccagctccttcaagggatatattgagaactgtagcacgcccaatacttatatctgtatgcaacggaccgtgacgcgtaacaagatcctggtcaagcagagccctatgctggtggcctacgacaacgccgtgaacctgagctgcaagtacagctacaacctgttcagcagagagttccgggccagcctgcacaaaggactggattctgctgtggaagtgtgcgtggtgtacggcaactacagccagcagctccaggtgtacagcaagaccggcttcaactgcgacggcaagctgggcaatgagagcgtgaccttctacctgcaaaacctgtacgtgaaccagaccgacatctatttctgcaagatcgaagtgatgtacccgcctccttacctggacaacgagaagtccaacggcaccatcatccacgtgaagggcaagcacctgtgtccttctccactgttccccggacctagcaagcctttctgggtgctcgttgttgttggcggcgtgctggcctgttatagcctgctggttaccgtggccttcatcatcttttgggtccgaagcaagcggagccggctgctgcacagcgactacatgaacatgacccctagacggcccggaccaaccagaaagcactaccagccttacgctcctcctagagacttcgccgcctatagaagtagcactagtagagtgaagttcagcagaagcgccgacgcccctgcctaccagcagggacagaaccaactgtacaacgagctgaacctgggcagacgggaagagtacgacgtgctggacaagcggagaggcagggaccctgagatgggcggaaagccccagcggagaaagaacccccaggaaggactgtataacgaactccagaaagacaagatggccgaagcctacagcgagatcggcatgaagggcgagcggagaagaggcaagggccacgatggcctgtaccagggcctgagcaccgccaccaaggacacctatgacgccctgcacatgcaggccctgcctccaaga

SEQ ID NO: 6027 - DNA, 3267 bp, Artificial Sequence
  Synthetic Polynucleotide
atggccttaccagtgaccgccttgctcctgccgctggccttgctgctccacgccgccaggccggacatccagatgacacagagccctagcagcctgtctgccagcgtgggagacagagtgaccatcacatgcaaggccagcgaccacatcaacaactggctggcctggtatcagcagaagcctggacaggcccctaagctgctgatctacggcgctaccacactggaaacaggcgtgcccagcagattttctggcagcggctctggcaccgactacaccctgacaatatccagcctccagcctgaggacttcgccacctactactgtcagcagagctggaacaccccttggacattcggccagggcaccaagctggaaatcaagagactcgagacaacacctggcgagagaagtagcctgcctgccttctatcctggcaccagcggctcttgttctggctgtggatctctgagcctgcctctgctggctggactggttgctgctgatgctgtggcctctctgctgattgtgggagccgtgttcctgtgcgccagacctagaagaagccccgctcaagaggacggcaaggtgtacatcaacatgcccggcagaggaagcactagtagagtgaagttcagcagaagcgccgacgcccctgcctaccagcagggacagaaccaactgtacaacgagctgaacctgggcagacgggaagagtacgacgtgctggacaagcggagaggcagggaccctgagatgggcggaaagccccagcggagaaagaacccccaggaaggactgtataacgaactccagaaagacaagatggccgaagcctacagcgagatcggcatgaagggcgagcggagaagaggcaagggccacgatggcctgtaccagggcctgagcaccgccaccaaggacacctatgacgccctgcacatgcaggccctgcctccaagaagggccaagcgatctggatctggagcaacaaacttctcactactcaaacaagcaggtgacgtggaggagaatcccgggcctatggactggatttggcgcatccttttccttgtcggcgctgctaccggcgcgcattccttcgaacaagttcagcttcaacagcctggcgctgagctggtcaaacctggcgcttctgtgaagatgagctgcaaagccagcggctacgccttcagcagctactggatcaactggatgaagcagaaacccggccagggactcgaatggatcggccaaatctatcccggcgacggcgacaccaactacaacggcaagttcaagggcagagccacactgaccgccgatacctctagcagcacagcctacatgcagctgagcagcctgaccagcgaagatagcgccgtgtacttctgtgcccggtccatcacaacagtcgtgggctgcgctatggactattggggccagggaacaagcgtgaccgtgtctagtacgcgtctgcactgtgtcggcgacacctatccatccaacgatcggtgctgccatgagtgccggcctggcaacggaatggtgtctcgatgttctcggagtcagaataccgtctgtaggccatgcggacccggcttttacaatgatgtcgtgtcctccaaaccttgcaagccatgtacttggtgcaatctgcggagcggctctgagcggaaacagctgtgcactgctacccaggacacagtgtgtagatgcagagccggaactcagcccctggactcttataagcccggcgttgactgcgctccatgtccaccagggcacttttccccaggcgacaatcaagcctgtaaaccgtggacaaattgcacactggccgggaaacacaccttgcagccagccagcaattcctccgatgccatctgtgaagatcgggacccaccagccactcagcctcaagaaactcaggggcctcctgctaggcccattacagtgcaacctaccgaggcttggccccggacatctcagggaccttctacaaggccagtggaagtgccaggcggtagagctgtggctgctatccttggattgggcctcgttctcggactgttgggaccacttgcaatcctgctggctctctatctgctgcggcgggatcagagactccctccagatgctcataagccacctggcggcggatctttcaggaccccaattcaagaagaacaagccgacgctcactctaccctggctaagatcagctctagacgggttaagttttccagatccgcagacgcacccgcttaccaacaagggcagaaccaactctacaatgaacttaatttggggcggagggaagagtacgacgttctggacaaaaggaggggacgagatcccgagatgggcggaaagcctcagcgaaggaagaatccgcaagaggggctttataacgaactccagaaagataaaatggcagaagcctatagtgagattgggatgaagggagaaaggaggaggggtaaaggtcacgatgggttgtaccaaggattgagcacagccactaaagatacctatgatgcgctccacatgcaggccctgccgccaagacgcgccaagagaagcggatctggcgtgaagcagaccctgaatttcgacctgctgaagctggctggcgacgtggaatccaacccaggccctggccatatgaccgagtacaagcccacggtgcgcctcgccacccgcgacgacgtccccagggccgtacgcaccctcgccgccgcgttcgccgactaccccgccacgcgccacaccgtcgatccggaccgccacatcgagcgggtcaccgagctgcaagaactcttcctcacgcgcgtcgggctcgacatcggcaaggtgtgggtcgcggacgacggcgccgcggtggcggtctggaccacgccggagagcgtcgaagcgggggcggtgttcgccgagatcggcccgcgcatggccgagttgagcggttcccggctggccgcgcagcaacagatggaaggcctcctggcgccgcaccggcccaaggagcccgcgtggttcctggccaccgtcggcgtctcgcccgaccaccagggcaagggtctgggcagcgccgtcgtgctccccggagtggaggcggccgagcgcgccggggtgcccgccttcctggagacctccgcgccccgcaacctccccttctacgagcggctcggcttcaccgtcaccgccgacgtcgaggtgcccgaaggaccgcgcacctggtgcatgacccgcaagcccggtgcctga

SEQ ID NO: 6028 - DNA, 3423 bp, Artificial Sequence
  Synthetic Polynucleotide
atggccttaccagtgaccgccttgctcctgccgctggccttgctgctccacgccgccaggccggcatgcgaagtgcagctgcttgaaagtggcggcggactgattcagcctggcggatctctgagactgagctgtgccgccagcggcttcaccttttctagccacgccatgacctgggtccgacaggcacctggaaaagggcttgaatgggtgtccgccatcagcggctctggcgattacacacactacgccgacagcgtgaagggcagattcaccatcagcagagacaacagcaagaacaccgtgtacctccagatgaacagcctgagagccgaggacagcgccgtgtattattgcgccaaggatgaggatggcggcagcctgcttggacacagaggacaaggcaccctggtcaccgtttcttccggtaccggcggaggcggatctggcggcggaggtagcggtggcggaggatctgaattcggatctctcgagacaacacctggcgagagaagtagcctgcctgccttctatcctggcaccagcggctcttgttctggctgtggatctctgagcctgcctctgctggctggactggttgctgctgatgctgtggcctctctgctgattgtgggagccgtgttcctgtgcgccagacctagaagaagccccgctcaagaggacggcaaggtgtacatcaacatgcccggcagaggaagcactagtagagtgaagttcagcagaagcgccgacgcccctgcctaccagcagggacagaaccaactgtacaacgagctgaacctgggcagacgggaagagtacgacgtgctggacaagcggagaggcagggaccctgagatgggcggaaagccccagcggagaaagaacccccaggaaggactgtataacgaactccagaaagacaagatggccgaagcctacagcgagatcggcatgaagggcgagcggagaagaggcaagggccacgatggcctgtaccagggcctgagcaccgccaccaaggacacctatgacgccctgcacatgcaggccctgcctccaagaagggccaagcgatctggatctggagcaacaaacttctcactactcaaacaagcaggtgacgtggaggagaatcccgggcctatggactggatttggcgcatccttttccttgtcggcgctgctaccggcgcgcattccgggcccgaagtgcagctggttgaatctggcggaggactggttcaggctggcggatctctgagactgtcttgtgccgccagcggcagaacctttagcatgggctggtttagacaggcccctggcaaagagagagagttcgtcgccgccatcacatactctggcggcagcccttactacgccgactctgtgaagggcagattcaccatcagccgggacaacgccaagaacaccgtgtacctccagatgaacagcctgaagcctgaggacaccgccgtgtactactgcgccgccaatccaacatacggcagcgactggaacgccgagaattggggccagggaacccaagtgacagtgtctagcggatccggcggcggaggatctggcggaggcggatctgggggcggaggctctttcgaaggcagcacgcgtctgcactgtgtcggcgacacctatccatccaacgatcggtgctgccatgagtgccggcctggcaacggaatggtgtctcgatgttctcggagtcagaataccgtctgtaggccatgcggacccggcttttacaatgatgtcgtgtcctccaaaccttgcaagccatgtacttggtgcaatctgcggagcggctctgagcggaaacagctgtgcactgctacccaggacacagtgtgtagatgcagagccggaactcagcccctggactcttataagcccggcgttgactgcgctccatgtccaccagggcacttttccccaggcgacaatcaagcctgtaaaccgtggacaaattgcacactggccgggaaacacaccttgcagccagccagcaattcctccgatgccatctgtgaagatcgggacccaccagccactcagcctcaagaaactcaggggcctcctgctaggcccattacagtgcaacctaccgaggcttggccccggacatctcagggaccttctacaaggccagtggaagtgccaggcggtagagctgtggctgctatccttggattgggcctcgttctcggactgttgggaccacttgcaatcctgctggctctctatctgctgcggcgggatcagagactccctccagatgctcataagccacctggcggcggatctttcaggaccccaattcaagaagaacaagccgacgctcactctaccctggctaagatcagctctagacgggttaagttttccagatccgcagacgcacccgcttaccaacaagggcagaaccaactctacaatgaacttaatttggggcggagggaagagtacgacgttctggacaaaaggaggggacgagatcccgagatgggcggaaagcctcagcgaaggaagaatccgcaagaggggctttataacgaactccagaaagataaaatggcagaagcctatagtgagattgggatgaagggagaaaggaggaggggtaaaggtcacgatgggttgtaccaaggattgagcacagccactaaagatacctatgatgcgctccacatgcaggccctgccgccaagacgcgccaagagaagcggatctggcgtgaagcagaccctgaatttcgacctgctgaagctggctggcgacgtggaatccaacccaggccctggccatatgaccgagtacaagcccacggtgcgcctcgccacccgcgacgacgtccccagggccgtacgcaccctcgccgccgcgttcgccgactaccccgccacgcgccacaccgtcgatccggaccgccacatcgagcgggtcaccgagctgcaagaactcttcctcacgcgcgtcgggctcgacatcggcaaggtgtgggtcgcggacgacggcgccgcggtggcggtctggaccacgccggagagcgtcgaagcgggggcggtgttcgccgagatcggcccgcgcatggccgagttgagcggttcccggctggccgcgcagcaacagatggaaggcctcctggcgccgcaccggcccaaggagcccgcgtggttcctggccaccgtcggcgtctcgcccgaccaccagggcaagggtctgggcagcgccgtcgtgctccccggagtggaggcggccgagcgcgccggggtgcccgccttcctggagacctccgcgccccgcaacctccccttctacgagcggctcggcttcaccgtcaccgccgacgtcgaggtgcccgaaggaccgcgcacctggtgcatgacccgcaagcccggtgcctga

SEQ ID NO: 6029 - DNA, 3870 bp, Artificial Sequence
  Synthetic Polynucleotide
atggccttaccagtgaccgccttgctcctgccgctggccttgctgctccacgccgccaggccggacatccagatgacacagagccctagcagcctgtctgccagcgtgggagacagagtgaccatcacatgcaaggccagcgaccacatcaacaactggctggcctggtatcagcagaagcctggacaggcccctaagctgctgatctacggcgctaccacactggaaacaggcgtgcccagcagattttctggcagcggctctggcaccgactacaccctgacaatatccagcctccagcctgaggacttcgccacctactactgtcagcagagctggaacaccccttggacattcggccagggcaccaagctggaaatcaagagactcgagggacagcctaaggccaatcctaccgtgacactgttccctccaagcagcgaagaactccaggccaacaaggccacacttgtgtgcctgatctccgacttctaccctggggctgtgacagtggcttggaaggccgatggatctcctgtgaaagccggcgtggaaaccaccaagccatccaagcagagcaacaacaaatacgccgccagctcctacctgagcctgacacctgagcagtggaagtcccacagatcctacagctgccaagtgacccacgaaggcagcaccgtggaaaagacagtggcccctacagagtgcagcggatccacaacacctggcgagagaagtagcctgcctgccttctatcctggcaccagcggctcttgttctggctgtggatctctgagcctgcctctgctggctggactggttgctgctgatgctgtggcctctctgctgattgtgggagccgtgttcctgtgcgccagacctagaagaagccccgctcaagaggacggcaaggtgtacatcaacatgcccggcagaggaagcactagtagagtgaagttcagcagaagcgccgacgcccctgcctaccagcagggacagaaccaactgtacaacgagctgaacctgggcagacgggaagagtacgacgtgctggacaagcggagaggcagggaccctgagatgggcggaaagccccagcggagaaagaacccccaggaaggactgtataacgaactccagaaagacaagatggccgaagcctacagcgagatcggcatgaagggcgagcggagaagaggcaagggccacgatggcctgtaccagggcctgagcaccgccaccaaggacacctatgacgccctgcacatgcaggccctgcctccaagaagggccaagcgatctggatctggagcaacaaacttctcactactcaaacaagcaggtgacgtggaggagaatcccgggcctatggactggatttggcgcatccttttccttgtcggcgctgctaccggcgcgcattccttcgaacaagttcagcttcaacagcctggcgctgagctggtcaaacctggcgcttctgtgaagatgagctgcaaagccagcggctacgccttcagcagctactggatcaactggatgaagcagaaacccggccagggactcgaatggatcggccaaatctatcccggcgacggcgacaccaactacaacggcaagttcaagggcagagccacactgaccgccgatacctctagcagcacagcctacatgcagctgagcagcctgaccagcgaagatagcgccgtgtacttctgtgcccggtccatcacaacagtcgtgggctgcgctatggactattggggccagggaacaagcgtgaccgtgtctagtacgcgtgcctctacaaagggaccctccgtgtttcctctggctcccagcagcaagtctacaagcggaggaacagccgctctgggctgcctggtcaaggattactttcccgagcctgtgaccgtgtcctggaatagcggagcactgacaagcggcgtgcacacctttccagccgtgctgcaaagcagcggcctgtactctctgagcagcgtggtcacagtgcctagctctagcctgggcacccagacctacatctgcaatgtgaaccacaagcctagcaacaccaaggtggacaagagagtggaacccaagagctgtggtaccctgcactgtgtcggcgacacctatccatccaacgatcggtgctgccatgagtgccggcctggcaacggaatggtgtctcgatgttctcggagtcagaataccgtctgtaggccatgcggacccggcttttacaatgatgtcgtgtcctccaaaccttgcaagccatgtacttggtgcaatctgcggagcggctctgagcggaaacagctgtgcactgctacccaggacacagtgtgtagatgcagagccggaactcagcccctggactcttataagcccggcgttgactgcgctccatgtccaccagggcacttttccccaggcgacaatcaagcctgtaaaccgtggacaaattgcacactggccgggaaacacaccttgcagccagccagcaattcctccgatgccatctgtgaagatcgggacccaccagccactcagcctcaagaaactcaggggcctcctgctaggcccattacagtgcaacctaccgaggcttggccccggacatctcagggaccttctacaaggccagtggaagtgccaggcggtagagctgtggctgctatccttggattgggcctcgttctcggactgttgggaccacttgcaatcctgctggctctctatctgctgcggcgggatcagagactccctccagatgctcataagccacctggcggcggatctttcaggaccccaattcaagaagaacaagccgacgctcactctaccctggctaagatcagctctagacgggttaagttttccagatccgcagacgcacccgcttaccaacaagggcagaaccaactctacaatgaacttaatttggggcggagggaagagtacgacgttctggacaaaaggaggggacgagatcccgagatgggcggaaagcctcagcgaaggaagaatccgcaagaggggctttataacgaactccagaaagataaaatggcagaagcctatagtgagattgggatgaagggagaaaggaggaggggtaaaggtcacgatgggttgtaccaaggattgagcacagccactaaagatacctatgatgcgctccacatgcaggccctgccgccaagacgcgccaagagaagcggatctggcgtgaagcagaccctgaatttcgacctgctgaagctggctggcgacgtggaatccaacccaggccctggccatatggctacctacgaggtgctgtgcgaggtggcaagaaagctgggcaccgacgacagagaagtggtgctgttcctgctgaacgtgttcatccctcagcctacactggcccagctgatcggtgcactgagagccctgaaagaggaaggccggctgacctttcctctgctggccgaatgcctgttcagagccggaagaagggatctgctgcgggacctgctgcatctggaccccagatttctggaaagacacctggccggcaccatgagctacttcagcccttaccagctgaccgtgctgcacgttgacggcgaactgtgcgccagagatattcggagcctgatcttcctgagcaaggacaccatcggcagccggtctacccctcagacatttctgcactgggtgtactgcatggaaaacctggacctgctcggccccacagatgtggatgccctgatgtccatgctgagaagcctgagcagagtggacctccagagacaggtgcagacactgatgggactgcacctgagcggacctagccacagccagcactacagacacacccct

SEQ ID NO: 6030 - DNA, 4029 bp, Artificial Sequence
  Synthetic Polynucleotide
atggccttaccagtgaccgccttgctcctgccgctggccttgctgctccacgccgccaggccggacatccagatgacacagagccctagcagcctgtctgccagcgtgggagacagagtgaccatcacatgcaaggccagcgaccacatcaacaactggctggcctggtatcagcagaagcctggacaggcccctaagctgctgatctacggcgctaccacactggaaacaggcgtgcccagcagattttctggcagcggctctggcaccgactacaccctgacaatatccagcctccagcctgaggacttcgccacctactactgtcagcagagctggaacaccccttggacattcggccagggcaccaagctggaaatcaagagactcgagggacagcctaaggccaatcctaccgtgacactgttccctccaagcagcgaagaactccaggccaacaaggccacacttgtgtgcctgatctccgacttctaccctggggctgtgacagtggcttggaaggccgatggatctcctgtgaaagccggcgtggaaaccaccaagccatccaagcagagcaacaacaaatacgccgccagctcctacctgagcctgacacctgagcagtggaagtcccacagatcctacagctgccaagtgacccacgaaggcagcaccgtggaaaagacagtggcccctacagagtgcagcggatccacaacacctggcgagagaagtagcctgcctgccttctatcctggcaccagcggctcttgttctggctgtggatctctgagcctgcctctgctggctggactggttgctgctgatgctgtggcctctctgctgattgtgggagccgtgttcctgtgcgccagacctagaagaagccccgctcaagaggacggcaaggtgtacatcaacatgcccggcagaggaagcactagtagagtgaagttcagcagaagcgccgacgcccctgcctaccagcagggacagaaccaactgtacaacgagctgaacctgggcagacgggaagagtacgacgtgctggacaagcggagaggcagggaccctgagatgggcggaaagccccagcggagaaagaacccccaggaaggactgtataacgaactccagaaagacaagatggccgaagcctacagcgagatcggcatgaagggcgagcggagaagaggcaagggccacgatggcctgtaccagggcctgagcaccgccaccaaggacacctatgacgccctgcacatgcaggccctgcctccaagaagggccaagcgatctggatctggagcaacaaacttctcactactcaaacaagcaggtgacgtggaggagaatcccgggcctatggactggatttggcgcatccttttccttgtcggcgctgctaccggcgcgcattccttcgaacaagttcagcttcaacagcctggcgctgagctggtcaaacctggcgcttctgtgaagatgagctgcaaagccagcggctacgccttcagcagctactggatcaactggatgaagcagaaacccggccagggactcgaatggatcggccaaatctatcccggcgacggcgacaccaactacaacggcaagttcaagggcagagccacactgaccgccgatacctctagcagcacagcctacatgcagctgagcagcctgaccagcgaagatagcgccgtgtacttctgtgcccggtccatcacaacagtcgtgggctgcgctatggactattggggccagggaacaagcgtgaccgtgtctagtacgcgtgcctctacaaagggaccctccgtgtttcctctggctcccagcagcaagtctacaagcggaggaacagccgctctgggctgcctggtcaaggattactttcccgagcctgtgaccgtgtcctggaatagcggagcactgacaagcggcgtgcacacctttccagccgtgctgcaaagcagcggcctgtactctctgagcagcgtggtcacagtgcctagctctagcctgggcacccagacctacatctgcaatgtgaaccacaagcctagcaacaccaaggtggacaagagagtggaacccaagagctgtggtaccctgcactgtgtcggcgacacctatccatccaacgatcggtgctgccatgagtgccggcctggcaacggaatggtgtctcgatgttctcggagtcagaataccgtctgtaggccatgcggacccggcttttacaatgatgtcgtgtcctccaaaccttgcaagccatgtacttggtgcaatctgcggagcggctctgagcggaaacagctgtgcactgctacccaggacacagtgtgtagatgcagagccggaactcagcccctggactcttataagcccggcgttgactgcgctccatgtccaccagggcacttttccccaggcgacaatcaagcctgtaaaccgtggacaaattgcacactggccgggaaacacaccttgcagccagccagcaattcctccgatgccatctgtgaagatcgggacccaccagccactcagcctcaagaaactcaggggcctcctgctaggcccattacagtgcaacctaccgaggcttggccccggacatctcagggaccttctacaaggccagtggaagtgccaggcggtagagctgtggctgctatccttggattgggcctcgttctcggactgttgggaccacttgcaatcctgctggctctctatctgctgcggcgggatcagagactccctccagatgctcataagccacctggcggcggatctttcaggaccccaattcaagaagaacaagccgacgctcactctaccctggctaagatcagctctagacgggttaagttttccagatccgcagacgcacccgcttaccaacaagggcagaaccaactctacaatgaacttaatttggggcggagggaagagtacgacgttctggacaaaaggaggggacgagatcccgagatgggcggaaagcctcagcgaaggaagaatccgcaagaggggctttataacgaactccagaaagataaaatggcagaagcctatagtgagattgggatgaagggagaaaggaggaggggtaaaggtcacgatgggttgtaccaaggattgagcacagccactaaagatacctatgatgcgctccacatgcaggccctgccgccaagacgcgccaagagaagcggatctggcgtgaagcagaccctgaatttcgacctgctgaagctggctggcgacgtggaatccaacccaggccctggccatatgtccgactccaaggaggtccctagccttccatttttgcgacacttgctcgaagagttggacagccatgaggacagcttgctgctgtttctgtgtcacgacgcggccccgggctgcacgacggtcacgcaagctttgtgctcgcttagccaacagcgcaagctgaccctcgcggctctggtcgagatgctctacgtgctgcagcgtatggatcttctcaagagccgcttcgggctcagcaaggagggggccgagcaattgctgggcacaagctttctcacgcgctaccgcaagctcatggtttgcgtgggtgaggagctcgactcgagcgagctacgcgctctacgcttgttcgcgtgcaacctgaatccgagcctgagcacggcgctttctgagagcagccgctttgtcgagcttgtactcgcgcttgaaaacgtaggactcgtctcgccatcgagtgtttccgtgcttgcggacatgttgcgcactcttcggcgcctcgatttgtgccagcagcttgttgagtacgaacaacaagagcaagccaggtaccgttactgttacgcggcctcgccctcattgccagttcgtacgttacgtcgggggcacggcgcgagtgaacacgagcagctgtgcatgcccgtgcaagaatcctctgacagccccgagctgctgcgcacgcccgtacaagaatcctccagcgacagccccgagcaaacgact

SEQ ID NO: 6031 - DNA, 3906 bp, Artificial Sequence
  Synthetic Polynucleotide
atggccttaccagtgaccgccttgctcctgccgctggccttgctgctccacgccgccaggccggacatccagatgacacagagccctagcagcctgtctgccagcgtgggagacagagtgaccatcacatgcaaggccagcgaccacatcaacaactggctggcctggtatcagcagaagcctggacaggcccctaagctgctgatctacggcgctaccacactggaaacaggcgtgcccagcagattttctggcagcggctctggcaccgactacaccctgacaatatccagcctccagcctgaggacttcgccacctactactgtcagcagagctggaacaccccttggacattcggccagggcaccaagctggaaatcaagagactcgagggacagcctaaggccaatcctaccgtgacactgttccctccaagcagcgaagaactccaggccaacaaggccacacttgtgtgcctgatctccgacttctaccctggggctgtgacagtggcttggaaggccgatggatctcctgtgaaagccggcgtggaaaccaccaagccatccaagcagagcaacaacaaatacgccgccagctcctacctgagcctgacacctgagcagtggaagtcccacagatcctacagctgccaagtgacccacgaaggcagcaccgtggaaaagacagtggcccctacagagtgcagcggatccacaacacctggcgagagaagtagcctgcctgccttctatcctggcaccagcggctcttgttctggctgtggatctctgagcctgcctctgctggctggactggttgctgctgatgctgtggcctctctgctgattgtgggagccgtgttcctgtgcgccagacctagaagaagccccgctcaagaggacggcaaggtgtacatcaacatgcccggcagaggaagcactagtagagtgaagttcagcagaagcgccgacgcccctgcctaccagcagggacagaaccaactgtacaacgagctgaacctgggcagacgggaagagtacgacgtgctggacaagcggagaggcagggaccctgagatgggcggaaagccccagcggagaaagaacccccaggaaggactgtataacgaactccagaaagacaagatggccgaagcctacagcgagatcggcatgaagggcgagcggagaagaggcaagggccacgatggcctgtaccagggcctgagcaccgccaccaaggacacctatgacgccctgcacatgcaggccctgcctccaagaagggccaagcgatctggatctggagcaacaaacttctcactactcaaacaagcaggtgacgtggaggagaatcccgggcctatggactggatttggcgcatccttttccttgtcggcgctgctaccggcgcgcattccttcgaacaagttcagcttcaacagcctggcgctgagctggtcaaacctggcgcttctgtgaagatgagctgcaaagccagcggctacgccttcagcagctactggatcaactggatgaagcagaaacccggccagggactcgaatggatcggccaaatctatcccggcgacggcgacaccaactacaacggcaagttcaagggcagagccacactgaccgccgatacctctagcagcacagcctacatgcagctgagcagcctgaccagcgaagatagcgccgtgtacttctgtgcccggtccatcacaacagtcgtgggctgcgctatggactattggggccagggaacaagcgtgaccgtgtctagtacgcgtgcctctacaaagggaccctccgtgtttcctctggctcccagcagcaagtctacaagcggaggaacagccgctctgggctgcctggtcaaggattactttcccgagcctgtgaccgtgtcctggaatagcggagcactgacaagcggcgtgcacacctttccagccgtgctgcaaagcagcggcctgtactctctgagcagcgtggtcacagtgcctagctctagcctgggcacccagacctacatctgcaatgtgaaccacaagcctagcaacaccaaggtggacaagagagtggaacccaagagctgtggtaccctgcactgtgtcggcgacacctatccatccaacgatcggtgctgccatgagtgccggcctggcaacggaatggtgtctcgatgttctcggagtcagaataccgtctgtaggccatgcggacccggcttttacaatgatgtcgtgtcctccaaaccttgcaagccatgtacttggtgcaatctgcggagcggctctgagcggaaacagctgtgcactgctacccaggacacagtgtgtagatgcagagccggaactcagcccctggactcttataagcccggcgttgactgcgctccatgtccaccagggcacttttccccaggcgacaatcaagcctgtaaaccgtggacaaattgcacactggccgggaaacacaccttgcagccagccagcaattcctccgatgccatctgtgaagatcgggacccaccagccactcagcctcaagaaactcaggggcctcctgctaggcccattacagtgcaacctaccgaggcttggccccggacatctcagggaccttctacaaggccagtggaagtgccaggcggtagagctgtggctgctatccttggattgggcctcgttctcggactgttgggaccacttgcaatcctgctggctctctatctgctgcggcgggatcagagactccctccagatgctcataagccacctggcggcggatctttcaggaccccaattcaagaagaacaagccgacgctcactctaccctggctaagatcagctctagacgggttaagttttccagatccgcagacgcacccgcttaccaacaagggcagaaccaactctacaatgaacttaatttggggcggagggaagagtacgacgttctggacaaaaggaggggacgagatcccgagatgggcggaaagcctcagcgaaggaagaatccgcaagaggggctttataacgaactccagaaagataaaatggcagaagcctatagtgagattgggatgaagggagaaaggaggaggggtaaaggtcacgatgggttgtaccaaggattgagcacagccactaaagatacctatgatgcgctccacatgcaggccctgccgccaagacgcgccaagagaagcggatctggcgtgaagcagaccctgaatttcgacctgctgaagctggctggcgacgtggaatccaacccaggccctggccatatgaccgagtacaagcccacggtgcgcctcgccacccgcgacgacgtccccagggccgtacgcaccctcgccgccgcgttcgccgactaccccgccacgcgccacaccgtcgatccggaccgccacatcgagcgggtcaccgagctgcaagaactcttcctcacgcgcgtcgggctcgacatcggcaaggtgtgggtcgcggacgacggcgccgcggtggcggtctggaccacgccggagagcgtcgaagcgggggcggtgttcgccgagatcggcccgcgcatggccgagttgagcggttcccggctggccgcgcagcaacagatggaaggcctcctggcgccgcaccggcccaaggagcccgcgtggttcctggccaccgtcggcgtctcgcccgaccaccagggcaagggtctgggcagcgccgtcgtgctccccggagtggaggcggccgagcgcgccggggtgcccgccttcctggagacctccgcgccccgcaacctccccttctacgagcggctcggcttcaccgtcaccgccgacgtcgaggtgcccgaaggaccgcgcacctggtgcatgacccgcaagcccggtgcctga

SEQ ID NO: 6032 - DNA, 4317 bp, Artificial Sequence
  Synthetic Polynucleotide
atggccttaccagtgaccgccttgctcctgccgctggccttgctgctccacgccgccaggccggaagtgcagctggttgaatctggcggaggactggttcaggctggcggatctctgagactgtcttgtgccgccagcggcagaacctttagcatgggctggtttagacaggcccctggcaaagagagagagttcgtcgccgccatcacatactctggcggcagcccttactacgccgactctgtgaagggcagattcaccatcagccgggacaacgccaagaacaccgtgtacctccagatgaacagcctgaagcctgaggacaccgccgtgtactactgcgccgccaatccaacatacggcagcgactggaacgccgagaattggggccagggaacccaagtgacagtgtctagcggtaccggcggaggcggatctggcggcggaggtagcggtggcggaggatctgaattcgacatccagatgacacagagccctagcagcctgtctgccagcgtgggagacagagtgaccatcacatgcaaggccagcgaccacatcaacaactggctggcctggtatcagcagaagcctggacaggcccctaagctgctgatctacggcgctaccacactggaaacaggcgtgcccagcagattttctggcagcggctctggcaccgactacaccctgacaatatccagcctccagcctgaggacttcgccacctactactgtcagcagagctggaacaccccttggacattcggccagggcaccaagctggaaatcaagagactcgagggacagcctaaggccaatcctaccgtgacactgttccctccaagcagcgaagaactccaggccaacaaggccacacttgtgtgcctgatctccgacttctaccctggggctgtgacagtggcttggaaggccgatggatctcctgtgaaagccggcgtggaaaccaccaagccatccaagcagagcaacaacaaatacgccgccagctcctacctgagcctgacacctgagcagtggaagtcccacagatcctacagctgccaagtgacccacgaaggcagcaccgtggaaaagacagtggcccctacagagtgcagcggatccacaacacctggcgagagaagtagcctgcctgccttctatcctggcaccagcggctcttgttctggctgtggatctctgagcctgcctctgctggctggactggttgctgctgatgctgtggcctctctgctgattgtgggagccgtgttcctgtgcgccagacctagaagaagccccgctcaagaggacggcaaggtgtacatcaacatgcccggcagaggaagcactagtagagtgaagttcagcagaagcgccgacgcccctgcctaccagcagggacagaaccaactgtacaacgagctgaacctgggcagacgggaagagtacgacgtgctggacaagcggagaggcagggaccctgagatgggcggaaagccccagcggagaaagaacccccaggaaggactgtataacgaactccagaaagacaagatggccgaagcctacagcgagatcggcatgaagggcgagcggagaagaggcaagggccacgatggcctgtaccagggcctgagcaccgccaccaaggacacctatgacgccctgcacatgcaggccctgcctccaagaagggccaagcgatctggatctggagcaacaaacttctcactactcaaacaagcaggtgacgtggaggagaatcccgggcctatggactggatttggcgcatccttttccttgtcggcgctgctaccggcgcgcattccttcgaacaagttcagcttcaacagcctggcgctgagctggtcaaacctggcgcttctgtgaagatgagctgcaaagccagcggctacgccttcagcagctactggatcaactggatgaagcagaaacccggccagggactcgaatggatcggccaaatctatcccggcgacggcgacaccaactacaacggcaagttcaagggcagagccacactgaccgccgatacctctagcagcacagcctacatgcagctgagcagcctgaccagcgaagatagcgccgtgtacttctgtgcccggtccatcacaacagtcgtgggctgcgctatggactattggggccagggaacaagcgtgaccgtgtctagtacgcgtgcctctacaaagggaccctccgtgtttcctctggctcccagcagcaagtctacaagcggaggaacagccgctctgggctgcctggtcaaggattactttcccgagcctgtgaccgtgtcctggaatagcggagcactgacaagcggcgtgcacacctttccagccgtgctgcaaagcagcggcctgtactctctgagcagcgtggtcacagtgcctagctctagcctgggcacccagacctacatctgcaatgtgaaccacaagcctagcaacaccaaggtggacaagagagtggaacccaagagctgtggtaccctgcactgtgtcggcgacacctatccatccaacgatcggtgctgccatgagtgccggcctggcaacggaatggtgtctcgatgttctcggagtcagaataccgtctgtaggccatgcggacccggcttttacaatgatgtcgtgtcctccaaaccttgcaagccatgtacttggtgcaatctgcggagcggctctgagcggaaacagctgtgcactgctacccaggacacagtgtgtagatgcagagccggaactcagcccctggactcttataagcccggcgttgactgcgctccatgtccaccagggcacttttccccaggcgacaatcaagcctgtaaaccgtggacaaattgcacactggccgggaaacacaccttgcagccagccagcaattcctccgatgccatctgtgaagatcgggacccaccagccactcagcctcaagaaactcaggggcctcctgctaggcccattacagtgcaacctaccgaggcttggccccggacatctcagggaccttctacaaggccagtggaagtgccaggcggtagagctgtggctgctatccttggattgggcctcgttctcggactgttgggaccacttgcaatcctgctggctctctatctgctgcggcgggatcagagactccctccagatgctcataagccacctggcggcggatctttcaggaccccaattcaagaagaacaagccgacgctcactctaccctggctaagatcagctctagacgggttaagttttccagatccgcagacgcacccgcttaccaacaagggcagaaccaactctacaatgaacttaatttggggcggagggaagagtacgacgttctggacaaaaggaggggacgagatcccgagatgggcggaaagcctcagcgaaggaagaatccgcaagaggggctttataacgaactccagaaagataaaatggcagaagcctatagtgagattgggatgaagggagaaaggaggaggggtaaaggtcacgatgggttgtaccaaggattgagcacagccactaaagatacctatgatgcgctccacatgcaggccctgccgccaagacgcgccaagagaagcggatctggcgtgaagcagaccctgaatttcgacctgctgaagctggctggcgacgtggaatccaacccaggccctggccatatgaccgagtacaagcccacggtgcgcctcgccacccgcgacgacgtccccagggccgtacgcaccctcgccgccgcgttcgccgactaccccgccacgcgccacaccgtcgatccggaccgccacatcgagcgggtcaccgagctgcaagaactcttcctcacgcgcgtcgggctcgacatcggcaaggtgtgggtcgcggacgacggcgccgcggtggcggtctggaccacgccggagagcgtcgaagcgggggcggtgttcgccgagatcggcccgcgcatggccgagttgagcggttcccggctggccgcgcagcaacagatggaaggcctcctggcgccgcaccggcccaaggagcccgcgtggttcctggccaccgtcggcgtctcgcccgaccaccagggcaagggtctgggcagcgccgtcgtgctccccggagtggaggcggccgagcgcgccggggtgcccgccttcctggagacctccgcgccccgcaacctccccttctacgagcggctcggcttcaccgtcaccgccgacgtcgaggtgcccgaaggaccgcgcacctggtgcatgacccgcaagcccggtgcctga

SEQ ID NO: 6033 - DNA, 4728 bp, Artificial Sequence
  Synthetic Polynucleotide
atggccttaccagtgaccgccttgctcctgccgctggccttgctgctccacgccgccaggccggaagtgcagctggttgaatctggcggaggactggttcaggctggcggatctctgagactgtcttgtgccgccagcggcagaacctttagcatgggctggtttagacaggcccctggcaaagagagagagttcgtcgccgccatcacatactctggcggcagcccttactacgccgactctgtgaagggcagattcaccatcagccgggacaacgccaagaacaccgtgtacctccagatgaacagcctgaagcctgaggacaccgccgtgtactactgcgccgccaatccaacatacggcagcgactggaacgccgagaattggggccagggaacccaagtgacagtgtctagcggtaccggcggaggcggatctggcggcggaggtagcggtggcggaggatctgaattcgacatccagatgacacagagccctagcagcctgtctgccagcgtgggagacagagtgaccatcacatgcaaggccagcgaccacatcaacaactggctggcctggtatcagcagaagcctggacaggcccctaagctgctgatctacggcgctaccacactggaaacaggcgtgcccagcagattttctggcagcggctctggcaccgactacaccctgacaatatccagcctccagcctgaggacttcgccacctactactgtcagcagagctggaacaccccttggacattcggccagggcaccaagctggaaatcaagagactcgagggacagcctaaggccaatcctaccgtgacactgttccctccaagcagcgaagaactccaggccaacaaggccacacttgtgtgcctgatctccgacttctaccctggggctgtgacagtggcttggaaggccgatggatctcctgtgaaagccggcgtggaaaccaccaagccatccaagcagagcaacaacaaatacgccgccagctcctacctgagcctgacacctgagcagtggaagtcccacagatcctacagctgccaagtgacccacgaaggcagcaccgtggaaaagacagtggcccctacagagtgcagcggatccacaacacctggcgagagaagtagcctgcctgccttctatcctggcaccagcggctcttgttctggctgtggatctctgagcctgcctctgctggctggactggttgctgctgatgctgtggcctctctgctgattgtgggagccgtgttcctgtgcgccagacctagaagaagccccgctcaagaggacggcaaggtgtacatcaacatgcccggcagaggaagcactagtagagtgaagttcagcagaagcgccgacgcccctgcctaccagcagggacagaaccaactgtacaacgagctgaacctgggcagacgggaagagtacgacgtgctggacaagcggagaggcagggaccctgagatgggcggaaagccccagcggagaaagaacccccaggaaggactgtataacgaactccagaaagacaagatggccgaagcctacagcgagatcggcatgaagggcgagcggagaagaggcaagggccacgatggcctgtaccagggcctgagcaccgccaccaaggacacctatgacgccctgcacatgcaggccctgcctccaagaagggccaagcgatctggatctggagcaacaaacttctcactactcaaacaagcaggtgacgtggaggagaatcccgggcctatggactggatttggcgcatccttttccttgtcggcgctgctaccggcgcgcattccgggcccgaagtgcaactggttgaatccggtggcggcctggtgcaagcaggcggatctctcagacttagctgtgccgcctccggcagaaccttcacaatgggatggtttaggcaggctccagggaaagagagagagttcgtcgccgccatctctctgtctcccacactggcctactacgccgactctgtgaaaggccggttcaccatctccagagataatgccaagaacaccgtggtgctgcaaatgaactctctgaaacccgaggatacagccctgtactattgtgccgctgaccggaagtccgtgatgagcatcagacccgattactggggacagggcacacaagtcacagtgtcctctggatccggcggcggaggatctggcggaggcggatctgggggcggaggctctttcgaacaagttcagcttcaacagcctggcgctgagctggtcaaacctggcgcttctgtgaagatgagctgcaaagccagcggctacgccttcagcagctactggatcaactggatgaagcagaaacccggccagggactcgaatggatcggccaaatctatcccggcgacggcgacaccaactacaacggcaagttcaagggcagagccacactgaccgccgatacctctagcagcacagcctacatgcagctgagcagcctgaccagcgaagatagcgccgtgtacttctgtgcccggtccatcacaacagtcgtgggctgcgctatggactattggggccagggaacaagcgtgaccgtgtctagtacgcgtgcctctacaaagggaccctccgtgtttcctctggctcccagcagcaagtctacaagcggaggaacagccgctctgggctgcctggtcaaggattactttcccgagcctgtgaccgtgtcctggaatagcggagcactgacaagcggcgtgcacacctttccagccgtgctgcaaagcagcggcctgtactctctgagcagcgtggtcacagtgcctagctctagcctgggcacccagacctacatctgcaatgtgaaccacaagcctagcaacaccaaggtggacaagagagtggaacccaagagctgtggtaccctgcactgtgtcggcgacacctatccatccaacgatcggtgctgccatgagtgccggcctggcaacggaatggtgtctcgatgttctcggagtcagaataccgtctgtaggccatgcggacccggcttttacaatgatgtcgtgtcctccaaaccttgcaagccatgtacttggtgcaatctgcggagcggctctgagcggaaacagctgtgcactgctacccaggacacagtgtgtagatgcagagccggaactcagcccctggactcttataagcccggcgttgactgcgctccatgtccaccagggcacttttccccaggcgacaatcaagcctgtaaaccgtggacaaattgcacactggccgggaaacacaccttgcagccagccagcaattcctccgatgccatctgtgaagatcgggacccaccagccactcagcctcaagaaactcaggggcctcctgctaggcccattacagtgcaacctaccgaggcttggccccggacatctcagggaccttctacaaggccagtggaagtgccaggcggtagagctgtggctgctatccttggattgggcctcgttctcggactgttgggaccacttgcaatcctgctggctctctatctgctgcggcgggatcagagactccctccagatgctcataagccacctggcggcggatctttcaggaccccaattcaagaagaacaagccgacgctcactctaccctggctaagatcagctctagacgggttaagttttccagatccgcagacgcacccgcttaccaacaagggcagaaccaactctacaatgaacttaatttggggcggagggaagagtacgacgttctggacaaaaggaggggacgagatcccgagatgggcggaaagcctcagcgaaggaagaatccgcaagaggggctttataacgaactccagaaagataaaatggcagaagcctatagtgagattgggatgaagggagaaaggaggaggggtaaaggtcacgatgggttgtaccaaggattgagcacagccactaaagatacctatgatgcgctccacatgcaggccctgccgccaagacgcgccaagagaagcggatctggcgtgaagcagaccctgaatttcgacctgctgaagctggctggcgacgtggaatccaacccaggccctggccatatgaccgagtacaagcccacggtgcgcctcgccacccgcgacgacgtccccagggccgtacgcaccctcgccgccgcgttcgccgactaccccgccacgcgccacaccgtcgatccggaccgccacatcgagcgggtcaccgagctgcaagaactcttcctcacgcgcgtcgggctcgacatcggcaaggtgtgggtcgcggacgacggcgccgcggtggcggtctggaccacgccggagagcgtcgaagcgggggcggtgttcgccgagatcggcccgcgcatggccgagttgagcggttcccggctggccgcgcagcaacagatggaaggcctcctggcgccgcaccggcccaaggagcccgcgtggttcctggccaccgtcggcgtctcgcccgaccaccagggcaagggtctgggcagcgccgtcgtgctccccggagtggaggcggccgagcgcgccggggtgcccgccttcctggagacctccgcgccccgcaacctccccttctacgagcggctcggcttcaccgtcaccgccgacgtcgaggtgcccgaaggaccgcgcacctggtgcatgacccgcaagcccggtgcctga

SEQ ID NO: 6034 - DNA, 3927 bp, Artificial Sequence
  Synthetic Polynucleotide
atggccttaccagtgaccgccttgctcctgccgctggccttgctgctccacgccgccaggccggaagtgcagctggttgaatctggcggaggactggttcaggctggcggatctctgagactgtcttgtgccgccagcggcagaacctttagcatgggctggtttagacaggcccctggcaaagagagagagttcgtcgccgccatcacatactctggcggcagcccttactacgccgactctgtgaagggcagattcaccatcagccgggacaacgccaagaacaccgtgtacctccagatgaacagcctgaagcctgaggacaccgccgtgtactactgcgccgccaatccaacatacggcagcgactggaacgccgagaattggggccagggaacccaagtgacagtgtctagcctcgagggacagcctaaggccaatcctaccgtgacactgttccctccaagcagcgaagaactccaggccaacaaggccacacttgtgtgcctgatctccgacttctaccctggggctgtgacagtggcttggaaggccgatggatctcctgtgaaagccggcgtggaaaccaccaagccatccaagcagagcaacaacaaatacgccgccagctcctacctgagcctgacacctgagcagtggaagtcccacagatcctacagctgccaagtgacccacgaaggcagcaccgtggaaaagacagtggcccctacagagtgcagcggatccacaacacctggcgagagaagtagcctgcctgccttctatcctggcaccagcggctcttgttctggctgtggatctctgagcctgcctctgctggctggactggttgctgctgatgctgtggcctctctgctgattgtgggagccgtgttcctgtgcgccagacctagaagaagccccgctcaagaggacggcaaggtgtacatcaacatgcccggcagaggaagcactagtagagtgaagttcagcagaagcgccgacgcccctgcctaccagcagggacagaaccaactgtacaacgagctgaacctgggcagacgggaagagtacgacgtgctggacaagcggagaggcagggaccctgagatgggcggaaagccccagcggagaaagaacccccaggaaggactgtataacgaactccagaaagacaagatggccgaagcctacagcgagatcggcatgaagggcgagcggagaagaggcaagggccacgatggcctgtaccagggcctgagcaccgccaccaaggacacctatgacgccctgcacatgcaggccctgcctccaagaagggccaagcgatctggatctggagcaacaaacttctcactactcaaacaagcaggtgacgtggaggagaatcccgggcctatggactggatttggcgcatccttttccttgtcggcgctgctaccggcgcgcattccgggcccgaagtgcaactggttgaatccggtggcggcctggtgcaagcaggcggatctctcagacttagctgtgccgcctccggcagaaccttcacaatgggatggtttaggcaggctccagggaaagagagagagttcgtcgccgccatctctctgtctcccacactggcctactacgccgactctgtgaaaggccggttcaccatctccagagataatgccaagaacaccgtggtgctgcaaatgaactctctgaaacccgaggatacagccctgtactattgtgccgctgaccggaagtccgtgatgagcatcagacccgattactggggacagggcacacaagtcacagtgtcctctacgcgtgcctctacaaagggaccctccgtgtttcctctggctcccagcagcaagtctacaagcggaggaacagccgctctgggctgcctggtcaaggattactttcccgagcctgtgaccgtgtcctggaatagcggagcactgacaagcggcgtgcacacctttccagccgtgctgcaaagcagcggcctgtactctctgagcagcgtggtcacagtgcctagctctagcctgggcacccagacctacatctgcaatgtgaaccacaagcctagcaacaccaaggtggacaagagagtggaacccaagagctgtggtaccctgcactgtgtcggcgacacctatccatccaacgatcggtgctgccatgagtgccggcctggcaacggaatggtgtctcgatgttctcggagtcagaataccgtctgtaggccatgcggacccggcttttacaatgatgtcgtgtcctccaaaccttgcaagccatgtacttggtgcaatctgcggagcggctctgagcggaaacagctgtgcactgctacccaggacacagtgtgtagatgcagagccggaactcagcccctggactcttataagcccggcgttgactgcgctccatgtccaccagggcacttttccccaggcgacaatcaagcctgtaaaccgtggacaaattgcacactggccgggaaacacaccttgcagccagccagcaattcctccgatgccatctgtgaagatcgggacccaccagccactcagcctcaagaaactcaggggcctcctgctaggcccattacagtgcaacctaccgaggcttggccccggacatctcagggaccttctacaaggccagtggaagtgccaggcggtagagctgtggctgctatccttggattgggcctcgttctcggactgttgggaccacttgcaatcctgctggctctctatctgctgcggcgggatcagagactccctccagatgctcataagccacctggcggcggatctttcaggaccccaattcaagaagaacaagccgacgctcactctaccctggctaagatcagctctagacgggttaagttttccagatccgcagacgcacccgcttaccaacaagggcagaaccaactctacaatgaacttaatttggggcggagggaagagtacgacgttctggacaaaaggaggggacgagatcccgagatgggcggaaagcctcagcgaaggaagaatccgcaagaggggctttataacgaactccagaaagataaaatggcagaagcctatagtgagattgggatgaagggagaaaggaggaggggtaaaggtcacgatgggttgtaccaaggattgagcacagccactaaagatacctatgatgcgctccacatgcaggccctgccgccaagacgcgccaagagaagcggatctggcgtgaagcagaccctgaatttcgacctgctgaagctggctggcgacgtggaatccaacccaggccctggccatatgaccgagtacaagcccacggtgcgcctcgccacccgcgacgacgtccccagggccgtacgcaccctcgccgccgcgttcgccgactaccccgccacgcgccacaccgtcgatccggaccgccacatcgagcgggtcaccgagctgcaagaactcttcctcacgcgcgtcgggctcgacatcggcaaggtgtgggtcgcggacgacggcgccgcggtggcggtctggaccacgccggagagcgtcgaagcgggggcggtgttcgccgagatcggcccgcgcatggccgagttgagcggttcccggctggccgcgcagcaacagatggaaggcctcctggcgccgcaccggcccaaggagcccgcgtggttcctggccaccgtcggcgtctcgcccgaccaccagggcaagggtctgggcagcgccgtcgtgctccccggagtggaggcggccgagcgcgccggggtgcccgccttcctggagacctccgcgccccgcaacctccccttctacgagcggctcggcttcaccgtcaccgccgacgtcgaggtgcccgaaggaccgcgcacctggtgcatgacccgcaagcccggtgcctga

SEQ ID NO: 6035 - DNA, 3951 bp, Artificial Sequence
  Synthetic Polynucleotide
atggccttaccagtgaccgccttgctcctgccgctggccttgctgctccacgccgccaggccggacatccagatgacacagagccctagcagcctgtctgccagcgtgggagacagagtgaccatcacatgcaaggccagcgaccacatcaacaactggctggcctggtatcagcagaagcctggacaggcccctaagctgctgatctacggcgctaccacactggaaacaggcgtgcccagcagattttctggcagcggctctggcaccgactacaccctgacaatatccagcctccagcctgaggacttcgccacctactactgtcagcagagctggaacaccccttggacattcggccagggcaccaagctggaaatcaagagactcgaggacctgaagaacgtgttcccacctgaggtggccgtgttcgagcctagcgaggccgagatcagccacacccagaaagccaccctcgtgtgcctggctaccggcttctaccccgaccatgtggaactgtcttggtgggtcaacggcaaagaggtgcacagcggcgtgtctaccgacccccagccactgaaagaacagcccgccctgaacgacagccggtactgcctgagcagcagactgagagtgtccgccaccttctggcagaacccccggaaccacttcagatgccaggtgcagttctacggcctgagcgagaacgacgagtggacccaggacagagccaagcccgtgacccagatcgtgtctgccgaagcctggggcagagccgattgcggatccacaacacctggcgagagaagtagcctgcctgccttctatcctggcaccagcggctcttgttctggctgtggatctctgagcctgcctctgctggctggactggttgctgctgatgctgtggcctctctgctgattgtgggagccgtgttcctgtgcgccagacctagaagaagccccgctcaagaggacggcaaggtgtacatcaacatgcccggcagaggaagcactagtagagtgaagttcagcagaagcgccgacgcccctgcctaccagcagggacagaaccaactgtacaacgagctgaacctgggcagacgggaagagtacgacgtgctggacaagcggagaggcagggaccctgagatgggcggaaagccccagcggagaaagaacccccaggaaggactgtataacgaactccagaaagacaagatggccgaagcctacagcgagatcggcatgaagggcgagcggagaagaggcaagggccacgatggcctgtaccagggcctgagcaccgccaccaaggacacctatgacgccctgcacatgcaggccctgcctccaagaagggccaagcgatctggatctggagcaacaaacttctcactactcaaacaagcaggtgacgtggaggagaatcccgggcctatggactggatttggcgcatccttttccttgtcggcgctgctaccggcgcgcattccttcgaacaagttcagcttcaacagcctggcgctgagctggtcaaacctggcgcttctgtgaagatgagctgcaaagccagcggctacgccttcagcagctactggatcaactggatgaagcagaaacccggccagggactcgaatggatcggccaaatctatcccggcgacggcgacaccaactacaacggcaagttcaagggcagagccacactgaccgccgatacctctagcagcacagcctacatgcagctgagcagcctgaccagcgaagatagcgccgtgtacttctgtgcccggtccatcacaacagtcgtgggctgcgctatggactattggggccagggaacaagcgtgaccgtgtctagtacgcgtatccagaaccctgatcctgccgtgtaccagctgcgggatagcaagagcagcgacaagagcgtgtgtctgttcaccgacttcgacagccagaccaacgtgtcccagagcaaggactccgacgtgtacatcaccgataagaccgtgctggacatgcggagcatggacttcaagagcaactccgccgtggcctggtccaacaagtccgatttcgcctgcgccaacgccttcaacaacagcattatccccgaggacacattcttcccaagccccgagagcagctgcggtaccctgcactgtgtcggcgacacctatccatccaacgatcggtgctgccatgagtgccggcctggcaacggaatggtgtctcgatgttctcggagtcagaataccgtctgtaggccatgcggacccggcttttacaatgatgtcgtgtcctccaaaccttgcaagccatgtacttggtgcaatctgcggagcggctctgagcggaaacagctgtgcactgctacccaggacacagtgtgtagatgcagagccggaactcagcccctggactcttataagcccggcgttgactgcgctccatgtccaccagggcacttttccccaggcgacaatcaagcctgtaaaccgtggacaaattgcacactggccgggaaacacaccttgcagccagccagcaattcctccgatgccatctgtgaagatcgggacccaccagccactcagcctcaagaaactcaggggcctcctgctaggcccattacagtgcaacctaccgaggcttggccccggacatctcagggaccttctacaaggccagtggaagtgccaggcggtagagctgtggctgctatccttggattgggcctcgttctcggactgttgggaccacttgcaatcctgctggctctctatctgctgcggcgggatcagagactccctccagatgctcataagccacctggcggcggatctttcaggaccccaattcaagaagaacaagccgacgctcactctaccctggctaagatcagctctagacgggttaagttttccagatccgcagacgcacccgcttaccaacaagggcagaaccaactctacaatgaacttaatttggggcggagggaagagtacgacgttctggacaaaaggaggggacgagatcccgagatgggcggaaagcctcagcgaaggaagaatccgcaagaggggctttataacgaactccagaaagataaaatggcagaagcctatagtgagattgggatgaagggagaaaggaggaggggtaaaggtcacgatgggttgtaccaaggattgagcacagccactaaagatacctatgatgcgctccacatgcaggccctgccgccaagacgcgccaagagaagcggatctggcgtgaagcagaccctgaatttcgacctgctgaagctggctggcgacgtggaatccaacccaggccctggccatatgaccgagtacaagcccacggtgcgcctcgccacccgcgacgacgtccccagggccgtacgcaccctcgccgccgcgttcgccgactaccccgccacgcgccacaccgtcgatccggaccgccacatcgagcgggtcaccgagctgcaagaactcttcctcacgcgcgtcgggctcgacatcggcaaggtgtgggtcgcggacgacggcgccgcggtggcggtctggaccacgccggagagcgtcgaagcgggggcggtgttcgccgagatcggcccgcgcatggccgagttgagcggttcccggctggccgcgcagcaacagatggaaggcctcctggcgccgcaccggcccaaggagcccgcgtggttcctggccaccgtcggcgtctcgcccgaccaccagggcaagggtctgggcagcgccgtcgtgctccccggagtggaggcggccgagcgcgccggggtgcccgccttcctggagacctccgcgccccgcaacctccccttctacgagcggctcggcttcaccgtcaccgccgacgtcgaggtgcccgaaggaccgcgcacctggtgcatgacccgcaagcccggtgcctga

SEQ ID NO: 6036 - DNA, 4362 bp, Artificial Sequence
  Synthetic Polynucleotide
atggccttaccagtgaccgccttgctcctgccgctggccttgctgctccacgccgccaggccggaagtgcagctggttgaatctggcggaggactggttcaggctggcggatctctgagactgtcttgtgccgccagcggcagaacctttagcatgggctggtttagacaggcccctggcaaagagagagagttcgtcgccgccatcacatactctggcggcagcccttactacgccgactctgtgaagggcagattcaccatcagccgggacaacgccaagaacaccgtgtacctccagatgaacagcctgaagcctgaggacaccgccgtgtactactgcgccgccaatccaacatacggcagcgactggaacgccgagaattggggccagggaacccaagtgacagtgtctagcggtaccggcggaggcggatctggcggcggaggtagcggtggcggaggatctgaattcgacatccagatgacacagagccctagcagcctgtctgccagcgtgggagacagagtgaccatcacatgcaaggccagcgaccacatcaacaactggctggcctggtatcagcagaagcctggacaggcccctaagctgctgatctacggcgctaccacactggaaacaggcgtgcccagcagattttctggcagcggctctggcaccgactacaccctgacaatatccagcctccagcctgaggacttcgccacctactactgtcagcagagctggaacaccccttggacattcggccagggcaccaagctggaaatcaagagactcgaggacctgaagaacgtgttcccacctgaggtggccgtgttcgagcctagcgaggccgagatcagccacacccagaaagccaccctcgtgtgcctggctaccggcttctaccccgaccatgtggaactgtcttggtgggtcaacggcaaagaggtgcacagcggcgtgtctaccgacccccagccactgaaagaacagcccgccctgaacgacagccggtactgcctgagcagcagactgagagtgtccgccaccttctggcagaacccccggaaccacttcagatgccaggtgcagttctacggcctgagcgagaacgacgagtggacccaggacagagccaagcccgtgacccagatcgtgtctgccgaagcctggggcagagccgattgcggatccacaacacctggcgagagaagtagcctgcctgccttctatcctggcaccagcggctcttgttctggctgtggatctctgagcctgcctctgctggctggactggttgctgctgatgctgtggcctctctgctgattgtgggagccgtgttcctgtgcgccagacctagaagaagccccgctcaagaggacggcaaggtgtacatcaacatgcccggcagaggaagcactagtagagtgaagttcagcagaagcgccgacgcccctgcctaccagcagggacagaaccaactgtacaacgagctgaacctgggcagacgggaagagtacgacgtgctggacaagcggagaggcagggaccctgagatgggcggaaagccccagcggagaaagaacccccaggaaggactgtataacgaactccagaaagacaagatggccgaagcctacagcgagatcggcatgaagggcgagcggagaagaggcaagggccacgatggcctgtaccagggcctgagcaccgccaccaaggacacctatgacgccctgcacatgcaggccctgcctccaagaagggccaagcgatctggatctggagcaacaaacttctcactactcaaacaagcaggtgacgtggaggagaatcccgggcctatggactggatttggcgcatccttttccttgtcggcgctgctaccggcgcgcattccttcgaacaagttcagcttcaacagcctggcgctgagctggtcaaacctggcgcttctgtgaagatgagctgcaaagccagcggctacgccttcagcagctactggatcaactggatgaagcagaaacccggccagggactcgaatggatcggccaaatctatcccggcgacggcgacaccaactacaacggcaagttcaagggcagagccacactgaccgccgatacctctagcagcacagcctacatgcagctgagcagcctgaccagcgaagatagcgccgtgtacttctgtgcccggtccatcacaacagtcgtgggctgcgctatggactattggggccagggaacaagcgtgaccgtgtctagtacgcgtatccagaaccctgatcctgccgtgtaccagctgcgggatagcaagagcagcgacaagagcgtgtgtctgttcaccgacttcgacagccagaccaacgtgtcccagagcaaggactccgacgtgtacatcaccgataagaccgtgctggacatgcggagcatggacttcaagagcaactccgccgtggcctggtccaacaagtccgatttcgcctgcgccaacgccttcaacaacagcattatccccgaggacacattcttcccaagccccgagagcagctgcggtaccctgcactgtgtcggcgacacctatccatccaacgatcggtgctgccatgagtgccggcctggcaacggaatggtgtctcgatgttctcggagtcagaataccgtctgtaggccatgcggacccggcttttacaatgatgtcgtgtcctccaaaccttgcaagccatgtacttggtgcaatctgcggagcggctctgagcggaaacagctgtgcactgctacccaggacacagtgtgtagatgcagagccggaactcagcccctggactcttataagcccggcgttgactgcgctccatgtccaccagggcacttttccccaggcgacaatcaagcctgtaaaccgtggacaaattgcacactggccgggaaacacaccttgcagccagccagcaattcctccgatgccatctgtgaagatcgggacccaccagccactcagcctcaagaaactcaggggcctcctgctaggcccattacagtgcaacctaccgaggcttggccccggacatctcagggaccttctacaaggccagtggaagtgccaggcggtagagctgtggctgctatccttggattgggcctcgttctcggactgttgggaccacttgcaatcctgctggctctctatctgctgcggcgggatcagagactccctccagatgctcataagccacctggcggcggatctttcaggaccccaattcaagaagaacaagccgacgctcactctaccctggctaagatcagctctagacgggttaagttttccagatccgcagacgcacccgcttaccaacaagggcagaaccaactctacaatgaacttaatttggggcggagggaagagtacgacgttctggacaaaaggaggggacgagatcccgagatgggcggaaagcctcagcgaaggaagaatccgcaagaggggctttataacgaactccagaaagataaaatggcagaagcctatagtgagattgggatgaagggagaaaggaggaggggtaaaggtcacgatgggttgtaccaaggattgagcacagccactaaagatacctatgatgcgctccacatgcaggccctgccgccaagacgcgccaagagaagcggatctggcgtgaagcagaccctgaatttcgacctgctgaagctggctggcgacgtggaatccaacccaggccctggccatatgaccgagtacaagcccacggtgcgcctcgccacccgcgacgacgtccccagggccgtacgcaccctcgccgccgcgttcgccgactaccccgccacgcgccacaccgtcgatccggaccgccacatcgagcgggtcaccgagctgcaagaactcttcctcacgcgcgtcgggctcgacatcggcaaggtgtgggtcgcggacgacggcgccgcggtggcggtctggaccacgccggagagcgtcgaagcgggggcggtgttcgccgagatcggcccgcgcatggccgagttgagcggttcccggctggccgcgcagcaacagatggaaggcctcctggcgccgcaccggcccaaggagcccgcgtggttcctggccaccgtcggcgtctcgcccgaccaccagggcaagggtctgggcagcgccgtcgtgctccccggagtggaggcggccgagcgcgccggggtgcccgccttcctggagacctccgcgccccgcaacctccccttctacgagcggctcggcttcaccgtcaccgccgacgtcgaggtgcccgaaggaccgcgcacctggtgcatgacccgcaagcccggtgcctga

SEQ ID NO: 6037 - DNA, 4773 bp, Artificial Sequence
  Synthetic Polynucleotide
atggccttaccagtgaccgccttgctcctgccgctggccttgctgctccacgccgccaggccggaagtgcagctggttgaatctggcggaggactggttcaggctggcggatctctgagactgtcttgtgccgccagcggcagaacctttagcatgggctggtttagacaggcccctggcaaagagagagagttcgtcgccgccatcacatactctggcggcagcccttactacgccgactctgtgaagggcagattcaccatcagccgggacaacgccaagaacaccgtgtacctccagatgaacagcctgaagcctgaggacaccgccgtgtactactgcgccgccaatccaacatacggcagcgactggaacgccgagaattggggccagggaacccaagtgacagtgtctagcggtaccggcggaggcggatctggcggcggaggtagcggtggcggaggatctgaattcgacatccagatgacacagagccctagcagcctgtctgccagcgtgggagacagagtgaccatcacatgcaaggccagcgaccacatcaacaactggctggcctggtatcagcagaagcctggacaggcccctaagctgctgatctacggcgctaccacactggaaacaggcgtgcccagcagattttctggcagcggctctggcaccgactacaccctgacaatatccagcctccagcctgaggacttcgccacctactactgtcagcagagctggaacaccccttggacattcggccagggcaccaagctggaaatcaagagactcgaggacctgaagaacgtgttcccacctgaggtggccgtgttcgagcctagcgaggccgagatcagccacacccagaaagccaccctcgtgtgcctggctaccggcttctaccccgaccatgtggaactgtcttggtgggtcaacggcaaagaggtgcacagcggcgtgtctaccgacccccagccactgaaagaacagcccgccctgaacgacagccggtactgcctgagcagcagactgagagtgtccgccaccttctggcagaacccccggaaccacttcagatgccaggtgcagttctacggcctgagcgagaacgacgagtggacccaggacagagccaagcccgtgacccagatcgtgtctgccgaagcctggggcagagccgattgcggatccacaacacctggcgagagaagtagcctgcctgccttctatcctggcaccagcggctcttgttctggctgtggatctctgagcctgcctctgctggctggactggttgctgctgatgctgtggcctctctgctgattgtgggagccgtgttcctgtgcgccagacctagaagaagccccgctcaagaggacggcaaggtgtacatcaacatgcccggcagaggaagcactagtagagtgaagttcagcagaagcgccgacgcccctgcctaccagcagggacagaaccaactgtacaacgagctgaacctgggcagacgggaagagtacgacgtgctggacaagcggagaggcagggaccctgagatgggcggaaagccccagcggagaaagaacccccaggaaggactgtataacgaactccagaaagacaagatggccgaagcctacagcgagatcggcatgaagggcgagcggagaagaggcaagggccacgatggcctgtaccagggcctgagcaccgccaccaaggacacctatgacgccctgcacatgcaggccctgcctccaagaagggccaagcgatctggatctggagcaacaaacttctcactactcaaacaagcaggtgacgtggaggagaatcccgggcctatggactggatttggcgcatccttttccttgtcggcgctgctaccggcgcgcattccgggcccgaagtgcaactggttgaatccggtggcggcctggtgcaagcaggcggatctctcagacttagctgtgccgcctccggcagaaccttcacaatgggatggtttaggcaggctccagggaaagagagagagttcgtcgccgccatctctctgtctcccacactggcctactacgccgactctgtgaaaggccggttcaccatctccagagataatgccaagaacaccgtggtgctgcaaatgaactctctgaaacccgaggatacagccctgtactattgtgccgctgaccggaagtccgtgatgagcatcagacccgattactggggacagggcacacaagtcacagtgtcctctggatccggcggcggaggatctggcggaggcggatctgggggcggaggctctttcgaacaagttcagcttcaacagcctggcgctgagctggtcaaacctggcgcttctgtgaagatgagctgcaaagccagcggctacgccttcagcagctactggatcaactggatgaagcagaaacccggccagggactcgaatggatcggccaaatctatcccggcgacggcgacaccaactacaacggcaagttcaagggcagagccacactgaccgccgatacctctagcagcacagcctacatgcagctgagcagcctgaccagcgaagatagcgccgtgtacttctgtgcccggtccatcacaacagtcgtgggctgcgctatggactattggggccagggaacaagcgtgaccgtgtctagtacgcgtatccagaaccctgatcctgccgtgtaccagctgcgggatagcaagagcagcgacaagagcgtgtgtctgttcaccgacttcgacagccagaccaacgtgtcccagagcaaggactccgacgtgtacatcaccgataagaccgtgctggacatgcggagcatggacttcaagagcaactccgccgtggcctggtccaacaagtccgatttcgcctgcgccaacgccttcaacaacagcattatccccgaggacacattcttcccaagccccgagagcagctgcggtaccctgcactgtgtcggcgacacctatccatccaacgatcggtgctgccatgagtgccggcctggcaacggaatggtgtctcgatgttctcggagtcagaataccgtctgtaggccatgcggacccggcttttacaatgatgtcgtgtcctccaaaccttgcaagccatgtacttggtgcaatctgcggagcggctctgagcggaaacagctgtgcactgctacccaggacacagtgtgtagatgcagagccggaactcagcccctggactcttataagcccggcgttgactgcgctccatgtccaccagggcacttttccccaggcgacaatcaagcctgtaaaccgtggacaaattgcacactggccgggaaacacaccttgcagccagccagcaattcctccgatgccatctgtgaagatcgggacccaccagccactcagcctcaagaaactcaggggcctcctgctaggcccattacagtgcaacctaccgaggcttggccccggacatctcagggaccttctacaaggccagtggaagtgccaggcggtagagctgtggctgctatccttggattgggcctcgttctcggactgttgggaccacttgcaatcctgctggctctctatctgctgcggcgggatcagagactccctccagatgctcataagccacctggcggcggatctttcaggaccccaattcaagaagaacaagccgacgctcactctaccctggctaagatcagctctagacgggttaagttttccagatccgcagacgcacccgcttaccaacaagggcagaaccaactctacaatgaacttaatttggggcggagggaagagtacgacgttctggacaaaaggaggggacgagatcccgagatgggcggaaagcctcagcgaaggaagaatccgcaagaggggctttataacgaactccagaaagataaaatggcagaagcctatagtgagattgggatgaagggagaaaggaggaggggtaaaggtcacgatgggttgtaccaaggattgagcacagccactaaagatacctatgatgcgctccacatgcaggccctgccgccaagacgcgccaagagaagcggatctggcgtgaagcagaccctgaatttcgacctgctgaagctggctggcgacgtggaatccaacccaggccctggccatatgaccgagtacaagcccacggtgcgcctcgccacccgcgacgacgtccccagggccgtacgcaccctcgccgccgcgttcgccgactaccccgccacgcgccacaccgtcgatccggaccgccacatcgagcgggtcaccgagctgcaagaactcttcctcacgcgcgtcgggctcgacatcggcaaggtgtgggtcgcggacgacggcgccgcggtggcggtctggaccacgccggagagcgtcgaagcgggggcggtgttcgccgagatcggcccgcgcatggccgagttgagcggttcccggctggccgcgcagcaacagatggaaggcctcctggcgccgcaccggcccaaggagcccgcgtggttcctggccaccgtcggcgtctcgcccgaccaccagggcaagggtctgggcagcgccgtcgtgctccccggagtggaggcggccgagcgcgccggggtgcccgccttcctggagacctccgcgccccgcaacctccccttctacgagcggctcggcttcaccgtcaccgccgacgtcgaggtgcccgaaggaccgcgcacctggtgcatgacccgcaagcccggtgcctga

SEQ ID NO: 6038 - DNA, 3972 bp, Artificial Sequence
  Synthetic Polynucleotide
atggccttaccagtgaccgccttgctcctgccgctggccttgctgctccacgccgccaggccggaagtgcagctggttgaatctggcggaggactggttcaggctggcggatctctgagactgtcttgtgccgccagcggcagaacctttagcatgggctggtttagacaggcccctggcaaagagagagagttcgtcgccgccatcacatactctggcggcagcccttactacgccgactctgtgaagggcagattcaccatcagccgggacaacgccaagaacaccgtgtacctccagatgaacagcctgaagcctgaggacaccgccgtgtactactgcgccgccaatccaacatacggcagcgactggaacgccgagaattggggccagggaacccaagtgacagtgtctagcctcgaggacctgaagaacgtgttcccacctgaggtggccgtgttcgagcctagcgaggccgagatcagccacacccagaaagccaccctcgtgtgcctggctaccggcttctaccccgaccatgtggaactgtcttggtgggtcaacggcaaagaggtgcacagcggcgtgtctaccgacccccagccactgaaagaacagcccgccctgaacgacagccggtactgcctgagcagcagactgagagtgtccgccaccttctggcagaacccccggaaccacttcagatgccaggtgcagttctacggcctgagcgagaacgacgagtggacccaggacagagccaagcccgtgacccagatcgtgtctgccgaagcctggggcagagccgattgcggatccacaacacctggcgagagaagtagcctgcctgccttctatcctggcaccagcggctcttgttctggctgtggatctctgagcctgcctctgctggctggactggttgctgctgatgctgtggcctctctgctgattgtgggagccgtgttcctgtgcgccagacctagaagaagccccgctcaagaggacggcaaggtgtacatcaacatgcccggcagaggaagcactagtagagtgaagttcagcagaagcgccgacgcccctgcctaccagcagggacagaaccaactgtacaacgagctgaacctgggcagacgggaagagtacgacgtgctggacaagcggagaggcagggaccctgagatgggcggaaagccccagcggagaaagaacccccaggaaggactgtataacgaactccagaaagacaagatggccgaagcctacagcgagatcggcatgaagggcgagcggagaagaggcaagggccacgatggcctgtaccagggcctgagcaccgccaccaaggacacctatgacgccctgcacatgcaggccctgcctccaagaagggccaagcgatctggatctggagcaacaaacttctcactactcaaacaagcaggtgacgtggaggagaatcccgggcctatggactggatttggcgcatccttttccttgtcggcgctgctaccggcgcgcattccgggcccgaagtgcaactggttgaatccggtggcggcctggtgcaagcaggcggatctctcagacttagctgtgccgcctccggcagaaccttcacaatgggatggtttaggcaggctccagggaaagagagagagttcgtcgccgccatctctctgtctcccacactggcctactacgccgactctgtgaaaggccggttcaccatctccagagataatgccaagaacaccgtggtgctgcaaatgaactctctgaaacccgaggatacagccctgtactattgtgccgctgaccggaagtccgtgatgagcatcagacccgattactggggacagggcacacaagtcacagtgtcctctacgcgtatccagaaccctgatcctgccgtgtaccagctgcgggatagcaagagcagcgacaagagcgtgtgtctgttcaccgacttcgacagccagaccaacgtgtcccagagcaaggactccgacgtgtacatcaccgataagaccgtgctggacatgcggagcatggacttcaagagcaactccgccgtggcctggtccaacaagtccgatttcgcctgcgccaacgccttcaacaacagcattatccccgaggacacattcttcccaagccccgagagcagctgcggtaccctgcactgtgtcggcgacacctatccatccaacgatcggtgctgccatgagtgccggcctggcaacggaatggtgtctcgatgttctcggagtcagaataccgtctgtaggccatgcggacccggcttttacaatgatgtcgtgtcctccaaaccttgcaagccatgtacttggtgcaatctgcggagcggctctgagcggaaacagctgtgcactgctacccaggacacagtgtgtagatgcagagccggaactcagcccctggactcttataagcccggcgttgactgcgctccatgtccaccagggcacttttccccaggcgacaatcaagcctgtaaaccgtggacaaattgcacactggccgggaaacacaccttgcagccagccagcaattcctccgatgccatctgtgaagatcgggacccaccagccactcagcctcaagaaactcaggggcctcctgctaggcccattacagtgcaacctaccgaggcttggccccggacatctcagggaccttctacaaggccagtggaagtgccaggcggtagagctgtggctgctatccttggattgggcctcgttctcggactgttgggaccacttgcaatcctgctggctctctatctgctgcggcgggatcagagactccctccagatgctcataagccacctggcggcggatctttcaggaccccaattcaagaagaacaagccgacgctcactctaccctggctaagatcagctctagacgggttaagttttccagatccgcagacgcacccgcttaccaacaagggcagaaccaactctacaatgaacttaatttggggcggagggaagagtacgacgttctggacaaaaggaggggacgagatcccgagatgggcggaaagcctcagcgaaggaagaatccgcaagaggggctttataacgaactccagaaagataaaatggcagaagcctatagtgagattgggatgaagggagaaaggaggaggggtaaaggtcacgatgggttgtaccaaggattgagcacagccactaaagatacctatgatgcgctccacatgcaggccctgccgccaagacgcgccaagagaagcggatctggcgtgaagcagaccctgaatttcgacctgctgaagctggctggcgacgtggaatccaacccaggccctggccatatgaccgagtacaagcccacggtgcgcctcgccacccgcgacgacgtccccagggccgtacgcaccctcgccgccgcgttcgccgactaccccgccacgcgccacaccgtcgatccggaccgccacatcgagcgggtcaccgagctgcaagaactcttcctcacgcgcgtcgggctcgacatcggcaaggtgtgggtcgcggacgacggcgccgcggtggcggtctggaccacgccggagagcgtcgaagcgggggcggtgttcgccgagatcggcccgcgcatggccgagttgagcggttcccggctggccgcgcagcaacagatggaaggcctcctggcgccgcaccggcccaaggagcccgcgtggttcctggccaccgtcggcgtctcgcccgaccaccagggcaagggtctgggcagcgccgtcgtgctccccggagtggaggcggccgagcgcgccggggtgcccgccttcctggagacctccgcgccccgcaacctccccttctacgagcggctcggcttcaccgtcaccgccgacgtcgaggtgcccgaaggaccgcgcacctggtgcatgacccgcaagcccggtgcctga

SEQ ID NO: 6039 - DNA, 1758 bp, Artificial Sequence; identical to SEQ ID NO: 2037
  Synthetic Polynucleotide

SEQ ID NO: 6040 - DNA, 1371 bp, Artificial Sequence; identical to SEQ ID NO: 5880
  Synthetic Polynucleotide

SEQ ID NO: 6041 - DNA, 1371 bp, Artificial Sequence; identical to SEQ ID NO: 5881
  Synthetic Polynucleotide

SEQ ID NO: 6042 - DNA, 993 bp, Artificial Sequence; identical to SEQ ID NO: 5882
  Synthetic Polynucleotide

SEQ ID NO: 6043 - DNA, 993 bp, Artificial Sequence; identical to SEQ ID NO: 5883
  Synthetic Polynucleotide

SEQ ID NO: 6044 - DNA, 993 bp, Artificial Sequence; identical to SEQ ID NO: 5884
  Synthetic Polynucleotide

SEQ ID NO: 6045 - DNA, 999 bp, Artificial Sequence; identical to SEQ ID NO: 5885
  Synthetic Polynucleotide

SEQ ID NO: 6046 - DNA, 1023 bp, Artificial Sequence; identical to SEQ ID NO: 5886
  Synthetic Polynucleotide

SEQ ID NO: 6047 - DNA, 1011 bp, Artificial Sequence; identical to SEQ ID NO: 5887
  Synthetic Polynucleotide

SEQ ID NO: 6048 - DNA, 996 bp, Artificial Sequence; identical to SEQ ID NO: 5888
  Synthetic Polynucleotide

SEQ ID NO: 6049 - DNA, 1011 bp, Artificial Sequence; identical to SEQ ID NO: 5889
  Synthetic Polynucleotide

SEQ ID NO: 6050 - DNA, 813 bp, Artificial Sequence; identical to SEQ ID NO: 5890
  Synthetic Polynucleotide

SEQ ID NO: 6051 - DNA, 906 bp, Artificial Sequence; identical to SEQ ID NO: 5891
  Synthetic Polynucleotide

SEQ ID NO: 6052 - DNA, 909 bp, Artificial Sequence; identical to SEQ ID NO: 5892
  Synthetic Polynucleotide

SEQ ID NO: 6053 - DNA, 1560 bp, Artificial Sequence; identical to SEQ ID NO: 5893
  Synthetic Polynucleotide

SEQ ID NO: 6054 - DNA, 1200 bp, Artificial Sequence; identical to SEQ ID NO: 5894
  Synthetic Polynucleotide

SEQ ID NO: 6055 - DNA, 798 bp, Artificial Sequence; identical to SEQ ID NO: 5895
  Synthetic Polynucleotide

SEQ ID NO: 6056 - DNA, 723 bp, Artificial Sequence; identical to SEQ ID NO: 5896
  Synthetic Polynucleotide

SEQ ID NO: 6057 - DNA, 1497 bp, Artificial Sequence; identical to SEQ ID NO: 5897
  Synthetic Polynucleotide

SEQ ID NO: 6058 - DNA, 1497 bp, Artificial Sequence; identical to SEQ ID NO: 5898
  Synthetic Polynucleotide

SEQ ID NO: 6059 - DNA, 3792 bp, Artificial Sequence
  Synthetic Polynucleotide
atggccttaccagtgaccgccttgctcctgccgctggccttgctgctccacgccgccaggccggacatccagatgacacagagccctagcagcctgtctgccagcgtgggagacagagtgaccatcacatgcaaggccagcgaccacatcaacaactggctggcctggtatcagcagaagcctggacaggcccctaagctgctgatctacggcgctaccacactggaaacaggcgtgcccagcagattttctggcagcggctctggcaccgactacaccctgacaatatccagcctccagcctgaggacttcgccacctactactgtcagcagagctggaacaccccttggacattcggccagggcaccaagctggaaatcaagagactcgagctgcattgcgtgggcgacacataccccagcaacgacagatgctgccacgaatgcagacccggcaatggcatggtgtccagatgcagcagatcccagaacaccgtgtgcagaccttgcggccctggcttctacaacgacgtggtgtctagcaagccctgcaagccttgcacctggtgtaacctgagaagcggcagcgagagaaagcagctgtgtaccgccacacaggataccgtgtgccggtgtagagctggcacacagcctctggacagctacaaacctggcgtggactgtgccccttgtcctcctggacactttagccctggcgacaaccaggcttgcaaaccctggaccaactgtaccctggccggcaagcacacactgcaacctgccagcaatagcagcgacgccatctgcgaggacagagatcctcctgccacacagccccaagagacacaaggacctccagccagacctatcaccgtgcagcctacagaagcctggcctagaacaagccagggacctagcaccagacctgtggaagttcctggtggcagagccgtggccgccattcttggtcttggactggtgctgggactgctcggacctctggctattctgctggccctgtacctgctgagaagggaccaaagactgcctcctgacgctcacaaacctccaggcggaggcagcttcagaacccctatccaagaggaacaggctgacgcccacagcaccctggcaaaaattagcactagtagagtgaagttcagcagaagcgccgacgcccctgcctaccagcagggacagaaccaactgtacaacgagctgaacctgggcagacgggaagagtacgacgtgctggacaagcggagaggcagggaccctgagatgggcggaaagccccagcggagaaagaacccccaggaaggactgtataacgaactccagaaagacaagatggccgaagcctacagcgagatcggcatgaagggcgagcggagaagaggcaagggccacgatggcctgtaccagggcctgagcaccgccaccaaggacacctatgacgccctgcacatgcaggccctgcctccaagaagggccaagcgatctggatctggagcaacaaacttctcactactcaaacaagcaggtgacgtggaggagaatcccgggcctatggactggatttggcgcatccttttccttgtcggcgctgctaccggcgcgcattccttcgaacaagttcagcttcaacagcctggcgctgagctggtcaaacctggcgcttctgtgaagatgagctgcaaagccagcggctacgccttcagcagctactggatcaactggatgaagcagaaacccggccagggactcgaatggatcggccaaatctatcccggcgacggcgacaccaactacaacggcaagttcaagggcagagccacactgaccgccgatacctctagcagcacagcctacatgcagctgagcagcctgaccagcgaagatagcgccgtgtacttctgtgcccggtccatcacaacagtcgtgggctgcgctatggactattggggccagggaacaagcgtgaccgtgtctagtacgcgtctgcactgtgtcggcgacacctatccatccaacgatcggtgctgccatgagtgccggcctggcaacggaatggtgtctcgatgttctcggagtcagaataccgtctgtaggccatgcggacccggcttttacaatgatgtcgtgtcctccaaaccttgcaagccatgtacttggtgcaatctgcggagcggctctgagcggaaacagctgtgcactgctacccaggacacagtgtgtagatgcagagccggaactcagcccctggactcttataagcccggcgttgactgcgctccatgtccaccagggcacttttccccaggcgacaatcaagcctgtaaaccgtggacaaattgcacactggccgggaaacacaccttgcagccagccagcaattcctccgatgccatctgtgaagatcgggacccaccagccactcagcctcaagaaactcaggggcctcctgctaggcccattacagtgcaacctaccgaggcttggccccggacatctcagggaccttctacaaggccagtggaagtgccaggcggtagagctgtggctgctatccttggattgggcctcgttctcggactgttgggaccacttgcaatcctgctggctctctatctgctgcggcgggatcagagactccctccagatgctcataagccacctggcggcggatctttcaggaccccaattcaagaagaacaagccgacgctcactctaccctggctaagatcagctctagacgggttaagttttccagatccgcagacgcacccgcttaccaacaagggcagaaccaactctacaatgaacttaatttggggcggagggaagagtacgacgttctggacaaaaggaggggacgagatcccgagatgggcggaaagcctcagcgaaggaagaatccgcaagaggggctttataacgaactccagaaagataaaatggcagaagcctatagtgagattgggatgaagggagaaaggaggaggggtaaaggtcacgatgggttgtaccaaggattgagcacagccactaaagatacctatgatgcgctccacatgcaggccctgccgccaagacgcgccaagagaagcggatctggcgtgaagcagaccctgaatttcgacctgctgaagctggctggcgacgtggaatccaacccaggccctggccatatgaccgagtacaagcccacggtgcgcctcgccacccgcgacgacgtccccagggccgtacgcaccctcgccgccgcgttcgccgactaccccgccacgcgccacaccgtcgatccggaccgccacatcgagcgggtcaccgagctgcaagaactcttcctcacgcgcgtcgggctcgacatcggcaaggtgtgggtcgcggacgacggcgccgcggtggcggtctggaccacgccggagagcgtcgaagcgggggcggtgttcgccgagatcggcccgcgcatggccgagttgagcggttcccggctggccgcgcagcaacagatggaaggcctcctggcgccgcaccggcccaaggagcccgcgtggttcctggccaccgtcggcgtctcgcccgaccaccagggcaagggtctgggcagcgccgtcgtgctccccggagtggaggcggccgagcgcgccggggtgcccgccttcctggagacctccgcgccccgcaacctccccttctacgagcggctcggcttcaccgtcaccgccgacgtcgaggtgcccgaaggaccgcgcacctggtgcatgacccgcaagcccggtgcctga

SEQ ID NO: 6060 - DNA, 3948 bp, Artificial Sequence
  Synthetic Polynucleotide
atggccttaccagtgaccgccttgctcctgccgctggccttgctgctccacgccgccaggccggcatgcgaagtgcagctgcttgaaagtggcggcggactgattcagcctggcggatctctgagactgagctgtgccgccagcggcttcaccttttctagccacgccatgacctgggtccgacaggcacctggaaaagggcttgaatgggtgtccgccatcagcggctctggcgattacacacactacgccgacagcgtgaagggcagattcaccatcagcagagacaacagcaagaacaccgtgtacctccagatgaacagcctgagagccgaggacagcgccgtgtattattgcgccaaggatgaggatggcggcagcctgcttggacacagaggacaaggcaccctggtcaccgtttcttccggtaccggcggaggcggatctggcggcggaggtagcggtggcggaggatctgaattcggatctctcgagctgcattgcgtgggcgacacataccccagcaacgacagatgctgccacgaatgcagacccggcaatggcatggtgtccagatgcagcagatcccagaacaccgtgtgcagaccttgcggccctggcttctacaacgacgtggtgtctagcaagccctgcaagccttgcacctggtgtaacctgagaagcggcagcgagagaaagcagctgtgtaccgccacacaggataccgtgtgccggtgtagagctggcacacagcctctggacagctacaaacctggcgtggactgtgccccttgtcctcctggacactttagccctggcgacaaccaggcttgcaaaccctggaccaactgtaccctggccggcaagcacacactgcaacctgccagcaatagcagcgacgccatctgcgaggacagagatcctcctgccacacagccccaagagacacaaggacctccagccagacctatcaccgtgcagcctacagaagcctggcctagaacaagccagggacctagcaccagacctgtggaagttcctggtggcagagccgtggccgccattcttggtcttggactggtgctgggactgctcggacctctggctattctgctggccctgtacctgctgagaagggaccaaagactgcctcctgacgctcacaaacctccaggcggaggcagcttcagaacccctatccaagaggaacaggctgacgcccacagcaccctggcaaaaattagcactagtagagtgaagttcagcagaagcgccgacgcccctgcctaccagcagggacagaaccaactgtacaacgagctgaacctgggcagacgggaagagtacgacgtgctggacaagcggagaggcagggaccctgagatgggcggaaagccccagcggagaaagaacccccaggaaggactgtataacgaactccagaaagacaagatggccgaagcctacagcgagatcggcatgaagggcgagcggagaagaggcaagggccacgatggcctgtaccagggcctgagcaccgccaccaaggacacctatgacgccctgcacatgcaggccctgcctccaagaagggccaagcgatctggatctggagcaacaaacttctcactactcaaacaagcaggtgacgtggaggagaatcccgggcctatggactggatttggcgcatccttttccttgtcggcgctgctaccggcgcgcattccgggcccgaagtgcagctggttgaatctggcggaggactggttcaggctggcggatctctgagactgtcttgtgccgccagcggcagaacctttagcatgggctggtttagacaggcccctggcaaagagagagagttcgtcgccgccatcacatactctggcggcagcccttactacgccgactctgtgaagggcagattcaccatcagccgggacaacgccaagaacaccgtgtacctccagatgaacagcctgaagcctgaggacaccgccgtgtactactgcgccgccaatccaacatacggcagcgactggaacgccgagaattggggccagggaacccaagtgacagtgtctagcggatccggcggcggaggatctggcggaggcggatctgggggcggaggctctttcgaaggcagcacgcgtctgcactgtgtcggcgacacctatccatccaacgatcggtgctgccatgagtgccggcctggcaacggaatggtgtctcgatgttctcggagtcagaataccgtctgtaggccatgcggacccggcttttacaatgatgtcgtgtcctccaaaccttgcaagccatgtacttggtgcaatctgcggagcggctctgagcggaaacagctgtgcactgctacccaggacacagtgtgtagatgcagagccggaactcagcccctggactcttataagcccggcgttgactgcgctccatgtccaccagggcacttttccccaggcgacaatcaagcctgtaaaccgtggacaaattgcacactggccgggaaacacaccttgcagccagccagcaattcctccgatgccatctgtgaagatcgggacccaccagccactcagcctcaagaaactcaggggcctcctgctaggcccattacagtgcaacctaccgaggcttggccccggacatctcagggaccttctacaaggccagtggaagtgccaggcggtagagctgtggctgctatccttggattgggcctcgttctcggactgttgggaccacttgcaatcctgctggctctctatctgctgcggcgggatcagagactccctccagatgctcataagccacctggcggcggatctttcaggaccccaattcaagaagaacaagccgacgctcactctaccctggctaagatcagctctagacgggttaagttttccagatccgcagacgcacccgcttaccaacaagggcagaaccaactctacaatgaacttaatttggggcggagggaagagtacgacgttctggacaaaaggaggggacgagatcccgagatgggcggaaagcctcagcgaaggaagaatccgcaagaggggctttataacgaactccagaaagataaaatggcagaagcctatagtgagattgggatgaagggagaaaggaggaggggtaaaggtcacgatgggttgtaccaaggattgagcacagccactaaagatacctatgatgcgctccacatgcaggccctgccgccaagacgcgccaagagaagcggatctggcgtgaagcagaccctgaatttcgacctgctgaagctggctggcgacgtggaatccaacccaggccctggccatatgaccgagtacaagcccacggtgcgcctcgccacccgcgacgacgtccccagggccgtacgcaccctcgccgccgcgttcgccgactaccccgccacgcgccacaccgtcgatccggaccgccacatcgagcgggtcaccgagctgcaagaactcttcctcacgcgcgtcgggctcgacatcggcaaggtgtgggtcgcggacgacggcgccgcggtggcggtctggaccacgccggagagcgtcgaagcgggggcggtgttcgccgagatcggcccgcgcatggccgagttgagcggttcccggctggccgcgcagcaacagatggaaggcctcctggcgccgcaccggcccaaggagcccgcgtggttcctggccaccgtcggcgtctcgcccgaccaccagggcaagggtctgggcagcgccgtcgtgctccccggagtggaggcggccgagcgcgccggggtgcccgccttcctggagacctccgcgccccgcaacctccccttctacgagcggctcggcttcaccgtcaccgccgacgtcgaggtgcccgaaggaccgcgcacctggtgcatgacccgcaagcccggtgcctga

SEQ ID NO: 6061 - DNA, 4395 bp, Artificial Sequence
  Synthetic Polynucleotide
atggccttaccagtgaccgccttgctcctgccgctggccttgctgctccacgccgccaggccggacatccagatgacacagagccctagcagcctgtctgccagcgtgggagacagagtgaccatcacatgcaaggccagcgaccacatcaacaactggctggcctggtatcagcagaagcctggacaggcccctaagctgctgatctacggcgctaccacactggaaacaggcgtgcccagcagattttctggcagcggctctggcaccgactacaccctgacaatatccagcctccagcctgaggacttcgccacctactactgtcagcagagctggaacaccccttggacattcggccagggcaccaagctggaaatcaagagactcgagggacagcctaaggccaatcctaccgtgacactgttccctccaagcagcgaagaactccaggccaacaaggccacacttgtgtgcctgatctccgacttctaccctggggctgtgacagtggcttggaaggccgatggatctcctgtgaaagccggcgtggaaaccaccaagccatccaagcagagcaacaacaaatacgccgccagctcctacctgagcctgacacctgagcagtggaagtcccacagatcctacagctgccaagtgacccacgaaggcagcaccgtggaaaagacagtggcccctacagagtgcagcggatccctgcattgcgtgggcgacacataccccagcaacgacagatgctgccacgaatgcagacccggcaatggcatggtgtccagatgcagcagatcccagaacaccgtgtgcagaccttgcggccctggcttctacaacgacgtggtgtctagcaagccctgcaagccttgcacctggtgtaacctgagaagcggcagcgagagaaagcagctgtgtaccgccacacaggataccgtgtgccggtgtagagctggcacacagcctctggacagctacaaacctggcgtggactgtgccccttgtcctcctggacactttagccctggcgacaaccaggcttgcaaaccctggaccaactgtaccctggccggcaagcacacactgcaacctgccagcaatagcagcgacgccatctgcgaggacagagatcctcctgccacacagccccaagagacacaaggacctccagccagacctatcaccgtgcagcctacagaagcctggcctagaacaagccagggacctagcaccagacctgtggaagttcctggtggcagagccgtggccgccattcttggtcttggactggtgctgggactgctcggacctctggctattctgctggccctgtacctgctgagaagggaccaaagactgcctcctgacgctcacaaacctccaggcggaggcagcttcagaacccctatccaagaggaacaggctgacgcccacagcaccctggcaaaaattagcactagtagagtgaagttcagcagaagcgccgacgcccctgcctaccagcagggacagaaccaactgtacaacgagctgaacctgggcagacgggaagagtacgacgtgctggacaagcggagaggcagggaccctgagatgggcggaaagccccagcggagaaagaacccccaggaaggactgtataacgaactccagaaagacaagatggccgaagcctacagcgagatcggcatgaagggcgagcggagaagaggcaagggccacgatggcctgtaccagggcctgagcaccgccaccaaggacacctatgacgccctgcacatgcaggccctgcctccaagaagggccaagcgatctggatctggagcaacaaacttctcactactcaaacaagcaggtgacgtggaggagaatcccgggcctatggactggatttggcgcatccttttccttgtcggcgctgctaccggcgcgcattccttcgaacaagttcagcttcaacagcctggcgctgagctggtcaaacctggcgcttctgtgaagatgagctgcaaagccagcggctacgccttcagcagctactggatcaactggatgaagcagaaacccggccagggactcgaatggatcggccaaatctatcccggcgacggcgacaccaactacaacggcaagttcaagggcagagccacactgaccgccgatacctctagcagcacagcctacatgcagctgagcagcctgaccagcgaagatagcgccgtgtacttctgtgcccggtccatcacaacagtcgtgggctgcgctatggactattggggccagggaacaagcgtgaccgtgtctagtacgcgtgcctctacaaagggaccctccgtgtttcctctggctcccagcagcaagtctacaagcggaggaacagccgctctgggctgcctggtcaaggattactttcccgagcctgtgaccgtgtcctggaatagcggagcactgacaagcggcgtgcacacctttccagccgtgctgcaaagcagcggcctgtactctctgagcagcgtggtcacagtgcctagctctagcctgggcacccagacctacatctgcaatgtgaaccacaagcctagcaacaccaaggtggacaagagagtggaacccaagagctgtggtaccctgcactgtgtcggcgacacctatccatccaacgatcggtgctgccatgagtgccggcctggcaacggaatggtgtctcgatgttctcggagtcagaataccgtctgtaggccatgcggacccggcttttacaatgatgtcgtgtcctccaaaccttgcaagccatgtacttggtgcaatctgcggagcggctctgagcggaaacagctgtgcactgctacccaggacacagtgtgtagatgcagagccggaactcagcccctggactcttataagcccggcgttgactgcgctccatgtccaccagggcacttttccccaggcgacaatcaagcctgtaaaccgtggacaaattgcacactggccgggaaacacaccttgcagccagccagcaattcctccgatgccatctgtgaagatcgggacccaccagccactcagcctcaagaaactcaggggcctcctgctaggcccattacagtgcaacctaccgaggcttggccccggacatctcagggaccttctacaaggccagtggaagtgccaggcggtagagctgtggctgctatccttggattgggcctcgttctcggactgttgggaccacttgcaatcctgctggctctctatctgctgcggcgggatcagagactccctccagatgctcataagccacctggcggcggatctttcaggaccccaattcaagaagaacaagccgacgctcactctaccctggctaagatcagctctagacgggttaagttttccagatccgcagacgcacccgcttaccaacaagggcagaaccaactctacaatgaacttaatttggggcggagggaagagtacgacgttctggacaaaaggaggggacgagatcccgagatgggcggaaagcctcagcgaaggaagaatccgcaagaggggctttataacgaactccagaaagataaaatggcagaagcctatagtgagattgggatgaagggagaaaggaggaggggtaaaggtcacgatgggttgtaccaaggattgagcacagccactaaagatacctatgatgcgctccacatgcaggccctgccgccaagacgcgccaagagaagcggatctggcgtgaagcagaccctgaatttcgacctgctgaagctggctggcgacgtggaatccaacccaggccctggccatatggctacctacgaggtgctgtgcgaggtggcaagaaagctgggcaccgacgacagagaagtggtgctgttcctgctgaacgtgttcatccctcagcctacactggcccagctgatcggtgcactgagagccctgaaagaggaaggccggctgacctttcctctgctggccgaatgcctgttcagagccggaagaagggatctgctgcgggacctgctgcatctggaccccagatttctggaaagacacctggccggcaccatgagctacttcagcccttaccagctgaccgtgctgcacgttgacggcgaactgtgcgccagagatattcggagcctgatcttcctgagcaaggacaccatcggcagccggtctacccctcagacatttctgcactgggtgtactgcatggaaaacctggacctgctcggccccacagatgtggatgccctgatgtccatgctgagaagcctgagcagagtggacctccagagacaggtgcagacactgatgggactgcacctgagcggacctagccacagccagcactacagacacacccct

SEQ ID NO: 6062 - DNA, 4554 bp, Artificial Sequence
  Synthetic Polynucleotide
atggccttaccagtgaccgccttgctcctgccgctggccttgctgctccacgccgccaggccggacatccagatgacacagagccctagcagcctgtctgccagcgtgggagacagagtgaccatcacatgcaaggccagcgaccacatcaacaactggctggcctggtatcagcagaagcctggacaggcccctaagctgctgatctacggcgctaccacactggaaacaggcgtgcccagcagattttctggcagcggctctggcaccgactacaccctgacaatatccagcctccagcctgaggacttcgccacctactactgtcagcagagctggaacaccccttggacattcggccagggcaccaagctggaaatcaagagactcgagggacagcctaaggccaatcctaccgtgacactgttccctccaagcagcgaagaactccaggccaacaaggccacacttgtgtgcctgatctccgacttctaccctggggctgtgacagtggcttggaaggccgatggatctcctgtgaaagccggcgtggaaaccaccaagccatccaagcagagcaacaacaaatacgccgccagctcctacctgagcctgacacctgagcagtggaagtcccacagatcctacagctgccaagtgacccacgaaggcagcaccgtggaaaagacagtggcccctacagagtgcagcggatccctgcattgcgtgggcgacacataccccagcaacgacagatgctgccacgaatgcagacccggcaatggcatggtgtccagatgcagcagatcccagaacaccgtgtgcagaccttgcggccctggcttctacaacgacgtggtgtctagcaagccctgcaagccttgcacctggtgtaacctgagaagcggcagcgagagaaagcagctgtgtaccgccacacaggataccgtgtgccggtgtagagctggcacacagcctctggacagctacaaacctggcgtggactgtgccccttgtcctcctggacactttagccctggcgacaaccaggcttgcaaaccctggaccaactgtaccctggccggcaagcacacactgcaacctgccagcaatagcagcgacgccatctgcgaggacagagatcctcctgccacacagccccaagagacacaaggacctccagccagacctatcaccgtgcagcctacagaagcctggcctagaacaagccagggacctagcaccagacctgtggaagttcctggtggcagagccgtggccgccattcttggtcttggactggtgctgggactgctcggacctctggctattctgctggccctgtacctgctgagaagggaccaaagactgcctcctgacgctcacaaacctccaggcggaggcagcttcagaacccctatccaagaggaacaggctgacgcccacagcaccctggcaaaaattagcactagtagagtgaagttcagcagaagcgccgacgcccctgcctaccagcagggacagaaccaactgtacaacgagctgaacctgggcagacgggaagagtacgacgtgctggacaagcggagaggcagggaccctgagatgggcggaaagccccagcggagaaagaacccccaggaaggactgtataacgaactccagaaagacaagatggccgaagcctacagcgagatcggcatgaagggcgagcggagaagaggcaagggccacgatggcctgtaccagggcctgagcaccgccaccaaggacacctatgacgccctgcacatgcaggccctgcctccaagaagggccaagcgatctggatctggagcaacaaacttctcactactcaaacaagcaggtgacgtggaggagaatcccgggcctatggactggatttggcgcatccttttccttgtcggcgctgctaccggcgcgcattccttcgaacaagttcagcttcaacagcctggcgctgagctggtcaaacctggcgcttctgtgaagatgagctgcaaagccagcggctacgccttcagcagctactggatcaactggatgaagcagaaacccggccagggactcgaatggatcggccaaatctatcccggcgacggcgacaccaactacaacggcaagttcaagggcagagccacactgaccgccgatacctctagcagcacagcctacatgcagctgagcagcctgaccagcgaagatagcgccgtgtacttctgtgcccggtccatcacaacagtcgtgggctgcgctatggactattggggccagggaacaagcgtgaccgtgtctagtacgcgtgcctctacaaagggaccctccgtgtttcctctggctcccagcagcaagtctacaagcggaggaacagccgctctgggctgcctggtcaaggattactttcccgagcctgtgaccgtgtcctggaatagcggagcactgacaagcggcgtgcacacctttccagccgtgctgcaaagcagcggcctgtactctctgagcagcgtggtcacagtgcctagctctagcctgggcacccagacctacatctgcaatgtgaaccacaagcctagcaacaccaaggtggacaagagagtggaacccaagagctgtggtaccctgcactgtgtcggcgacacctatccatccaacgatcggtgctgccatgagtgccggcctggcaacggaatggtgtctcgatgttctcggagtcagaataccgtctgtaggccatgcggacccggcttttacaatgatgtcgtgtcctccaaaccttgcaagccatgtacttggtgcaatctgcggagcggctctgagcggaaacagctgtgcactgctacccaggacacagtgtgtagatgcagagccggaactcagcccctggactcttataagcccggcgttgactgcgctccatgtccaccagggcacttttccccaggcgacaatcaagcctgtaaaccgtggacaaattgcacactggccgggaaacacaccttgcagccagccagcaattcctccgatgccatctgtgaagatcgggacccaccagccactcagcctcaagaaactcaggggcctcctgctaggcccattacagtgcaacctaccgaggcttggccccggacatctcagggaccttctacaaggccagtggaagtgccaggcggtagagctgtggctgctatccttggattgggcctcgttctcggactgttgggaccacttgcaatcctgctggctctctatctgctgcggcgggatcagagactccctccagatgctcataagccacctggcggcggatctttcaggaccccaattcaagaagaacaagccgacgctcactctaccctggctaagatcagctctagacgggttaagttttccagatccgcagacgcacccgcttaccaacaagggcagaaccaactctacaatgaacttaatttggggcggagggaagagtacgacgttctggacaaaaggaggggacgagatcccgagatgggcggaaagcctcagcgaaggaagaatccgcaagaggggctttataacgaactccagaaagataaaatggcagaagcctatagtgagattgggatgaagggagaaaggaggaggggtaaaggtcacgatgggttgtaccaaggattgagcacagccactaaagatacctatgatgcgctccacatgcaggccctgccgccaagacgcgccaagagaagcggatctggcgtgaagcagaccctgaatttcgacctgctgaagctggctggcgacgtggaatccaacccaggccctggccatatgtccgactccaaggaggtccctagccttccatttttgcgacacttgctcgaagagttggacagccatgaggacagcttgctgctgtttctgtgtcacgacgcggccccgggctgcacgacggtcacgcaagctttgtgctcgcttagccaacagcgcaagctgaccctcgcggctctggtcgagatgctctacgtgctgcagcgtatggatcttctcaagagccgcttcgggctcagcaaggagggggccgagcaattgctgggcacaagctttctcacgcgctaccgcaagctcatggtttgcgtgggtgaggagctcgactcgagcgagctacgcgctctacgcttgttcgcgtgcaacctgaatccgagcctgagcacggcgctttctgagagcagccgctttgtcgagcttgtactcgcgcttgaaaacgtaggactcgtctcgccatcgagtgtttccgtgcttgcggacatgttgcgcactcttcggcgcctcgatttgtgccagcagcttgttgagtacgaacaacaagagcaagccaggtaccgttactgttacgcggcctcgccctcattgccagttcgtacgttacgtcgggggcacggcgcgagtgaacacgagcagctgtgcatgcccgtgcaagaatcctctgacagccccgagctgctgcgcacgcccgtacaagaatcctccagcgacagccccgagcaaacgact

SEQ ID NO: 6063 - DNA, 4431 bp, Artificial Sequence
  Synthetic Polynucleotide
atggccttaccagtgaccgccttgctcctgccgctggccttgctgctccacgccgccaggccggacatccagatgacacagagccctagcagcctgtctgccagcgtgggagacagagtgaccatcacatgcaaggccagcgaccacatcaacaactggctggcctggtatcagcagaagcctggacaggcccctaagctgctgatctacggcgctaccacactggaaacaggcgtgcccagcagattttctggcagcggctctggcaccgactacaccctgacaatatccagcctccagcctgaggacttcgccacctactactgtcagcagagctggaacaccccttggacattcggccagggcaccaagctggaaatcaagagactcgagggacagcctaaggccaatcctaccgtgacactgttccctccaagcagcgaagaactccaggccaacaaggccacacttgtgtgcctgatctccgacttctaccctggggctgtgacagtggcttggaaggccgatggatctcctgtgaaagccggcgtggaaaccaccaagccatccaagcagagcaacaacaaatacgccgccagctcctacctgagcctgacacctgagcagtggaagtcccacagatcctacagctgccaagtgacccacgaaggcagcaccgtggaaaagacagtggcccctacagagtgcagcggatccctgcattgcgtgggcgacacataccccagcaacgacagatgctgccacgaatgcagacccggcaatggcatggtgtccagatgcagcagatcccagaacaccgtgtgcagaccttgcggccctggcttctacaacgacgtggtgtctagcaagccctgcaagccttgcacctggtgtaacctgagaagcggcagcgagagaaagcagctgtgtaccgccacacaggataccgtgtgccggtgtagagctggcacacagcctctggacagctacaaacctggcgtggactgtgccccttgtcctcctggacactttagccctggcgacaaccaggcttgcaaaccctggaccaactgtaccctggccggcaagcacacactgcaacctgccagcaatagcagcgacgccatctgcgaggacagagatcctcctgccacacagccccaagagacacaaggacctccagccagacctatcaccgtgcagcctacagaagcctggcctagaacaagccagggacctagcaccagacctgtggaagttcctggtggcagagccgtggccgccattcttggtcttggactggtgctgggactgctcggacctctggctattctgctggccctgtacctgctgagaagggaccaaagactgcctcctgacgctcacaaacctccaggcggaggcagcttcagaacccctatccaagaggaacaggctgacgcccacagcaccctggcaaaaattagcactagtagagtgaagttcagcagaagcgccgacgcccctgcctaccagcagggacagaaccaactgtacaacgagctgaacctgggcagacgggaagagtacgacgtgctggacaagcggagaggcagggaccctgagatgggcggaaagccccagcggagaaagaacccccaggaaggactgtataacgaactccagaaagacaagatggccgaagcctacagcgagatcggcatgaagggcgagcggagaagaggcaagggccacgatggcctgtaccagggcctgagcaccgccaccaaggacacctatgacgccctgcacatgcaggccctgcctccaagaagggccaagcgatctggatctggagcaacaaacttctcactactcaaacaagcaggtgacgtggaggagaatcccgggcctatggactggatttggcgcatccttttccttgtcggcgctgctaccggcgcgcattccttcgaacaagttcagcttcaacagcctggcgctgagctggtcaaacctggcgcttctgtgaagatgagctgcaaagccagcggctacgccttcagcagctactggatcaactggatgaagcagaaacccggccagggactcgaatggatcggccaaatctatcccggcgacggcgacaccaactacaacggcaagttcaagggcagagccacactgaccgccgatacctctagcagcacagcctacatgcagctgagcagcctgaccagcgaagatagcgccgtgtacttctgtgcccggtccatcacaacagtcgtgggctgcgctatggactattggggccagggaacaagcgtgaccgtgtctagtacgcgtgcctctacaaagggaccctccgtgtttcctctggctcccagcagcaagtctacaagcggaggaacagccgctctgggctgcctggtcaaggattactttcccgagcctgtgaccgtgtcctggaatagcggagcactgacaagcggcgtgcacacctttccagccgtgctgcaaagcagcggcctgtactctctgagcagcgtggtcacagtgcctagctctagcctgggcacccagacctacatctgcaatgtgaaccacaagcctagcaacaccaaggtggacaagagagtggaacccaagagctgtggtaccctgcactgtgtcggcgacacctatccatccaacgatcggtgctgccatgagtgccggcctggcaacggaatggtgtctcgatgttctcggagtcagaataccgtctgtaggccatgcggacccggcttttacaatgatgtcgtgtcctccaaaccttgcaagccatgtacttggtgcaatctgcggagcggctctgagcggaaacagctgtgcactgctacccaggacacagtgtgtagatgcagagccggaactcagcccctggactcttataagcccggcgttgactgcgctccatgtccaccagggcacttttccccaggcgacaatcaagcctgtaaaccgtggacaaattgcacactggccgggaaacacaccttgcagccagccagcaattcctccgatgccatctgtgaagatcgggacccaccagccactcagcctcaagaaactcaggggcctcctgctaggcccattacagtgcaacctaccgaggcttggccccggacatctcagggaccttctacaaggccagtggaagtgccaggcggtagagctgtggctgctatccttggattgggcctcgttctcggactgttgggaccacttgcaatcctgctggctctctatctgctgcggcgggatcagagactccctccagatgctcataagccacctggcggcggatctttcaggaccccaattcaagaagaacaagccgacgctcactctaccctggctaagatcagctctagacgggttaagttttccagatccgcagacgcacccgcttaccaacaagggcagaaccaactctacaatgaacttaatttggggcggagggaagagtacgacgttctggacaaaaggaggggacgagatcccgagatgggcggaaagcctcagcgaaggaagaatccgcaagaggggctttataacgaactccagaaagataaaatggcagaagcctatagtgagattgggatgaagggagaaaggaggaggggtaaaggtcacgatgggttgtaccaaggattgagcacagccactaaagatacctatgatgcgctccacatgcaggccctgccgccaagacgcgccaagagaagcggatctggcgtgaagcagaccctgaatttcgacctgctgaagctggctggcgacgtggaatccaacccaggccctggccatatgaccgagtacaagcccacggtgcgcctcgccacccgcgacgacgtccccagggccgtacgcaccctcgccgccgcgttcgccgactaccccgccacgcgccacaccgtcgatccggaccgccacatcgagcgggtcaccgagctgcaagaactcttcctcacgcgcgtcgggctcgacatcggcaaggtgtgggtcgcggacgacggcgccgcggtggcggtctggaccacgccggagagcgtcgaagcgggggcggtgttcgccgagatcggcccgcgcatggccgagttgagcggttcccggctggccgcgcagcaacagatggaaggcctcctggcgccgcaccggcccaaggagcccgcgtggttcctggccaccgtcggcgtctcgcccgaccaccagggcaagggtctgggcagcgccgtcgtgctccccggagtggaggcggccgagcgcgccggggtgcccgccttcctggagacctccgcgccccgcaacctccccttctacgagcggctcggcttcaccgtcaccgccgacgtcgaggtgcccgaaggaccgcgcacctggtgcatgacccgcaagcccggtgcctga

SEQ ID NO: 6064 - DNA, 4842 bp, Artificial Sequence
  Synthetic Polynucleotide
atggccttaccagtgaccgccttgctcctgccgctggccttgctgctccacgccgccaggccggaagtgcagctggttgaatctggcggaggactggttcaggctggcggatctctgagactgtcttgtgccgccagcggcagaacctttagcatgggctggtttagacaggcccctggcaaagagagagagttcgtcgccgccatcacatactctggcggcagcccttactacgccgactctgtgaagggcagattcaccatcagccgggacaacgccaagaacaccgtgtacctccagatgaacagcctgaagcctgaggacaccgccgtgtactactgcgccgccaatccaacatacggcagcgactggaacgccgagaattggggccagggaacccaagtgacagtgtctagcggtaccggcggaggcggatctggcggcggaggtagcggtggcggaggatctgaattcgacatccagatgacacagagccctagcagcctgtctgccagcgtgggagacagagtgaccatcacatgcaaggccagcgaccacatcaacaactggctggcctggtatcagcagaagcctggacaggcccctaagctgctgatctacggcgctaccacactggaaacaggcgtgcccagcagattttctggcagcggctctggcaccgactacaccctgacaatatccagcctccagcctgaggacttcgccacctactactgtcagcagagctggaacaccccttggacattcggccagggcaccaagctggaaatcaagagactcgagggacagcctaaggccaatcctaccgtgacactgttccctccaagcagcgaagaactccaggccaacaaggccacacttgtgtgcctgatctccgacttctaccctggggctgtgacagtggcttggaaggccgatggatctcctgtgaaagccggcgtggaaaccaccaagccatccaagcagagcaacaacaaatacgccgccagctcctacctgagcctgacacctgagcagtggaagtcccacagatcctacagctgccaagtgacccacgaaggcagcaccgtggaaaagacagtggcccctacagagtgcagcggatccctgcattgcgtgggcgacacataccccagcaacgacagatgctgccacgaatgcagacccggcaatggcatggtgtccagatgcagcagatcccagaacaccgtgtgcagaccttgcggccctggcttctacaacgacgtggtgtctagcaagccctgcaagccttgcacctggtgtaacctgagaagcggcagcgagagaaagcagctgtgtaccgccacacaggataccgtgtgccggtgtagagctggcacacagcctctggacagctacaaacctggcgtggactgtgccccttgtcctcctggacactttagccctggcgacaaccaggcttgcaaaccctggaccaactgtaccctggccggcaagcacacactgcaacctgccagcaatagcagcgacgccatctgcgaggacagagatcctcctgccacacagccccaagagacacaaggacctccagccagacctatcaccgtgcagcctacagaagcctggcctagaacaagccagggacctagcaccagacctgtggaagttcctggtggcagagccgtggccgccattcttggtcttggactggtgctgggactgctcggacctctggctattctgctggccctgtacctgctgagaagggaccaaagactgcctcctgacgctcacaaacctccaggcggaggcagcttcagaacccctatccaagaggaacaggctgacgcccacagcaccctggcaaaaattagcactagtagagtgaagttcagcagaagcgccgacgcccctgcctaccagcagggacagaaccaactgtacaacgagctgaacctgggcagacgggaagagtacgacgtgctggacaagcggagaggcagggaccctgagatgggcggaaagccccagcggagaaagaacccccaggaaggactgtataacgaactccagaaagacaagatggccgaagcctacagcgagatcggcatgaagggcgagcggagaagaggcaagggccacgatggcctgtaccagggcctgagcaccgccaccaaggacacctatgacgccctgcacatgcaggccctgcctccaagaagggccaagcgatctggatctggagcaacaaacttctcactactcaaacaagcaggtgacgtggaggagaatcccgggcctatggactggatttggcgcatccttttccttgtcggcgctgctaccggcgcgcattccttcgaacaagttcagcttcaacagcctggcgctgagctggtcaaacctggcgcttctgtgaagatgagctgcaaagccagcggctacgccttcagcagctactggatcaactggatgaagcagaaacccggccagggactcgaatggatcggccaaatctatcccggcgacggcgacaccaactacaacggcaagttcaagggcagagccacactgaccgccgatacctctagcagcacagcctacatgcagctgagcagcctgaccagcgaagatagcgccgtgtacttctgtgcccggtccatcacaacagtcgtgggctgcgctatggactattggggccagggaacaagcgtgaccgtgtctagtacgcgtgcctctacaaagggaccctccgtgtttcctctggctcccagcagcaagtctacaagcggaggaacagccgctctgggctgcctggtcaaggattactttcccgagcctgtgaccgtgtcctggaatagcggagcactgacaagcggcgtgcacacctttccagccgtgctgcaaagcagcggcctgtactctctgagcagcgtggtcacagtgcctagctctagcctgggcacccagacctacatctgcaatgtgaaccacaagcctagcaacaccaaggtggacaagagagtggaacccaagagctgtggtaccctgcactgtgtcggcgacacctatccatccaacgatcggtgctgccatgagtgccggcctggcaacggaatggtgtctcgatgttctcggagtcagaataccgtctgtaggccatgcggacccggcttttacaatgatgtcgtgtcctccaaaccttgcaagccatgtacttggtgcaatctgcggagcggctctgagcggaaacagctgtgcactgctacccaggacacagtgtgtagatgcagagccggaactcagcccctggactcttataagcccggcgttgactgcgctccatgtccaccagggcacttttccccaggcgacaatcaagcctgtaaaccgtggacaaattgcacactggccgggaaacacaccttgcagccagccagcaattcctccgatgccatctgtgaagatcgggacccaccagccactcagcctcaagaaactcaggggcctcctgctaggcccattacagtgcaacctaccgaggcttggccccggacatctcagggaccttctacaaggccagtggaagtgccaggcggtagagctgtggctgctatccttggattgggcctcgttctcggactgttgggaccacttgcaatcctgctggctctctatctgctgcggcgggatcagagactccctccagatgctcataagccacctggcggcggatctttcaggaccccaattcaagaagaacaagccgacgctcactctaccctggctaagatcagctctagacgggttaagttttccagatccgcagacgcacccgcttaccaacaagggcagaaccaactctacaatgaacttaatttggggcggagggaagagtacgacgttctggacaaaaggaggggacgagatcccgagatgggcggaaagcctcagcgaaggaagaatccgcaagaggggctttataacgaactccagaaagataaaatggcagaagcctatagtgagattgggatgaagggagaaaggaggaggggtaaaggtcacgatgggttgtaccaaggattgagcacagccactaaagatacctatgatgcgctccacatgcaggccctgccgccaagacgcgccaagagaagcggatctggcgtgaagcagaccctgaatttcgacctgctgaagctggctggcgacgtggaatccaacccaggccctggccatatgaccgagtacaagcccacggtgcgcctcgccacccgcgacgacgtccccagggccgtacgcaccctcgccgccgcgttcgccgactaccccgccacgcgccacaccgtcgatccggaccgccacatcgagcgggtcaccgagctgcaagaactcttcctcacgcgcgtcgggctcgacatcggcaaggtgtgggtcgcggacgacggcgccgcggtggcggtctggaccacgccggagagcgtcgaagcgggggcggtgttcgccgagatcggcccgcgcatggccgagttgagcggttcccggctggccgcgcagcaacagatggaaggcctcctggcgccgcaccggcccaaggagcccgcgtggttcctggccaccgtcggcgtctcgcccgaccaccagggcaagggtctgggcagcgccgtcgtgctccccggagtggaggcggccgagcgcgccggggtgcccgccttcctggagacctccgcgccccgcaacctccccttctacgagcggctcggcttcaccgtcaccgccgacgtcgaggtgcccgaaggaccgcgcacctggtgcatgacccgcaagcccggtgcctga

SEQ ID NO: 6065 - DNA, 5253 bp, Artificial Sequence
  Synthetic Polynucleotide
atggccttaccagtgaccgccttgctcctgccgctggccttgctgctccacgccgccaggccggaagtgcagctggttgaatctggcggaggactggttcaggctggcggatctctgagactgtcttgtgccgccagcggcagaacctttagcatgggctggtttagacaggcccctggcaaagagagagagttcgtcgccgccatcacatactctggcggcagcccttactacgccgactctgtgaagggcagattcaccatcagccgggacaacgccaagaacaccgtgtacctccagatgaacagcctgaagcctgaggacaccgccgtgtactactgcgccgccaatccaacatacggcagcgactggaacgccgagaattggggccagggaacccaagtgacagtgtctagcggtaccggcggaggcggatctggcggcggaggtagcggtggcggaggatctgaattcgacatccagatgacacagagccctagcagcctgtctgccagcgtgggagacagagtgaccatcacatgcaaggccagcgaccacatcaacaactggctggcctggtatcagcagaagcctggacaggcccctaagctgctgatctacggcgctaccacactggaaacaggcgtgcccagcagattttctggcagcggctctggcaccgactacaccctgacaatatccagcctccagcctgaggacttcgccacctactactgtcagcagagctggaacaccccttggacattcggccagggcaccaagctggaaatcaagagactcgagggacagcctaaggccaatcctaccgtgacactgttccctccaagcagcgaagaactccaggccaacaaggccacacttgtgtgcctgatctccgacttctaccctggggctgtgacagtggcttggaaggccgatggatctcctgtgaaagccggcgtggaaaccaccaagccatccaagcagagcaacaacaaatacgccgccagctcctacctgagcctgacacctgagcagtggaagtcccacagatcctacagctgccaagtgacccacgaaggcagcaccgtggaaaagacagtggcccctacagagtgcagcggatccctgcattgcgtgggcgacacataccccagcaacgacagatgctgccacgaatgcagacccggcaatggcatggtgtccagatgcagcagatcccagaacaccgtgtgcagaccttgcggccctggcttctacaacgacgtggtgtctagcaagccctgcaagccttgcacctggtgtaacctgagaagcggcagcgagagaaagcagctgtgtaccgccacacaggataccgtgtgccggtgtagagctggcacacagcctctggacagctacaaacctggcgtggactgtgccccttgtcctcctggacactttagccctggcgacaaccaggcttgcaaaccctggaccaactgtaccctggccggcaagcacacactgcaacctgccagcaatagcagcgacgccatctgcgaggacagagatcctcctgccacacagccccaagagacacaaggacctccagccagacctatcaccgtgcagcctacagaagcctggcctagaacaagccagggacctagcaccagacctgtggaagttcctggtggcagagccgtggccgccattcttggtcttggactggtgctgggactgctcggacctctggctattctgctggccctgtacctgctgagaagggaccaaagactgcctcctgacgctcacaaacctccaggcggaggcagcttcagaacccctatccaagaggaacaggctgacgcccacagcaccctggcaaaaattagcactagtagagtgaagttcagcagaagcgccgacgcccctgcctaccagcagggacagaaccaactgtacaacgagctgaacctgggcagacgggaagagtacgacgtgctggacaagcggagaggcagggaccctgagatgggcggaaagccccagcggagaaagaacccccaggaaggactgtataacgaactccagaaagacaagatggccgaagcctacagcgagatcggcatgaagggcgagcggagaagaggcaagggccacgatggcctgtaccagggcctgagcaccgccaccaaggacacctatgacgccctgcacatgcaggccctgcctccaagaagggccaagcgatctggatctggagcaacaaacttctcactactcaaacaagcaggtgacgtggaggagaatcccgggcctatggactggatttggcgcatccttttccttgtcggcgctgctaccggcgcgcattccgggcccgaagtgcaactggttgaatccggtggcggcctggtgcaagcaggcggatctctcagacttagctgtgccgcctccggcagaaccttcacaatgggatggtttaggcaggctccagggaaagagagagagttcgtcgccgccatctctctgtctcccacactggcctactacgccgactctgtgaaaggccggttcaccatctccagagataatgccaagaacaccgtggtgctgcaaatgaactctctgaaacccgaggatacagccctgtactattgtgccgctgaccggaagtccgtgatgagcatcagacccgattactggggacagggcacacaagtcacagtgtcctctggatccggcggcggaggatctggcggaggcggatctgggggcggaggctctttcgaacaagttcagcttcaacagcctggcgctgagctggtcaaacctggcgcttctgtgaagatgagctgcaaagccagcggctacgccttcagcagctactggatcaactggatgaagcagaaacccggccagggactcgaatggatcggccaaatctatcccggcgacggcgacaccaactacaacggcaagttcaagggcagagccacactgaccgccgatacctctagcagcacagcctacatgcagctgagcagcctgaccagcgaagatagcgccgtgtacttctgtgcccggtccatcacaacagtcgtgggctgcgctatggactattggggccagggaacaagcgtgaccgtgtctagtacgcgtgcctctacaaagggaccctccgtgtttcctctggctcccagcagcaagtctacaagcggaggaacagccgctctgggctgcctggtcaaggattactttcccgagcctgtgaccgtgtcctggaatagcggagcactgacaagcggcgtgcacacctttccagccgtgctgcaaagcagcggcctgtactctctgagcagcgtggtcacagtgcctagctctagcctgggcacccagacctacatctgcaatgtgaaccacaagcctagcaacaccaaggtggacaagagagtggaacccaagagctgtggtaccctgcactgtgtcggcgacacctatccatccaacgatcggtgctgccatgagtgccggcctggcaacggaatggtgtctcgatgttctcggagtcagaataccgtctgtaggccatgcggacccggcttttacaatgatgtcgtgtcctccaaaccttgcaagccatgtacttggtgcaatctgcggagcggctctgagcggaaacagctgtgcactgctacccaggacacagtgtgtagatgcagagccggaactcagcccctggactcttataagcccggcgttgactgcgctccatgtccaccagggcacttttccccaggcgacaatcaagcctgtaaaccgtggacaaattgcacactggccgggaaacacaccttgcagccagccagcaattcctccgatgccatctgtgaagatcgggacccaccagccactcagcctcaagaaactcaggggcctcctgctaggcccattacagtgcaacctaccgaggcttggccccggacatctcagggaccttctacaaggccagtggaagtgccaggcggtagagctgtggctgctatccttggattgggcctcgttctcggactgttgggaccacttgcaatcctgctggctctctatctgctgcggcgggatcagagactccctccagatgctcataagccacctggcggcggatctttcaggaccccaattcaagaagaacaagccgacgctcactctaccctggctaagatcagctctagacgggttaagttttccagatccgcagacgcacccgcttaccaacaagggcagaaccaactctacaatgaacttaatttggggcggagggaagagtacgacgttctggacaaaaggaggggacgagatcccgagatgggcggaaagcctcagcgaaggaagaatccgcaagaggggctttataacgaactccagaaagataaaatggcagaagcctatagtgagattgggatgaagggagaaaggaggaggggtaaaggtcacgatgggttgtaccaaggattgagcacagccactaaagatacctatgatgcgctccacatgcaggccctgccgccaagacgcgccaagagaagcggatctggcgtgaagcagaccctgaatttcgacctgctgaagctggctggcgacgtggaatccaacccaggccctggccatatgaccgagtacaagcccacggtgcgcctcgccacccgcgacgacgtccccagggccgtacgcaccctcgccgccgcgttcgccgactaccccgccacgcgccacaccgtcgatccggaccgccacatcgagcgggtcaccgagctgcaagaactcttcctcacgcgcgtcgggctcgacatcggcaaggtgtgggtcgcggacgacggcgccgcggtggcggtctggaccacgccggagagcgtcgaagcgggggcggtgttcgccgagatcggcccgcgcatggccgagttgagcggttcccggctggccgcgcagcaacagatggaaggcctcctggcgccgcaccggcccaaggagcccgcgtggttcctggccaccgtcggcgtctcgcccgaccaccagggcaagggtctgggcagcgccgtcgtgctccccggagtggaggcggccgagcgcgccggggtgcccgccttcctggagacctccgcgccccgcaacctccccttctacgagcggctcggcttcaccgtcaccgccgacgtcgaggtgcccgaaggaccgcgcacctggtgcatgacccgcaagcccggtgcctga

SEQ ID NO: 6066 - DNA, 4452 bp, Artificial Sequence
  Synthetic Polynucleotide
atggccttaccagtgaccgccttgctcctgccgctggccttgctgctccacgccgccaggccggaagtgcagctggttgaatctggcggaggactggttcaggctggcggatctctgagactgtcttgtgccgccagcggcagaacctttagcatgggctggtttagacaggcccctggcaaagagagagagttcgtcgccgccatcacatactctggcggcagcccttactacgccgactctgtgaagggcagattcaccatcagccgggacaacgccaagaacaccgtgtacctccagatgaacagcctgaagcctgaggacaccgccgtgtactactgcgccgccaatccaacatacggcagcgactggaacgccgagaattggggccagggaacccaagtgacagtgtctagcctcgagggacagcctaaggccaatcctaccgtgacactgttccctccaagcagcgaagaactccaggccaacaaggccacacttgtgtgcctgatctccgacttctaccctggggctgtgacagtggcttggaaggccgatggatctcctgtgaaagccggcgtggaaaccaccaagccatccaagcagagcaacaacaaatacgccgccagctcctacctgagcctgacacctgagcagtggaagtcccacagatcctacagctgccaagtgacccacgaaggcagcaccgtggaaaagacagtggcccctacagagtgcagcggatccctgcattgcgtgggcgacacataccccagcaacgacagatgctgccacgaatgcagacccggcaatggcatggtgtccagatgcagcagatcccagaacaccgtgtgcagaccttgcggccctggcttctacaacgacgtggtgtctagcaagccctgcaagccttgcacctggtgtaacctgagaagcggcagcgagagaaagcagctgtgtaccgccacacaggataccgtgtgccggtgtagagctggcacacagcctctggacagctacaaacctggcgtggactgtgccccttgtcctcctggacactttagccctggcgacaaccaggcttgcaaaccctggaccaactgtaccctggccggcaagcacacactgcaacctgccagcaatagcagcgacgccatctgcgaggacagagatcctcctgccacacagccccaagagacacaaggacctccagccagacctatcaccgtgcagcctacagaagcctggcctagaacaagccagggacctagcaccagacctgtggaagttcctggtggcagagccgtggccgccattcttggtcttggactggtgctgggactgctcggacctctggctattctgctggccctgtacctgctgagaagggaccaaagactgcctcctgacgctcacaaacctccaggcggaggcagcttcagaacccctatccaagaggaacaggctgacgcccacagcaccctggcaaaaattagcactagtagagtgaagttcagcagaagcgccgacgcccctgcctaccagcagggacagaaccaactgtacaacgagctgaacctgggcagacgggaagagtacgacgtgctggacaagcggagaggcagggaccctgagatgggcggaaagccccagcggagaaagaacccccaggaaggactgtataacgaactccagaaagacaagatggccgaagcctacagcgagatcggcatgaagggcgagcggagaagaggcaagggccacgatggcctgtaccagggcctgagcaccgccaccaaggacacctatgacgccctgcacatgcaggccctgcctccaagaagggccaagcgatctggatctggagcaacaaacttctcactactcaaacaagcaggtgacgtggaggagaatcccgggcctatggactggatttggcgcatccttttccttgtcggcgctgctaccggcgcgcattccgggcccgaagtgcaactggttgaatccggtggcggcctggtgcaagcaggcggatctctcagacttagctgtgccgcctccggcagaaccttcacaatgggatggtttaggcaggctccagggaaagagagagagttcgtcgccgccatctctctgtctcccacactggcctactacgccgactctgtgaaaggccggttcaccatctccagagataatgccaagaacaccgtggtgctgcaaatgaactctctgaaacccgaggatacagccctgtactattgtgccgctgaccggaagtccgtgatgagcatcagacccgattactggggacagggcacacaagtcacagtgtcctctacgcgtgcctctacaaagggaccctccgtgtttcctctggctcccagcagcaagtctacaagcggaggaacagccgctctgggctgcctggtcaaggattactttcccgagcctgtgaccgtgtcctggaatagcggagcactgacaagcggcgtgcacacctttccagccgtgctgcaaagcagcggcctgtactctctgagcagcgtggtcacagtgcctagctctagcctgggcacccagacctacatctgcaatgtgaaccacaagcctagcaacaccaaggtggacaagagagtggaacccaagagctgtggtaccctgcactgtgtcggcgacacctatccatccaacgatcggtgctgccatgagtgccggcctggcaacggaatggtgtctcgatgttctcggagtcagaataccgtctgtaggccatgcggacccggcttttacaatgatgtcgtgtcctccaaaccttgcaagccatgtacttggtgcaatctgcggagcggctctgagcggaaacagctgtgcactgctacccaggacacagtgtgtagatgcagagccggaactcagcccctggactcttataagcccggcgttgactgcgctccatgtccaccagggcacttttccccaggcgacaatcaagcctgtaaaccgtggacaaattgcacactggccgggaaacacaccttgcagccagccagcaattcctccgatgccatctgtgaagatcgggacccaccagccactcagcctcaagaaactcaggggcctcctgctaggcccattacagtgcaacctaccgaggcttggccccggacatctcagggaccttctacaaggccagtggaagtgccaggcggtagagctgtggctgctatccttggattgggcctcgttctcggactgttgggaccacttgcaatcctgctggctctctatctgctgcggcgggatcagagactccctccagatgctcataagccacctggcggcggatctttcaggaccccaattcaagaagaacaagccgacgctcactctaccctggctaagatcagctctagacgggttaagttttccagatccgcagacgcacccgcttaccaacaagggcagaaccaactctacaatgaacttaatttggggcggagggaagagtacgacgttctggacaaaaggaggggacgagatcccgagatgggcggaaagcctcagcgaaggaagaatccgcaagaggggctttataacgaactccagaaagataaaatggcagaagcctatagtgagattgggatgaagggagaaaggaggaggggtaaaggtcacgatgggttgtaccaaggattgagcacagccactaaagatacctatgatgcgctccacatgcaggccctgccgccaagacgcgccaagagaagcggatctggcgtgaagcagaccctgaatttcgacctgctgaagctggctggcgacgtggaatccaacccaggccctggccatatgaccgagtacaagcccacggtgcgcctcgccacccgcgacgacgtccccagggccgtacgcaccctcgccgccgcgttcgccgactaccccgccacgcgccacaccgtcgatccggaccgccacatcgagcgggtcaccgagctgcaagaactcttcctcacgcgcgtcgggctcgacatcggcaaggtgtgggtcgcggacgacggcgccgcggtggcggtctggaccacgccggagagcgtcgaagcgggggcggtgttcgccgagatcggcccgcgcatggccgagttgagcggttcccggctggccgcgcagcaacagatggaaggcctcctggcgccgcaccggcccaaggagcccgcgtggttcctggccaccgtcggcgtctcgcccgaccaccagggcaagggtctgggcagcgccgtcgtgctccccggagtggaggcggccgagcgcgccggggtgcccgccttcctggagacctccgcgccccgcaacctccccttctacgagcggctcggcttcaccgtcaccgccgacgtcgaggtgcccgaaggaccgcgcacctggtgcatgacccgcaagcccggtgcctga

SEQ ID NO: 6067 - DNA, 4476 bp, Artificial Sequence
  Synthetic Polynucleotide
atggccttaccagtgaccgccttgctcctgccgctggccttgctgctccacgccgccaggccggacatccagatgacacagagccctagcagcctgtctgccagcgtgggagacagagtgaccatcacatgcaaggccagcgaccacatcaacaactggctggcctggtatcagcagaagcctggacaggcccctaagctgctgatctacggcgctaccacactggaaacaggcgtgcccagcagattttctggcagcggctctggcaccgactacaccctgacaatatccagcctccagcctgaggacttcgccacctactactgtcagcagagctggaacaccccttggacattcggccagggcaccaagctggaaatcaagagactcgaggacctgaagaacgtgttcccacctgaggtggccgtgttcgagcctagcgaggccgagatcagccacacccagaaagccaccctcgtgtgcctggctaccggcttctaccccgaccatgtggaactgtcttggtgggtcaacggcaaagaggtgcacagcggcgtgtctaccgacccccagccactgaaagaacagcccgccctgaacgacagccggtactgcctgagcagcagactgagagtgtccgccaccttctggcagaacccccggaaccacttcagatgccaggtgcagttctacggcctgagcgagaacgacgagtggacccaggacagagccaagcccgtgacccagatcgtgtctgccgaagcctggggcagagccgattgcggatccctgcattgcgtgggcgacacataccccagcaacgacagatgctgccacgaatgcagacccggcaatggcatggtgtccagatgcagcagatcccagaacaccgtgtgcagaccttgcggccctggcttctacaacgacgtggtgtctagcaagccctgcaagccttgcacctggtgtaacctgagaagcggcagcgagagaaagcagctgtgtaccgccacacaggataccgtgtgccggtgtagagctggcacacagcctctggacagctacaaacctggcgtggactgtgccccttgtcctcctggacactttagccctggcgacaaccaggcttgcaaaccctggaccaactgtaccctggccggcaagcacacactgcaacctgccagcaatagcagcgacgccatctgcgaggacagagatcctcctgccacacagccccaagagacacaaggacctccagccagacctatcaccgtgcagcctacagaagcctggcctagaacaagccagggacctagcaccagacctgtggaagttcctggtggcagagccgtggccgccattcttggtcttggactggtgctgggactgctcggacctctggctattctgctggccctgtacctgctgagaagggaccaaagactgcctcctgacgctcacaaacctccaggcggaggcagcttcagaacccctatccaagaggaacaggctgacgcccacagcaccctggcaaaaattagcactagtagagtgaagttcagcagaagcgccgacgcccctgcctaccagcagggacagaaccaactgtacaacgagctgaacctgggcagacgggaagagtacgacgtgctggacaagcggagaggcagggaccctgagatgggcggaaagccccagcggagaaagaacccccaggaaggactgtataacgaactccagaaagacaagatggccgaagcctacagcgagatcggcatgaagggcgagcggagaagaggcaagggccacgatggcctgtaccagggcctgagcaccgccaccaaggacacctatgacgccctgcacatgcaggccctgcctccaagaagggccaagcgatctggatctggagcaacaaacttctcactactcaaacaagcaggtgacgtggaggagaatcccgggcctatggactggatttggcgcatccttttccttgtcggcgctgctaccggcgcgcattccttcgaacaagttcagcttcaacagcctggcgctgagctggtcaaacctggcgcttctgtgaagatgagctgcaaagccagcggctacgccttcagcagctactggatcaactggatgaagcagaaacccggccagggactcgaatggatcggccaaatctatcccggcgacggcgacaccaactacaacggcaagttcaagggcagagccacactgaccgccgatacctctagcagcacagcctacatgcagctgagcagcctgaccagcgaagatagcgccgtgtacttctgtgcccggtccatcacaacagtcgtgggctgcgctatggactattggggccagggaacaagcgtgaccgtgtctagtacgcgtatccagaaccctgatcctgccgtgtaccagctgcgggatagcaagagcagcgacaagagcgtgtgtctgttcaccgacttcgacagccagaccaacgtgtcccagagcaaggactccgacgtgtacatcaccgataagaccgtgctggacatgcggagcatggacttcaagagcaactccgccgtggcctggtccaacaagtccgatttcgcctgcgccaacgccttcaacaacagcattatccccgaggacacattcttcccaagccccgagagcagctgcggtaccctgcactgtgtcggcgacacctatccatccaacgatcggtgctgccatgagtgccggcctggcaacggaatggtgtctcgatgttctcggagtcagaataccgtctgtaggccatgcggacccggcttttacaatgatgtcgtgtcctccaaaccttgcaagccatgtacttggtgcaatctgcggagcggctctgagcggaaacagctgtgcactgctacccaggacacagtgtgtagatgcagagccggaactcagcccctggactcttataagcccggcgttgactgcgctccatgtccaccagggcacttttccccaggcgacaatcaagcctgtaaaccgtggacaaattgcacactggccgggaaacacaccttgcagccagccagcaattcctccgatgccatctgtgaagatcgggacccaccagccactcagcctcaagaaactcaggggcctcctgctaggcccattacagtgcaacctaccgaggcttggccccggacatctcagggaccttctacaaggccagtggaagtgccaggcggtagagctgtggctgctatccttggattgggcctcgttctcggactgttgggaccacttgcaatcctgctggctctctatctgctgcggcgggatcagagactccctccagatgctcataagccacctggcggcggatctttcaggaccccaattcaagaagaacaagccgacgctcactctaccctggctaagatcagctctagacgggttaagttttccagatccgcagacgcacccgcttaccaacaagggcagaaccaactctacaatgaacttaatttggggcggagggaagagtacgacgttctggacaaaaggaggggacgagatcccgagatgggcggaaagcctcagcgaaggaagaatccgcaagaggggctttataacgaactccagaaagataaaatggcagaagcctatagtgagattgggatgaagggagaaaggaggaggggtaaaggtcacgatgggttgtaccaaggattgagcacagccactaaagatacctatgatgcgctccacatgcaggccctgccgccaagacgcgccaagagaagcggatctggcgtgaagcagaccctgaatttcgacctgctgaagctggctggcgacgtggaatccaacccaggccctggccatatgaccgagtacaagcccacggtgcgcctcgccacccgcgacgacgtccccagggccgtacgcaccctcgccgccgcgttcgccgactaccccgccacgcgccacaccgtcgatccggaccgccacatcgagcgggtcaccgagctgcaagaactcttcctcacgcgcgtcgggctcgacatcggcaaggtgtgggtcgcggacgacggcgccgcggtggcggtctggaccacgccggagagcgtcgaagcgggggcggtgttcgccgagatcggcccgcgcatggccgagttgagcggttcccggctggccgcgcagcaacagatggaaggcctcctggcgccgcaccggcccaaggagcccgcgtggttcctggccaccgtcggcgtctcgcccgaccaccagggcaagggtctgggcagcgccgtcgtgctccccggagtggaggcggccgagcgcgccggggtgcccgccttcctggagacctccgcgccccgcaacctccccttctacgagcggctcggcttcaccgtcaccgccgacgtcgaggtgcccgaaggaccgcgcacctggtgcatgacccgcaagcccggtgcctga

SEQ ID NO: 6068 - DNA, 4887 bp, Artificial Sequence
  Synthetic Polynucleotide
atggccttaccagtgaccgccttgctcctgccgctggccttgctgctccacgccgccaggccggaagtgcagctggttgaatctggcggaggactggttcaggctggcggatctctgagactgtcttgtgccgccagcggcagaacctttagcatgggctggtttagacaggcccctggcaaagagagagagttcgtcgccgccatcacatactctggcggcagcccttactacgccgactctgtgaagggcagattcaccatcagccgggacaacgccaagaacaccgtgtacctccagatgaacagcctgaagcctgaggacaccgccgtgtactactgcgccgccaatccaacatacggcagcgactggaacgccgagaattggggccagggaacccaagtgacagtgtctagcggtaccggcggaggcggatctggcggcggaggtagcggtggcggaggatctgaattcgacatccagatgacacagagccctagcagcctgtctgccagcgtgggagacagagtgaccatcacatgcaaggccagcgaccacatcaacaactggctggcctggtatcagcagaagcctggacaggcccctaagctgctgatctacggcgctaccacactggaaacaggcgtgcccagcagattttctggcagcggctctggcaccgactacaccctgacaatatccagcctccagcctgaggacttcgccacctactactgtcagcagagctggaacaccccttggacattcggccagggcaccaagctggaaatcaagagactcgaggacctgaagaacgtgttcccacctgaggtggccgtgttcgagcctagcgaggccgagatcagccacacccagaaagccaccctcgtgtgcctggctaccggcttctaccccgaccatgtggaactgtcttggtgggtcaacggcaaagaggtgcacagcggcgtgtctaccgacccccagccactgaaagaacagcccgccctgaacgacagccggtactgcctgagcagcagactgagagtgtccgccaccttctggcagaacccccggaaccacttcagatgccaggtgcagttctacggcctgagcgagaacgacgagtggacccaggacagagccaagcccgtgacccagatcgtgtctgccgaagcctggggcagagccgattgcggatccctgcattgcgtgggcgacacataccccagcaacgacagatgctgccacgaatgcagacccggcaatggcatggtgtccagatgcagcagatcccagaacaccgtgtgcagaccttgcggccctggcttctacaacgacgtggtgtctagcaagccctgcaagccttgcacctggtgtaacctgagaagcggcagcgagagaaagcagctgtgtaccgccacacaggataccgtgtgccggtgtagagctggcacacagcctctggacagctacaaacctggcgtggactgtgccccttgtcctcctggacactttagccctggcgacaaccaggcttgcaaaccctggaccaactgtaccctggccggcaagcacacactgcaacctgccagcaatagcagcgacgccatctgcgaggacagagatcctcctgccacacagccccaagagacacaaggacctccagccagacctatcaccgtgcagcctacagaagcctggcctagaacaagccagggacctagcaccagacctgtggaagttcctggtggcagagccgtggccgccattcttggtcttggactggtgctgggactgctcggacctctggctattctgctggccctgtacctgctgagaagggaccaaagactgcctcctgacgctcacaaacctccaggcggaggcagcttcagaacccctatccaagaggaacaggctgacgcccacagcaccctggcaaaaattagcactagtagagtgaagttcagcagaagcgccgacgcccctgcctaccagcagggacagaaccaactgtacaacgagctgaacctgggcagacgggaagagtacgacgtgctggacaagcggagaggcagggaccctgagatgggcggaaagccccagcggagaaagaacccccaggaaggactgtataacgaactccagaaagacaagatggccgaagcctacagcgagatcggcatgaagggcgagcggagaagaggcaagggccacgatggcctgtaccagggcctgagcaccgccaccaaggacacctatgacgccctgcacatgcaggccctgcctccaagaagggccaagcgatctggatctggagcaacaaacttctcactactcaaacaagcaggtgacgtggaggagaatcccgggcctatggactggatttggcgcatccttttccttgtcggcgctgctaccggcgcgcattccttcgaacaagttcagcttcaacagcctggcgctgagctggtcaaacctggcgcttctgtgaagatgagctgcaaagccagcggctacgccttcagcagctactggatcaactggatgaagcagaaacccggccagggactcgaatggatcggccaaatctatcccggcgacggcgacaccaactacaacggcaagttcaagggcagagccacactgaccgccgatacctctagcagcacagcctacatgcagctgagcagcctgaccagcgaagatagcgccgtgtacttctgtgcccggtccatcacaacagtcgtgggctgcgctatggactattggggccagggaacaagcgtgaccgtgtctagtacgcgtatccagaaccctgatcctgccgtgtaccagctgcgggatagcaagagcagcgacaagagcgtgtgtctgttcaccgacttcgacagccagaccaacgtgtcccagagcaaggactccgacgtgtacatcaccgataagaccgtgctggacatgcggagcatggacttcaagagcaactccgccgtggcctggtccaacaagtccgatttcgcctgcgccaacgccttcaacaacagcattatccccgaggacacattcttcccaagccccgagagcagctgcggtaccctgcactgtgtcggcgacacctatccatccaacgatcggtgctgccatgagtgccggcctggcaacggaatggtgtctcgatgttctcggagtcagaataccgtctgtaggccatgcggacccggcttttacaatgatgtcgtgtcctccaaaccttgcaagccatgtacttggtgcaatctgcggagcggctctgagcggaaacagctgtgcactgctacccaggacacagtgtgtagatgcagagccggaactcagcccctggactcttataagcccggcgttgactgcgctccatgtccaccagggcacttttccccaggcgacaatcaagcctgtaaaccgtggacaaattgcacactggccgggaaacacaccttgcagccagccagcaattcctccgatgccatctgtgaagatcgggacccaccagccactcagcctcaagaaactcaggggcctcctgctaggcccattacagtgcaacctaccgaggcttggccccggacatctcagggaccttctacaaggccagtggaagtgccaggcggtagagctgtggctgctatccttggattgggcctcgttctcggactgttgggaccacttgcaatcctgctggctctctatctgctgcggcgggatcagagactccctccagatgctcataagccacctggcggcggatctttcaggaccccaattcaagaagaacaagccgacgctcactctaccctggctaagatcagctctagacgggttaagttttccagatccgcagacgcacccgcttaccaacaagggcagaaccaactctacaatgaacttaatttggggcggagggaagagtacgacgttctggacaaaaggaggggacgagatcccgagatgggcggaaagcctcagcgaaggaagaatccgcaagaggggctttataacgaactccagaaagataaaatggcagaagcctatagtgagattgggatgaagggagaaaggaggaggggtaaaggtcacgatgggttgtaccaaggattgagcacagccactaaagatacctatgatgcgctccacatgcaggccctgccgccaagacgcgccaagagaagcggatctggcgtgaagcagaccctgaatttcgacctgctgaagctggctggcgacgtggaatccaacccaggccctggccatatgaccgagtacaagcccacggtgcgcctcgccacccgcgacgacgtccccagggccgtacgcaccctcgccgccgcgttcgccgactaccccgccacgcgccacaccgtcgatccggaccgccacatcgagcgggtcaccgagctgcaagaactcttcctcacgcgcgtcgggctcgacatcggcaaggtgtgggtcgcggacgacggcgccgcggtggcggtctggaccacgccggagagcgtcgaagcgggggcggtgttcgccgagatcggcccgcgcatggccgagttgagcggttcccggctggccgcgcagcaacagatggaaggcctcctggcgccgcaccggcccaaggagcccgcgtggttcctggccaccgtcggcgtctcgcccgaccaccagggcaagggtctgggcagcgccgtcgtgctccccggagtggaggcggccgagcgcgccggggtgcccgccttcctggagacctccgcgccccgcaacctccccttctacgagcggctcggcttcaccgtcaccgccgacgtcgaggtgcccgaaggaccgcgcacctggtgcatgacccgcaagcccggtgcctga

SEQ ID NO: 6069 - DNA, 5298 bp, Artificial Sequence
  Synthetic Polynucleotide
atggccttaccagtgaccgccttgctcctgccgctggccttgctgctccacgccgccaggccggaagtgcagctggttgaatctggcggaggactggttcaggctggcggatctctgagactgtcttgtgccgccagcggcagaacctttagcatgggctggtttagacaggcccctggcaaagagagagagttcgtcgccgccatcacatactctggcggcagcccttactacgccgactctgtgaagggcagattcaccatcagccgggacaacgccaagaacaccgtgtacctccagatgaacagcctgaagcctgaggacaccgccgtgtactactgcgccgccaatccaacatacggcagcgactggaacgccgagaattggggccagggaacccaagtgacagtgtctagcggtaccggcggaggcggatctggcggcggaggtagcggtggcggaggatctgaattcgacatccagatgacacagagccctagcagcctgtctgccagcgtgggagacagagtgaccatcacatgcaaggccagcgaccacatcaacaactggctggcctggtatcagcagaagcctggacaggcccctaagctgctgatctacggcgctaccacactggaaacaggcgtgcccagcagattttctggcagcggctctggcaccgactacaccctgacaatatccagcctccagcctgaggacttcgccacctactactgtcagcagagctggaacaccccttggacattcggccagggcaccaagctggaaatcaagagactcgaggacctgaagaacgtgttcccacctgaggtggccgtgttcgagcctagcgaggccgagatcagccacacccagaaagccaccctcgtgtgcctggctaccggcttctaccccgaccatgtggaactgtcttggtgggtcaacggcaaagaggtgcacagcggcgtgtctaccgacccccagccactgaaagaacagcccgccctgaacgacagccggtactgcctgagcagcagactgagagtgtccgccaccttctggcagaacccccggaaccacttcagatgccaggtgcagttctacggcctgagcgagaacgacgagtggacccaggacagagccaagcccgtgacccagatcgtgtctgccgaagcctggggcagagccgattgcggatccctgcattgcgtgggcgacacataccccagcaacgacagatgctgccacgaatgcagacccggcaatggcatggtgtccagatgcagcagatcccagaacaccgtgtgcagaccttgcggccctggcttctacaacgacgtggtgtctagcaagccctgcaagccttgcacctggtgtaacctgagaagcggcagcgagagaaagcagctgtgtaccgccacacaggataccgtgtgccggtgtagagctggcacacagcctctggacagctacaaacctggcgtggactgtgccccttgtcctcctggacactttagccctggcgacaaccaggcttgcaaaccctggaccaactgtaccctggccggcaagcacacactgcaacctgccagcaatagcagcgacgccatctgcgaggacagagatcctcctgccacacagccccaagagacacaaggacctccagccagacctatcaccgtgcagcctacagaagcctggcctagaacaagccagggacctagcaccagacctgtggaagttcctggtggcagagccgtggccgccattcttggtcttggactggtgctgggactgctcggacctctggctattctgctggccctgtacctgctgagaagggaccaaagactgcctcctgacgctcacaaacctccaggcggaggcagcttcagaacccctatccaagaggaacaggctgacgcccacagcaccctggcaaaaattagcactagtagagtgaagttcagcagaagcgccgacgcccctgcctaccagcagggacagaaccaactgtacaacgagctgaacctgggcagacgggaagagtacgacgtgctggacaagcggagaggcagggaccctgagatgggcggaaagccccagcggagaaagaacccccaggaaggactgtataacgaactccagaaagacaagatggccgaagcctacagcgagatcggcatgaagggcgagcggagaagaggcaagggccacgatggcctgtaccagggcctgagcaccgccaccaaggacacctatgacgccctgcacatgcaggccctgcctccaagaagggccaagcgatctggatctggagcaacaaacttctcactactcaaacaagcaggtgacgtggaggagaatcccgggcctatggactggatttggcgcatccttttccttgtcggcgctgctaccggcgcgcattccgggcccgaagtgcaactggttgaatccggtggcggcctggtgcaagcaggcggatctctcagacttagctgtgccgcctccggcagaaccttcacaatgggatggtttaggcaggctccagggaaagagagagagttcgtcgccgccatctctctgtctcccacactggcctactacgccgactctgtgaaaggccggttcaccatctccagagataatgccaagaacaccgtggtgctgcaaatgaactctctgaaacccgaggatacagccctgtactattgtgccgctgaccggaagtccgtgatgagcatcagacccgattactggggacagggcacacaagtcacagtgtcctctggatccggcggcggaggatctggcggaggcggatctgggggcggaggctctttcgaacaagttcagcttcaacagcctggcgctgagctggtcaaacctggcgcttctgtgaagatgagctgcaaagccagcggctacgccttcagcagctactggatcaactggatgaagcagaaacccggccagggactcgaatggatcggccaaatctatcccggcgacggcgacaccaactacaacggcaagttcaagggcagagccacactgaccgccgatacctctagcagcacagcctacatgcagctgagcagcctgaccagcgaagatagcgccgtgtacttctgtgcccggtccatcacaacagtcgtgggctgcgctatggactattggggccagggaacaagcgtgaccgtgtctagtacgcgtatccagaaccctgatcctgccgtgtaccagctgcgggatagcaagagcagcgacaagagcgtgtgtctgttcaccgacttcgacagccagaccaacgtgtcccagagcaaggactccgacgtgtacatcaccgataagaccgtgctggacatgcggagcatggacttcaagagcaactccgccgtggcctggtccaacaagtccgatttcgcctgcgccaacgccttcaacaacagcattatccccgaggacacattcttcccaagccccgagagcagctgcggtaccctgcactgtgtcggcgacacctatccatccaacgatcggtgctgccatgagtgccggcctggcaacggaatggtgtctcgatgttctcggagtcagaataccgtctgtaggccatgcggacccggcttttacaatgatgtcgtgtcctccaaaccttgcaagccatgtacttggtgcaatctgcggagcggctctgagcggaaacagctgtgcactgctacccaggacacagtgtgtagatgcagagccggaactcagcccctggactcttataagcccggcgttgactgcgctccatgtccaccagggcacttttccccaggcgacaatcaagcctgtaaaccgtggacaaattgcacactggccgggaaacacaccttgcagccagccagcaattcctccgatgccatctgtgaagatcgggacccaccagccactcagcctcaagaaactcaggggcctcctgctaggcccattacagtgcaacctaccgaggcttggccccggacatctcagggaccttctacaaggccagtggaagtgccaggcggtagagctgtggctgctatccttggattgggcctcgttctcggactgttgggaccacttgcaatcctgctggctctctatctgctgcggcgggatcagagactccctccagatgctcataagccacctggcggcggatctttcaggaccccaattcaagaagaacaagccgacgctcactctaccctggctaagatcagctctagacgggttaagttttccagatccgcagacgcacccgcttaccaacaagggcagaaccaactctacaatgaacttaatttggggcggagggaagagtacgacgttctggacaaaaggaggggacgagatcccgagatgggcggaaagcctcagcgaaggaagaatccgcaagaggggctttataacgaactccagaaagataaaatggcagaagcctatagtgagattgggatgaagggagaaaggaggaggggtaaaggtcacgatgggttgtaccaaggattgagcacagccactaaagatacctatgatgcgctccacatgcaggccctgccgccaagacgcgccaagagaagcggatctggcgtgaagcagaccctgaatttcgacctgctgaagctggctggcgacgtggaatccaacccaggccctggccatatgaccgagtacaagcccacggtgcgcctcgccacccgcgacgacgtccccagggccgtacgcaccctcgccgccgcgttcgccgactaccccgccacgcgccacaccgtcgatccggaccgccacatcgagcgggtcaccgagctgcaagaactcttcctcacgcgcgtcgggctcgacatcggcaaggtgtgggtcgcggacgacggcgccgcggtggcggtctggaccacgccggagagcgtcgaagcgggggcggtgttcgccgagatcggcccgcgcatggccgagttgagcggttcccggctggccgcgcagcaacagatggaaggcctcctggcgccgcaccggcccaaggagcccgcgtggttcctggccaccgtcggcgtctcgcccgaccaccagggcaagggtctgggcagcgccgtcgtgctccccggagtggaggcggccgagcgcgccggggtgcccgccttcctggagacctccgcgccccgcaacctccccttctacgagcggctcggcttcaccgtcaccgccgacgtcgaggtgcccgaaggaccgcgcacctggtgcatgacccgcaagcccggtgcctga

SEQ ID NO: 6070 - DNA, 4497 bp, Artificial Sequence
  Synthetic Polynucleotide
atggccttaccagtgaccgccttgctcctgccgctggccttgctgctccacgccgccaggccggaagtgcagctggttgaatctggcggaggactggttcaggctggcggatctctgagactgtcttgtgccgccagcggcagaacctttagcatgggctggtttagacaggcccctggcaaagagagagagttcgtcgccgccatcacatactctggcggcagcccttactacgccgactctgtgaagggcagattcaccatcagccgggacaacgccaagaacaccgtgtacctccagatgaacagcctgaagcctgaggacaccgccgtgtactactgcgccgccaatccaacatacggcagcgactggaacgccgagaattggggccagggaacccaagtgacagtgtctagcctcgaggacctgaagaacgtgttcccacctgaggtggccgtgttcgagcctagcgaggccgagatcagccacacccagaaagccaccctcgtgtgcctggctaccggcttctaccccgaccatgtggaactgtcttggtgggtcaacggcaaagaggtgcacagcggcgtgtctaccgacccccagccactgaaagaacagcccgccctgaacgacagccggtactgcctgagcagcagactgagagtgtccgccaccttctggcagaacccccggaaccacttcagatgccaggtgcagttctacggcctgagcgagaacgacgagtggacccaggacagagccaagcccgtgacccagatcgtgtctgccgaagcctggggcagagccgattgcggatccctgcattgcgtgggcgacacataccccagcaacgacagatgctgccacgaatgcagacccggcaatggcatggtgtccagatgcagcagatcccagaacaccgtgtgcagaccttgcggccctggcttctacaacgacgtggtgtctagcaagccctgcaagccttgcacctggtgtaacctgagaagcggcagcgagagaaagcagctgtgtaccgccacacaggataccgtgtgccggtgtagagctggcacacagcctctggacagctacaaacctggcgtggactgtgccccttgtcctcctggacactttagccctggcgacaaccaggcttgcaaaccctggaccaactgtaccctggccggcaagcacacactgcaacctgccagcaatagcagcgacgccatctgcgaggacagagatcctcctgccacacagccccaagagacacaaggacctccagccagacctatcaccgtgcagcctacagaagcctggcctagaacaagccagggacctagcaccagacctgtggaagttcctggtggcagagccgtggccgccattcttggtcttggactggtgctgggactgctcggacctctggctattctgctggccctgtacctgctgagaagggaccaaagactgcctcctgacgctcacaaacctccaggcggaggcagcttcagaacccctatccaagaggaacaggctgacgcccacagcaccctggcaaaaattagcactagtagagtgaagttcagcagaagcgccgacgcccctgcctaccagcagggacagaaccaactgtacaacgagctgaacctgggcagacgggaagagtacgacgtgctggacaagcggagaggcagggaccctgagatgggcggaaagccccagcggagaaagaacccccaggaaggactgtataacgaactccagaaagacaagatggccgaagcctacagcgagatcggcatgaagggcgagcggagaagaggcaagggccacgatggcctgtaccagggcctgagcaccgccaccaaggacacctatgacgccctgcacatgcaggccctgcctccaagaagggccaagcgatctggatctggagcaacaaacttctcactactcaaacaagcaggtgacgtggaggagaatcccgggcctatggactggatttggcgcatccttttccttgtcggcgctgctaccggcgcgcattccgggcccgaagtgcaactggttgaatccggtggcggcctggtgcaagcaggcggatctctcagacttagctgtgccgcctccggcagaaccttcacaatgggatggtttaggcaggctccagggaaagagagagagttcgtcgccgccatctctctgtctcccacactggcctactacgccgactctgtgaaaggccggttcaccatctccagagataatgccaagaacaccgtggtgctgcaaatgaactctctgaaacccgaggatacagccctgtactattgtgccgctgaccggaagtccgtgatgagcatcagacccgattactggggacagggcacacaagtcacagtgtcctctacgcgtatccagaaccctgatcctgccgtgtaccagctgcgggatagcaagagcagcgacaagagcgtgtgtctgttcaccgacttcgacagccagaccaacgtgtcccagagcaaggactccgacgtgtacatcaccgataagaccgtgctggacatgcggagcatggacttcaagagcaactccgccgtggcctggtccaacaagtccgatttcgcctgcgccaacgccttcaacaacagcattatccccgaggacacattcttcccaagccccgagagcagctgcggtaccctgcactgtgtcggcgacacctatccatccaacgatcggtgctgccatgagtgccggcctggcaacggaatggtgtctcgatgttctcggagtcagaataccgtctgtaggccatgcggacccggcttttacaatgatgtcgtgtcctccaaaccttgcaagccatgtacttggtgcaatctgcggagcggctctgagcggaaacagctgtgcactgctacccaggacacagtgtgtagatgcagagccggaactcagcccctggactcttataagcccggcgttgactgcgctccatgtccaccagggcacttttccccaggcgacaatcaagcctgtaaaccgtggacaaattgcacactggccgggaaacacaccttgcagccagccagcaattcctccgatgccatctgtgaagatcgggacccaccagccactcagcctcaagaaactcaggggcctcctgctaggcccattacagtgcaacctaccgaggcttggccccggacatctcagggaccttctacaaggccagtggaagtgccaggcggtagagctgtggctgctatccttggattgggcctcgttctcggactgttgggaccacttgcaatcctgctggctctctatctgctgcggcgggatcagagactccctccagatgctcataagccacctggcggcggatctttcaggaccccaattcaagaagaacaagccgacgctcactctaccctggctaagatcagctctagacgggttaagttttccagatccgcagacgcacccgcttaccaacaagggcagaaccaactctacaatgaacttaatttggggcggagggaagagtacgacgttctggacaaaaggaggggacgagatcccgagatgggcggaaagcctcagcgaaggaagaatccgcaagaggggctttataacgaactccagaaagataaaatggcagaagcctatagtgagattgggatgaagggagaaaggaggaggggtaaaggtcacgatgggttgtaccaaggattgagcacagccactaaagatacctatgatgcgctccacatgcaggccctgccgccaagacgcgccaagagaagcggatctggcgtgaagcagaccctgaatttcgacctgctgaagctggctggcgacgtggaatccaacccaggccctggccatatgaccgagtacaagcccacggtgcgcctcgccacccgcgacgacgtccccagggccgtacgcaccctcgccgccgcgttcgccgactaccccgccacgcgccacaccgtcgatccggaccgccacatcgagcgggtcaccgagctgcaagaactcttcctcacgcgcgtcgggctcgacatcggcaaggtgtgggtcgcggacgacggcgccgcggtggcggtctggaccacgccggagagcgtcgaagcgggggcggtgttcgccgagatcggcccgcgcatggccgagttgagcggttcccggctggccgcgcagcaacagatggaaggcctcctggcgccgcaccggcccaaggagcccgcgtggttcctggccaccgtcggcgtctcgcccgaccaccagggcaagggtctgggcagcgccgtcgtgctccccggagtggaggcggccgagcgcgccggggtgcccgccttcctggagacctccgcgccccgcaacctccccttctacgagcggctcggcttcaccgtcaccgccgacgtcgaggtgcccgaaggaccgcgcacctggtgcatgacccgcaagcccggtgcctga

SEQ ID NO: 6071 - DNA, 2283 bp, Artificial Sequence
  Synthetic Polynucleotide
atggccttaccagtgaccgccttgctcctgccgctggccttgctgctccacgccgccaggccggcatgcgaagtgcagctgcttgaaagtggcggcggactgattcagcctggcggatctctgagactgagctgtgccgccagcggcttcaccttttctagccacgccatgacctgggtccgacaggcacctggaaaagggcttgaatgggtgtccgccatcagcggctctggcgattacacacactacgccgacagcgtgaagggcagattcaccatcagcagagacaacagcaagaacaccgtgtacctccagatgaacagcctgagagccgaggacagcgccgtgtattattgcgccaaggatgaggatggcggcagcctgcttggacacagaggacaaggcaccctggtcaccgtttcttccggtaccggcggaggcggatctggcggcggaggtagcggtggcggaggatctgaattcggatctctcgagctgcattgcgtgggcgacacataccccagcaacgacagatgctgccacgaatgcagacccggcaatggcatggtgtccagatgcagcagatcccagaacaccgtgtgcagaccttgcggccctggcttctacaacgacgtggtgtctagcaagccctgcaagccttgcacctggtgtaacctgagaagcggcagcgagagaaagcagctgtgtaccgccacacaggataccgtgtgccggtgtagagctggcacacagcctctggacagctacaaacctggcgtggactgtgccccttgtcctcctggacactttagccctggcgacaaccaggcttgcaaaccctggaccaactgtaccctggccggcaagcacacactgcaacctgccagcaatagcagcgacgccatctgcgaggacagagatcctcctgccacacagccccaagagacacaaggacctccagccagacctatcaccgtgcagcctacagaagcctggcctagaacaagccagggacctagcaccagacctgtggaagttcctggtggcagagccgtggccgccattcttggtcttggactggtgctgggactgctcggacctctggctattctgctggccctgtacctgctgagaagggaccaaagactgcctcctgacgctcacaaacctccaggcggaggcagcttcagaacccctatccaagaggaacaggctgacgcccacagcaccctggcaaaaattagcactagtagagtgaagttcagcagaagcgccgacgcccctgcctaccagcagggacagaaccaactgtacaacgagctgaacctgggcagacgggaagagtacgacgtgctggacaagcggagaggcagggaccctgagatgggcggaaagccccagcggagaaagaacccccaggaaggactgtataacgaactccagaaagacaagatggccgaagcctacagcgagatcggcatgaagggcgagcggagaagaggcaagggccacgatggcctgtaccagggcctgagcaccgccaccaaggacacctatgacgccctgcacatgcaggccctgcctccaagaagggccaagcgatctggatctggagcaacaaacttctcactactcaaacaagcaggtgacgtggaggagaatcccgggcctactagaggccatatgaccgagtacaagcccacggtgcgcctcgccacccgcgacgacgtccccagggccgtacgcaccctcgccgccgcgttcgccgactaccccgccacgcgccacaccgtcgatccggaccgccacatcgagcgggtcaccgagctgcaagaactcttcctcacgcgcgtcgggctcgacatcggcaaggtgtgggtcgcggacgacggcgccgcggtggcggtctggaccacgccggagagcgtcgaagcgggggcggtgttcgccgagatcggcccgcgcatggccgagttgagcggttcccggctggccgcgcagcaacagatggaaggcctcctggcgccgcaccggcccaaggagcccgcgtggttcctggccaccgtcggcgtctcgcccgaccaccagggcaagggtctgggcagcgccgtcgtgctccccggagtggaggcggccgagcgcgccggggtgcccgccttcctggagacctccgcgccccgcaacctccccttctacgagcggctcggcttcaccgtcaccgccgacgtcgaggtgcccgaaggaccgcgcacctggtgcatgacccgcaagcccggtgcctga

SEQ ID NO: 6072 - DNA, 1896 bp, Artificial Sequence
  Synthetic Polynucleotide
atggccttaccagtgaccgccttgctcctgccgctggccttgctgctccacgccgccaggccggacatccagatgacacagagccctagcagcctgtctgccagcgtgggagacagagtgaccatcacatgcaaggccagcgaccacatcaacaactggctggcctggtatcagcagaagcctggacaggcccctaagctgctgatctacggcgctaccacactggaaacaggcgtgcccagcagattttctggcagcggctctggcaccgactacaccctgacaatatccagcctccagcctgaggacttcgccacctactactgtcagcagagctggaacaccccttggacattcggccagggcaccaagctggaaatcaagagaggcggaggcggaagtggaggcggaggatctggcggcggaggctctcaagttcagcttcaacagcctggcgctgagctggtcaaacctggcgcttctgtgaagatgagctgcaaagccagcggctacgccttcagcagctactggatcaactggatgaagcagaaacccggccagggactcgaatggatcggccaaatctatcccggcgacggcgacaccaactacaacggcaagttcaagggcagagccacactgaccgccgatacctctagcagcacagcctacatgcagctgagcagcctgaccagcgaagatagcgccgtgtacttctgtgcccggtccatcacaacagtcgtgggctgcgctatggactattggggccagggaacaagcgtgaccgtgtctagtacgcgtctgcattgcgtgggcgacacataccccagcaacgacagatgctgccacgaatgcagacccggcaatggcatggtgtccagatgcagcagatcccagaacaccgtgtgcagaccttgcggccctggcttctacaacgacgtggtgtctagcaagccctgcaagccttgcacctggtgtaacctgagaagcggcagcgagagaaagcagctgtgtaccgccacacaggataccgtgtgccggtgtagagctggcacacagcctctggacagctacaaacctggcgtggactgtgccccttgtcctcctggacactttagccctggcgacaaccaggcttgcaaaccctggaccaactgtaccctggccggcaagcacacactgcaacctgccagcaatagcagcgacgccatctgcgaggacagagatcctcctgccacacagccccaagagacacaaggacctccagccagacctatcaccgtgcagcctacagaagcctggcctagaacaagccagggacctagcaccagacctgtggaagttcctggtggcagagccgtggccgccattcttggtcttggactggtgctgggactgctcggacctctggctattctgctggccctgtacctgctgagaagggaccaaagactgcctcctgacgctcacaaacctccaggcggaggcagcttcagaacccctatccaagaggaacaggctgacgcccacagcaccctggcaaaaattagcactagtagagtgaagttcagcagaagcgccgacgcccctgcctaccagcagggacagaaccaactgtacaacgagctgaacctgggcagacgggaagagtacgacgtgctggacaagcggagaggcagggaccctgagatgggcggaaagccccagcggagaaagaacccccaggaaggactgtataacgaactccagaaagacaagatggccgaagcctacagcgagatcggcatgaagggcgagcggagaagaggcaagggccacgatggcctgtaccagggcctgagcaccgccaccaaggacacctatgacgccctgcacatgcaggccctgcctccaaga

SEQ ID NO: 6073 - DNA, 1896 bp, Artificial Sequence
  Synthetic Polynucleotide
atggccttaccagtgaccgccttgctcctgccgctggccttgctgctccacgccgccaggccggagatcgtgctgacacagagccctgccaccctgtctctgagccctggcgaaagagccaccctgagctgtagagccagccagagcgtgtccagctacctggcctggtatcagcagaagcccggccaggctccccggctgctgatctacgatgccagcaatagagccaccggcatccccgccagattttccggctctggcagcggcaccgacttcaccctgaccatcagctccctggaacccgaggacttcgccgtgtactactgccagcagcggagcaactggcccatcacattcggccagggcacccggctggaaatcaaaggcggaggcggaagtggaggcggaggatctggcggcggaggctctgaagtgcagctggtggaatcaggcggcggactggtgcagcctggcagaagcctgagactgagctgtgccgccagcggcttcaccttcaacgactacgccatgcactgggtgcgccaggcccctggaaaaggactggaatgggtgtccacaatcagctggaacagcggcagcatcggctacgccgatagcgtgaagggccggttcaccatcagccgggacaacgccaagaagtccctgtacctccagatgaacagcctgcgggccgaggacacagccctgtactattgcgccaaggacatccagtacggcaactactactacggcatggacgtgtggggccagggaaccaccgtgaccgtgtcatctacgcgtctgcattgcgtgggcgacacataccccagcaacgacagatgctgccacgaatgcagacccggcaatggcatggtgtccagatgcagcagatcccagaacaccgtgtgcagaccttgcggccctggcttctacaacgacgtggtgtctagcaagccctgcaagccttgcacctggtgtaacctgagaagcggcagcgagagaaagcagctgtgtaccgccacacaggataccgtgtgccggtgtagagctggcacacagcctctggacagctacaaacctggcgtggactgtgccccttgtcctcctggacactttagccctggcgacaaccaggcttgcaaaccctggaccaactgtaccctggccggcaagcacacactgcaacctgccagcaatagcagcgacgccatctgcgaggacagagatcctcctgccacacagccccaagagacacaaggacctccagccagacctatcaccgtgcagcctacagaagcctggcctagaacaagccagggacctagcaccagacctgtggaagttcctggtggcagagccgtggccgccattcttggtcttggactggtgctgggactgctcggacctctggctattctgctggccctgtacctgctgagaagggaccaaagactgcctcctgacgctcacaaacctccaggcggaggcagcttcagaacccctatccaagaggaacaggctgacgcccacagcaccctggcaaaaattagcactagtagagtgaagttcagcagaagcgccgacgcccctgcctaccagcagggacagaaccaactgtacaacgagctgaacctgggcagacgggaagagtacgacgtgctggacaagcggagaggcagggaccctgagatgggcggaaagccccagcggagaaagaacccccaggaaggactgtataacgaactccagaaagacaagatggccgaagcctacagcgagatcggcatgaagggcgagcggagaagaggcaagggccacgatggcctgtaccagggcctgagcaccgccaccaaggacacctatgacgccctgcacatgcaggccctgcctccaaga

SEQ ID NO: 6074 - DNA, 1518 bp, Artificial Sequence
  Synthetic Polynucleotide
atggccttaccagtgaccgccttgctcctgccgctggccttgctgctccacgccgccaggccggaagtgcagctggttgaatctggcggaggactggttcaggctggcggatctctgagactgtcttgtgccgccagcggcagaacctttagcatgggctggtttagacaggcccctggcaaagagagagagttcgtcgccgccatcacatactctggcggcagcccttactacgccgactctgtgaagggcagattcaccatcagccgggacaacgccaagaacaccgtgtacctccagatgaacagcctgaagcctgaggacaccgccgtgtactactgcgccgccaatccaacatacggcagcgactggaacgccgagaattggggccagggaacccaagtgacagtgtctagcacgcgtctgcattgcgtgggcgacacataccccagcaacgacagatgctgccacgaatgcagacccggcaatggcatggtgtccagatgcagcagatcccagaacaccgtgtgcagaccttgcggccctggcttctacaacgacgtggtgtctagcaagccctgcaagccttgcacctggtgtaacctgagaagcggcagcgagagaaagcagctgtgtaccgccacacaggataccgtgtgccggtgtagagctggcacacagcctctggacagctacaaacctggcgtggactgtgccccttgtcctcctggacactttagccctggcgacaaccaggcttgcaaaccctggaccaactgtaccctggccggcaagcacacactgcaacctgccagcaatagcagcgacgccatctgcgaggacagagatcctcctgccacacagccccaagagacacaaggacctccagccagacctatcaccgtgcagcctacagaagcctggcctagaacaagccagggacctagcaccagacctgtggaagttcctggtggcagagccgtggccgccattcttggtcttggactggtgctgggactgctcggacctctggctattctgctggccctgtacctgctgagaagggaccaaagactgcctcctgacgctcacaaacctccaggcggaggcagcttcagaacccctatccaagaggaacaggctgacgcccacagcaccctggcaaaaattagcactagtagagtgaagttcagcagaagcgccgacgcccctgcctaccagcagggacagaaccaactgtacaacgagctgaacctgggcagacgggaagagtacgacgtgctggacaagcggagaggcagggaccctgagatgggcggaaagccccagcggagaaagaacccccaggaaggactgtataacgaactccagaaagacaagatggccgaagcctacagcgagatcggcatgaagggcgagcggagaagaggcaagggccacgatggcctgtaccagggcctgagcaccgccaccaaggacacctatgacgccctgcacatgcaggccctgcctccaaga

SEQ ID NO: 6075 - DNA, 1518 bp, Artificial Sequence
  Synthetic Polynucleotide
atggccttaccagtgaccgccttgctcctgccgctggccttgctgctccacgccgccaggccgcagctccagttgcaagagagcggccctggcttggtaaaaccttccgagacccttagcctcacatgcacggttagtgggggcagcatttcctcaggtgattactattggggatggattcggcaacccccgggtaaaggattggagtggattggtcatatttattatagtggagcgacgtactacaacccaagtctcaaatccagggttacaatatccgtcgatacgagcaggaaccaattcagcttgaaactttctagtgtcaccgcagcagacacagccgtctattactgtacgcgggatgactccagtaattggcggtcccgagggcaagggacactggtcacggtctcctcaacgcgtctgcattgcgtgggcgacacataccccagcaacgacagatgctgccacgaatgcagacccggcaatggcatggtgtccagatgcagcagatcccagaacaccgtgtgcagaccttgcggccctggcttctacaacgacgtggtgtctagcaagccctgcaagccttgcacctggtgtaacctgagaagcggcagcgagagaaagcagctgtgtaccgccacacaggataccgtgtgccggtgtagagctggcacacagcctctggacagctacaaacctggcgtggactgtgccccttgtcctcctggacactttagccctggcgacaaccaggcttgcaaaccctggaccaactgtaccctggccggcaagcacacactgcaacctgccagcaatagcagcgacgccatctgcgaggacagagatcctcctgccacacagccccaagagacacaaggacctccagccagacctatcaccgtgcagcctacagaagcctggcctagaacaagccagggacctagcaccagacctgtggaagttcctggtggcagagccgtggccgccattcttggtcttggactggtgctgggactgctcggacctctggctattctgctggccctgtacctgctgagaagggaccaaagactgcctcctgacgctcacaaacctccaggcggaggcagcttcagaacccctatccaagaggaacaggctgacgcccacagcaccctggcaaaaattagcactagtagagtgaagttcagcagaagcgccgacgcccctgcctaccagcagggacagaaccaactgtacaacgagctgaacctgggcagacgggaagagtacgacgtgctggacaagcggagaggcagggaccctgagatgggcggaaagccccagcggagaaagaacccccaggaaggactgtataacgaactccagaaagacaagatggccgaagcctacagcgagatcggcatgaagggcgagcggagaagaggcaagggccacgatggcctgtaccagggcctgagcaccgccaccaaggacacctatgacgccctgcacatgcaggccctgcctccaaga

SEQ ID NO: 6076 - DNA, 1518 bp, Artificial Sequence
  Synthetic Polynucleotide
atggccttaccagtgaccgccttgctcctgccgctggccttgctgctccacgccgccaggccgcagctccagctgcaagagtctggacctggcctggtcaagcctagcgagacactgagcctgacctgtaccgtgtccggcgatagcatcagcagcggcgattactactggggctggatcagacagcctcctggcaaaggactggaatggatcggccacatctactacagcggcgtgacctactacaaccccagcctgaagtccagagtgaccatcagcgtggacaccagccggaaccagttctccctgaagctgtctagcgtgacagccgccgataccgccgtgtactactgcaccagagaggacagcagcaactggcggagtagaggccagggaacactggtcacagttagctctacgcgtctgcattgcgtgggcgacacataccccagcaacgacagatgctgccacgaatgcagacccggcaatggcatggtgtccagatgcagcagatcccagaacaccgtgtgcagaccttgcggccctggcttctacaacgacgtggtgtctagcaagccctgcaagccttgcacctggtgtaacctgagaagcggcagcgagagaaagcagctgtgtaccgccacacaggataccgtgtgccggtgtagagctggcacacagcctctggacagctacaaacctggcgtggactgtgccccttgtcctcctggacactttagccctggcgacaaccaggcttgcaaaccctggaccaactgtaccctggccggcaagcacacactgcaacctgccagcaatagcagcgacgccatctgcgaggacagagatcctcctgccacacagccccaagagacacaaggacctccagccagacctatcaccgtgcagcctacagaagcctggcctagaacaagccagggacctagcaccagacctgtggaagttcctggtggcagagccgtggccgccattcttggtcttggactggtgctgggactgctcggacctctggctattctgctggccctgtacctgctgagaagggaccaaagactgcctcctgacgctcacaaacctccaggcggaggcagcttcagaacccctatccaagaggaacaggctgacgcccacagcaccctggcaaaaattagcactagtagagtgaagttcagcagaagcgccgacgcccctgcctaccagcagggacagaaccaactgtacaacgagctgaacctgggcagacgggaagagtacgacgtgctggacaagcggagaggcagggaccctgagatgggcggaaagccccagcggagaaagaacccccaggaaggactgtataacgaactccagaaagacaagatggccgaagcctacagcgagatcggcatgaagggcgagcggagaagaggcaagggccacgatggcctgtaccagggcctgagcaccgccaccaaggacacctatgacgccctgcacatgcaggccctgcctccaaga

SEQ ID NO: 6077 - DNA, 1524 bp, Artificial Sequence
  Synthetic Polynucleotide
atggccttaccagtgaccgccttgctcctgccgctggccttgctgctccacgccgccaggccggaagttcagctgcaagagtctggcggaggactggttcaacctggcggaagcctgagactgtcttgtgccgcctctggcagaaccttcagcagcctgttcatgggctggttcagacaggcccctggcaaagagagagaactggtcgccgccatcagccggtacagcctgtacacctactacgccgacagcgtgaagggcagattcaccatcagcgccgacaacgccaagaacgccgtgtacctccagatgaacagcctgaagccagaggacacagccgtgtactactgcgccagcaaacttgagtacaccagcaacgactacgacagctggggccagggaacccaagtgacagtctcttctacgcgtctgcattgcgtgggcgacacataccccagcaacgacagatgctgccacgaatgcagacccggcaatggcatggtgtccagatgcagcagatcccagaacaccgtgtgcagaccttgcggccctggcttctacaacgacgtggtgtctagcaagccctgcaagccttgcacctggtgtaacctgagaagcggcagcgagagaaagcagctgtgtaccgccacacaggataccgtgtgccggtgtagagctggcacacagcctctggacagctacaaacctggcgtggactgtgccccttgtcctcctggacactttagccctggcgacaaccaggcttgcaaaccctggaccaactgtaccctggccggcaagcacacactgcaacctgccagcaatagcagcgacgccatctgcgaggacagagatcctcctgccacacagccccaagagacacaaggacctccagccagacctatcaccgtgcagcctacagaagcctggcctagaacaagccagggacctagcaccagacctgtggaagttcctggtggcagagccgtggccgccattcttggtcttggactggtgctgggactgctcggacctctggctattctgctggccctgtacctgctgagaagggaccaaagactgcctcctgacgctcacaaacctccaggcggaggcagcttcagaacccctatccaagaggaacaggctgacgcccacagcaccctggcaaaaattagcactagtagagtgaagttcagcagaagcgccgacgcccctgcctaccagcagggacagaaccaactgtacaacgagctgaacctgggcagacgggaagagtacgacgtgctggacaagcggagaggcagggaccctgagatgggcggaaagccccagcggagaaagaacccccaggaaggactgtataacgaactccagaaagacaagatggccgaagcctacagcgagatcggcatgaagggcgagcggagaagaggcaagggccacgatggcctgtaccagggcctgagcaccgccaccaaggacacctatgacgccctgcacatgcaggccctgcctccaaga

SEQ ID NO: 6078 - DNA, 1548 bp, Artificial Sequence
  Synthetic Polynucleotide
atggccttaccagtgaccgccttgctcctgccgctggccttgctgctccacgccgccaggccggaagtgcagctggttgaatctggcggaggactggttcagcctggcggatctctgagactgtcttgtgccgcctctggcttcgccagcgactactatatcatcggctggttcagacaggcccctggcaaagagagagagggcgtcagctgtatcagcagcagatacgccaacaccaactacgccgacagcgtgaagggcagattcaccatcagccgggacaacgccaagaacaccgtgtacctccagatgaacagcctgaagcctgaggacaccgccgtgtactactgtgccgccgacaccagaagatacacctgtcctgacattgccaccatgcaccggaacttcgattcttggggccagggcacactggtcaccgtttcttctacgcgtctgcattgcgtgggcgacacataccccagcaacgacagatgctgccacgaatgcagacccggcaatggcatggtgtccagatgcagcagatcccagaacaccgtgtgcagaccttgcggccctggcttctacaacgacgtggtgtctagcaagccctgcaagccttgcacctggtgtaacctgagaagcggcagcgagagaaagcagctgtgtaccgccacacaggataccgtgtgccggtgtagagctggcacacagcctctggacagctacaaacctggcgtggactgtgccccttgtcctcctggacactttagccctggcgacaaccaggcttgcaaaccctggaccaactgtaccctggccggcaagcacacactgcaacctgccagcaatagcagcgacgccatctgcgaggacagagatcctcctgccacacagccccaagagacacaaggacctccagccagacctatcaccgtgcagcctacagaagcctggcctagaacaagccagggacctagcaccagacctgtggaagttcctggtggcagagccgtggccgccattcttggtcttggactggtgctgggactgctcggacctctggctattctgctggccctgtacctgctgagaagggaccaaagactgcctcctgacgctcacaaacctccaggcggaggcagcttcagaacccctatccaagaggaacaggctgacgcccacagcaccctggcaaaaattagcactagtagagtgaagttcagcagaagcgccgacgcccctgcctaccagcagggacagaaccaactgtacaacgagctgaacctgggcagacgggaagagtacgacgtgctggacaagcggagaggcagggaccctgagatgggcggaaagccccagcggagaaagaacccccaggaaggactgtataacgaactccagaaagacaagatggccgaagcctacagcgagatcggcatgaagggcgagcggagaagaggcaagggccacgatggcctgtaccagggcctgagcaccgccaccaaggacacctatgacgccctgcacatgcaggccctgcctccaaga

SEQ ID NO: 6079 - DNA, 1536 bp, Artificial Sequence
  Synthetic Polynucleotide
atggccttaccagtgaccgccttgctcctgccgctggccttgctgctccacgccgccaggccggaagtgcaactggtggaatctggaggctctctggtgcagccagggggaagcctgagactgtcttgtgccgcttccggcttcaccttcgacgactacgccatgagctgggtgcgccaggtgccaggcaaaggcctggaatgggtgtccagcatcaactggagcggcacccacaccgattacgccgactccgtgaaaggcagattcacaatcagcagaaacaacgccaacaataccctgtacctgcagatgaactccctgaagtctgaggatacagcagtgtattattgcgccaagaactggcgggacgccggcaccacttggtttgagaaaagcggctctgccggacagggaacccaagtgacagtgtcctccacgcgtctgcattgcgtgggcgacacataccccagcaacgacagatgctgccacgaatgcagacccggcaatggcatggtgtccagatgcagcagatcccagaacaccgtgtgcagaccttgcggccctggcttctacaacgacgtggtgtctagcaagccctgcaagccttgcacctggtgtaacctgagaagcggcagcgagagaaagcagctgtgtaccgccacacaggataccgtgtgccggtgtagagctggcacacagcctctggacagctacaaacctggcgtggactgtgccccttgtcctcctggacactttagccctggcgacaaccaggcttgcaaaccctggaccaactgtaccctggccggcaagcacacactgcaacctgccagcaatagcagcgacgccatctgcgaggacagagatcctcctgccacacagccccaagagacacaaggacctccagccagacctatcaccgtgcagcctacagaagcctggcctagaacaagccagggacctagcaccagacctgtggaagttcctggtggcagagccgtggccgccattcttggtcttggactggtgctgggactgctcggacctctggctattctgctggccctgtacctgctgagaagggaccaaagactgcctcctgacgctcacaaacctccaggcggaggcagcttcagaacccctatccaagaggaacaggctgacgcccacagcaccctggcaaaaattagcactagtagagtgaagttcagcagaagcgccgacgcccctgcctaccagcagggacagaaccaactgtacaacgagctgaacctgggcagacgggaagagtacgacgtgctggacaagcggagaggcagggaccctgagatgggcggaaagccccagcggagaaagaacccccaggaaggactgtataacgaactccagaaagacaagatggccgaagcctacagcgagatcggcatgaagggcgagcggagaagaggcaagggccacgatggcctgtaccagggcctgagcaccgccaccaaggacacctatgacgccctgcacatgcaggccctgcctccaaga

SEQ ID NO: 6080 - DNA, 1521 bp, Artificial Sequence
  Synthetic Polynucleotide
atggccttaccagtgaccgccttgctcctgccgctggccttgctgctccacgccgccaggccggaggtgcagctggttgaatctggcggaggactggttcagcctggcggatctctgagactgtcttgtgccgccagcggcttcaacatcaaggatacctgtatcggctgggttcgcagagcccctggcaaagaggaagaactggtcgccaaaatctgcaagtacagcggccacaccagatacgccgacagcgtgaagggcagattcaccatcagcgccgacaccagcaagaacaccgcctacctccagatgaacagcctgagagccgaggacaccgccgtgtactattgtgccgctgtgtccgtcagagatgggcactacaattactggggccagggcaccaccgtgaccgtttcttcaacgcgtctgcattgcgtgggcgacacataccccagcaacgacagatgctgccacgaatgcagacccggcaatggcatggtgtccagatgcagcagatcccagaacaccgtgtgcagaccttgcggccctggcttctacaacgacgtggtgtctagcaagccctgcaagccttgcacctggtgtaacctgagaagcggcagcgagagaaagcagctgtgtaccgccacacaggataccgtgtgccggtgtagagctggcacacagcctctggacagctacaaacctggcgtggactgtgccccttgtcctcctggacactttagccctggcgacaaccaggcttgcaaaccctggaccaactgtaccctggccggcaagcacacactgcaacctgccagcaatagcagcgacgccatctgcgaggacagagatcctcctgccacacagccccaagagacacaaggacctccagccagacctatcaccgtgcagcctacagaagcctggcctagaacaagccagggacctagcaccagacctgtggaagttcctggtggcagagccgtggccgccattcttggtcttggactggtgctgggactgctcggacctctggctattctgctggccctgtacctgctgagaagggaccaaagactgcctcctgacgctcacaaacctccaggcggaggcagcttcagaacccctatccaagaggaacaggctgacgcccacagcaccctggcaaaaattagcactagtagagtgaagttcagcagaagcgccgacgcccctgcctaccagcagggacagaaccaactgtacaacgagctgaacctgggcagacgggaagagtacgacgtgctggacaagcggagaggcagggaccctgagatgggcggaaagccccagcggagaaagaacccccaggaaggactgtataacgaactccagaaagacaagatggccgaagcctacagcgagatcggcatgaagggcgagcggagaagaggcaagggccacgatggcctgtaccagggcctgagcaccgccaccaaggacacctatgacgccctgcacatgcaggccctgcctccaaga

SEQ ID NO: 6081 - DNA, 1536 bp, Artificial Sequence
  Synthetic Polynucleotide
atggccttaccagtgaccgccttgctcctgccgctggccttgctgctccacgccgccaggccgggctctgacctgggcatcaagctgctgttcgccgctgccaagggccaggacgacgaagtgcggattctgctggctgctggggccgacgtgaacgccaaggatttcgagggctacacccccctgcacgtggccgcctatgatggacacctggaaatcgtggaagtgctgctgaaggctggcgctgatgtgaatgccaaagacagccagggccggacccctctgcatgaagccgcctacagcggccatctggaaattgtggaagtgctgctgaaagccggggcagacgtgaacgctcaggacgacgctggcgagacaccagccgatctggctgcagcttggggccacgaagatatcgccgaggtgctgcagaagacgcgtctgcattgcgtgggcgacacataccccagcaacgacagatgctgccacgaatgcagacccggcaatggcatggtgtccagatgcagcagatcccagaacaccgtgtgcagaccttgcggccctggcttctacaacgacgtggtgtctagcaagccctgcaagccttgcacctggtgtaacctgagaagcggcagcgagagaaagcagctgtgtaccgccacacaggataccgtgtgccggtgtagagctggcacacagcctctggacagctacaaacctggcgtggactgtgccccttgtcctcctggacactttagccctggcgacaaccaggcttgcaaaccctggaccaactgtaccctggccggcaagcacacactgcaacctgccagcaatagcagcgacgccatctgcgaggacagagatcctcctgccacacagccccaagagacacaaggacctccagccagacctatcaccgtgcagcctacagaagcctggcctagaacaagccagggacctagcaccagacctgtggaagttcctggtggcagagccgtggccgccattcttggtcttggactggtgctgggactgctcggacctctggctattctgctggccctgtacctgctgagaagggaccaaagactgcctcctgacgctcacaaacctccaggcggaggcagcttcagaacccctatccaagaggaacaggctgacgcccacagcaccctggcaaaaattagcactagtagagtgaagttcagcagaagcgccgacgcccctgcctaccagcagggacagaaccaactgtacaacgagctgaacctgggcagacgggaagagtacgacgtgctggacaagcggagaggcagggaccctgagatgggcggaaagccccagcggagaaagaacccccaggaaggactgtataacgaactccagaaagacaagatggccgaagcctacagcgagatcggcatgaagggcgagcggagaagaggcaagggccacgatggcctgtaccagggcctgagcaccgccaccaaggacacctatgacgccctgcacatgcaggccctgcctccaaga

SEQ ID NO: 6082 - DNA, 1338 bp, Artificial Sequence
  Synthetic Polynucleotide
atggccttaccagtgaccgccttgctcctgccgctggccttgctgctccacgccgccaggccggtggacaacaagttcaacaaagagcggtacagcgcctactacgagatttggcaactgcccaacctgaacgtgcggcagaaggccgccttcatcggatctctgcaggacgaccctagccagagcgccaatctgctggccgaggccaagaagctgaacgacgcccaggcccctaaaacgcgtctgcattgcgtgggcgacacataccccagcaacgacagatgctgccacgaatgcagacccggcaatggcatggtgtccagatgcagcagatcccagaacaccgtgtgcagaccttgcggccctggcttctacaacgacgtggtgtctagcaagccctgcaagccttgcacctggtgtaacctgagaagcggcagcgagagaaagcagctgtgtaccgccacacaggataccgtgtgccggtgtagagctggcacacagcctctggacagctacaaacctggcgtggactgtgccccttgtcctcctggacactttagccctggcgacaaccaggcttgcaaaccctggaccaactgtaccctggccggcaagcacacactgcaacctgccagcaatagcagcgacgccatctgcgaggacagagatcctcctgccacacagccccaagagacacaaggacctccagccagacctatcaccgtgcagcctacagaagcctggcctagaacaagccagggacctagcaccagacctgtggaagttcctggtggcagagccgtggccgccattcttggtcttggactggtgctgggactgctcggacctctggctattctgctggccctgtacctgctgagaagggaccaaagactgcctcctgacgctcacaaacctccaggcggaggcagcttcagaacccctatccaagaggaacaggctgacgcccacagcaccctggcaaaaattagcactagtagagtgaagttcagcagaagcgccgacgcccctgcctaccagcagggacagaaccaactgtacaacgagctgaacctgggcagacgggaagagtacgacgtgctggacaagcggagaggcagggaccctgagatgggcggaaagccccagcggagaaagaacccccaggaaggactgtataacgaactccagaaagacaagatggccgaagcctacagcgagatcggcatgaagggcgagcggagaagaggcaagggccacgatggcctgtaccagggcctgagcaccgccaccaaggacacctatgacgccctgcacatgcaggccctgcctccaaga

SEQ ID NO: 6083 - DNA, 1431 bp, Artificial Sequence
  Synthetic Polynucleotide
atggccttaccagtgaccgccttgctcctgccgctggccttgctgctccacgccgccaggccgctgccagccccgaagaatttggtcgtttcccgtgtcactgaggactctgcacgtctgagctggaccgcaccggacgcggcgttcgacagctttgcaatcggctactgggagtgggatgatgacggcgaggccattgtgctgaccgttccgggtagcgagcgcagctacgatctgaccggtctgaagccgggtacggaatatccggtgtatattgcgggcgtgaagggtggccagtggagcttcccgctgagcgcgatctttaccaccacgcgtctgcattgcgtgggcgacacataccccagcaacgacagatgctgccacgaatgcagacccggcaatggcatggtgtccagatgcagcagatcccagaacaccgtgtgcagaccttgcggccctggcttctacaacgacgtggtgtctagcaagccctgcaagccttgcacctggtgtaacctgagaagcggcagcgagagaaagcagctgtgtaccgccacacaggataccgtgtgccggtgtagagctggcacacagcctctggacagctacaaacctggcgtggactgtgccccttgtcctcctggacactttagccctggcgacaaccaggcttgcaaaccctggaccaactgtaccctggccggcaagcacacactgcaacctgccagcaatagcagcgacgccatctgcgaggacagagatcctcctgccacacagccccaagagacacaaggacctccagccagacctatcaccgtgcagcctacagaagcctggcctagaacaagccagggacctagcaccagacctgtggaagttcctggtggcagagccgtggccgccattcttggtcttggactggtgctgggactgctcggacctctggctattctgctggccctgtacctgctgagaagggaccaaagactgcctcctgacgctcacaaacctccaggcggaggcagcttcagaacccctatccaagaggaacaggctgacgcccacagcaccctggcaaaaattagcactagtagagtgaagttcagcagaagcgccgacgcccctgcctaccagcagggacagaaccaactgtacaacgagctgaacctgggcagacgggaagagtacgacgtgctggacaagcggagaggcagggaccctgagatgggcggaaagccccagcggagaaagaacccccaggaaggactgtataacgaactccagaaagacaagatggccgaagcctacagcgagatcggcatgaagggcgagcggagaagaggcaagggccacgatggcctgtaccagggcctgagcaccgccaccaaggacacctatgacgccctgcacatgcaggccctgcctccaaga

SEQ ID NO: 6084 - DNA, 1434 bp, Artificial Sequence
  Synthetic Polynucleotide
atggccttaccagtgaccgccttgctcctgccgctggccttgctgctccacgccgccaggccgatgctgcccgctcctaagaatctggtggtgtccagaatcaccgaggacagcgccagactgtcttggacagctcctgatgccgccttcgacagcttccccatccggtacatcgagacactgatctggggcgaagccatctggctggatgtgcctggaagcgagagaagctacgacctgaccggactgaagcctggcacagagtatgccgtggtcatcaccggcgtgaaaggcggcagattctctagccctctggtggcctctttcaccaccacgcgtctgcattgcgtgggcgacacataccccagcaacgacagatgctgccacgaatgcagacccggcaatggcatggtgtccagatgcagcagatcccagaacaccgtgtgcagaccttgcggccctggcttctacaacgacgtggtgtctagcaagccctgcaagccttgcacctggtgtaacctgagaagcggcagcgagagaaagcagctgtgtaccgccacacaggataccgtgtgccggtgtagagctggcacacagcctctggacagctacaaacctggcgtggactgtgccccttgtcctcctggacactttagccctggcgacaaccaggcttgcaaaccctggaccaactgtaccctggccggcaagcacacactgcaacctgccagcaatagcagcgacgccatctgcgaggacagagatcctcctgccacacagccccaagagacacaaggacctccagccagacctatcaccgtgcagcctacagaagcctggcctagaacaagccagggacctagcaccagacctgtggaagttcctggtggcagagccgtggccgccattcttggtcttggactggtgctgggactgctcggacctctggctattctgctggccctgtacctgctgagaagggaccaaagactgcctcctgacgctcacaaacctccaggcggaggcagcttcagaacccctatccaagaggaacaggctgacgcccacagcaccctggcaaaaattagcactagtagagtgaagttcagcagaagcgccgacgcccctgcctaccagcagggacagaaccaactgtacaacgagctgaacctgggcagacgggaagagtacgacgtgctggacaagcggagaggcagggaccctgagatgggcggaaagccccagcggagaaagaacccccaggaaggactgtataacgaactccagaaagacaagatggccgaagcctacagcgagatcggcatgaagggcgagcggagaagaggcaagggccacgatggcctgtaccagggcctgagcaccgccaccaaggacacctatgacgccctgcacatgcaggccctgcctccaaga

SEQ ID NO: 6085 - DNA, 2085 bp, Artificial Sequence
  Synthetic Polynucleotide
atggccttaccagtgaccgccttgctcctgccgctggccttgctgctccacgccgccaggccgatggccttaccagtgaccgccttgctcctgccgctggccttgctgctccacgccgccaggccgctgttcaatcaagaggtgcagatccctctgaccgagagctactgtggcccctgtcctaagaactggatctgctacaagaacaactgctaccagttcttcgacgagagcaagaattggtacgagagccaggccagctgcatgagccagaatgccagcctgctgaaggtgtacagcaaagaggaccaggacctgctgaaactggtcaagagctaccactggatgggccttgtgcacatccccaccaatggctcttggcagtgggaggacggcagcattctgagccctaacctgctgaccatcatcgagatgcagaagggcgactgcgccctgtacgccagcagctttaagggctacatcgagaattgcagcaccccgaacacctacatctgtatgcagagaaccgttggcggaggcggaagtggaggcggaggatctggcggcggaggctctgacctctttaatcaagaagtccagattccactcaccgaatcctactgcggaccttgtccaaaaaattggatttgttataagaacaactgttatcaattctttgatgagtctaaaaattggtatgagtcccaggcttcctgcatgtctcagaacgcttctctgctgaaagtctactctaaagaagatcaggatctcctgaagctcgtcaagtcttatcattggatggggctcgtccacattcctaccaacggaagctggcaatgggaagatggctccatcctgtctccaaatctgctcacgattattgaaatgcagaaaggggattgtgctctctacgccagctccttcaagggatatattgagaactgtagcacgcccaatacttatatctgtatgcaacggaccgtgacgcgtctgcattgcgtgggcgacacataccccagcaacgacagatgctgccacgaatgcagacccggcaatggcatggtgtccagatgcagcagatcccagaacaccgtgtgcagaccttgcggccctggcttctacaacgacgtggtgtctagcaagccctgcaagccttgcacctggtgtaacctgagaagcggcagcgagagaaagcagctgtgtaccgccacacaggataccgtgtgccggtgtagagctggcacacagcctctggacagctacaaacctggcgtggactgtgccccttgtcctcctggacactttagccctggcgacaaccaggcttgcaaaccctggaccaactgtaccctggccggcaagcacacactgcaacctgccagcaatagcagcgacgccatctgcgaggacagagatcctcctgccacacagccccaagagacacaaggacctccagccagacctatcaccgtgcagcctacagaagcctggcctagaacaagccagggacctagcaccagacctgtggaagttcctggtggcagagccgtggccgccattcttggtcttggactggtgctgggactgctcggacctctggctattctgctggccctgtacctgctgagaagggaccaaagactgcctcctgacgctcacaaacctccaggcggaggcagcttcagaacccctatccaagaggaacaggctgacgcccacagcaccctggcaaaaattagcactagtagagtgaagttcagcagaagcgccgacgcccctgcctaccagcagggacagaaccaactgtacaacgagctgaacctgggcagacgggaagagtacgacgtgctggacaagcggagaggcagggaccctgagatgggcggaaagccccagcggagaaagaacccccaggaaggactgtataacgaactccagaaagacaagatggccgaagcctacagcgagatcggcatgaagggcgagcggagaagaggcaagggccacgatggcctgtaccagggcctgagcaccgccaccaaggacacctatgacgccctgcacatgcaggccctgcctccaaga

SEQ ID NO: 6086 - DNA, 1725 bp, Artificial Sequence
  Synthetic Polynucleotide
atggccttaccagtgaccgccttgctcctgccgctggccttgctgctccacgccgccaggccgatggagctgactgatttgctcctggcggccatgcttcttgcagtggcaagactaactctgtccagccccgtagctcctgcctgtgaccccagactcctaaataaactgctgcgtgactcccacctccttcacagccgactgagtcagtgtcccgacgtggaccctttgtctatccctgttctgctgcctgctgtggactttagcctgggagaatggaaaacccagacggaacagagcaaggcacaggacattctaggggcagtgtcccttctactggagggagtgatggcagcacgaggacagttggaaccctcctgcctctcatccctcctgggacagctttctgggcaggttcgcctcctcttgggggccctgcagggcctcctaggaacccagcttcctctacagggcaggaccacagctcacaaggaccccaatgccctcttcttgagcttgcaacaactgcttcggggaaaggtgcgcttcctgcttctggtagaaggtcccaccctctgtgtcagacggaccctgccaaccacagctgtcccaagcagtacttctacgcgtctgcattgcgtgggcgacacataccccagcaacgacagatgctgccacgaatgcagacccggcaatggcatggtgtccagatgcagcagatcccagaacaccgtgtgcagaccttgcggccctggcttctacaacgacgtggtgtctagcaagccctgcaagccttgcacctggtgtaacctgagaagcggcagcgagagaaagcagctgtgtaccgccacacaggataccgtgtgccggtgtagagctggcacacagcctctggacagctacaaacctggcgtggactgtgccccttgtcctcctggacactttagccctggcgacaaccaggcttgcaaaccctggaccaactgtaccctggccggcaagcacacactgcaacctgccagcaatagcagcgacgccatctgcgaggacagagatcctcctgccacacagccccaagagacacaaggacctccagccagacctatcaccgtgcagcctacagaagcctggcctagaacaagccagggacctagcaccagacctgtggaagttcctggtggcagagccgtggccgccattcttggtcttggactggtgctgggactgctcggacctctggctattctgctggccctgtacctgctgagaagggaccaaagactgcctcctgacgctcacaaacctccaggcggaggcagcttcagaacccctatccaagaggaacaggctgacgcccacagcaccctggcaaaaattagcactagtagagtgaagttcagcagaagcgccgacgcccctgcctaccagcagggacagaaccaactgtacaacgagctgaacctgggcagacgggaagagtacgacgtgctggacaagcggagaggcagggaccctgagatgggcggaaagccccagcggagaaagaacccccaggaaggactgtataacgaactccagaaagacaagatggccgaagcctacagcgagatcggcatgaagggcgagcggagaagaggcaagggccacgatggcctgtaccagggcctgagcaccgccaccaaggacacctatgacgccctgcacatgcaggccctgcctccaaga

SEQ ID NO: 6087 - DNA, 1323 bp, Artificial Sequence
  Synthetic Polynucleotide
atggccttaccagtgaccgccttgctcctgccgctggccttgctgctccacgccgccaggccgatggaccccgacctggaaatcagagccgccttcctgcggcagagaaacacagccctgagaacagaggtggccgagctggaacaagaggtgcagcggctggaaaacgaggtgtcccagtacgagacaagatacggccctctcggaggcggaaaaacgcgtacgcgtctgcattgcgtgggcgacacataccccagcaacgacagatgctgccacgaatgcagacccggcaatggcatggtgtccagatgcagcagatcccagaacaccgtgtgcagaccttgcggccctggcttctacaacgacgtggtgtctagcaagccctgcaagccttgcacctggtgtaacctgagaagcggcagcgagagaaagcagctgtgtaccgccacacaggataccgtgtgccggtgtagagctggcacacagcctctggacagctacaaacctggcgtggactgtgccccttgtcctcctggacactttagccctggcgacaaccaggcttgcaaaccctggaccaactgtaccctggccggcaagcacacactgcaacctgccagcaatagcagcgacgccatctgcgaggacagagatcctcctgccacacagccccaagagacacaaggacctccagccagacctatcaccgtgcagcctacagaagcctggcctagaacaagccagggacctagcaccagacctgtggaagttcctggtggcagagccgtggccgccattcttggtcttggactggtgctgggactgctcggacctctggctattctgctggccctgtacctgctgagaagggaccaaagactgcctcctgacgctcacaaacctccaggcggaggcagcttcagaacccctatccaagaggaacaggctgacgcccacagcaccctggcaaaaattagcactagtagagtgaagttcagcagaagcgccgacgcccctgcctaccagcagggacagaaccaactgtacaacgagctgaacctgggcagacgggaagagtacgacgtgctggacaagcggagaggcagggaccctgagatgggcggaaagccccagcggagaaagaacccccaggaaggactgtataacgaactccagaaagacaagatggccgaagcctacagcgagatcggcatgaagggcgagcggagaagaggcaagggccacgatggcctgtaccagggcctgagcaccgccaccaaggacacctatgacgccctgcacatgcaggccctgcctccaaga

SEQ ID NO: 6088 - DNA, 1248 bp, Artificial Sequence
  Synthetic Polynucleotide
atggccttaccagtgaccgccttgctcctgccgctggccttgctgctccacgccgccaggccggaagttgctgccctcgagaaggaggtagcagctttggaaaaagaagtcgcagcccttgagaaagaagttgcggctctggagaagacgcgtctgcattgcgtgggcgacacataccccagcaacgacagatgctgccacgaatgcagacccggcaatggcatggtgtccagatgcagcagatcccagaacaccgtgtgcagaccttgcggccctggcttctacaacgacgtggtgtctagcaagccctgcaagccttgcacctggtgtaacctgagaagcggcagcgagagaaagcagctgtgtaccgccacacaggataccgtgtgccggtgtagagctggcacacagcctctggacagctacaaacctggcgtggactgtgccccttgtcctcctggacactttagccctggcgacaaccaggcttgcaaaccctggaccaactgtaccctggccggcaagcacacactgcaacctgccagcaatagcagcgacgccatctgcgaggacagagatcctcctgccacacagccccaagagacacaaggacctccagccagacctatcaccgtgcagcctacagaagcctggcctagaacaagccagggacctagcaccagacctgtggaagttcctggtggcagagccgtggccgccattcttggtcttggactggtgctgggactgctcggacctctggctattctgctggccctgtacctgctgagaagggaccaaagactgcctcctgacgctcacaaacctccaggcggaggcagcttcagaacccctatccaagaggaacaggctgacgcccacagcaccctggcaaaaattagcactagtagagtgaagttcagcagaagcgccgacgcccctgcctaccagcagggacagaaccaactgtacaacgagctgaacctgggcagacgggaagagtacgacgtgctggacaagcggagaggcagggaccctgagatgggcggaaagccccagcggagaaagaacccccaggaaggactgtataacgaactccagaaagacaagatggccgaagcctacagcgagatcggcatgaagggcgagcggagaagaggcaagggccacgatggcctgtaccagggcctgagcaccgccaccaaggacacctatgacgccctgcacatgcaggccctgcctccaaga

SEQ ID NO: 6089 - DNA, 2022 bp, Artificial Sequence
  Synthetic Polynucleotide
atggccttaccagtgaccgccttgctcctgccgctggccttgctgctccacgccgccaggccgctgttcaatcaagaggtgcagatccctctgaccgagagctactgtggcccctgtcctaagaactggatctgctacaagaacaactgctaccagttcttcgacgagagcaagaattggtacgagagccaggccagctgcatgagccagaatgccagcctgctgaaggtgtacagcaaagaggaccaggacctgctgaaactggtcaagagcgcccactggatgggccttgtgcacatccccaccaatggctcttggcagtgggaggacggcagcattctgagccctaacctgctgaccatcatcgagatgcagaagggcgactgcgccctgtacgccagcagctttaagggcttcatcgagaattgcagcaccccgaacacctacatctgtatgcagagaaccgttggcggaggcggaagtggaggcggaggatctggcggcggaggctctgacctctttaatcaagaagtccagattccactcaccgaatcctactgcggaccttgtccaaaaaattggatttgttataagaacaactgttatcaattctttgatgagtctaaaaattggtatgagtcccaggcttcctgcatgtctcagaacgcttctctgctgaaagtctactctaaagaagatcaggatctcctgaagctcgtcaagtctgcccattggatggggctcgtccacattcctaccaacggaagctggcaatgggaagatggctccatcctgtctccaaatctgctcacgattattgaaatgcagaaaggggattgtgctctctacgccagctccttcaagggatttattgagaactgtagcacgcccaatacttatatctgtatgcaacggaccgtgacgcgtctgcattgcgtgggcgacacataccccagcaacgacagatgctgccacgaatgcagacccggcaatggcatggtgtccagatgcagcagatcccagaacaccgtgtgcagaccttgcggccctggcttctacaacgacgtggtgtctagcaagccctgcaagccttgcacctggtgtaacctgagaagcggcagcgagagaaagcagctgtgtaccgccacacaggataccgtgtgccggtgtagagctggcacacagcctctggacagctacaaacctggcgtggactgtgccccttgtcctcctggacactttagccctggcgacaaccaggcttgcaaaccctggaccaactgtaccctggccggcaagcacacactgcaacctgccagcaatagcagcgacgccatctgcgaggacagagatcctcctgccacacagccccaagagacacaaggacctccagccagacctatcaccgtgcagcctacagaagcctggcctagaacaagccagggacctagcaccagacctgtggaagttcctggtggcagagccgtggccgccattcttggtcttggactggtgctgggactgctcggacctctggctattctgctggccctgtacctgctgagaagggaccaaagactgcctcctgacgctcacaaacctccaggcggaggcagcttcagaacccctatccaagaggaacaggctgacgcccacagcaccctggcaaaaattagcactagtagagtgaagttcagcagaagcgccgacgcccctgcctaccagcagggacagaaccaactgtacaacgagctgaacctgggcagacgggaagagtacgacgtgctggacaagcggagaggcagggaccctgagatgggcggaaagccccagcggagaaagaacccccaggaaggactgtataacgaactccagaaagacaagatggccgaagcctacagcgagatcggcatgaagggcgagcggagaagaggcaagggccacgatggcctgtaccagggcctgagcaccgccaccaaggacacctatgacgccctgcacatgcaggccctgcctccaaga

SEQ ID NO: 6090 - DNA, 2022 bp, Artificial Sequence
  Synthetic Polynucleotide
atggccttaccagtgaccgccttgctcctgccgctggccttgctgctccacgccgccaggccgctgttcaatcaagaggtgcagatccctctgaccgagagctactgtggcccctgtcctaagaactggatctgctacaagaacaactgctaccagttcttcgacgagagcaagaattggtacgagagccaggccagctgcatgagccagaatgccagcctgctgaaggtgtacagcaaagaggaccaggacctgctgaaactggtcaagagcgcccactggatgggccttgtgcacatccccaccaatggctcttggcagtgggaggacggcagcattctgagccctaacctgctgaccatcatcgagatgcagaagggcgactgcgccctgtacgccagcagctttaagggctacatcgagaattgcagcaccccgaacacctacatctgtatgcagagaaccgtttctggcggaggcggctctggaggaggcggaagtggcggcggaggcgacctctttaatcaagaagtccagattccactcaccgaatcctactgcggaccttgtccaaaaaattggatttgttataagaacaactgttatcaattctttgatgagtctaaaaattggtatgagtcccaggcttcctgcatgtctcagaacgcttctctgctgaaagtctactctaaagaagatcaggatctcctgaagctcgtcaagtctgcccattggatggggctcgtccacattcctaccaacggaagctggcaatgggaagatggctccatcctgtctccaaatctgctcacgattattgaaatgcagaaaggggattgtgctctctacgccagctccttcaagggatatattgagaactgtagcacgcccaatacttatatctgtatgcaacggaccgtgacgcgtctgcattgcgtgggcgacacataccccagcaacgacagatgctgccacgaatgcagacccggcaatggcatggtgtccagatgcagcagatcccagaacaccgtgtgcagaccttgcggccctggcttctacaacgacgtggtgtctagcaagccctgcaagccttgcacctggtgtaacctgagaagcggcagcgagagaaagcagctgtgtaccgccacacaggataccgtgtgccggtgtagagctggcacacagcctctggacagctacaaacctggcgtggactgtgccccttgtcctcctggacactttagccctggcgacaaccaggcttgcaaaccctggaccaactgtaccctggccggcaagcacacactgcaacctgccagcaatagcagcgacgccatctgcgaggacagagatcctcctgccacacagccccaagagacacaaggacctccagccagacctatcaccgtgcagcctacagaagcctggcctagaacaagccagggacctagcaccagacctgtggaagttcctggtggcagagccgtggccgccattcttggtcttggactggtgctgggactgctcggacctctggctattctgctggccctgtacctgctgagaagggaccaaagactgcctcctgacgctcacaaacctccaggcggaggcagcttcagaacccctatccaagaggaacaggctgacgcccacagcaccctggcaaaaattagcactagtagagtgaagttcagcagaagcgccgacgcccctgcctaccagcagggacagaaccaactgtacaacgagctgaacctgggcagacgggaagagtacgacgtgctggacaagcggagaggcagggaccctgagatgggcggaaagccccagcggagaaagaacccccaggaaggactgtataacgaactccagaaagacaagatggccgaagcctacagcgagatcggcatgaagggcgagcggagaagaggcaagggccacgatggcctgtaccagggcctgagcaccgccaccaaggacacctatgacgccctgcacatgcaggccctgcctccaaga

SEQ ID NO: 6091 - DNA, 3558 bp, Artificial Sequence
  Synthetic Polynucleotide
atggccttaccagtgaccgccttgctcctgccgctggccttgctgctccacgccgccaggccggacatccagatgacacagagccctagcagcctgtctgccagcgtgggagacagagtgaccatcacatgcaaggccagcgaccacatcaacaactggctggcctggtatcagcagaagcctggacaggcccctaagctgctgatctacggcgctaccacactggaaacaggcgtgcccagcagattttctggcagcggctctggcaccgactacaccctgacaatatccagcctccagcctgaggacttcgccacctactactgtcagcagagctggaacaccccttggacattcggccagggcaccaagctggaaatcaagagactcgagacaacacctggcgagagaagtagcctgcctgccttctatcctggcaccagcggctcttgttctggctgtggatctctgagcctgcctctgctggctggactggttgctgctgatgctgtggcctctctgctgattgtgggagccgtgttcctgtgcgccagacctagaagaagccccgctcaagaggacggcaaggtgtacatcaacatgcccggcagaggaagcactagtagagtgaagttcagcagaagcgccgacgcccctgcctaccagcagggacagaaccaactgtacaacgagctgaacctgggcagacgggaagagtacgacgtgctggacaagcggagaggcagggaccctgagatgggcggaaagccccagcggagaaagaacccccaggaaggactgtataacgaactccagaaagacaagatggccgaagcctacagcgagatcggcatgaagggcgagcggagaagaggcaagggccacgatggcctgtaccagggcctgagcaccgccaccaaggacacctatgacgccctgcacatgcaggccctgcctccaagaagggccaagcgatctggatctggagcaacaaacttctcactactcaaacaagcaggtgacgtggaggagaatcccgggcctatggactggatttggcgcatccttttccttgtcggcgctgctaccggcgcgcattccttcgaacaagttcagcttcaacagcctggcgctgagctggtcaaacctggcgcttctgtgaagatgagctgcaaagccagcggctacgccttcagcagctactggatcaactggatgaagcagaaacccggccagggactcgaatggatcggccaaatctatcccggcgacggcgacaccaactacaacggcaagttcaagggcagagccacactgaccgccgatacctctagcagcacagcctacatgcagctgagcagcctgaccagcgaagatagcgccgtgtacttctgtgcccggtccatcacaacagtcgtgggctgcgctatggactattggggccagggaacaagcgtgaccgtgtctagtacgcgtaaaggatgccagggaagcgccgaccatgtggtgtcaatttctggcgtgcccctgcaactccagccaaactctattcagaccaaagtcgatagcattgcctggaaaaaattgctgccctctcagaacgggtttcaccacattctcaaatgggaaaatggctctctgccctccaacacctccaacgatcggtttagctttatcgtcaagaatctgtccctgctcatcaaagcagcccagcagcaagactccggcctgtattgcctcgaagtcacctccatctccgggaaagtgcagacagctacattccaagtgttcgtctttgataaggtcgagaagcctagactccaaggacaggggaagattctggacagaggacggtgtcaggtggcactgtcttgccttgtcagccgcgacggcaatgtgtcttatgcttggtatcggggctccaagctgattcaaaccgctgggaatctgacatacctcgatgaagaggttgacatcaatgggacgcacacgtatacttgcaatgtctccaatcctgtcagctgggagtctcataccctgaacctgacacaggattgtcaaaatgcacatcaagagttccggttttggccgtttcttgtgattatcgtgattctgtctgccctcttcctcggaactctggcttgcttctgtgtctggcggcgcaaacggaaagagaaacagtctgagacttccccgaaagagtttctcacgatatacgaagatgtcaaggacctcaagacccgccgcaaccatgagcaagaacagacattcccaggcggaggctccacaatctactccatgattcagtcccagtctagcgccccaacctctcaagagcctgcttataccctgtacagtctgattcagccctccagaaagtccggctctcggaagaggaaccactctcctagcttcaactccaccatatatgaagtcattggcaagtctcagcccaaagcacagaatcctgccaggctgagcagaaaagaacttgagaatttcgacgtctactccagctctagacgggttaagttttccagatccgcagacgcacccgcttaccaacaagggcagaaccaactctacaatgaacttaatttggggcggagggaagagtacgacgttctggacaaaaggaggggacgagatcccgagatgggcggaaagcctcagcgaaggaagaatccgcaagaggggctttataacgaactccagaaagataaaatggcagaagcctatagtgagattgggatgaagggagaaaggaggaggggtaaaggtcacgatgggttgtaccaaggattgagcacagccactaaagatacctatgatgcgctccacatgcaggccctgccgccaagacgcgccaagagaagcggatctggcgtgaagcagaccctgaatttcgacctgctgaagctggctggcgacgtggaatccaacccaggccctggccatatgaccgagtacaagcccacggtgcgcctcgccacccgcgacgacgtccccagggccgtacgcaccctcgccgccgcgttcgccgactaccccgccacgcgccacaccgtcgatccggaccgccacatcgagcgggtcaccgagctgcaagaactcttcctcacgcgcgtcgggctcgacatcggcaaggtgtgggtcgcggacgacggcgccgcggtggcggtctggaccacgccggagagcgtcgaagcgggggcggtgttcgccgagatcggcccgcgcatggccgagttgagcggttcccggctggccgcgcagcaacagatggaaggcctcctggcgccgcaccggcccaaggagcccgcgtggttcctggccaccgtcggcgtctcgcccgaccaccagggcaagggtctgggcagcgccgtcgtgctccccggagtggaggcggccgagcgcgccggggtgcccgccttcctggagacctccgcgccccgcaacctccccttctacgagcggctcggcttcaccgtcaccgccgacgtcgaggtgcccgaaggaccgcgcacctggtgcatgacccgcaagcccggtgcctga

SEQ ID NO: 6092 - DNA, 3714 bp, Artificial Sequence
  Synthetic Polynucleotide
atggccttaccagtgaccgccttgctcctgccgctggccttgctgctccacgccgccaggccggcatgcgaagtgcagctgcttgaaagtggcggcggactgattcagcctggcggatctctgagactgagctgtgccgccagcggcttcaccttttctagccacgccatgacctgggtccgacaggcacctggaaaagggcttgaatgggtgtccgccatcagcggctctggcgattacacacactacgccgacagcgtgaagggcagattcaccatcagcagagacaacagcaagaacaccgtgtacctccagatgaacagcctgagagccgaggacagcgccgtgtattattgcgccaaggatgaggatggcggcagcctgcttggacacagaggacaaggcaccctggtcaccgtttcttccggtaccggcggaggcggatctggcggcggaggtagcggtggcggaggatctgaattcggatctctcgagacaacacctggcgagagaagtagcctgcctgccttctatcctggcaccagcggctcttgttctggctgtggatctctgagcctgcctctgctggctggactggttgctgctgatgctgtggcctctctgctgattgtgggagccgtgttcctgtgcgccagacctagaagaagccccgctcaagaggacggcaaggtgtacatcaacatgcccggcagaggaagcactagtagagtgaagttcagcagaagcgccgacgcccctgcctaccagcagggacagaaccaactgtacaacgagctgaacctgggcagacgggaagagtacgacgtgctggacaagcggagaggcagggaccctgagatgggcggaaagccccagcggagaaagaacccccaggaaggactgtataacgaactccagaaagacaagatggccgaagcctacagcgagatcggcatgaagggcgagcggagaagaggcaagggccacgatggcctgtaccagggcctgagcaccgccaccaaggacacctatgacgccctgcacatgcaggccctgcctccaagaagggccaagcgatctggatctggagcaacaaacttctcactactcaaacaagcaggtgacgtggaggagaatcccgggcctatggactggatttggcgcatccttttccttgtcggcgctgctaccggcgcgcattccgggcccgaagtgcagctggttgaatctggcggaggactggttcaggctggcggatctctgagactgtcttgtgccgccagcggcagaacctttagcatgggctggtttagacaggcccctggcaaagagagagagttcgtcgccgccatcacatactctggcggcagcccttactacgccgactctgtgaagggcagattcaccatcagccgggacaacgccaagaacaccgtgtacctccagatgaacagcctgaagcctgaggacaccgccgtgtactactgcgccgccaatccaacatacggcagcgactggaacgccgagaattggggccagggaacccaagtgacagtgtctagcggatccggcggcggaggatctggcggaggcggatctgggggcggaggctctttcgaaggcagcacgcgtaaaggatgccagggaagcgccgaccatgtggtgtcaatttctggcgtgcccctgcaactccagccaaactctattcagaccaaagtcgatagcattgcctggaaaaaattgctgccctctcagaacgggtttcaccacattctcaaatgggaaaatggctctctgccctccaacacctccaacgatcggtttagctttatcgtcaagaatctgtccctgctcatcaaagcagcccagcagcaagactccggcctgtattgcctcgaagtcacctccatctccgggaaagtgcagacagctacattccaagtgttcgtctttgataaggtcgagaagcctagactccaaggacaggggaagattctggacagaggacggtgtcaggtggcactgtcttgccttgtcagccgcgacggcaatgtgtcttatgcttggtatcggggctccaagctgattcaaaccgctgggaatctgacatacctcgatgaagaggttgacatcaatgggacgcacacgtatacttgcaatgtctccaatcctgtcagctgggagtctcataccctgaacctgacacaggattgtcaaaatgcacatcaagagttccggttttggccgtttcttgtgattatcgtgattctgtctgccctcttcctcggaactctggcttgcttctgtgtctggcggcgcaaacggaaagagaaacagtctgagacttccccgaaagagtttctcacgatatacgaagatgtcaaggacctcaagacccgccgcaaccatgagcaagaacagacattcccaggcggaggctccacaatctactccatgattcagtcccagtctagcgccccaacctctcaagagcctgcttataccctgtacagtctgattcagccctccagaaagtccggctctcggaagaggaaccactctcctagcttcaactccaccatatatgaagtcattggcaagtctcagcccaaagcacagaatcctgccaggctgagcagaaaagaacttgagaatttcgacgtctactccagctctagacgggttaagttttccagatccgcagacgcacccgcttaccaacaagggcagaaccaactctacaatgaacttaatttggggcggagggaagagtacgacgttctggacaaaaggaggggacgagatcccgagatgggcggaaagcctcagcgaaggaagaatccgcaagaggggctttataacgaactccagaaagataaaatggcagaagcctatagtgagattgggatgaagggagaaaggaggaggggtaaaggtcacgatgggttgtaccaaggattgagcacagccactaaagatacctatgatgcgctccacatgcaggccctgccgccaagacgcgccaagagaagcggatctggcgtgaagcagaccctgaatttcgacctgctgaagctggctggcgacgtggaatccaacccaggccctggccatatgaccgagtacaagcccacggtgcgcctcgccacccgcgacgacgtccccagggccgtacgcaccctcgccgccgcgttcgccgactaccccgccacgcgccacaccgtcgatccggaccgccacatcgagcgggtcaccgagctgcaagaactcttcctcacgcgcgtcgggctcgacatcggcaaggtgtgggtcgcggacgacggcgccgcggtggcggtctggaccacgccggagagcgtcgaagcgggggcggtgttcgccgagatcggcccgcgcatggccgagttgagcggttcccggctggccgcgcagcaacagatggaaggcctcctggcgccgcaccggcccaaggagcccgcgtggttcctggccaccgtcggcgtctcgcccgaccaccagggcaagggtctgggcagcgccgtcgtgctccccggagtggaggcggccgagcgcgccggggtgcccgccttcctggagacctccgcgccccgcaacctccccttctacgagcggctcggcttcaccgtcaccgccgacgtcgaggtgcccgaaggaccgcgcacctggtgcatgacccgcaagcccggtgcctga

SEQ ID NO: 6093 - DNA, 4161 bp, Artificial Sequence
  Synthetic Polynucleotide
atggccttaccagtgaccgccttgctcctgccgctggccttgctgctccacgccgccaggccggacatccagatgacacagagccctagcagcctgtctgccagcgtgggagacagagtgaccatcacatgcaaggccagcgaccacatcaacaactggctggcctggtatcagcagaagcctggacaggcccctaagctgctgatctacggcgctaccacactggaaacaggcgtgcccagcagattttctggcagcggctctggcaccgactacaccctgacaatatccagcctccagcctgaggacttcgccacctactactgtcagcagagctggaacaccccttggacattcggccagggcaccaagctggaaatcaagagactcgagggacagcctaaggccaatcctaccgtgacactgttccctccaagcagcgaagaactccaggccaacaaggccacacttgtgtgcctgatctccgacttctaccctggggctgtgacagtggcttggaaggccgatggatctcctgtgaaagccggcgtggaaaccaccaagccatccaagcagagcaacaacaaatacgccgccagctcctacctgagcctgacacctgagcagtggaagtcccacagatcctacagctgccaagtgacccacgaaggcagcaccgtggaaaagacagtggcccctacagagtgcagcggatccacaacacctggcgagagaagtagcctgcctgccttctatcctggcaccagcggctcttgttctggctgtggatctctgagcctgcctctgctggctggactggttgctgctgatgctgtggcctctctgctgattgtgggagccgtgttcctgtgcgccagacctagaagaagccccgctcaagaggacggcaaggtgtacatcaacatgcccggcagaggaagcactagtagagtgaagttcagcagaagcgccgacgcccctgcctaccagcagggacagaaccaactgtacaacgagctgaacctgggcagacgggaagagtacgacgtgctggacaagcggagaggcagggaccctgagatgggcggaaagccccagcggagaaagaacccccaggaaggactgtataacgaactccagaaagacaagatggccgaagcctacagcgagatcggcatgaagggcgagcggagaagaggcaagggccacgatggcctgtaccagggcctgagcaccgccaccaaggacacctatgacgccctgcacatgcaggccctgcctccaagaagggccaagcgatctggatctggagcaacaaacttctcactactcaaacaagcaggtgacgtggaggagaatcccgggcctatggactggatttggcgcatccttttccttgtcggcgctgctaccggcgcgcattccttcgaacaagttcagcttcaacagcctggcgctgagctggtcaaacctggcgcttctgtgaagatgagctgcaaagccagcggctacgccttcagcagctactggatcaactggatgaagcagaaacccggccagggactcgaatggatcggccaaatctatcccggcgacggcgacaccaactacaacggcaagttcaagggcagagccacactgaccgccgatacctctagcagcacagcctacatgcagctgagcagcctgaccagcgaagatagcgccgtgtacttctgtgcccggtccatcacaacagtcgtgggctgcgctatggactattggggccagggaacaagcgtgaccgtgtctagtacgcgtgcctctacaaagggaccctccgtgtttcctctggctcccagcagcaagtctacaagcggaggaacagccgctctgggctgcctggtcaaggattactttcccgagcctgtgaccgtgtcctggaatagcggagcactgacaagcggcgtgcacacctttccagccgtgctgcaaagcagcggcctgtactctctgagcagcgtggtcacagtgcctagctctagcctgggcacccagacctacatctgcaatgtgaaccacaagcctagcaacaccaaggtggacaagagagtggaacccaagagctgtggtaccaaaggatgccagggaagcgccgaccatgtggtgtcaatttctggcgtgcccctgcaactccagccaaactctattcagaccaaagtcgatagcattgcctggaaaaaattgctgccctctcagaacgggtttcaccacattctcaaatgggaaaatggctctctgccctccaacacctccaacgatcggtttagctttatcgtcaagaatctgtccctgctcatcaaagcagcccagcagcaagactccggcctgtattgcctcgaagtcacctccatctccgggaaagtgcagacagctacattccaagtgttcgtctttgataaggtcgagaagcctagactccaaggacaggggaagattctggacagaggacggtgtcaggtggcactgtcttgccttgtcagccgcgacggcaatgtgtcttatgcttggtatcggggctccaagctgattcaaaccgctgggaatctgacatacctcgatgaagaggttgacatcaatgggacgcacacgtatacttgcaatgtctccaatcctgtcagctgggagtctcataccctgaacctgacacaggattgtcaaaatgcacatcaagagttccggttttggccgtttcttgtgattatcgtgattctgtctgccctcttcctcggaactctggcttgcttctgtgtctggcggcgcaaacggaaagagaaacagtctgagacttccccgaaagagtttctcacgatatacgaagatgtcaaggacctcaagacccgccgcaaccatgagcaagaacagacattcccaggcggaggctccacaatctactccatgattcagtcccagtctagcgccccaacctctcaagagcctgcttataccctgtacagtctgattcagccctccagaaagtccggctctcggaagaggaaccactctcctagcttcaactccaccatatatgaagtcattggcaagtctcagcccaaagcacagaatcctgccaggctgagcagaaaagaacttgagaatttcgacgtctactccagctctagacgggttaagttttccagatccgcagacgcacccgcttaccaacaagggcagaaccaactctacaatgaacttaatttggggcggagggaagagtacgacgttctggacaaaaggaggggacgagatcccgagatgggcggaaagcctcagcgaaggaagaatccgcaagaggggctttataacgaactccagaaagataaaatggcagaagcctatagtgagattgggatgaagggagaaaggaggaggggtaaaggtcacgatgggttgtaccaaggattgagcacagccactaaagatacctatgatgcgctccacatgcaggccctgccgccaagacgcgccaagagaagcggatctggcgtgaagcagaccctgaatttcgacctgctgaagctggctggcgacgtggaatccaacccaggccctggccatatggctacctacgaggtgctgtgcgaggtggcaagaaagctgggcaccgacgacagagaagtggtgctgttcctgctgaacgtgttcatccctcagcctacactggcccagctgatcggtgcactgagagccctgaaagaggaaggccggctgacctttcctctgctggccgaatgcctgttcagagccggaagaagggatctgctgcgggacctgctgcatctggaccccagatttctggaaagacacctggccggcaccatgagctacttcagcccttaccagctgaccgtgctgcacgttgacggcgaactgtgcgccagagatattcggagcctgatcttcctgagcaaggacaccatcggcagccggtctacccctcagacatttctgcactgggtgtactgcatggaaaacctggacctgctcggccccacagatgtggatgccctgatgtccatgctgagaagcctgagcagagtggacctccagagacaggtgcagacactgatgggactgcacctgagcggacctagccacagccagcactacagacacacccct

SEQ ID NO: 6094 - DNA, 4320 bp, Artificial Sequence
  Synthetic Polynucleotide
atggccttaccagtgaccgccttgctcctgccgctggccttgctgctccacgccgccaggccggacatccagatgacacagagccctagcagcctgtctgccagcgtgggagacagagtgaccatcacatgcaaggccagcgaccacatcaacaactggctggcctggtatcagcagaagcctggacaggcccctaagctgctgatctacggcgctaccacactggaaacaggcgtgcccagcagattttctggcagcggctctggcaccgactacaccctgacaatatccagcctccagcctgaggacttcgccacctactactgtcagcagagctggaacaccccttggacattcggccagggcaccaagctggaaatcaagagactcgagggacagcctaaggccaatcctaccgtgacactgttccctccaagcagcgaagaactccaggccaacaaggccacacttgtgtgcctgatctccgacttctaccctggggctgtgacagtggcttggaaggccgatggatctcctgtgaaagccggcgtggaaaccaccaagccatccaagcagagcaacaacaaatacgccgccagctcctacctgagcctgacacctgagcagtggaagtcccacagatcctacagctgccaagtgacccacgaaggcagcaccgtggaaaagacagtggcccctacagagtgcagcggatccacaacacctggcgagagaagtagcctgcctgccttctatcctggcaccagcggctcttgttctggctgtggatctctgagcctgcctctgctggctggactggttgctgctgatgctgtggcctctctgctgattgtgggagccgtgttcctgtgcgccagacctagaagaagccccgctcaagaggacggcaaggtgtacatcaacatgcccggcagaggaagcactagtagagtgaagttcagcagaagcgccgacgcccctgcctaccagcagggacagaaccaactgtacaacgagctgaacctgggcagacgggaagagtacgacgtgctggacaagcggagaggcagggaccctgagatgggcggaaagccccagcggagaaagaacccccaggaaggactgtataacgaactccagaaagacaagatggccgaagcctacagcgagatcggcatgaagggcgagcggagaagaggcaagggccacgatggcctgtaccagggcctgagcaccgccaccaaggacacctatgacgccctgcacatgcaggccctgcctccaagaagggccaagcgatctggatctggagcaacaaacttctcactactcaaacaagcaggtgacgtggaggagaatcccgggcctatggactggatttggcgcatccttttccttgtcggcgctgctaccggcgcgcattccttcgaacaagttcagcttcaacagcctggcgctgagctggtcaaacctggcgcttctgtgaagatgagctgcaaagccagcggctacgccttcagcagctactggatcaactggatgaagcagaaacccggccagggactcgaatggatcggccaaatctatcccggcgacggcgacaccaactacaacggcaagttcaagggcagagccacactgaccgccgatacctctagcagcacagcctacatgcagctgagcagcctgaccagcgaagatagcgccgtgtacttctgtgcccggtccatcacaacagtcgtgggctgcgctatggactattggggccagggaacaagcgtgaccgtgtctagtacgcgtgcctctacaaagggaccctccgtgtttcctctggctcccagcagcaagtctacaagcggaggaacagccgctctgggctgcctggtcaaggattactttcccgagcctgtgaccgtgtcctggaatagcggagcactgacaagcggcgtgcacacctttccagccgtgctgcaaagcagcggcctgtactctctgagcagcgtggtcacagtgcctagctctagcctgggcacccagacctacatctgcaatgtgaaccacaagcctagcaacaccaaggtggacaagagagtggaacccaagagctgtggtaccaaaggatgccagggaagcgccgaccatgtggtgtcaatttctggcgtgcccctgcaactccagccaaactctattcagaccaaagtcgatagcattgcctggaaaaaattgctgccctctcagaacgggtttcaccacattctcaaatgggaaaatggctctctgccctccaacacctccaacgatcggtttagctttatcgtcaagaatctgtccctgctcatcaaagcagcccagcagcaagactccggcctgtattgcctcgaagtcacctccatctccgggaaagtgcagacagctacattccaagtgttcgtctttgataaggtcgagaagcctagactccaaggacaggggaagattctggacagaggacggtgtcaggtggcactgtcttgccttgtcagccgcgacggcaatgtgtcttatgcttggtatcggggctccaagctgattcaaaccgctgggaatctgacatacctcgatgaagaggttgacatcaatgggacgcacacgtatacttgcaatgtctccaatcctgtcagctgggagtctcataccctgaacctgacacaggattgtcaaaatgcacatcaagagttccggttttggccgtttcttgtgattatcgtgattctgtctgccctcttcctcggaactctggcttgcttctgtgtctggcggcgcaaacggaaagagaaacagtctgagacttccccgaaagagtttctcacgatatacgaagatgtcaaggacctcaagacccgccgcaaccatgagcaagaacagacattcccaggcggaggctccacaatctactccatgattcagtcccagtctagcgccccaacctctcaagagcctgcttataccctgtacagtctgattcagccctccagaaagtccggctctcggaagaggaaccactctcctagcttcaactccaccatatatgaagtcattggcaagtctcagcccaaagcacagaatcctgccaggctgagcagaaaagaacttgagaatttcgacgtctactccagctctagacgggttaagttttccagatccgcagacgcacccgcttaccaacaagggcagaaccaactctacaatgaacttaatttggggcggagggaagagtacgacgttctggacaaaaggaggggacgagatcccgagatgggcggaaagcctcagcgaaggaagaatccgcaagaggggctttataacgaactccagaaagataaaatggcagaagcctatagtgagattgggatgaagggagaaaggaggaggggtaaaggtcacgatgggttgtaccaaggattgagcacagccactaaagatacctatgatgcgctccacatgcaggccctgccgccaagacgcgccaagagaagcggatctggcgtgaagcagaccctgaatttcgacctgctgaagctggctggcgacgtggaatccaacccaggccctggccatatgtccgactccaaggaggtccctagccttccatttttgcgacacttgctcgaagagttggacagccatgaggacagcttgctgctgtttctgtgtcacgacgcggccccgggctgcacgacggtcacgcaagctttgtgctcgcttagccaacagcgcaagctgaccctcgcggctctggtcgagatgctctacgtgctgcagcgtatggatcttctcaagagccgcttcgggctcagcaaggagggggccgagcaattgctgggcacaagctttctcacgcgctaccgcaagctcatggtttgcgtgggtgaggagctcgactcgagcgagctacgcgctctacgcttgttcgcgtgcaacctgaatccgagcctgagcacggcgctttctgagagcagccgctttgtcgagcttgtactcgcgcttgaaaacgtaggactcgtctcgccatcgagtgtttccgtgcttgcggacatgttgcgcactcttcggcgcctcgatttgtgccagcagcttgttgagtacgaacaacaagagcaagccaggtaccgttactgttacgcggcctcgccctcattgccagttcgtacgttacgtcgggggcacggcgcgagtgaacacgagcagctgtgcatgcccgtgcaagaatcctctgacagccccgagctgctgcgcacgcccgtacaagaatcctccagcgacagccccgagcaaacgact

SEQ ID NO: 6095 - DNA, 4197 bp, Artificial Sequence
  Synthetic Polynucleotide
atggccttaccagtgaccgccttgctcctgccgctggccttgctgctccacgccgccaggccggacatccagatgacacagagccctagcagcctgtctgccagcgtgggagacagagtgaccatcacatgcaaggccagcgaccacatcaacaactggctggcctggtatcagcagaagcctggacaggcccctaagctgctgatctacggcgctaccacactggaaacaggcgtgcccagcagattttctggcagcggctctggcaccgactacaccctgacaatatccagcctccagcctgaggacttcgccacctactactgtcagcagagctggaacaccccttggacattcggccagggcaccaagctggaaatcaagagactcgagggacagcctaaggccaatcctaccgtgacactgttccctccaagcagcgaagaactccaggccaacaaggccacacttgtgtgcctgatctccgacttctaccctggggctgtgacagtggcttggaaggccgatggatctcctgtgaaagccggcgtggaaaccaccaagccatccaagcagagcaacaacaaatacgccgccagctcctacctgagcctgacacctgagcagtggaagtcccacagatcctacagctgccaagtgacccacgaaggcagcaccgtggaaaagacagtggcccctacagagtgcagcggatccacaacacctggcgagagaagtagcctgcctgccttctatcctggcaccagcggctcttgttctggctgtggatctctgagcctgcctctgctggctggactggttgctgctgatgctgtggcctctctgctgattgtgggagccgtgttcctgtgcgccagacctagaagaagccccgctcaagaggacggcaaggtgtacatcaacatgcccggcagaggaagcactagtagagtgaagttcagcagaagcgccgacgcccctgcctaccagcagggacagaaccaactgtacaacgagctgaacctgggcagacgggaagagtacgacgtgctggacaagcggagaggcagggaccctgagatgggcggaaagccccagcggagaaagaacccccaggaaggactgtataacgaactccagaaagacaagatggccgaagcctacagcgagatcggcatgaagggcgagcggagaagaggcaagggccacgatggcctgtaccagggcctgagcaccgccaccaaggacacctatgacgccctgcacatgcaggccctgcctccaagaagggccaagcgatctggatctggagcaacaaacttctcactactcaaacaagcaggtgacgtggaggagaatcccgggcctatggactggatttggcgcatccttttccttgtcggcgctgctaccggcgcgcattccttcgaacaagttcagcttcaacagcctggcgctgagctggtcaaacctggcgcttctgtgaagatgagctgcaaagccagcggctacgccttcagcagctactggatcaactggatgaagcagaaacccggccagggactcgaatggatcggccaaatctatcccggcgacggcgacaccaactacaacggcaagttcaagggcagagccacactgaccgccgatacctctagcagcacagcctacatgcagctgagcagcctgaccagcgaagatagcgccgtgtacttctgtgcccggtccatcacaacagtcgtgggctgcgctatggactattggggccagggaacaagcgtgaccgtgtctagtacgcgtgcctctacaaagggaccctccgtgtttcctctggctcccagcagcaagtctacaagcggaggaacagccgctctgggctgcctggtcaaggattactttcccgagcctgtgaccgtgtcctggaatagcggagcactgacaagcggcgtgcacacctttccagccgtgctgcaaagcagcggcctgtactctctgagcagcgtggtcacagtgcctagctctagcctgggcacccagacctacatctgcaatgtgaaccacaagcctagcaacaccaaggtggacaagagagtggaacccaagagctgtggtaccaaaggatgccagggaagcgccgaccatgtggtgtcaatttctggcgtgcccctgcaactccagccaaactctattcagaccaaagtcgatagcattgcctggaaaaaattgctgccctctcagaacgggtttcaccacattctcaaatgggaaaatggctctctgccctccaacacctccaacgatcggtttagctttatcgtcaagaatctgtccctgctcatcaaagcagcccagcagcaagactccggcctgtattgcctcgaagtcacctccatctccgggaaagtgcagacagctacattccaagtgttcgtctttgataaggtcgagaagcctagactccaaggacaggggaagattctggacagaggacggtgtcaggtggcactgtcttgccttgtcagccgcgacggcaatgtgtcttatgcttggtatcggggctccaagctgattcaaaccgctgggaatctgacatacctcgatgaagaggttgacatcaatgggacgcacacgtatacttgcaatgtctccaatcctgtcagctgggagtctcataccctgaacctgacacaggattgtcaaaatgcacatcaagagttccggttttggccgtttcttgtgattatcgtgattctgtctgccctcttcctcggaactctggcttgcttctgtgtctggcggcgcaaacggaaagagaaacagtctgagacttccccgaaagagtttctcacgatatacgaagatgtcaaggacctcaagacccgccgcaaccatgagcaagaacagacattcccaggcggaggctccacaatctactccatgattcagtcccagtctagcgccccaacctctcaagagcctgcttataccctgtacagtctgattcagccctccagaaagtccggctctcggaagaggaaccactctcctagcttcaactccaccatatatgaagtcattggcaagtctcagcccaaagcacagaatcctgccaggctgagcagaaaagaacttgagaatttcgacgtctactccagctctagacgggttaagttttccagatccgcagacgcacccgcttaccaacaagggcagaaccaactctacaatgaacttaatttggggcggagggaagagtacgacgttctggacaaaaggaggggacgagatcccgagatgggcggaaagcctcagcgaaggaagaatccgcaagaggggctttataacgaactccagaaagataaaatggcagaagcctatagtgagattgggatgaagggagaaaggaggaggggtaaaggtcacgatgggttgtaccaaggattgagcacagccactaaagatacctatgatgcgctccacatgcaggccctgccgccaagacgcgccaagagaagcggatctggcgtgaagcagaccctgaatttcgacctgctgaagctggctggcgacgtggaatccaacccaggccctggccatatgaccgagtacaagcccacggtgcgcctcgccacccgcgacgacgtccccagggccgtacgcaccctcgccgccgcgttcgccgactaccccgccacgcgccacaccgtcgatccggaccgccacatcgagcgggtcaccgagctgcaagaactcttcctcacgcgcgtcgggctcgacatcggcaaggtgtgggtcgcggacgacggcgccgcggtggcggtctggaccacgccggagagcgtcgaagcgggggcggtgttcgccgagatcggcccgcgcatggccgagttgagcggttcccggctggccgcgcagcaacagatggaaggcctcctggcgccgcaccggcccaaggagcccgcgtggttcctggccaccgtcggcgtctcgcccgaccaccagggcaagggtctgggcagcgccgtcgtgctccccggagtggaggcggccgagcgcgccggggtgcccgccttcctggagacctccgcgccccgcaacctccccttctacgagcggctcggcttcaccgtcaccgccgacgtcgaggtgcccgaaggaccgcgcacctggtgcatgacccgcaagcccggtgcctga

SEQ ID NO: 6096 - DNA, 4608 bp, Artificial Sequence
  Synthetic Polynucleotide
atggccttaccagtgaccgccttgctcctgccgctggccttgctgctccacgccgccaggccggaagtgcagctggttgaatctggcggaggactggttcaggctggcggatctctgagactgtcttgtgccgccagcggcagaacctttagcatgggctggtttagacaggcccctggcaaagagagagagttcgtcgccgccatcacatactctggcggcagcccttactacgccgactctgtgaagggcagattcaccatcagccgggacaacgccaagaacaccgtgtacctccagatgaacagcctgaagcctgaggacaccgccgtgtactactgcgccgccaatccaacatacggcagcgactggaacgccgagaattggggccagggaacccaagtgacagtgtctagcggtaccggcggaggcggatctggcggcggaggtagcggtggcggaggatctgaattcgacatccagatgacacagagccctagcagcctgtctgccagcgtgggagacagagtgaccatcacatgcaaggccagcgaccacatcaacaactggctggcctggtatcagcagaagcctggacaggcccctaagctgctgatctacggcgctaccacactggaaacaggcgtgcccagcagattttctggcagcggctctggcaccgactacaccctgacaatatccagcctccagcctgaggacttcgccacctactactgtcagcagagctggaacaccccttggacattcggccagggcaccaagctggaaatcaagagactcgagggacagcctaaggccaatcctaccgtgacactgttccctccaagcagcgaagaactccaggccaacaaggccacacttgtgtgcctgatctccgacttctaccctggggctgtgacagtggcttggaaggccgatggatctcctgtgaaagccggcgtggaaaccaccaagccatccaagcagagcaacaacaaatacgccgccagctcctacctgagcctgacacctgagcagtggaagtcccacagatcctacagctgccaagtgacccacgaaggcagcaccgtggaaaagacagtggcccctacagagtgcagcggatccacaacacctggcgagagaagtagcctgcctgccttctatcctggcaccagcggctcttgttctggctgtggatctctgagcctgcctctgctggctggactggttgctgctgatgctgtggcctctctgctgattgtgggagccgtgttcctgtgcgccagacctagaagaagccccgctcaagaggacggcaaggtgtacatcaacatgcccggcagaggaagcactagtagagtgaagttcagcagaagcgccgacgcccctgcctaccagcagggacagaaccaactgtacaacgagctgaacctgggcagacgggaagagtacgacgtgctggacaagcggagaggcagggaccctgagatgggcggaaagccccagcggagaaagaacccccaggaaggactgtataacgaactccagaaagacaagatggccgaagcctacagcgagatcggcatgaagggcgagcggagaagaggcaagggccacgatggcctgtaccagggcctgagcaccgccaccaaggacacctatgacgccctgcacatgcaggccctgcctccaagaagggccaagcgatctggatctggagcaacaaacttctcactactcaaacaagcaggtgacgtggaggagaatcccgggcctatggactggatttggcgcatccttttccttgtcggcgctgctaccggcgcgcattccttcgaacaagttcagcttcaacagcctggcgctgagctggtcaaacctggcgcttctgtgaagatgagctgcaaagccagcggctacgccttcagcagctactggatcaactggatgaagcagaaacccggccagggactcgaatggatcggccaaatctatcccggcgacggcgacaccaactacaacggcaagttcaagggcagagccacactgaccgccgatacctctagcagcacagcctacatgcagctgagcagcctgaccagcgaagatagcgccgtgtacttctgtgcccggtccatcacaacagtcgtgggctgcgctatggactattggggccagggaacaagcgtgaccgtgtctagtacgcgtgcctctacaaagggaccctccgtgtttcctctggctcccagcagcaagtctacaagcggaggaacagccgctctgggctgcctggtcaaggattactttcccgagcctgtgaccgtgtcctggaatagcggagcactgacaagcggcgtgcacacctttccagccgtgctgcaaagcagcggcctgtactctctgagcagcgtggtcacagtgcctagctctagcctgggcacccagacctacatctgcaatgtgaaccacaagcctagcaacaccaaggtggacaagagagtggaacccaagagctgtggtaccaaaggatgccagggaagcgccgaccatgtggtgtcaatttctggcgtgcccctgcaactccagccaaactctattcagaccaaagtcgatagcattgcctggaaaaaattgctgccctctcagaacgggtttcaccacattctcaaatgggaaaatggctctctgccctccaacacctccaacgatcggtttagctttatcgtcaagaatctgtccctgctcatcaaagcagcccagcagcaagactccggcctgtattgcctcgaagtcacctccatctccgggaaagtgcagacagctacattccaagtgttcgtctttgataaggtcgagaagcctagactccaaggacaggggaagattctggacagaggacggtgtcaggtggcactgtcttgccttgtcagccgcgacggcaatgtgtcttatgcttggtatcggggctccaagctgattcaaaccgctgggaatctgacatacctcgatgaagaggttgacatcaatgggacgcacacgtatacttgcaatgtctccaatcctgtcagctgggagtctcataccctgaacctgacacaggattgtcaaaatgcacatcaagagttccggttttggccgtttcttgtgattatcgtgattctgtctgccctcttcctcggaactctggcttgcttctgtgtctggcggcgcaaacggaaagagaaacagtctgagacttccccgaaagagtttctcacgatatacgaagatgtcaaggacctcaagacccgccgcaaccatgagcaagaacagacattcccaggcggaggctccacaatctactccatgattcagtcccagtctagcgccccaacctctcaagagcctgcttataccctgtacagtctgattcagccctccagaaagtccggctctcggaagaggaaccactctcctagcttcaactccaccatatatgaagtcattggcaagtctcagcccaaagcacagaatcctgccaggctgagcagaaaagaacttgagaatttcgacgtctactccagctctagacgggttaagttttccagatccgcagacgcacccgcttaccaacaagggcagaaccaactctacaatgaacttaatttggggcggagggaagagtacgacgttctggacaaaaggaggggacgagatcccgagatgggcggaaagcctcagcgaaggaagaatccgcaagaggggctttataacgaactccagaaagataaaatggcagaagcctatagtgagattgggatgaagggagaaaggaggaggggtaaaggtcacgatgggttgtaccaaggattgagcacagccactaaagatacctatgatgcgctccacatgcaggccctgccgccaagacgcgccaagagaagcggatctggcgtgaagcagaccctgaatttcgacctgctgaagctggctggcgacgtggaatccaacccaggccctggccatatgaccgagtacaagcccacggtgcgcctcgccacccgcgacgacgtccccagggccgtacgcaccctcgccgccgcgttcgccgactaccccgccacgcgccacaccgtcgatccggaccgccacatcgagcgggtcaccgagctgcaagaactcttcctcacgcgcgtcgggctcgacatcggcaaggtgtgggtcgcggacgacggcgccgcggtggcggtctggaccacgccggagagcgtcgaagcgggggcggtgttcgccgagatcggcccgcgcatggccgagttgagcggttcccggctggccgcgcagcaacagatggaaggcctcctggcgccgcaccggcccaaggagcccgcgtggttcctggccaccgtcggcgtctcgcccgaccaccagggcaagggtctgggcagcgccgtcgtgctccccggagtggaggcggccgagcgcgccggggtgcccgccttcctggagacctccgcgccccgcaacctccccttctacgagcggctcggcttcaccgtcaccgccgacgtcgaggtgcccgaaggaccgcgcacctggtgcatgacccgcaagcccggtgcctga

SEQ ID NO: 6097 - DNA, 5019 bp, Artificial Sequence
  Synthetic Polynucleotide
atggccttaccagtgaccgccttgctcctgccgctggccttgctgctccacgccgccaggccggaagtgcagctggttgaatctggcggaggactggttcaggctggcggatctctgagactgtcttgtgccgccagcggcagaacctttagcatgggctggtttagacaggcccctggcaaagagagagagttcgtcgccgccatcacatactctggcggcagcccttactacgccgactctgtgaagggcagattcaccatcagccgggacaacgccaagaacaccgtgtacctccagatgaacagcctgaagcctgaggacaccgccgtgtactactgcgccgccaatccaacatacggcagcgactggaacgccgagaattggggccagggaacccaagtgacagtgtctagcggtaccggcggaggcggatctggcggcggaggtagcggtggcggaggatctgaattcgacatccagatgacacagagccctagcagcctgtctgccagcgtgggagacagagtgaccatcacatgcaaggccagcgaccacatcaacaactggctggcctggtatcagcagaagcctggacaggcccctaagctgctgatctacggcgctaccacactggaaacaggcgtgcccagcagattttctggcagcggctctggcaccgactacaccctgacaatatccagcctccagcctgaggacttcgccacctactactgtcagcagagctggaacaccccttggacattcggccagggcaccaagctggaaatcaagagactcgagggacagcctaaggccaatcctaccgtgacactgttccctccaagcagcgaagaactccaggccaacaaggccacacttgtgtgcctgatctccgacttctaccctggggctgtgacagtggcttggaaggccgatggatctcctgtgaaagccggcgtggaaaccaccaagccatccaagcagagcaacaacaaatacgccgccagctcctacctgagcctgacacctgagcagtggaagtcccacagatcctacagctgccaagtgacccacgaaggcagcaccgtggaaaagacagtggcccctacagagtgcagcggatccacaacacctggcgagagaagtagcctgcctgccttctatcctggcaccagcggctcttgttctggctgtggatctctgagcctgcctctgctggctggactggttgctgctgatgctgtggcctctctgctgattgtgggagccgtgttcctgtgcgccagacctagaagaagccccgctcaagaggacggcaaggtgtacatcaacatgcccggcagaggaagcactagtagagtgaagttcagcagaagcgccgacgcccctgcctaccagcagggacagaaccaactgtacaacgagctgaacctgggcagacgggaagagtacgacgtgctggacaagcggagaggcagggaccctgagatgggcggaaagccccagcggagaaagaacccccaggaaggactgtataacgaactccagaaagacaagatggccgaagcctacagcgagatcggcatgaagggcgagcggagaagaggcaagggccacgatggcctgtaccagggcctgagcaccgccaccaaggacacctatgacgccctgcacatgcaggccctgcctccaagaagggccaagcgatctggatctggagcaacaaacttctcactactcaaacaagcaggtgacgtggaggagaatcccgggcctatggactggatttggcgcatccttttccttgtcggcgctgctaccggcgcgcattccgggcccgaagtgcaactggttgaatccggtggcggcctggtgcaagcaggcggatctctcagacttagctgtgccgcctccggcagaaccttcacaatgggatggtttaggcaggctccagggaaagagagagagttcgtcgccgccatctctctgtctcccacactggcctactacgccgactctgtgaaaggccggttcaccatctccagagataatgccaagaacaccgtggtgctgcaaatgaactctctgaaacccgaggatacagccctgtactattgtgccgctgaccggaagtccgtgatgagcatcagacccgattactggggacagggcacacaagtcacagtgtcctctggatccggcggcggaggatctggcggaggcggatctgggggcggaggctctttcgaacaagttcagcttcaacagcctggcgctgagctggtcaaacctggcgcttctgtgaagatgagctgcaaagccagcggctacgccttcagcagctactggatcaactggatgaagcagaaacccggccagggactcgaatggatcggccaaatctatcccggcgacggcgacaccaactacaacggcaagttcaagggcagagccacactgaccgccgatacctctagcagcacagcctacatgcagctgagcagcctgaccagcgaagatagcgccgtgtacttctgtgcccggtccatcacaacagtcgtgggctgcgctatggactattggggccagggaacaagcgtgaccgtgtctagtacgcgtgcctctacaaagggaccctccgtgtttcctctggctcccagcagcaagtctacaagcggaggaacagccgctctgggctgcctggtcaaggattactttcccgagcctgtgaccgtgtcctggaatagcggagcactgacaagcggcgtgcacacctttccagccgtgctgcaaagcagcggcctgtactctctgagcagcgtggtcacagtgcctagctctagcctgggcacccagacctacatctgcaatgtgaaccacaagcctagcaacaccaaggtggacaagagagtggaacccaagagctgtggtaccaaaggatgccagggaagcgccgaccatgtggtgtcaatttctggcgtgcccctgcaactccagccaaactctattcagaccaaagtcgatagcattgcctggaaaaaattgctgccctctcagaacgggtttcaccacattctcaaatgggaaaatggctctctgccctccaacacctccaacgatcggtttagctttatcgtcaagaatctgtccctgctcatcaaagcagcccagcagcaagactccggcctgtattgcctcgaagtcacctccatctccgggaaagtgcagacagctacattccaagtgttcgtctttgataaggtcgagaagcctagactccaaggacaggggaagattctggacagaggacggtgtcaggtggcactgtcttgccttgtcagccgcgacggcaatgtgtcttatgcttggtatcggggctccaagctgattcaaaccgctgggaatctgacatacctcgatgaagaggttgacatcaatgggacgcacacgtatacttgcaatgtctccaatcctgtcagctgggagtctcataccctgaacctgacacaggattgtcaaaatgcacatcaagagttccggttttggccgtttcttgtgattatcgtgattctgtctgccctcttcctcggaactctggcttgcttctgtgtctggcggcgcaaacggaaagagaaacagtctgagacttccccgaaagagtttctcacgatatacgaagatgtcaaggacctcaagacccgccgcaaccatgagcaagaacagacattcccaggcggaggctccacaatctactccatgattcagtcccagtctagcgccccaacctctcaagagcctgcttataccctgtacagtctgattcagccctccagaaagtccggctctcggaagaggaaccactctcctagcttcaactccaccatatatgaagtcattggcaagtctcagcccaaagcacagaatcctgccaggctgagcagaaaagaacttgagaatttcgacgtctactccagctctagacgggttaagttttccagatccgcagacgcacccgcttaccaacaagggcagaaccaactctacaatgaacttaatttggggcggagggaagagtacgacgttctggacaaaaggaggggacgagatcccgagatgggcggaaagcctcagcgaaggaagaatccgcaagaggggctttataacgaactccagaaagataaaatggcagaagcctatagtgagattgggatgaagggagaaaggaggaggggtaaaggtcacgatgggttgtaccaaggattgagcacagccactaaagatacctatgatgcgctccacatgcaggccctgccgccaagacgcgccaagagaagcggatctggcgtgaagcagaccctgaatttcgacctgctgaagctggctggcgacgtggaatccaacccaggccctggccatatgaccgagtacaagcccacggtgcgcctcgccacccgcgacgacgtccccagggccgtacgcaccctcgccgccgcgttcgccgactaccccgccacgcgccacaccgtcgatccggaccgccacatcgagcgggtcaccgagctgcaagaactcttcctcacgcgcgtcgggctcgacatcggcaaggtgtgggtcgcggacgacggcgccgcggtggcggtctggaccacgccggagagcgtcgaagcgggggcggtgttcgccgagatcggcccgcgcatggccgagttgagcggttcccggctggccgcgcagcaacagatggaaggcctcctggcgccgcaccggcccaaggagcccgcgtggttcctggccaccgtcggcgtctcgcccgaccaccagggcaagggtctgggcagcgccgtcgtgctccccggagtggaggcggccgagcgcgccggggtgcccgccttcctggagacctccgcgccccgcaacctccccttctacgagcggctcggcttcaccgtcaccgccgacgtcgaggtgcccgaaggaccgcgcacctggtgcatgacccgcaagcccggtgcctga

SEQ ID NO: 6098 - DNA, 4218 bp, Artificial Sequence
  Synthetic Polynucleotide
atggccttaccagtgaccgccttgctcctgccgctggccttgctgctccacgccgccaggccggaagtgcagctggttgaatctggcggaggactggttcaggctggcggatctctgagactgtcttgtgccgccagcggcagaacctttagcatgggctggtttagacaggcccctggcaaagagagagagttcgtcgccgccatcacatactctggcggcagcccttactacgccgactctgtgaagggcagattcaccatcagccgggacaacgccaagaacaccgtgtacctccagatgaacagcctgaagcctgaggacaccgccgtgtactactgcgccgccaatccaacatacggcagcgactggaacgccgagaattggggccagggaacccaagtgacagtgtctagcctcgagggacagcctaaggccaatcctaccgtgacactgttccctccaagcagcgaagaactccaggccaacaaggccacacttgtgtgcctgatctccgacttctaccctggggctgtgacagtggcttggaaggccgatggatctcctgtgaaagccggcgtggaaaccaccaagccatccaagcagagcaacaacaaatacgccgccagctcctacctgagcctgacacctgagcagtggaagtcccacagatcctacagctgccaagtgacccacgaaggcagcaccgtggaaaagacagtggcccctacagagtgcagcggatccacaacacctggcgagagaagtagcctgcctgccttctatcctggcaccagcggctcttgttctggctgtggatctctgagcctgcctctgctggctggactggttgctgctgatgctgtggcctctctgctgattgtgggagccgtgttcctgtgcgccagacctagaagaagccccgctcaagaggacggcaaggtgtacatcaacatgcccggcagaggaagcactagtagagtgaagttcagcagaagcgccgacgcccctgcctaccagcagggacagaaccaactgtacaacgagctgaacctgggcagacgggaagagtacgacgtgctggacaagcggagaggcagggaccctgagatgggcggaaagccccagcggagaaagaacccccaggaaggactgtataacgaactccagaaagacaagatggccgaagcctacagcgagatcggcatgaagggcgagcggagaagaggcaagggccacgatggcctgtaccagggcctgagcaccgccaccaaggacacctatgacgccctgcacatgcaggccctgcctccaagaagggccaagcgatctggatctggagcaacaaacttctcactactcaaacaagcaggtgacgtggaggagaatcccgggcctatggactggatttggcgcatccttttccttgtcggcgctgctaccggcgcgcattccgggcccgaagtgcaactggttgaatccggtggcggcctggtgcaagcaggcggatctctcagacttagctgtgccgcctccggcagaaccttcacaatgggatggtttaggcaggctccagggaaagagagagagttcgtcgccgccatctctctgtctcccacactggcctactacgccgactctgtgaaaggccggttcaccatctccagagataatgccaagaacaccgtggtgctgcaaatgaactctctgaaacccgaggatacagccctgtactattgtgccgctgaccggaagtccgtgatgagcatcagacccgattactggggacagggcacacaagtcacagtgtcctctacgcgtgcctctacaaagggaccctccgtgtttcctctggctcccagcagcaagtctacaagcggaggaacagccgctctgggctgcctggtcaaggattactttcccgagcctgtgaccgtgtcctggaatagcggagcactgacaagcggcgtgcacacctttccagccgtgctgcaaagcagcggcctgtactctctgagcagcgtggtcacagtgcctagctctagcctgggcacccagacctacatctgcaatgtgaaccacaagcctagcaacaccaaggtggacaagagagtggaacccaagagctgtggtaccaaaggatgccagggaagcgccgaccatgtggtgtcaatttctggcgtgcccctgcaactccagccaaactctattcagaccaaagtcgatagcattgcctggaaaaaattgctgccctctcagaacgggtttcaccacattctcaaatgggaaaatggctctctgccctccaacacctccaacgatcggtttagctttatcgtcaagaatctgtccctgctcatcaaagcagcccagcagcaagactccggcctgtattgcctcgaagtcacctccatctccgggaaagtgcagacagctacattccaagtgttcgtctttgataaggtcgagaagcctagactccaaggacaggggaagattctggacagaggacggtgtcaggtggcactgtcttgccttgtcagccgcgacggcaatgtgtcttatgcttggtatcggggctccaagctgattcaaaccgctgggaatctgacatacctcgatgaagaggttgacatcaatgggacgcacacgtatacttgcaatgtctccaatcctgtcagctgggagtctcataccctgaacctgacacaggattgtcaaaatgcacatcaagagttccggttttggccgtttcttgtgattatcgtgattctgtctgccctcttcctcggaactctggcttgcttctgtgtctggcggcgcaaacggaaagagaaacagtctgagacttccccgaaagagtttctcacgatatacgaagatgtcaaggacctcaagacccgccgcaaccatgagcaagaacagacattcccaggcggaggctccacaatctactccatgattcagtcccagtctagcgccccaacctctcaagagcctgcttataccctgtacagtctgattcagccctccagaaagtccggctctcggaagaggaaccactctcctagcttcaactccaccatatatgaagtcattggcaagtctcagcccaaagcacagaatcctgccaggctgagcagaaaagaacttgagaatttcgacgtctactccagctctagacgggttaagttttccagatccgcagacgcacccgcttaccaacaagggcagaaccaactctacaatgaacttaatttggggcggagggaagagtacgacgttctggacaaaaggaggggacgagatcccgagatgggcggaaagcctcagcgaaggaagaatccgcaagaggggctttataacgaactccagaaagataaaatggcagaagcctatagtgagattgggatgaagggagaaaggaggaggggtaaaggtcacgatgggttgtaccaaggattgagcacagccactaaagatacctatgatgcgctccacatgcaggccctgccgccaagacgcgccaagagaagcggatctggcgtgaagcagaccctgaatttcgacctgctgaagctggctggcgacgtggaatccaacccaggccctggccatatgaccgagtacaagcccacggtgcgcctcgccacccgcgacgacgtccccagggccgtacgcaccctcgccgccgcgttcgccgactaccccgccacgcgccacaccgtcgatccggaccgccacatcgagcgggtcaccgagctgcaagaactcttcctcacgcgcgtcgggctcgacatcggcaaggtgtgggtcgcggacgacggcgccgcggtggcggtctggaccacgccggagagcgtcgaagcgggggcggtgttcgccgagatcggcccgcgcatggccgagttgagcggttcccggctggccgcgcagcaacagatggaaggcctcctggcgccgcaccggcccaaggagcccgcgtggttcctggccaccgtcggcgtctcgcccgaccaccagggcaagggtctgggcagcgccgtcgtgctccccggagtggaggcggccgagcgcgccggggtgcccgccttcctggagacctccgcgccccgcaacctccccttctacgagcggctcggcttcaccgtcaccgccgacgtcgaggtgcccgaaggaccgcgcacctggtgcatgacccgcaagcccggtgcctga

SEQ ID NO: 6099 - DNA, 4242 bp, Artificial Sequence
  Synthetic Polynucleotide
atggccttaccagtgaccgccttgctcctgccgctggccttgctgctccacgccgccaggccggacatccagatgacacagagccctagcagcctgtctgccagcgtgggagacagagtgaccatcacatgcaaggccagcgaccacatcaacaactggctggcctggtatcagcagaagcctggacaggcccctaagctgctgatctacggcgctaccacactggaaacaggcgtgcccagcagattttctggcagcggctctggcaccgactacaccctgacaatatccagcctccagcctgaggacttcgccacctactactgtcagcagagctggaacaccccttggacattcggccagggcaccaagctggaaatcaagagactcgaggacctgaagaacgtgttcccacctgaggtggccgtgttcgagcctagcgaggccgagatcagccacacccagaaagccaccctcgtgtgcctggctaccggcttctaccccgaccatgtggaactgtcttggtgggtcaacggcaaagaggtgcacagcggcgtgtctaccgacccccagccactgaaagaacagcccgccctgaacgacagccggtactgcctgagcagcagactgagagtgtccgccaccttctggcagaacccccggaaccacttcagatgccaggtgcagttctacggcctgagcgagaacgacgagtggacccaggacagagccaagcccgtgacccagatcgtgtctgccgaagcctggggcagagccgattgcggatccacaacacctggcgagagaagtagcctgcctgccttctatcctggcaccagcggctcttgttctggctgtggatctctgagcctgcctctgctggctggactggttgctgctgatgctgtggcctctctgctgattgtgggagccgtgttcctgtgcgccagacctagaagaagccccgctcaagaggacggcaaggtgtacatcaacatgcccggcagaggaagcactagtagagtgaagttcagcagaagcgccgacgcccctgcctaccagcagggacagaaccaactgtacaacgagctgaacctgggcagacgggaagagtacgacgtgctggacaagcggagaggcagggaccctgagatgggcggaaagccccagcggagaaagaacccccaggaaggactgtataacgaactccagaaagacaagatggccgaagcctacagcgagatcggcatgaagggcgagcggagaagaggcaagggccacgatggcctgtaccagggcctgagcaccgccaccaaggacacctatgacgccctgcacatgcaggccctgcctccaagaagggccaagcgatctggatctggagcaacaaacttctcactactcaaacaagcaggtgacgtggaggagaatcccgggcctatggactggatttggcgcatccttttccttgtcggcgctgctaccggcgcgcattccttcgaacaagttcagcttcaacagcctggcgctgagctggtcaaacctggcgcttctgtgaagatgagctgcaaagccagcggctacgccttcagcagctactggatcaactggatgaagcagaaacccggccagggactcgaatggatcggccaaatctatcccggcgacggcgacaccaactacaacggcaagttcaagggcagagccacactgaccgccgatacctctagcagcacagcctacatgcagctgagcagcctgaccagcgaagatagcgccgtgtacttctgtgcccggtccatcacaacagtcgtgggctgcgctatggactattggggccagggaacaagcgtgaccgtgtctagtacgcgtatccagaaccctgatcctgccgtgtaccagctgcgggatagcaagagcagcgacaagagcgtgtgtctgttcaccgacttcgacagccagaccaacgtgtcccagagcaaggactccgacgtgtacatcaccgataagaccgtgctggacatgcggagcatggacttcaagagcaactccgccgtggcctggtccaacaagtccgatttcgcctgcgccaacgccttcaacaacagcattatccccgaggacacattcttcccaagccccgagagcagctgcggtaccaaaggatgccagggaagcgccgaccatgtggtgtcaatttctggcgtgcccctgcaactccagccaaactctattcagaccaaagtcgatagcattgcctggaaaaaattgctgccctctcagaacgggtttcaccacattctcaaatgggaaaatggctctctgccctccaacacctccaacgatcggtttagctttatcgtcaagaatctgtccctgctcatcaaagcagcccagcagcaagactccggcctgtattgcctcgaagtcacctccatctccgggaaagtgcagacagctacattccaagtgttcgtctttgataaggtcgagaagcctagactccaaggacaggggaagattctggacagaggacggtgtcaggtggcactgtcttgccttgtcagccgcgacggcaatgtgtcttatgcttggtatcggggctccaagctgattcaaaccgctgggaatctgacatacctcgatgaagaggttgacatcaatgggacgcacacgtatacttgcaatgtctccaatcctgtcagctgggagtctcataccctgaacctgacacaggattgtcaaaatgcacatcaagagttccggttttggccgtttcttgtgattatcgtgattctgtctgccctcttcctcggaactctggcttgcttctgtgtctggcggcgcaaacggaaagagaaacagtctgagacttccccgaaagagtttctcacgatatacgaagatgtcaaggacctcaagacccgccgcaaccatgagcaagaacagacattcccaggcggaggctccacaatctactccatgattcagtcccagtctagcgccccaacctctcaagagcctgcttataccctgtacagtctgattcagccctccagaaagtccggctctcggaagaggaaccactctcctagcttcaactccaccatatatgaagtcattggcaagtctcagcccaaagcacagaatcctgccaggctgagcagaaaagaacttgagaatttcgacgtctactccagctctagacgggttaagttttccagatccgcagacgcacccgcttaccaacaagggcagaaccaactctacaatgaacttaatttggggcggagggaagagtacgacgttctggacaaaaggaggggacgagatcccgagatgggcggaaagcctcagcgaaggaagaatccgcaagaggggctttataacgaactccagaaagataaaatggcagaagcctatagtgagattgggatgaagggagaaaggaggaggggtaaaggtcacgatgggttgtaccaaggattgagcacagccactaaagatacctatgatgcgctccacatgcaggccctgccgccaagacgcgccaagagaagcggatctggcgtgaagcagaccctgaatttcgacctgctgaagctggctggcgacgtggaatccaacccaggccctggccatatgaccgagtacaagcccacggtgcgcctcgccacccgcgacgacgtccccagggccgtacgcaccctcgccgccgcgttcgccgactaccccgccacgcgccacaccgtcgatccggaccgccacatcgagcgggtcaccgagctgcaagaactcttcctcacgcgcgtcgggctcgacatcggcaaggtgtgggtcgcggacgacggcgccgcggtggcggtctggaccacgccggagagcgtcgaagcgggggcggtgttcgccgagatcggcccgcgcatggccgagttgagcggttcccggctggccgcgcagcaacagatggaaggcctcctggcgccgcaccggcccaaggagcccgcgtggttcctggccaccgtcggcgtctcgcccgaccaccagggcaagggtctgggcagcgccgtcgtgctccccggagtggaggcggccgagcgcgccggggtgcccgccttcctggagacctccgcgccccgcaacctccccttctacgagcggctcggcttcaccgtcaccgccgacgtcgaggtgcccgaaggaccgcgcacctggtgcatgacccgcaagcccggtgcctga

SEQ ID NO: 6100 - DNA, 4653 bp, Artificial Sequence
  Synthetic Polynucleotide
atggccttaccagtgaccgccttgctcctgccgctggccttgctgctccacgccgccaggccggaagtgcagctggttgaatctggcggaggactggttcaggctggcggatctctgagactgtcttgtgccgccagcggcagaacctttagcatgggctggtttagacaggcccctggcaaagagagagagttcgtcgccgccatcacatactctggcggcagcccttactacgccgactctgtgaagggcagattcaccatcagccgggacaacgccaagaacaccgtgtacctccagatgaacagcctgaagcctgaggacaccgccgtgtactactgcgccgccaatccaacatacggcagcgactggaacgccgagaattggggccagggaacccaagtgacagtgtctagcggtaccggcggaggcggatctggcggcggaggtagcggtggcggaggatctgaattcgacatccagatgacacagagccctagcagcctgtctgccagcgtgggagacagagtgaccatcacatgcaaggccagcgaccacatcaacaactggctggcctggtatcagcagaagcctggacaggcccctaagctgctgatctacggcgctaccacactggaaacaggcgtgcccagcagattttctggcagcggctctggcaccgactacaccctgacaatatccagcctccagcctgaggacttcgccacctactactgtcagcagagctggaacaccccttggacattcggccagggcaccaagctggaaatcaagagactcgaggacctgaagaacgtgttcccacctgaggtggccgtgttcgagcctagcgaggccgagatcagccacacccagaaagccaccctcgtgtgcctggctaccggcttctaccccgaccatgtggaactgtcttggtgggtcaacggcaaagaggtgcacagcggcgtgtctaccgacccccagccactgaaagaacagcccgccctgaacgacagccggtactgcctgagcagcagactgagagtgtccgccaccttctggcagaacccccggaaccacttcagatgccaggtgcagttctacggcctgagcgagaacgacgagtggacccaggacagagccaagcccgtgacccagatcgtgtctgccgaagcctggggcagagccgattgcggatccacaacacctggcgagagaagtagcctgcctgccttctatcctggcaccagcggctcttgttctggctgtggatctctgagcctgcctctgctggctggactggttgctgctgatgctgtggcctctctgctgattgtgggagccgtgttcctgtgcgccagacctagaagaagccccgctcaagaggacggcaaggtgtacatcaacatgcccggcagaggaagcactagtagagtgaagttcagcagaagcgccgacgcccctgcctaccagcagggacagaaccaactgtacaacgagctgaacctgggcagacgggaagagtacgacgtgctggacaagcggagaggcagggaccctgagatgggcggaaagccccagcggagaaagaacccccaggaaggactgtataacgaactccagaaagacaagatggccgaagcctacagcgagatcggcatgaagggcgagcggagaagaggcaagggccacgatggcctgtaccagggcctgagcaccgccaccaaggacacctatgacgccctgcacatgcaggccctgcctccaagaagggccaagcgatctggatctggagcaacaaacttctcactactcaaacaagcaggtgacgtggaggagaatcccgggcctatggactggatttggcgcatccttttccttgtcggcgctgctaccggcgcgcattccttcgaacaagttcagcttcaacagcctggcgctgagctggtcaaacctggcgcttctgtgaagatgagctgcaaagccagcggctacgccttcagcagctactggatcaactggatgaagcagaaacccggccagggactcgaatggatcggccaaatctatcccggcgacggcgacaccaactacaacggcaagttcaagggcagagccacactgaccgccgatacctctagcagcacagcctacatgcagctgagcagcctgaccagcgaagatagcgccgtgtacttctgtgcccggtccatcacaacagtcgtgggctgcgctatggactattggggccagggaacaagcgtgaccgtgtctagtacgcgtatccagaaccctgatcctgccgtgtaccagctgcgggatagcaagagcagcgacaagagcgtgtgtctgttcaccgacttcgacagccagaccaacgtgtcccagagcaaggactccgacgtgtacatcaccgataagaccgtgctggacatgcggagcatggacttcaagagcaactccgccgtggcctggtccaacaagtccgatttcgcctgcgccaacgccttcaacaacagcattatccccgaggacacattcttcccaagccccgagagcagctgcggtaccaaaggatgccagggaagcgccgaccatgtggtgtcaatttctggcgtgcccctgcaactccagccaaactctattcagaccaaagtcgatagcattgcctggaaaaaattgctgccctctcagaacgggtttcaccacattctcaaatgggaaaatggctctctgccctccaacacctccaacgatcggtttagctttatcgtcaagaatctgtccctgctcatcaaagcagcccagcagcaagactccggcctgtattgcctcgaagtcacctccatctccgggaaagtgcagacagctacattccaagtgttcgtctttgataaggtcgagaagcctagactccaaggacaggggaagattctggacagaggacggtgtcaggtggcactgtcttgccttgtcagccgcgacggcaatgtgtcttatgcttggtatcggggctccaagctgattcaaaccgctgggaatctgacatacctcgatgaagaggttgacatcaatgggacgcacacgtatacttgcaatgtctccaatcctgtcagctgggagtctcataccctgaacctgacacaggattgtcaaaatgcacatcaagagttccggttttggccgtttcttgtgattatcgtgattctgtctgccctcttcctcggaactctggcttgcttctgtgtctggcggcgcaaacggaaagagaaacagtctgagacttccccgaaagagtttctcacgatatacgaagatgtcaaggacctcaagacccgccgcaaccatgagcaagaacagacattcccaggcggaggctccacaatctactccatgattcagtcccagtctagcgccccaacctctcaagagcctgcttataccctgtacagtctgattcagccctccagaaagtccggctctcggaagaggaaccactctcctagcttcaactccaccatatatgaagtcattggcaagtctcagcccaaagcacagaatcctgccaggctgagcagaaaagaacttgagaatttcgacgtctactccagctctagacgggttaagttttccagatccgcagacgcacccgcttaccaacaagggcagaaccaactctacaatgaacttaatttggggcggagggaagagtacgacgttctggacaaaaggaggggacgagatcccgagatgggcggaaagcctcagcgaaggaagaatccgcaagaggggctttataacgaactccagaaagataaaatggcagaagcctatagtgagattgggatgaagggagaaaggaggaggggtaaaggtcacgatgggttgtaccaaggattgagcacagccactaaagatacctatgatgcgctccacatgcaggccctgccgccaagacgcgccaagagaagcggatctggcgtgaagcagaccctgaatttcgacctgctgaagctggctggcgacgtggaatccaacccaggccctggccatatgaccgagtacaagcccacggtgcgcctcgccacccgcgacgacgtccccagggccgtacgcaccctcgccgccgcgttcgccgactaccccgccacgcgccacaccgtcgatccggaccgccacatcgagcgggtcaccgagctgcaagaactcttcctcacgcgcgtcgggctcgacatcggcaaggtgtgggtcgcggacgacggcgccgcggtggcggtctggaccacgccggagagcgtcgaagcgggggcggtgttcgccgagatcggcccgcgcatggccgagttgagcggttcccggctggccgcgcagcaacagatggaaggcctcctggcgccgcaccggcccaaggagcccgcgtggttcctggccaccgtcggcgtctcgcccgaccaccagggcaagggtctgggcagcgccgtcgtgctccccggagtggaggcggccgagcgcgccggggtgcccgccttcctggagacctccgcgccccgcaacctccccttctacgagcggctcggcttcaccgtcaccgccgacgtcgaggtgcccgaaggaccgcgcacctggtgcatgacccgcaagcccggtgcctga

SEQ ID NO: 6101 - DNA, 5064 bp, Artificial Sequence
  Synthetic Polynucleotide
atggccttaccagtgaccgccttgctcctgccgctggccttgctgctccacgccgccaggccggaagtgcagctggttgaatctggcggaggactggttcaggctggcggatctctgagactgtcttgtgccgccagcggcagaacctttagcatgggctggtttagacaggcccctggcaaagagagagagttcgtcgccgccatcacatactctggcggcagcccttactacgccgactctgtgaagggcagattcaccatcagccgggacaacgccaagaacaccgtgtacctccagatgaacagcctgaagcctgaggacaccgccgtgtactactgcgccgccaatccaacatacggcagcgactggaacgccgagaattggggccagggaacccaagtgacagtgtctagcggtaccggcggaggcggatctggcggcggaggtagcggtggcggaggatctgaattcgacatccagatgacacagagccctagcagcctgtctgccagcgtgggagacagagtgaccatcacatgcaaggccagcgaccacatcaacaactggctggcctggtatcagcagaagcctggacaggcccctaagctgctgatctacggcgctaccacactggaaacaggcgtgcccagcagattttctggcagcggctctggcaccgactacaccctgacaatatccagcctccagcctgaggacttcgccacctactactgtcagcagagctggaacaccccttggacattcggccagggcaccaagctggaaatcaagagactcgaggacctgaagaacgtgttcccacctgaggtggccgtgttcgagcctagcgaggccgagatcagccacacccagaaagccaccctcgtgtgcctggctaccggcttctaccccgaccatgtggaactgtcttggtgggtcaacggcaaagaggtgcacagcggcgtgtctaccgacccccagccactgaaagaacagcccgccctgaacgacagccggtactgcctgagcagcagactgagagtgtccgccaccttctggcagaacccccggaaccacttcagatgccaggtgcagttctacggcctgagcgagaacgacgagtggacccaggacagagccaagcccgtgacccagatcgtgtctgccgaagcctggggcagagccgattgcggatccacaacacctggcgagagaagtagcctgcctgccttctatcctggcaccagcggctcttgttctggctgtggatctctgagcctgcctctgctggctggactggttgctgctgatgctgtggcctctctgctgattgtgggagccgtgttcctgtgcgccagacctagaagaagccccgctcaagaggacggcaaggtgtacatcaacatgcccggcagaggaagcactagtagagtgaagttcagcagaagcgccgacgcccctgcctaccagcagggacagaaccaactgtacaacgagctgaacctgggcagacgggaagagtacgacgtgctggacaagcggagaggcagggaccctgagatgggcggaaagccccagcggagaaagaacccccaggaaggactgtataacgaactccagaaagacaagatggccgaagcctacagcgagatcggcatgaagggcgagcggagaagaggcaagggccacgatggcctgtaccagggcctgagcaccgccaccaaggacacctatgacgccctgcacatgcaggccctgcctccaagaagggccaagcgatctggatctggagcaacaaacttctcactactcaaacaagcaggtgacgtggaggagaatcccgggcctatggactggatttggcgcatccttttccttgtcggcgctgctaccggcgcgcattccgggcccgaagtgcaactggttgaatccggtggcggcctggtgcaagcaggcggatctctcagacttagctgtgccgcctccggcagaaccttcacaatgggatggtttaggcaggctccagggaaagagagagagttcgtcgccgccatctctctgtctcccacactggcctactacgccgactctgtgaaaggccggttcaccatctccagagataatgccaagaacaccgtggtgctgcaaatgaactctctgaaacccgaggatacagccctgtactattgtgccgctgaccggaagtccgtgatgagcatcagacccgattactggggacagggcacacaagtcacagtgtcctctggatccggcggcggaggatctggcggaggcggatctgggggcggaggctctttcgaacaagttcagcttcaacagcctggcgctgagctggtcaaacctggcgcttctgtgaagatgagctgcaaagccagcggctacgccttcagcagctactggatcaactggatgaagcagaaacccggccagggactcgaatggatcggccaaatctatcccggcgacggcgacaccaactacaacggcaagttcaagggcagagccacactgaccgccgatacctctagcagcacagcctacatgcagctgagcagcctgaccagcgaagatagcgccgtgtacttctgtgcccggtccatcacaacagtcgtgggctgcgctatggactattggggccagggaacaagcgtgaccgtgtctagtacgcgtatccagaaccctgatcctgccgtgtaccagctgcgggatagcaagagcagcgacaagagcgtgtgtctgttcaccgacttcgacagccagaccaacgtgtcccagagcaaggactccgacgtgtacatcaccgataagaccgtgctggacatgcggagcatggacttcaagagcaactccgccgtggcctggtccaacaagtccgatttcgcctgcgccaacgccttcaacaacagcattatccccgaggacacattcttcccaagccccgagagcagctgcggtaccaaaggatgccagggaagcgccgaccatgtggtgtcaatttctggcgtgcccctgcaactccagccaaactctattcagaccaaagtcgatagcattgcctggaaaaaattgctgccctctcagaacgggtttcaccacattctcaaatgggaaaatggctctctgccctccaacacctccaacgatcggtttagctttatcgtcaagaatctgtccctgctcatcaaagcagcccagcagcaagactccggcctgtattgcctcgaagtcacctccatctccgggaaagtgcagacagctacattccaagtgttcgtctttgataaggtcgagaagcctagactccaaggacaggggaagattctggacagaggacggtgtcaggtggcactgtcttgccttgtcagccgcgacggcaatgtgtcttatgcttggtatcggggctccaagctgattcaaaccgctgggaatctgacatacctcgatgaagaggttgacatcaatgggacgcacacgtatacttgcaatgtctccaatcctgtcagctgggagtctcataccctgaacctgacacaggattgtcaaaatgcacatcaagagttccggttttggccgtttcttgtgattatcgtgattctgtctgccctcttcctcggaactctggcttgcttctgtgtctggcggcgcaaacggaaagagaaacagtctgagacttccccgaaagagtttctcacgatatacgaagatgtcaaggacctcaagacccgccgcaaccatgagcaagaacagacattcccaggcggaggctccacaatctactccatgattcagtcccagtctagcgccccaacctctcaagagcctgcttataccctgtacagtctgattcagccctccagaaagtccggctctcggaagaggaaccactctcctagcttcaactccaccatatatgaagtcattggcaagtctcagcccaaagcacagaatcctgccaggctgagcagaaaagaacttgagaatttcgacgtctactccagctctagacgggttaagttttccagatccgcagacgcacccgcttaccaacaagggcagaaccaactctacaatgaacttaatttggggcggagggaagagtacgacgttctggacaaaaggaggggacgagatcccgagatgggcggaaagcctcagcgaaggaagaatccgcaagaggggctttataacgaactccagaaagataaaatggcagaagcctatagtgagattgggatgaagggagaaaggaggaggggtaaaggtcacgatgggttgtaccaaggattgagcacagccactaaagatacctatgatgcgctccacatgcaggccctgccgccaagacgcgccaagagaagcggatctggcgtgaagcagaccctgaatttcgacctgctgaagctggctggcgacgtggaatccaacccaggccctggccatatgaccgagtacaagcccacggtgcgcctcgccacccgcgacgacgtccccagggccgtacgcaccctcgccgccgcgttcgccgactaccccgccacgcgccacaccgtcgatccggaccgccacatcgagcgggtcaccgagctgcaagaactcttcctcacgcgcgtcgggctcgacatcggcaaggtgtgggtcgcggacgacggcgccgcggtggcggtctggaccacgccggagagcgtcgaagcgggggcggtgttcgccgagatcggcccgcgcatggccgagttgagcggttcccggctggccgcgcagcaacagatggaaggcctcctggcgccgcaccggcccaaggagcccgcgtggttcctggccaccgtcggcgtctcgcccgaccaccagggcaagggtctgggcagcgccgtcgtgctccccggagtggaggcggccgagcgcgccggggtgcccgccttcctggagacctccgcgccccgcaacctccccttctacgagcggctcggcttcaccgtcaccgccgacgtcgaggtgcccgaaggaccgcgcacctggtgcatgacccgcaagcccggtgcctga

SEQ ID NO: 6102 - DNA, 4263 bp, Artificial Sequence
  Synthetic Polynucleotide
atggccttaccagtgaccgccttgctcctgccgctggccttgctgctccacgccgccaggccggaagtgcagctggttgaatctggcggaggactggttcaggctggcggatctctgagactgtcttgtgccgccagcggcagaacctttagcatgggctggtttagacaggcccctggcaaagagagagagttcgtcgccgccatcacatactctggcggcagcccttactacgccgactctgtgaagggcagattcaccatcagccgggacaacgccaagaacaccgtgtacctccagatgaacagcctgaagcctgaggacaccgccgtgtactactgcgccgccaatccaacatacggcagcgactggaacgccgagaattggggccagggaacccaagtgacagtgtctagcctcgaggacctgaagaacgtgttcccacctgaggtggccgtgttcgagcctagcgaggccgagatcagccacacccagaaagccaccctcgtgtgcctggctaccggcttctaccccgaccatgtggaactgtcttggtgggtcaacggcaaagaggtgcacagcggcgtgtctaccgacccccagccactgaaagaacagcccgccctgaacgacagccggtactgcctgagcagcagactgagagtgtccgccaccttctggcagaacccccggaaccacttcagatgccaggtgcagttctacggcctgagcgagaacgacgagtggacccaggacagagccaagcccgtgacccagatcgtgtctgccgaagcctggggcagagccgattgcggatccacaacacctggcgagagaagtagcctgcctgccttctatcctggcaccagcggctcttgttctggctgtggatctctgagcctgcctctgctggctggactggttgctgctgatgctgtggcctctctgctgattgtgggagccgtgttcctgtgcgccagacctagaagaagccccgctcaagaggacggcaaggtgtacatcaacatgcccggcagaggaagcactagtagagtgaagttcagcagaagcgccgacgcccctgcctaccagcagggacagaaccaactgtacaacgagctgaacctgggcagacgggaagagtacgacgtgctggacaagcggagaggcagggaccctgagatgggcggaaagccccagcggagaaagaacccccaggaaggactgtataacgaactccagaaagacaagatggccgaagcctacagcgagatcggcatgaagggcgagcggagaagaggcaagggccacgatggcctgtaccagggcctgagcaccgccaccaaggacacctatgacgccctgcacatgcaggccctgcctccaagaagggccaagcgatctggatctggagcaacaaacttctcactactcaaacaagcaggtgacgtggaggagaatcccgggcctatggactggatttggcgcatccttttccttgtcggcgctgctaccggcgcgcattccgggcccgaagtgcaactggttgaatccggtggcggcctggtgcaagcaggcggatctctcagacttagctgtgccgcctccggcagaaccttcacaatgggatggtttaggcaggctccagggaaagagagagagttcgtcgccgccatctctctgtctcccacactggcctactacgccgactctgtgaaaggccggttcaccatctccagagataatgccaagaacaccgtggtgctgcaaatgaactctctgaaacccgaggatacagccctgtactattgtgccgctgaccggaagtccgtgatgagcatcagacccgattactggggacagggcacacaagtcacagtgtcctctacgcgtatccagaaccctgatcctgccgtgtaccagctgcgggatagcaagagcagcgacaagagcgtgtgtctgttcaccgacttcgacagccagaccaacgtgtcccagagcaaggactccgacgtgtacatcaccgataagaccgtgctggacatgcggagcatggacttcaagagcaactccgccgtggcctggtccaacaagtccgatttcgcctgcgccaacgccttcaacaacagcattatccccgaggacacattcttcccaagccccgagagcagctgcggtaccaaaggatgccagggaagcgccgaccatgtggtgtcaatttctggcgtgcccctgcaactccagccaaactctattcagaccaaagtcgatagcattgcctggaaaaaattgctgccctctcagaacgggtttcaccacattctcaaatgggaaaatggctctctgccctccaacacctccaacgatcggtttagctttatcgtcaagaatctgtccctgctcatcaaagcagcccagcagcaagactccggcctgtattgcctcgaagtcacctccatctccgggaaagtgcagacagctacattccaagtgttcgtctttgataaggtcgagaagcctagactccaaggacaggggaagattctggacagaggacggtgtcaggtggcactgtcttgccttgtcagccgcgacggcaatgtgtcttatgcttggtatcggggctccaagctgattcaaaccgctgggaatctgacatacctcgatgaagaggttgacatcaatgggacgcacacgtatacttgcaatgtctccaatcctgtcagctgggagtctcataccctgaacctgacacaggattgtcaaaatgcacatcaagagttccggttttggccgtttcttgtgattatcgtgattctgtctgccctcttcctcggaactctggcttgcttctgtgtctggcggcgcaaacggaaagagaaacagtctgagacttccccgaaagagtttctcacgatatacgaagatgtcaaggacctcaagacccgccgcaaccatgagcaagaacagacattcccaggcggaggctccacaatctactccatgattcagtcccagtctagcgccccaacctctcaagagcctgcttataccctgtacagtctgattcagccctccagaaagtccggctctcggaagaggaaccactctcctagcttcaactccaccatatatgaagtcattggcaagtctcagcccaaagcacagaatcctgccaggctgagcagaaaagaacttgagaatttcgacgtctactccagctctagacgggttaagttttccagatccgcagacgcacccgcttaccaacaagggcagaaccaactctacaatgaacttaatttggggcggagggaagagtacgacgttctggacaaaaggaggggacgagatcccgagatgggcggaaagcctcagcgaaggaagaatccgcaagaggggctttataacgaactccagaaagataaaatggcagaagcctatagtgagattgggatgaagggagaaaggaggaggggtaaaggtcacgatgggttgtaccaaggattgagcacagccactaaagatacctatgatgcgctccacatgcaggccctgccgccaagacgcgccaagagaagcggatctggcgtgaagcagaccctgaatttcgacctgctgaagctggctggcgacgtggaatccaacccaggccctggccatatgaccgagtacaagcccacggtgcgcctcgccacccgcgacgacgtccccagggccgtacgcaccctcgccgccgcgttcgccgactaccccgccacgcgccacaccgtcgatccggaccgccacatcgagcgggtcaccgagctgcaagaactcttcctcacgcgcgtcgggctcgacatcggcaaggtgtgggtcgcggacgacggcgccgcggtggcggtctggaccacgccggagagcgtcgaagcgggggcggtgttcgccgagatcggcccgcgcatggccgagttgagcggttcccggctggccgcgcagcaacagatggaaggcctcctggcgccgcaccggcccaaggagcccgcgtggttcctggccaccgtcggcgtctcgcccgaccaccagggcaagggtctgggcagcgccgtcgtgctccccggagtggaggcggccgagcgcgccggggtgcccgccttcctggagacctccgcgccccgcaacctccccttctacgagcggctcggcttcaccgtcaccgccgacgtcgaggtgcccgaaggaccgcgcacctggtgcatgacccgcaagcccggtgcctga

SEQ ID NO: 6103 - DNA, 1758 bp, Artificial Sequence; identical to SEQ ID NO: 2037
  Synthetic Polynucleotide

SEQ ID NO: 6104 - DNA, 1371 bp, Artificial Sequence; identical to SEQ ID NO: 5880
  Synthetic Polynucleotide

SEQ ID NO: 6105 - DNA, 1371 bp, Artificial Sequence; identical to SEQ ID NO: 5881
  Synthetic Polynucleotide

SEQ ID NO: 6106 - DNA, 993 bp, Artificial Sequence; identical to SEQ ID NO: 5882
  Synthetic Polynucleotide

SEQ ID NO: 6107 - DNA, 993 bp, Artificial Sequence; identical to SEQ ID NO: 5883
  Synthetic Polynucleotide

SEQ ID NO: 6108 - DNA, 993 bp, Artificial Sequence; identical to SEQ ID NO: 5884
  Synthetic Polynucleotide

SEQ ID NO: 6109 - DNA, 999 bp, Artificial Sequence; identical to SEQ ID NO: 5885
  Synthetic Polynucleotide

SEQ ID NO: 6110 - DNA, 1023 bp, Artificial Sequence; identical to SEQ ID NO: 5886
  Synthetic Polynucleotide

SEQ ID NO: 6111 - DNA, 1011 bp, Artificial Sequence; identical to SEQ ID NO: 5887
  Synthetic Polynucleotide

SEQ ID NO: 6112 - DNA, 996 bp, Artificial Sequence; identical to SEQ ID NO: 5888
  Synthetic Polynucleotide

SEQ ID NO: 6113 - DNA, 1011 bp, Artificial Sequence; identical to SEQ ID NO: 5889
  Synthetic Polynucleotide

SEQ ID NO: 6114 - DNA, 813 bp, Artificial Sequence; identical to SEQ ID NO: 5890
  Synthetic Polynucleotide

SEQ ID NO: 6115 - DNA, 906 bp, Artificial Sequence; identical to SEQ ID NO: 5891
  Synthetic Polynucleotide

SEQ ID NO: 6116 - DNA, 909 bp, Artificial Sequence; identical to SEQ ID NO: 5892
  Synthetic Polynucleotide

SEQ ID NO: 6117 - DNA, 1560 bp, Artificial Sequence; identical to SEQ ID NO: 5893
  Synthetic Polynucleotide

SEQ ID NO: 6118 - DNA, 1200 bp, Artificial Sequence; identical to SEQ ID NO: 5894
  Synthetic Polynucleotide

SEQ ID NO: 6119 - DNA, 798 bp, Artificial Sequence; identical to SEQ ID NO: 5895
  Synthetic Polynucleotide

SEQ ID NO: 6120 - DNA, 723 bp, Artificial Sequence; identical to SEQ ID NO: 5896
  Synthetic Polynucleotide

SEQ ID NO: 6121 - DNA, 1497 bp, Artificial Sequence; identical to SEQ ID NO: 5897
  Synthetic Polynucleotide

SEQ ID NO: 6122 - DNA, 1497 bp, Artificial Sequence; identical to SEQ ID NO: 5898
  Synthetic Polynucleotide

SEQ ID NO: 6123 - DNA, 4374 bp, Artificial Sequence
  Synthetic Polynucleotide
atggccttaccagtgaccgccttgctcctgccgctggccttgctgctccacgccgccaggccggacatccagatgacacagagccctagcagcctgtctgccagcgtgggagacagagtgaccatcacatgcaaggccagcgaccacatcaacaactggctggcctggtatcagcagaagcctggacaggcccctaagctgctgatctacggcgctaccacactggaaacaggcgtgcccagcagattttctggcagcggctctggcaccgactacaccctgacaatatccagcctccagcctgaggacttcgccacctactactgtcagcagagctggaacaccccttggacattcggccagggcaccaagctggaaatcaagagactcgagaagggctgtcagggctctgccgatcacgtggtgtctatcagcggagtgcctctccagctccagcctaacagcatccagaccaaggtggactctatcgcctggaagaagctgctgcccagccagaatggcttccaccacatcctgaagtgggagaacggcagcctgcctagcaacaccagcaacgacagattcagcttcatcgtgaagaacctgagcctgctgattaaggccgctcagcagcaggatagcggcctgtactgtctggaagtgaccagcatcagcggcaaggtgcagaccgccacctttcaggtgttcgtgttcgacaaggtggaaaagccccggctgcaaggccagggcaagatccttgatagaggcagatgccaggtggccctgagctgtctggtttccagagatggcaacgtgtcctacgcctggtacagaggcagcaagctgatccagacagccggcaacctgacctacctggacgaggaagtggacatcaacggcacccacacctacacctgtaatgtgtctaaccccgtgtcctgggagagccacacactgaatctgacccaggactgccagaacgcccaccaagagttcagattctggcccttcctggtcatcatcgtgatcctgagcgccctgttcctgggcaccctggcctgtttttgcgtgtggcgcagaaagcgcaaagagaagcagagcgagacaagccccaaagagttcctgaccatctacgaggacgtgaaggatctgaaaacccggcggaaccacgaacaagagcagacctttcctggcggcggaagcaccatctacagcatgatccagagccagagcagcgcccctacaagccaagagccagcctacacactgtactccctgatccagcctagcagaaagagcggcagccggaagagaaatcacagccccagcttcaacagcacgatctacgaagtgatcggaaagtcccagcctaaggctcagaaccccgccagactgagccggaaagagctggaaaacttcgacgtgtacagcagcactagtagagtgaagttcagcagaagcgccgacgcccctgcctaccagcagggacagaaccaactgtacaacgagctgaacctgggcagacgggaagagtacgacgtgctggacaagcggagaggcagggaccctgagatgggcggaaagccccagcggagaaagaacccccaggaaggactgtataacgaactccagaaagacaagatggccgaagcctacagcgagatcggcatgaagggcgagcggagaagaggcaagggccacgatggcctgtaccagggcctgagcaccgccaccaaggacacctatgacgccctgcacatgcaggccctgcctccaagaagggccaagcgatctggatctggagcaacaaacttctcactactcaaacaagcaggtgacgtggaggagaatcccgggcctatggactggatttggcgcatccttttccttgtcggcgctgctaccggcgcgcattccttcgaacaagttcagcttcaacagcctggcgctgagctggtcaaacctggcgcttctgtgaagatgagctgcaaagccagcggctacgccttcagcagctactggatcaactggatgaagcagaaacccggccagggactcgaatggatcggccaaatctatcccggcgacggcgacaccaactacaacggcaagttcaagggcagagccacactgaccgccgatacctctagcagcacagcctacatgcagctgagcagcctgaccagcgaagatagcgccgtgtacttctgtgcccggtccatcacaacagtcgtgggctgcgctatggactattggggccagggaacaagcgtgaccgtgtctagtacgcgtaaaggatgccagggaagcgccgaccatgtggtgtcaatttctggcgtgcccctgcaactccagccaaactctattcagaccaaagtcgatagcattgcctggaaaaaattgctgccctctcagaacgggtttcaccacattctcaaatgggaaaatggctctctgccctccaacacctccaacgatcggtttagctttatcgtcaagaatctgtccctgctcatcaaagcagcccagcagcaagactccggcctgtattgcctcgaagtcacctccatctccgggaaagtgcagacagctacattccaagtgttcgtctttgataaggtcgagaagcctagactccaaggacaggggaagattctggacagaggacggtgtcaggtggcactgtcttgccttgtcagccgcgacggcaatgtgtcttatgcttggtatcggggctccaagctgattcaaaccgctgggaatctgacatacctcgatgaagaggttgacatcaatgggacgcacacgtatacttgcaatgtctccaatcctgtcagctgggagtctcataccctgaacctgacacaggattgtcaaaatgcacatcaagagttccggttttggccgtttcttgtgattatcgtgattctgtctgccctcttcctcggaactctggcttgcttctgtgtctggcggcgcaaacggaaagagaaacagtctgagacttccccgaaagagtttctcacgatatacgaagatgtcaaggacctcaagacccgccgcaaccatgagcaagaacagacattcccaggcggaggctccacaatctactccatgattcagtcccagtctagcgccccaacctctcaagagcctgcttataccctgtacagtctgattcagccctccagaaagtccggctctcggaagaggaaccactctcctagcttcaactccaccatatatgaagtcattggcaagtctcagcccaaagcacagaatcctgccaggctgagcagaaaagaacttgagaatttcgacgtctactccagctctagacgggttaagttttccagatccgcagacgcacccgcttaccaacaagggcagaaccaactctacaatgaacttaatttggggcggagggaagagtacgacgttctggacaaaaggaggggacgagatcccgagatgggcggaaagcctcagcgaaggaagaatccgcaagaggggctttataacgaactccagaaagataaaatggcagaagcctatagtgagattgggatgaagggagaaaggaggaggggtaaaggtcacgatgggttgtaccaaggattgagcacagccactaaagatacctatgatgcgctccacatgcaggccctgccgccaagacgcgccaagagaagcggatctggcgtgaagcagaccctgaatttcgacctgctgaagctggctggcgacgtggaatccaacccaggccctggccatatgaccgagtacaagcccacggtgcgcctcgccacccgcgacgacgtccccagggccgtacgcaccctcgccgccgcgttcgccgactaccccgccacgcgccacaccgtcgatccggaccgccacatcgagcgggtcaccgagctgcaagaactcttcctcacgcgcgtcgggctcgacatcggcaaggtgtgggtcgcggacgacggcgccgcggtggcggtctggaccacgccggagagcgtcgaagcgggggcggtgttcgccgagatcggcccgcgcatggccgagttgagcggttcccggctggccgcgcagcaacagatggaaggcctcctggcgccgcaccggcccaaggagcccgcgtggttcctggccaccgtcggcgtctcgcccgaccaccagggcaagggtctgggcagcgccgtcgtgctccccggagtggaggcggccgagcgcgccggggtgcccgccttcctggagacctccgcgccccgcaacctccccttctacgagcggctcggcttcaccgtcaccgccgacgtcgaggtgcccgaaggaccgcgcacctggtgcatgacccgcaagcccggtgcctga

SEQ ID NO: 6124 - DNA, 4530 bp, Artificial Sequence
  Synthetic Polynucleotide
atggccttaccagtgaccgccttgctcctgccgctggccttgctgctccacgccgccaggccggcatgcgaagtgcagctgcttgaaagtggcggcggactgattcagcctggcggatctctgagactgagctgtgccgccagcggcttcaccttttctagccacgccatgacctgggtccgacaggcacctggaaaagggcttgaatgggtgtccgccatcagcggctctggcgattacacacactacgccgacagcgtgaagggcagattcaccatcagcagagacaacagcaagaacaccgtgtacctccagatgaacagcctgagagccgaggacagcgccgtgtattattgcgccaaggatgaggatggcggcagcctgcttggacacagaggacaaggcaccctggtcaccgtttcttccggtaccggcggaggcggatctggcggcggaggtagcggtggcggaggatctgaattcggatctctcgagaagggctgtcagggctctgccgatcacgtggtgtctatcagcggagtgcctctccagctccagcctaacagcatccagaccaaggtggactctatcgcctggaagaagctgctgcccagccagaatggcttccaccacatcctgaagtgggagaacggcagcctgcctagcaacaccagcaacgacagattcagcttcatcgtgaagaacctgagcctgctgattaaggccgctcagcagcaggatagcggcctgtactgtctggaagtgaccagcatcagcggcaaggtgcagaccgccacctttcaggtgttcgtgttcgacaaggtggaaaagccccggctgcaaggccagggcaagatccttgatagaggcagatgccaggtggccctgagctgtctggtttccagagatggcaacgtgtcctacgcctggtacagaggcagcaagctgatccagacagccggcaacctgacctacctggacgaggaagtggacatcaacggcacccacacctacacctgtaatgtgtctaaccccgtgtcctgggagagccacacactgaatctgacccaggactgccagaacgcccaccaagagttcagattctggcccttcctggtcatcatcgtgatcctgagcgccctgttcctgggcaccctggcctgtttttgcgtgtggcgcagaaagcgcaaagagaagcagagcgagacaagccccaaagagttcctgaccatctacgaggacgtgaaggatctgaaaacccggcggaaccacgaacaagagcagacctttcctggcggcggaagcaccatctacagcatgatccagagccagagcagcgcccctacaagccaagagccagcctacacactgtactccctgatccagcctagcagaaagagcggcagccggaagagaaatcacagccccagcttcaacagcacgatctacgaagtgatcggaaagtcccagcctaaggctcagaaccccgccagactgagccggaaagagctggaaaacttcgacgtgtacagcagcactagtagagtgaagttcagcagaagcgccgacgcccctgcctaccagcagggacagaaccaactgtacaacgagctgaacctgggcagacgggaagagtacgacgtgctggacaagcggagaggcagggaccctgagatgggcggaaagccccagcggagaaagaacccccaggaaggactgtataacgaactccagaaagacaagatggccgaagcctacagcgagatcggcatgaagggcgagcggagaagaggcaagggccacgatggcctgtaccagggcctgagcaccgccaccaaggacacctatgacgccctgcacatgcaggccctgcctccaagaagggccaagcgatctggatctggagcaacaaacttctcactactcaaacaagcaggtgacgtggaggagaatcccgggcctatggactggatttggcgcatccttttccttgtcggcgctgctaccggcgcgcattccgggcccgaagtgcagctggttgaatctggcggaggactggttcaggctggcggatctctgagactgtcttgtgccgccagcggcagaacctttagcatgggctggtttagacaggcccctggcaaagagagagagttcgtcgccgccatcacatactctggcggcagcccttactacgccgactctgtgaagggcagattcaccatcagccgggacaacgccaagaacaccgtgtacctccagatgaacagcctgaagcctgaggacaccgccgtgtactactgcgccgccaatccaacatacggcagcgactggaacgccgagaattggggccagggaacccaagtgacagtgtctagcggatccggcggcggaggatctggcggaggcggatctgggggcggaggctctttcgaaggcagcacgcgtaaaggatgccagggaagcgccgaccatgtggtgtcaatttctggcgtgcccctgcaactccagccaaactctattcagaccaaagtcgatagcattgcctggaaaaaattgctgccctctcagaacgggtttcaccacattctcaaatgggaaaatggctctctgccctccaacacctccaacgatcggtttagctttatcgtcaagaatctgtccctgctcatcaaagcagcccagcagcaagactccggcctgtattgcctcgaagtcacctccatctccgggaaagtgcagacagctacattccaagtgttcgtctttgataaggtcgagaagcctagactccaaggacaggggaagattctggacagaggacggtgtcaggtggcactgtcttgccttgtcagccgcgacggcaatgtgtcttatgcttggtatcggggctccaagctgattcaaaccgctgggaatctgacatacctcgatgaagaggttgacatcaatgggacgcacacgtatacttgcaatgtctccaatcctgtcagctgggagtctcataccctgaacctgacacaggattgtcaaaatgcacatcaagagttccggttttggccgtttcttgtgattatcgtgattctgtctgccctcttcctcggaactctggcttgcttctgtgtctggcggcgcaaacggaaagagaaacagtctgagacttccccgaaagagtttctcacgatatacgaagatgtcaaggacctcaagacccgccgcaaccatgagcaagaacagacattcccaggcggaggctccacaatctactccatgattcagtcccagtctagcgccccaacctctcaagagcctgcttataccctgtacagtctgattcagccctccagaaagtccggctctcggaagaggaaccactctcctagcttcaactccaccatatatgaagtcattggcaagtctcagcccaaagcacagaatcctgccaggctgagcagaaaagaacttgagaatttcgacgtctactccagctctagacgggttaagttttccagatccgcagacgcacccgcttaccaacaagggcagaaccaactctacaatgaacttaatttggggcggagggaagagtacgacgttctggacaaaaggaggggacgagatcccgagatgggcggaaagcctcagcgaaggaagaatccgcaagaggggctttataacgaactccagaaagataaaatggcagaagcctatagtgagattgggatgaagggagaaaggaggaggggtaaaggtcacgatgggttgtaccaaggattgagcacagccactaaagatacctatgatgcgctccacatgcaggccctgccgccaagacgcgccaagagaagcggatctggcgtgaagcagaccctgaatttcgacctgctgaagctggctggcgacgtggaatccaacccaggccctggccatatgaccgagtacaagcccacggtgcgcctcgccacccgcgacgacgtccccagggccgtacgcaccctcgccgccgcgttcgccgactaccccgccacgcgccacaccgtcgatccggaccgccacatcgagcgggtcaccgagctgcaagaactcttcctcacgcgcgtcgggctcgacatcggcaaggtgtgggtcgcggacgacggcgccgcggtggcggtctggaccacgccggagagcgtcgaagcgggggcggtgttcgccgagatcggcccgcgcatggccgagttgagcggttcccggctggccgcgcagcaacagatggaaggcctcctggcgccgcaccggcccaaggagcccgcgtggttcctggccaccgtcggcgtctcgcccgaccaccagggcaagggtctgggcagcgccgtcgtgctccccggagtggaggcggccgagcgcgccggggtgcccgccttcctggagacctccgcgccccgcaacctccccttctacgagcggctcggcttcaccgtcaccgccgacgtcgaggtgcccgaaggaccgcgcacctggtgcatgacccgcaagcccggtgcctga

SEQ ID NO: 6125 - DNA, 4977 bp, Artificial Sequence
  Synthetic Polynucleotide
atggccttaccagtgaccgccttgctcctgccgctggccttgctgctccacgccgccaggccggacatccagatgacacagagccctagcagcctgtctgccagcgtgggagacagagtgaccatcacatgcaaggccagcgaccacatcaacaactggctggcctggtatcagcagaagcctggacaggcccctaagctgctgatctacggcgctaccacactggaaacaggcgtgcccagcagattttctggcagcggctctggcaccgactacaccctgacaatatccagcctccagcctgaggacttcgccacctactactgtcagcagagctggaacaccccttggacattcggccagggcaccaagctggaaatcaagagactcgagggacagcctaaggccaatcctaccgtgacactgttccctccaagcagcgaagaactccaggccaacaaggccacacttgtgtgcctgatctccgacttctaccctggggctgtgacagtggcttggaaggccgatggatctcctgtgaaagccggcgtggaaaccaccaagccatccaagcagagcaacaacaaatacgccgccagctcctacctgagcctgacacctgagcagtggaagtcccacagatcctacagctgccaagtgacccacgaaggcagcaccgtggaaaagacagtggcccctacagagtgcagcggatccaagggctgtcagggctctgccgatcacgtggtgtctatcagcggagtgcctctccagctccagcctaacagcatccagaccaaggtggactctatcgcctggaagaagctgctgcccagccagaatggcttccaccacatcctgaagtgggagaacggcagcctgcctagcaacaccagcaacgacagattcagcttcatcgtgaagaacctgagcctgctgattaaggccgctcagcagcaggatagcggcctgtactgtctggaagtgaccagcatcagcggcaaggtgcagaccgccacctttcaggtgttcgtgttcgacaaggtggaaaagccccggctgcaaggccagggcaagatccttgatagaggcagatgccaggtggccctgagctgtctggtttccagagatggcaacgtgtcctacgcctggtacagaggcagcaagctgatccagacagccggcaacctgacctacctggacgaggaagtggacatcaacggcacccacacctacacctgtaatgtgtctaaccccgtgtcctgggagagccacacactgaatctgacccaggactgccagaacgcccaccaagagttcagattctggcccttcctggtcatcatcgtgatcctgagcgccctgttcctgggcaccctggcctgtttttgcgtgtggcgcagaaagcgcaaagagaagcagagcgagacaagccccaaagagttcctgaccatctacgaggacgtgaaggatctgaaaacccggcggaaccacgaacaagagcagacctttcctggcggcggaagcaccatctacagcatgatccagagccagagcagcgcccctacaagccaagagccagcctacacactgtactccctgatccagcctagcagaaagagcggcagccggaagagaaatcacagccccagcttcaacagcacgatctacgaagtgatcggaaagtcccagcctaaggctcagaaccccgccagactgagccggaaagagctggaaaacttcgacgtgtacagcagcactagtagagtgaagttcagcagaagcgccgacgcccctgcctaccagcagggacagaaccaactgtacaacgagctgaacctgggcagacgggaagagtacgacgtgctggacaagcggagaggcagggaccctgagatgggcggaaagccccagcggagaaagaacccccaggaaggactgtataacgaactccagaaagacaagatggccgaagcctacagcgagatcggcatgaagggcgagcggagaagaggcaagggccacgatggcctgtaccagggcctgagcaccgccaccaaggacacctatgacgccctgcacatgcaggccctgcctccaagaagggccaagcgatctggatctggagcaacaaacttctcactactcaaacaagcaggtgacgtggaggagaatcccgggcctatggactggatttggcgcatccttttccttgtcggcgctgctaccggcgcgcattccttcgaacaagttcagcttcaacagcctggcgctgagctggtcaaacctggcgcttctgtgaagatgagctgcaaagccagcggctacgccttcagcagctactggatcaactggatgaagcagaaacccggccagggactcgaatggatcggccaaatctatcccggcgacggcgacaccaactacaacggcaagttcaagggcagagccacactgaccgccgatacctctagcagcacagcctacatgcagctgagcagcctgaccagcgaagatagcgccgtgtacttctgtgcccggtccatcacaacagtcgtgggctgcgctatggactattggggccagggaacaagcgtgaccgtgtctagtacgcgtgcctctacaaagggaccctccgtgtttcctctggctcccagcagcaagtctacaagcggaggaacagccgctctgggctgcctggtcaaggattactttcccgagcctgtgaccgtgtcctggaatagcggagcactgacaagcggcgtgcacacctttccagccgtgctgcaaagcagcggcctgtactctctgagcagcgtggtcacagtgcctagctctagcctgggcacccagacctacatctgcaatgtgaaccacaagcctagcaacaccaaggtggacaagagagtggaacccaagagctgtggtaccaaaggatgccagggaagcgccgaccatgtggtgtcaatttctggcgtgcccctgcaactccagccaaactctattcagaccaaagtcgatagcattgcctggaaaaaattgctgccctctcagaacgggtttcaccacattctcaaatgggaaaatggctctctgccctccaacacctccaacgatcggtttagctttatcgtcaagaatctgtccctgctcatcaaagcagcccagcagcaagactccggcctgtattgcctcgaagtcacctccatctccgggaaagtgcagacagctacattccaagtgttcgtctttgataaggtcgagaagcctagactccaaggacaggggaagattctggacagaggacggtgtcaggtggcactgtcttgccttgtcagccgcgacggcaatgtgtcttatgcttggtatcggggctccaagctgattcaaaccgctgggaatctgacatacctcgatgaagaggttgacatcaatgggacgcacacgtatacttgcaatgtctccaatcctgtcagctgggagtctcataccctgaacctgacacaggattgtcaaaatgcacatcaagagttccggttttggccgtttcttgtgattatcgtgattctgtctgccctcttcctcggaactctggcttgcttctgtgtctggcggcgcaaacggaaagagaaacagtctgagacttccccgaaagagtttctcacgatatacgaagatgtcaaggacctcaagacccgccgcaaccatgagcaagaacagacattcccaggcggaggctccacaatctactccatgattcagtcccagtctagcgccccaacctctcaagagcctgcttataccctgtacagtctgattcagccctccagaaagtccggctctcggaagaggaaccactctcctagcttcaactccaccatatatgaagtcattggcaagtctcagcccaaagcacagaatcctgccaggctgagcagaaaagaacttgagaatttcgacgtctactccagctctagacgggttaagttttccagatccgcagacgcacccgcttaccaacaagggcagaaccaactctacaatgaacttaatttggggcggagggaagagtacgacgttctggacaaaaggaggggacgagatcccgagatgggcggaaagcctcagcgaaggaagaatccgcaagaggggctttataacgaactccagaaagataaaatggcagaagcctatagtgagattgggatgaagggagaaaggaggaggggtaaaggtcacgatgggttgtaccaaggattgagcacagccactaaagatacctatgatgcgctccacatgcaggccctgccgccaagacgcgccaagagaagcggatctggcgtgaagcagaccctgaatttcgacctgctgaagctggctggcgacgtggaatccaacccaggccctggccatatggctacctacgaggtgctgtgcgaggtggcaagaaagctgggcaccgacgacagagaagtggtgctgttcctgctgaacgtgttcatccctcagcctacactggcccagctgatcggtgcactgagagccctgaaagaggaaggccggctgacctttcctctgctggccgaatgcctgttcagagccggaagaagggatctgctgcgggacctgctgcatctggaccccagatttctggaaagacacctggccggcaccatgagctacttcagcccttaccagctgaccgtgctgcacgttgacggcgaactgtgcgccagagatattcggagcctgatcttcctgagcaaggacaccatcggcagccggtctacccctcagacatttctgcactgggtgtactgcatggaaaacctggacctgctcggccccacagatgtggatgccctgatgtccatgctgagaagcctgagcagagtggacctccagagacaggtgcagacactgatgggactgcacctgagcggacctagccacagccagcactacagacacacccct

SEQ ID NO: 6126 - DNA, 5136 bp, Artificial Sequence
  Synthetic Polynucleotide
atggccttaccagtgaccgccttgctcctgccgctggccttgctgctccacgccgccaggccggacatccagatgacacagagccctagcagcctgtctgccagcgtgggagacagagtgaccatcacatgcaaggccagcgaccacatcaacaactggctggcctggtatcagcagaagcctggacaggcccctaagctgctgatctacggcgctaccacactggaaacaggcgtgcccagcagattttctggcagcggctctggcaccgactacaccctgacaatatccagcctccagcctgaggacttcgccacctactactgtcagcagagctggaacaccccttggacattcggccagggcaccaagctggaaatcaagagactcgagggacagcctaaggccaatcctaccgtgacactgttccctccaagcagcgaagaactccaggccaacaaggccacacttgtgtgcctgatctccgacttctaccctggggctgtgacagtggcttggaaggccgatggatctcctgtgaaagccggcgtggaaaccaccaagccatccaagcagagcaacaacaaatacgccgccagctcctacctgagcctgacacctgagcagtggaagtcccacagatcctacagctgccaagtgacccacgaaggcagcaccgtggaaaagacagtggcccctacagagtgcagcggatccaagggctgtcagggctctgccgatcacgtggtgtctatcagcggagtgcctctccagctccagcctaacagcatccagaccaaggtggactctatcgcctggaagaagctgctgcccagccagaatggcttccaccacatcctgaagtgggagaacggcagcctgcctagcaacaccagcaacgacagattcagcttcatcgtgaagaacctgagcctgctgattaaggccgctcagcagcaggatagcggcctgtactgtctggaagtgaccagcatcagcggcaaggtgcagaccgccacctttcaggtgttcgtgttcgacaaggtggaaaagccccggctgcaaggccagggcaagatccttgatagaggcagatgccaggtggccctgagctgtctggtttccagagatggcaacgtgtcctacgcctggtacagaggcagcaagctgatccagacagccggcaacctgacctacctggacgaggaagtggacatcaacggcacccacacctacacctgtaatgtgtctaaccccgtgtcctgggagagccacacactgaatctgacccaggactgccagaacgcccaccaagagttcagattctggcccttcctggtcatcatcgtgatcctgagcgccctgttcctgggcaccctggcctgtttttgcgtgtggcgcagaaagcgcaaagagaagcagagcgagacaagccccaaagagttcctgaccatctacgaggacgtgaaggatctgaaaacccggcggaaccacgaacaagagcagacctttcctggcggcggaagcaccatctacagcatgatccagagccagagcagcgcccctacaagccaagagccagcctacacactgtactccctgatccagcctagcagaaagagcggcagccggaagagaaatcacagccccagcttcaacagcacgatctacgaagtgatcggaaagtcccagcctaaggctcagaaccccgccagactgagccggaaagagctggaaaacttcgacgtgtacagcagcactagtagagtgaagttcagcagaagcgccgacgcccctgcctaccagcagggacagaaccaactgtacaacgagctgaacctgggcagacgggaagagtacgacgtgctggacaagcggagaggcagggaccctgagatgggcggaaagccccagcggagaaagaacccccaggaaggactgtataacgaactccagaaagacaagatggccgaagcctacagcgagatcggcatgaagggcgagcggagaagaggcaagggccacgatggcctgtaccagggcctgagcaccgccaccaaggacacctatgacgccctgcacatgcaggccctgcctccaagaagggccaagcgatctggatctggagcaacaaacttctcactactcaaacaagcaggtgacgtggaggagaatcccgggcctatggactggatttggcgcatccttttccttgtcggcgctgctaccggcgcgcattccttcgaacaagttcagcttcaacagcctggcgctgagctggtcaaacctggcgcttctgtgaagatgagctgcaaagccagcggctacgccttcagcagctactggatcaactggatgaagcagaaacccggccagggactcgaatggatcggccaaatctatcccggcgacggcgacaccaactacaacggcaagttcaagggcagagccacactgaccgccgatacctctagcagcacagcctacatgcagctgagcagcctgaccagcgaagatagcgccgtgtacttctgtgcccggtccatcacaacagtcgtgggctgcgctatggactattggggccagggaacaagcgtgaccgtgtctagtacgcgtgcctctacaaagggaccctccgtgtttcctctggctcccagcagcaagtctacaagcggaggaacagccgctctgggctgcctggtcaaggattactttcccgagcctgtgaccgtgtcctggaatagcggagcactgacaagcggcgtgcacacctttccagccgtgctgcaaagcagcggcctgtactctctgagcagcgtggtcacagtgcctagctctagcctgggcacccagacctacatctgcaatgtgaaccacaagcctagcaacaccaaggtggacaagagagtggaacccaagagctgtggtaccaaaggatgccagggaagcgccgaccatgtggtgtcaatttctggcgtgcccctgcaactccagccaaactctattcagaccaaagtcgatagcattgcctggaaaaaattgctgccctctcagaacgggtttcaccacattctcaaatgggaaaatggctctctgccctccaacacctccaacgatcggtttagctttatcgtcaagaatctgtccctgctcatcaaagcagcccagcagcaagactccggcctgtattgcctcgaagtcacctccatctccgggaaagtgcagacagctacattccaagtgttcgtctttgataaggtcgagaagcctagactccaaggacaggggaagattctggacagaggacggtgtcaggtggcactgtcttgccttgtcagccgcgacggcaatgtgtcttatgcttggtatcggggctccaagctgattcaaaccgctgggaatctgacatacctcgatgaagaggttgacatcaatgggacgcacacgtatacttgcaatgtctccaatcctgtcagctgggagtctcataccctgaacctgacacaggattgtcaaaatgcacatcaagagttccggttttggccgtttcttgtgattatcgtgattctgtctgccctcttcctcggaactctggcttgcttctgtgtctggcggcgcaaacggaaagagaaacagtctgagacttccccgaaagagtttctcacgatatacgaagatgtcaaggacctcaagacccgccgcaaccatgagcaagaacagacattcccaggcggaggctccacaatctactccatgattcagtcccagtctagcgccccaacctctcaagagcctgcttataccctgtacagtctgattcagccctccagaaagtccggctctcggaagaggaaccactctcctagcttcaactccaccatatatgaagtcattggcaagtctcagcccaaagcacagaatcctgccaggctgagcagaaaagaacttgagaatttcgacgtctactccagctctagacgggttaagttttccagatccgcagacgcacccgcttaccaacaagggcagaaccaactctacaatgaacttaatttggggcggagggaagagtacgacgttctggacaaaaggaggggacgagatcccgagatgggcggaaagcctcagcgaaggaagaatccgcaagaggggctttataacgaactccagaaagataaaatggcagaagcctatagtgagattgggatgaagggagaaaggaggaggggtaaaggtcacgatgggttgtaccaaggattgagcacagccactaaagatacctatgatgcgctccacatgcaggccctgccgccaagacgcgccaagagaagcggatctggcgtgaagcagaccctgaatttcgacctgctgaagctggctggcgacgtggaatccaacccaggccctggccatatgtccgactccaaggaggtccctagccttccatttttgcgacacttgctcgaagagttggacagccatgaggacagcttgctgctgtttctgtgtcacgacgcggccccgggctgcacgacggtcacgcaagctttgtgctcgcttagccaacagcgcaagctgaccctcgcggctctggtcgagatgctctacgtgctgcagcgtatggatcttctcaagagccgcttcgggctcagcaaggagggggccgagcaattgctgggcacaagctttctcacgcgctaccgcaagctcatggtttgcgtgggtgaggagctcgactcgagcgagctacgcgctctacgcttgttcgcgtgcaacctgaatccgagcctgagcacggcgctttctgagagcagccgctttgtcgagcttgtactcgcgcttgaaaacgtaggactcgtctcgccatcgagtgtttccgtgcttgcggacatgttgcgcactcttcggcgcctcgatttgtgccagcagcttgttgagtacgaacaacaagagcaagccaggtaccgttactgttacgcggcctcgccctcattgccagttcgtacgttacgtcgggggcacggcgcgagtgaacacgagcagctgtgcatgcccgtgcaagaatcctctgacagccccgagctgctgcgcacgcccgtacaagaatcctccagcgacagccccgagcaaacgact

SEQ ID NO: 6127 - DNA, 5013 bp, Artificial Sequence
  Synthetic Polynucleotide
atggccttaccagtgaccgccttgctcctgccgctggccttgctgctccacgccgccaggccggacatccagatgacacagagccctagcagcctgtctgccagcgtgggagacagagtgaccatcacatgcaaggccagcgaccacatcaacaactggctggcctggtatcagcagaagcctggacaggcccctaagctgctgatctacggcgctaccacactggaaacaggcgtgcccagcagattttctggcagcggctctggcaccgactacaccctgacaatatccagcctccagcctgaggacttcgccacctactactgtcagcagagctggaacaccccttggacattcggccagggcaccaagctggaaatcaagagactcgagggacagcctaaggccaatcctaccgtgacactgttccctccaagcagcgaagaactccaggccaacaaggccacacttgtgtgcctgatctccgacttctaccctggggctgtgacagtggcttggaaggccgatggatctcctgtgaaagccggcgtggaaaccaccaagccatccaagcagagcaacaacaaatacgccgccagctcctacctgagcctgacacctgagcagtggaagtcccacagatcctacagctgccaagtgacccacgaaggcagcaccgtggaaaagacagtggcccctacagagtgcagcggatccaagggctgtcagggctctgccgatcacgtggtgtctatcagcggagtgcctctccagctccagcctaacagcatccagaccaaggtggactctatcgcctggaagaagctgctgcccagccagaatggcttccaccacatcctgaagtgggagaacggcagcctgcctagcaacaccagcaacgacagattcagcttcatcgtgaagaacctgagcctgctgattaaggccgctcagcagcaggatagcggcctgtactgtctggaagtgaccagcatcagcggcaaggtgcagaccgccacctttcaggtgttcgtgttcgacaaggtggaaaagccccggctgcaaggccagggcaagatccttgatagaggcagatgccaggtggccctgagctgtctggtttccagagatggcaacgtgtcctacgcctggtacagaggcagcaagctgatccagacagccggcaacctgacctacctggacgaggaagtggacatcaacggcacccacacctacacctgtaatgtgtctaaccccgtgtcctgggagagccacacactgaatctgacccaggactgccagaacgcccaccaagagttcagattctggcccttcctggtcatcatcgtgatcctgagcgccctgttcctgggcaccctggcctgtttttgcgtgtggcgcagaaagcgcaaagagaagcagagcgagacaagccccaaagagttcctgaccatctacgaggacgtgaaggatctgaaaacccggcggaaccacgaacaagagcagacctttcctggcggcggaagcaccatctacagcatgatccagagccagagcagcgcccctacaagccaagagccagcctacacactgtactccctgatccagcctagcagaaagagcggcagccggaagagaaatcacagccccagcttcaacagcacgatctacgaagtgatcggaaagtcccagcctaaggctcagaaccccgccagactgagccggaaagagctggaaaacttcgacgtgtacagcagcactagtagagtgaagttcagcagaagcgccgacgcccctgcctaccagcagggacagaaccaactgtacaacgagctgaacctgggcagacgggaagagtacgacgtgctggacaagcggagaggcagggaccctgagatgggcggaaagccccagcggagaaagaacccccaggaaggactgtataacgaactccagaaagacaagatggccgaagcctacagcgagatcggcatgaagggcgagcggagaagaggcaagggccacgatggcctgtaccagggcctgagcaccgccaccaaggacacctatgacgccctgcacatgcaggccctgcctccaagaagggccaagcgatctggatctggagcaacaaacttctcactactcaaacaagcaggtgacgtggaggagaatcccgggcctatggactggatttggcgcatccttttccttgtcggcgctgctaccggcgcgcattccttcgaacaagttcagcttcaacagcctggcgctgagctggtcaaacctggcgcttctgtgaagatgagctgcaaagccagcggctacgccttcagcagctactggatcaactggatgaagcagaaacccggccagggactcgaatggatcggccaaatctatcccggcgacggcgacaccaactacaacggcaagttcaagggcagagccacactgaccgccgatacctctagcagcacagcctacatgcagctgagcagcctgaccagcgaagatagcgccgtgtacttctgtgcccggtccatcacaacagtcgtgggctgcgctatggactattggggccagggaacaagcgtgaccgtgtctagtacgcgtgcctctacaaagggaccctccgtgtttcctctggctcccagcagcaagtctacaagcggaggaacagccgctctgggctgcctggtcaaggattactttcccgagcctgtgaccgtgtcctggaatagcggagcactgacaagcggcgtgcacacctttccagccgtgctgcaaagcagcggcctgtactctctgagcagcgtggtcacagtgcctagctctagcctgggcacccagacctacatctgcaatgtgaaccacaagcctagcaacaccaaggtggacaagagagtggaacccaagagctgtggtaccaaaggatgccagggaagcgccgaccatgtggtgtcaatttctggcgtgcccctgcaactccagccaaactctattcagaccaaagtcgatagcattgcctggaaaaaattgctgccctctcagaacgggtttcaccacattctcaaatgggaaaatggctctctgccctccaacacctccaacgatcggtttagctttatcgtcaagaatctgtccctgctcatcaaagcagcccagcagcaagactccggcctgtattgcctcgaagtcacctccatctccgggaaagtgcagacagctacattccaagtgttcgtctttgataaggtcgagaagcctagactccaaggacaggggaagattctggacagaggacggtgtcaggtggcactgtcttgccttgtcagccgcgacggcaatgtgtcttatgcttggtatcggggctccaagctgattcaaaccgctgggaatctgacatacctcgatgaagaggttgacatcaatgggacgcacacgtatacttgcaatgtctccaatcctgtcagctgggagtctcataccctgaacctgacacaggattgtcaaaatgcacatcaagagttccggttttggccgtttcttgtgattatcgtgattctgtctgccctcttcctcggaactctggcttgcttctgtgtctggcggcgcaaacggaaagagaaacagtctgagacttccccgaaagagtttctcacgatatacgaagatgtcaaggacctcaagacccgccgcaaccatgagcaagaacagacattcccaggcggaggctccacaatctactccatgattcagtcccagtctagcgccccaacctctcaagagcctgcttataccctgtacagtctgattcagccctccagaaagtccggctctcggaagaggaaccactctcctagcttcaactccaccatatatgaagtcattggcaagtctcagcccaaagcacagaatcctgccaggctgagcagaaaagaacttgagaatttcgacgtctactccagctctagacgggttaagttttccagatccgcagacgcacccgcttaccaacaagggcagaaccaactctacaatgaacttaatttggggcggagggaagagtacgacgttctggacaaaaggaggggacgagatcccgagatgggcggaaagcctcagcgaaggaagaatccgcaagaggggctttataacgaactccagaaagataaaatggcagaagcctatagtgagattgggatgaagggagaaaggaggaggggtaaaggtcacgatgggttgtaccaaggattgagcacagccactaaagatacctatgatgcgctccacatgcaggccctgccgccaagacgcgccaagagaagcggatctggcgtgaagcagaccctgaatttcgacctgctgaagctggctggcgacgtggaatccaacccaggccctggccatatgaccgagtacaagcccacggtgcgcctcgccacccgcgacgacgtccccagggccgtacgcaccctcgccgccgcgttcgccgactaccccgccacgcgccacaccgtcgatccggaccgccacatcgagcgggtcaccgagctgcaagaactcttcctcacgcgcgtcgggctcgacatcggcaaggtgtgggtcgcggacgacggcgccgcggtggcggtctggaccacgccggagagcgtcgaagcgggggcggtgttcgccgagatcggcccgcgcatggccgagttgagcggttcccggctggccgcgcagcaacagatggaaggcctcctggcgccgcaccggcccaaggagcccgcgtggttcctggccaccgtcggcgtctcgcccgaccaccagggcaagggtctgggcagcgccgtcgtgctccccggagtggaggcggccgagcgcgccggggtgcccgccttcctggagacctccgcgccccgcaacctccccttctacgagcggctcggcttcaccgtcaccgccgacgtcgaggtgcccgaaggaccgcgcacctggtgcatgacccgcaagcccggtgcctga

SEQ ID NO: 6128 - DNA, 5424 bp, Artificial Sequence
  Synthetic Polynucleotide
atggccttaccagtgaccgccttgctcctgccgctggccttgctgctccacgccgccaggccggaagtgcagctggttgaatctggcggaggactggttcaggctggcggatctctgagactgtcttgtgccgccagcggcagaacctttagcatgggctggtttagacaggcccctggcaaagagagagagttcgtcgccgccatcacatactctggcggcagcccttactacgccgactctgtgaagggcagattcaccatcagccgggacaacgccaagaacaccgtgtacctccagatgaacagcctgaagcctgaggacaccgccgtgtactactgcgccgccaatccaacatacggcagcgactggaacgccgagaattggggccagggaacccaagtgacagtgtctagcggtaccggcggaggcggatctggcggcggaggtagcggtggcggaggatctgaattcgacatccagatgacacagagccctagcagcctgtctgccagcgtgggagacagagtgaccatcacatgcaaggccagcgaccacatcaacaactggctggcctggtatcagcagaagcctggacaggcccctaagctgctgatctacggcgctaccacactggaaacaggcgtgcccagcagattttctggcagcggctctggcaccgactacaccctgacaatatccagcctccagcctgaggacttcgccacctactactgtcagcagagctggaacaccccttggacattcggccagggcaccaagctggaaatcaagagactcgagggacagcctaaggccaatcctaccgtgacactgttccctccaagcagcgaagaactccaggccaacaaggccacacttgtgtgcctgatctccgacttctaccctggggctgtgacagtggcttggaaggccgatggatctcctgtgaaagccggcgtggaaaccaccaagccatccaagcagagcaacaacaaatacgccgccagctcctacctgagcctgacacctgagcagtggaagtcccacagatcctacagctgccaagtgacccacgaaggcagcaccgtggaaaagacagtggcccctacagagtgcagcggatccaagggctgtcagggctctgccgatcacgtggtgtctatcagcggagtgcctctccagctccagcctaacagcatccagaccaaggtggactctatcgcctggaagaagctgctgcccagccagaatggcttccaccacatcctgaagtgggagaacggcagcctgcctagcaacaccagcaacgacagattcagcttcatcgtgaagaacctgagcctgctgattaaggccgctcagcagcaggatagcggcctgtactgtctggaagtgaccagcatcagcggcaaggtgcagaccgccacctttcaggtgttcgtgttcgacaaggtggaaaagccccggctgcaaggccagggcaagatccttgatagaggcagatgccaggtggccctgagctgtctggtttccagagatggcaacgtgtcctacgcctggtacagaggcagcaagctgatccagacagccggcaacctgacctacctggacgaggaagtggacatcaacggcacccacacctacacctgtaatgtgtctaaccccgtgtcctgggagagccacacactgaatctgacccaggactgccagaacgcccaccaagagttcagattctggcccttcctggtcatcatcgtgatcctgagcgccctgttcctgggcaccctggcctgtttttgcgtgtggcgcagaaagcgcaaagagaagcagagcgagacaagccccaaagagttcctgaccatctacgaggacgtgaaggatctgaaaacccggcggaaccacgaacaagagcagacctttcctggcggcggaagcaccatctacagcatgatccagagccagagcagcgcccctacaagccaagagccagcctacacactgtactccctgatccagcctagcagaaagagcggcagccggaagagaaatcacagccccagcttcaacagcacgatctacgaagtgatcggaaagtcccagcctaaggctcagaaccccgccagactgagccggaaagagctggaaaacttcgacgtgtacagcagcactagtagagtgaagttcagcagaagcgccgacgcccctgcctaccagcagggacagaaccaactgtacaacgagctgaacctgggcagacgggaagagtacgacgtgctggacaagcggagaggcagggaccctgagatgggcggaaagccccagcggagaaagaacccccaggaaggactgtataacgaactccagaaagacaagatggccgaagcctacagcgagatcggcatgaagggcgagcggagaagaggcaagggccacgatggcctgtaccagggcctgagcaccgccaccaaggacacctatgacgccctgcacatgcaggccctgcctccaagaagggccaagcgatctggatctggagcaacaaacttctcactactcaaacaagcaggtgacgtggaggagaatcccgggcctatggactggatttggcgcatccttttccttgtcggcgctgctaccggcgcgcattccttcgaacaagttcagcttcaacagcctggcgctgagctggtcaaacctggcgcttctgtgaagatgagctgcaaagccagcggctacgccttcagcagctactggatcaactggatgaagcagaaacccggccagggactcgaatggatcggccaaatctatcccggcgacggcgacaccaactacaacggcaagttcaagggcagagccacactgaccgccgatacctctagcagcacagcctacatgcagctgagcagcctgaccagcgaagatagcgccgtgtacttctgtgcccggtccatcacaacagtcgtgggctgcgctatggactattggggccagggaacaagcgtgaccgtgtctagtacgcgtgcctctacaaagggaccctccgtgtttcctctggctcccagcagcaagtctacaagcggaggaacagccgctctgggctgcctggtcaaggattactttcccgagcctgtgaccgtgtcctggaatagcggagcactgacaagcggcgtgcacacctttccagccgtgctgcaaagcagcggcctgtactctctgagcagcgtggtcacagtgcctagctctagcctgggcacccagacctacatctgcaatgtgaaccacaagcctagcaacaccaaggtggacaagagagtggaacccaagagctgtggtaccaaaggatgccagggaagcgccgaccatgtggtgtcaatttctggcgtgcccctgcaactccagccaaactctattcagaccaaagtcgatagcattgcctggaaaaaattgctgccctctcagaacgggtttcaccacattctcaaatgggaaaatggctctctgccctccaacacctccaacgatcggtttagctttatcgtcaagaatctgtccctgctcatcaaagcagcccagcagcaagactccggcctgtattgcctcgaagtcacctccatctccgggaaagtgcagacagctacattccaagtgttcgtctttgataaggtcgagaagcctagactccaaggacaggggaagattctggacagaggacggtgtcaggtggcactgtcttgccttgtcagccgcgacggcaatgtgtcttatgcttggtatcggggctccaagctgattcaaaccgctgggaatctgacatacctcgatgaagaggttgacatcaatgggacgcacacgtatacttgcaatgtctccaatcctgtcagctgggagtctcataccctgaacctgacacaggattgtcaaaatgcacatcaagagttccggttttggccgtttcttgtgattatcgtgattctgtctgccctcttcctcggaactctggcttgcttctgtgtctggcggcgcaaacggaaagagaaacagtctgagacttccccgaaagagtttctcacgatatacgaagatgtcaaggacctcaagacccgccgcaaccatgagcaagaacagacattcccaggcggaggctccacaatctactccatgattcagtcccagtctagcgccccaacctctcaagagcctgcttataccctgtacagtctgattcagccctccagaaagtccggctctcggaagaggaaccactctcctagcttcaactccaccatatatgaagtcattggcaagtctcagcccaaagcacagaatcctgccaggctgagcagaaaagaacttgagaatttcgacgtctactccagctctagacgggttaagttttccagatccgcagacgcacccgcttaccaacaagggcagaaccaactctacaatgaacttaatttggggcggagggaagagtacgacgttctggacaaaaggaggggacgagatcccgagatgggcggaaagcctcagcgaaggaagaatccgcaagaggggctttataacgaactccagaaagataaaatggcagaagcctatagtgagattgggatgaagggagaaaggaggaggggtaaaggtcacgatgggttgtaccaaggattgagcacagccactaaagatacctatgatgcgctccacatgcaggccctgccgccaagacgcgccaagagaagcggatctggcgtgaagcagaccctgaatttcgacctgctgaagctggctggcgacgtggaatccaacccaggccctggccatatgaccgagtacaagcccacggtgcgcctcgccacccgcgacgacgtccccagggccgtacgcaccctcgccgccgcgttcgccgactaccccgccacgcgccacaccgtcgatccggaccgccacatcgagcgggtcaccgagctgcaagaactcttcctcacgcgcgtcgggctcgacatcggcaaggtgtgggtcgcggacgacggcgccgcggtggcggtctggaccacgccggagagcgtcgaagcgggggcggtgttcgccgagatcggcccgcgcatggccgagttgagcggttcccggctggccgcgcagcaacagatggaaggcctcctggcgccgcaccggcccaaggagcccgcgtggttcctggccaccgtcggcgtctcgcccgaccaccagggcaagggtctgggcagcgccgtcgtgctccccggagtggaggcggccgagcgcgccggggtgcccgccttcctggagacctccgcgccccgcaacctccccttctacgagcggctcggcttcaccgtcaccgccgacgtcgaggtgcccgaaggaccgcgcacctggtgcatgacccgcaagcccggtgcctga

SEQ ID NO: 6129 - DNA, 5835 bp, Artificial Sequence
  Synthetic Polynucleotide
atggccttaccagtgaccgccttgctcctgccgctggccttgctgctccacgccgccaggccggaagtgcagctggttgaatctggcggaggactggttcaggctggcggatctctgagactgtcttgtgccgccagcggcagaacctttagcatgggctggtttagacaggcccctggcaaagagagagagttcgtcgccgccatcacatactctggcggcagcccttactacgccgactctgtgaagggcagattcaccatcagccgggacaacgccaagaacaccgtgtacctccagatgaacagcctgaagcctgaggacaccgccgtgtactactgcgccgccaatccaacatacggcagcgactggaacgccgagaattggggccagggaacccaagtgacagtgtctagcggtaccggcggaggcggatctggcggcggaggtagcggtggcggaggatctgaattcgacatccagatgacacagagccctagcagcctgtctgccagcgtgggagacagagtgaccatcacatgcaaggccagcgaccacatcaacaactggctggcctggtatcagcagaagcctggacaggcccctaagctgctgatctacggcgctaccacactggaaacaggcgtgcccagcagattttctggcagcggctctggcaccgactacaccctgacaatatccagcctccagcctgaggacttcgccacctactactgtcagcagagctggaacaccccttggacattcggccagggcaccaagctggaaatcaagagactcgagggacagcctaaggccaatcctaccgtgacactgttccctccaagcagcgaagaactccaggccaacaaggccacacttgtgtgcctgatctccgacttctaccctggggctgtgacagtggcttggaaggccgatggatctcctgtgaaagccggcgtggaaaccaccaagccatccaagcagagcaacaacaaatacgccgccagctcctacctgagcctgacacctgagcagtggaagtcccacagatcctacagctgccaagtgacccacgaaggcagcaccgtggaaaagacagtggcccctacagagtgcagcggatccaagggctgtcagggctctgccgatcacgtggtgtctatcagcggagtgcctctccagctccagcctaacagcatccagaccaaggtggactctatcgcctggaagaagctgctgcccagccagaatggcttccaccacatcctgaagtgggagaacggcagcctgcctagcaacaccagcaacgacagattcagcttcatcgtgaagaacctgagcctgctgattaaggccgctcagcagcaggatagcggcctgtactgtctggaagtgaccagcatcagcggcaaggtgcagaccgccacctttcaggtgttcgtgttcgacaaggtggaaaagccccggctgcaaggccagggcaagatccttgatagaggcagatgccaggtggccctgagctgtctggtttccagagatggcaacgtgtcctacgcctggtacagaggcagcaagctgatccagacagccggcaacctgacctacctggacgaggaagtggacatcaacggcacccacacctacacctgtaatgtgtctaaccccgtgtcctgggagagccacacactgaatctgacccaggactgccagaacgcccaccaagagttcagattctggcccttcctggtcatcatcgtgatcctgagcgccctgttcctgggcaccctggcctgtttttgcgtgtggcgcagaaagcgcaaagagaagcagagcgagacaagccccaaagagttcctgaccatctacgaggacgtgaaggatctgaaaacccggcggaaccacgaacaagagcagacctttcctggcggcggaagcaccatctacagcatgatccagagccagagcagcgcccctacaagccaagagccagcctacacactgtactccctgatccagcctagcagaaagagcggcagccggaagagaaatcacagccccagcttcaacagcacgatctacgaagtgatcggaaagtcccagcctaaggctcagaaccccgccagactgagccggaaagagctggaaaacttcgacgtgtacagcagcactagtagagtgaagttcagcagaagcgccgacgcccctgcctaccagcagggacagaaccaactgtacaacgagctgaacctgggcagacgggaagagtacgacgtgctggacaagcggagaggcagggaccctgagatgggcggaaagccccagcggagaaagaacccccaggaaggactgtataacgaactccagaaagacaagatggccgaagcctacagcgagatcggcatgaagggcgagcggagaagaggcaagggccacgatggcctgtaccagggcctgagcaccgccaccaaggacacctatgacgccctgcacatgcaggccctgcctccaagaagggccaagcgatctggatctggagcaacaaacttctcactactcaaacaagcaggtgacgtggaggagaatcccgggcctatggactggatttggcgcatccttttccttgtcggcgctgctaccggcgcgcattccgggcccgaagtgcaactggttgaatccggtggcggcctggtgcaagcaggcggatctctcagacttagctgtgccgcctccggcagaaccttcacaatgggatggtttaggcaggctccagggaaagagagagagttcgtcgccgccatctctctgtctcccacactggcctactacgccgactctgtgaaaggccggttcaccatctccagagataatgccaagaacaccgtggtgctgcaaatgaactctctgaaacccgaggatacagccctgtactattgtgccgctgaccggaagtccgtgatgagcatcagacccgattactggggacagggcacacaagtcacagtgtcctctggatccggcggcggaggatctggcggaggcggatctgggggcggaggctctttcgaacaagttcagcttcaacagcctggcgctgagctggtcaaacctggcgcttctgtgaagatgagctgcaaagccagcggctacgccttcagcagctactggatcaactggatgaagcagaaacccggccagggactcgaatggatcggccaaatctatcccggcgacggcgacaccaactacaacggcaagttcaagggcagagccacactgaccgccgatacctctagcagcacagcctacatgcagctgagcagcctgaccagcgaagatagcgccgtgtacttctgtgcccggtccatcacaacagtcgtgggctgcgctatggactattggggccagggaacaagcgtgaccgtgtctagtacgcgtgcctctacaaagggaccctccgtgtttcctctggctcccagcagcaagtctacaagcggaggaacagccgctctgggctgcctggtcaaggattactttcccgagcctgtgaccgtgtcctggaatagcggagcactgacaagcggcgtgcacacctttccagccgtgctgcaaagcagcggcctgtactctctgagcagcgtggtcacagtgcctagctctagcctgggcacccagacctacatctgcaatgtgaaccacaagcctagcaacaccaaggtggacaagagagtggaacccaagagctgtggtaccaaaggatgccagggaagcgccgaccatgtggtgtcaatttctggcgtgcccctgcaactccagccaaactctattcagaccaaagtcgatagcattgcctggaaaaaattgctgccctctcagaacgggtttcaccacattctcaaatgggaaaatggctctctgccctccaacacctccaacgatcggtttagctttatcgtcaagaatctgtccctgctcatcaaagcagcccagcagcaagactccggcctgtattgcctcgaagtcacctccatctccgggaaagtgcagacagctacattccaagtgttcgtctttgataaggtcgagaagcctagactccaaggacaggggaagattctggacagaggacggtgtcaggtggcactgtcttgccttgtcagccgcgacggcaatgtgtcttatgcttggtatcggggctccaagctgattcaaaccgctgggaatctgacatacctcgatgaagaggttgacatcaatgggacgcacacgtatacttgcaatgtctccaatcctgtcagctgggagtctcataccctgaacctgacacaggattgtcaaaatgcacatcaagagttccggttttggccgtttcttgtgattatcgtgattctgtctgccctcttcctcggaactctggcttgcttctgtgtctggcggcgcaaacggaaagagaaacagtctgagacttccccgaaagagtttctcacgatatacgaagatgtcaaggacctcaagacccgccgcaaccatgagcaagaacagacattcccaggcggaggctccacaatctactccatgattcagtcccagtctagcgccccaacctctcaagagcctgcttataccctgtacagtctgattcagccctccagaaagtccggctctcggaagaggaaccactctcctagcttcaactccaccatatatgaagtcattggcaagtctcagcccaaagcacagaatcctgccaggctgagcagaaaagaacttgagaatttcgacgtctactccagctctagacgggttaagttttccagatccgcagacgcacccgcttaccaacaagggcagaaccaactctacaatgaacttaatttggggcggagggaagagtacgacgttctggacaaaaggaggggacgagatcccgagatgggcggaaagcctcagcgaaggaagaatccgcaagaggggctttataacgaactccagaaagataaaatggcagaagcctatagtgagattgggatgaagggagaaaggaggaggggtaaaggtcacgatgggttgtaccaaggattgagcacagccactaaagatacctatgatgcgctccacatgcaggccctgccgccaagacgcgccaagagaagcggatctggcgtgaagcagaccctgaatttcgacctgctgaagctggctggcgacgtggaatccaacccaggccctggccatatgaccgagtacaagcccacggtgcgcctcgccacccgcgacgacgtccccagggccgtacgcaccctcgccgccgcgttcgccgactaccccgccacgcgccacaccgtcgatccggaccgccacatcgagcgggtcaccgagctgcaagaactcttcctcacgcgcgtcgggctcgacatcggcaaggtgtgggtcgcggacgacggcgccgcggtggcggtctggaccacgccggagagcgtcgaagcgggggcggtgttcgccgagatcggcccgcgcatggccgagttgagcggttcccggctggccgcgcagcaacagatggaaggcctcctggcgccgcaccggcccaaggagcccgcgtggttcctggccaccgtcggcgtctcgcccgaccaccagggcaagggtctgggcagcgccgtcgtgctccccggagtggaggcggccgagcgcgccggggtgcccgccttcctggagacctccgcgccccgcaacctccccttctacgagcggctcggcttcaccgtcaccgccgacgtcgaggtgcccgaaggaccgcgcacctggtgcatgacccgcaagcccggtgcctga

SEQ ID NO: 6130 - DNA, 5034 bp, Artificial Sequence
  Synthetic Polynucleotide
atggccttaccagtgaccgccttgctcctgccgctggccttgctgctccacgccgccaggccggaagtgcagctggttgaatctggcggaggactggttcaggctggcggatctctgagactgtcttgtgccgccagcggcagaacctttagcatgggctggtttagacaggcccctggcaaagagagagagttcgtcgccgccatcacatactctggcggcagcccttactacgccgactctgtgaagggcagattcaccatcagccgggacaacgccaagaacaccgtgtacctccagatgaacagcctgaagcctgaggacaccgccgtgtactactgcgccgccaatccaacatacggcagcgactggaacgccgagaattggggccagggaacccaagtgacagtgtctagcctcgagggacagcctaaggccaatcctaccgtgacactgttccctccaagcagcgaagaactccaggccaacaaggccacacttgtgtgcctgatctccgacttctaccctggggctgtgacagtggcttggaaggccgatggatctcctgtgaaagccggcgtggaaaccaccaagccatccaagcagagcaacaacaaatacgccgccagctcctacctgagcctgacacctgagcagtggaagtcccacagatcctacagctgccaagtgacccacgaaggcagcaccgtggaaaagacagtggcccctacagagtgcagcggatccaagggctgtcagggctctgccgatcacgtggtgtctatcagcggagtgcctctccagctccagcctaacagcatccagaccaaggtggactctatcgcctggaagaagctgctgcccagccagaatggcttccaccacatcctgaagtgggagaacggcagcctgcctagcaacaccagcaacgacagattcagcttcatcgtgaagaacctgagcctgctgattaaggccgctcagcagcaggatagcggcctgtactgtctggaagtgaccagcatcagcggcaaggtgcagaccgccacctttcaggtgttcgtgttcgacaaggtggaaaagccccggctgcaaggccagggcaagatccttgatagaggcagatgccaggtggccctgagctgtctggtttccagagatggcaacgtgtcctacgcctggtacagaggcagcaagctgatccagacagccggcaacctgacctacctggacgaggaagtggacatcaacggcacccacacctacacctgtaatgtgtctaaccccgtgtcctgggagagccacacactgaatctgacccaggactgccagaacgcccaccaagagttcagattctggcccttcctggtcatcatcgtgatcctgagcgccctgttcctgggcaccctggcctgtttttgcgtgtggcgcagaaagcgcaaagagaagcagagcgagacaagccccaaagagttcctgaccatctacgaggacgtgaaggatctgaaaacccggcggaaccacgaacaagagcagacctttcctggcggcggaagcaccatctacagcatgatccagagccagagcagcgcccctacaagccaagagccagcctacacactgtactccctgatccagcctagcagaaagagcggcagccggaagagaaatcacagccccagcttcaacagcacgatctacgaagtgatcggaaagtcccagcctaaggctcagaaccccgccagactgagccggaaagagctggaaaacttcgacgtgtacagcagcactagtagagtgaagttcagcagaagcgccgacgcccctgcctaccagcagggacagaaccaactgtacaacgagctgaacctgggcagacgggaagagtacgacgtgctggacaagcggagaggcagggaccctgagatgggcggaaagccccagcggagaaagaacccccaggaaggactgtataacgaactccagaaagacaagatggccgaagcctacagcgagatcggcatgaagggcgagcggagaagaggcaagggccacgatggcctgtaccagggcctgagcaccgccaccaaggacacctatgacgccctgcacatgcaggccctgcctccaagaagggccaagcgatctggatctggagcaacaaacttctcactactcaaacaagcaggtgacgtggaggagaatcccgggcctatggactggatttggcgcatccttttccttgtcggcgctgctaccggcgcgcattccgggcccgaagtgcaactggttgaatccggtggcggcctggtgcaagcaggcggatctctcagacttagctgtgccgcctccggcagaaccttcacaatgggatggtttaggcaggctccagggaaagagagagagttcgtcgccgccatctctctgtctcccacactggcctactacgccgactctgtgaaaggccggttcaccatctccagagataatgccaagaacaccgtggtgctgcaaatgaactctctgaaacccgaggatacagccctgtactattgtgccgctgaccggaagtccgtgatgagcatcagacccgattactggggacagggcacacaagtcacagtgtcctctacgcgtgcctctacaaagggaccctccgtgtttcctctggctcccagcagcaagtctacaagcggaggaacagccgctctgggctgcctggtcaaggattactttcccgagcctgtgaccgtgtcctggaatagcggagcactgacaagcggcgtgcacacctttccagccgtgctgcaaagcagcggcctgtactctctgagcagcgtggtcacagtgcctagctctagcctgggcacccagacctacatctgcaatgtgaaccacaagcctagcaacaccaaggtggacaagagagtggaacccaagagctgtggtaccaaaggatgccagggaagcgccgaccatgtggtgtcaatttctggcgtgcccctgcaactccagccaaactctattcagaccaaagtcgatagcattgcctggaaaaaattgctgccctctcagaacgggtttcaccacattctcaaatgggaaaatggctctctgccctccaacacctccaacgatcggtttagctttatcgtcaagaatctgtccctgctcatcaaagcagcccagcagcaagactccggcctgtattgcctcgaagtcacctccatctccgggaaagtgcagacagctacattccaagtgttcgtctttgataaggtcgagaagcctagactccaaggacaggggaagattctggacagaggacggtgtcaggtggcactgtcttgccttgtcagccgcgacggcaatgtgtcttatgcttggtatcggggctccaagctgattcaaaccgctgggaatctgacatacctcgatgaagaggttgacatcaatgggacgcacacgtatacttgcaatgtctccaatcctgtcagctgggagtctcataccctgaacctgacacaggattgtcaaaatgcacatcaagagttccggttttggccgtttcttgtgattatcgtgattctgtctgccctcttcctcggaactctggcttgcttctgtgtctggcggcgcaaacggaaagagaaacagtctgagacttccccgaaagagtttctcacgatatacgaagatgtcaaggacctcaagacccgccgcaaccatgagcaagaacagacattcccaggcggaggctccacaatctactccatgattcagtcccagtctagcgccccaacctctcaagagcctgcttataccctgtacagtctgattcagccctccagaaagtccggctctcggaagaggaaccactctcctagcttcaactccaccatatatgaagtcattggcaagtctcagcccaaagcacagaatcctgccaggctgagcagaaaagaacttgagaatttcgacgtctactccagctctagacgggttaagttttccagatccgcagacgcacccgcttaccaacaagggcagaaccaactctacaatgaacttaatttggggcggagggaagagtacgacgttctggacaaaaggaggggacgagatcccgagatgggcggaaagcctcagcgaaggaagaatccgcaagaggggctttataacgaactccagaaagataaaatggcagaagcctatagtgagattgggatgaagggagaaaggaggaggggtaaaggtcacgatgggttgtaccaaggattgagcacagccactaaagatacctatgatgcgctccacatgcaggccctgccgccaagacgcgccaagagaagcggatctggcgtgaagcagaccctgaatttcgacctgctgaagctggctggcgacgtggaatccaacccaggccctggccatatgaccgagtacaagcccacggtgcgcctcgccacccgcgacgacgtccccagggccgtacgcaccctcgccgccgcgttcgccgactaccccgccacgcgccacaccgtcgatccggaccgccacatcgagcgggtcaccgagctgcaagaactcttcctcacgcgcgtcgggctcgacatcggcaaggtgtgggtcgcggacgacggcgccgcggtggcggtctggaccacgccggagagcgtcgaagcgggggcggtgttcgccgagatcggcccgcgcatggccgagttgagcggttcccggctggccgcgcagcaacagatggaaggcctcctggcgccgcaccggcccaaggagcccgcgtggttcctggccaccgtcggcgtctcgcccgaccaccagggcaagggtctgggcagcgccgtcgtgctccccggagtggaggcggccgagcgcgccggggtgcccgccttcctggagacctccgcgccccgcaacctccccttctacgagcggctcggcttcaccgtcaccgccgacgtcgaggtgcccgaaggaccgcgcacctggtgcatgacccgcaagcccggtgcctga

SEQ ID NO: 6131 - DNA, 5058 bp, Artificial Sequence
  Synthetic Polynucleotide
atggccttaccagtgaccgccttgctcctgccgctggccttgctgctccacgccgccaggccggacatccagatgacacagagccctagcagcctgtctgccagcgtgggagacagagtgaccatcacatgcaaggccagcgaccacatcaacaactggctggcctggtatcagcagaagcctggacaggcccctaagctgctgatctacggcgctaccacactggaaacaggcgtgcccagcagattttctggcagcggctctggcaccgactacaccctgacaatatccagcctccagcctgaggacttcgccacctactactgtcagcagagctggaacaccccttggacattcggccagggcaccaagctggaaatcaagagactcgaggacctgaagaacgtgttcccacctgaggtggccgtgttcgagcctagcgaggccgagatcagccacacccagaaagccaccctcgtgtgcctggctaccggcttctaccccgaccatgtggaactgtcttggtgggtcaacggcaaagaggtgcacagcggcgtgtctaccgacccccagccactgaaagaacagcccgccctgaacgacagccggtactgcctgagcagcagactgagagtgtccgccaccttctggcagaacccccggaaccacttcagatgccaggtgcagttctacggcctgagcgagaacgacgagtggacccaggacagagccaagcccgtgacccagatcgtgtctgccgaagcctggggcagagccgattgcggatccaagggctgtcagggctctgccgatcacgtggtgtctatcagcggagtgcctctccagctccagcctaacagcatccagaccaaggtggactctatcgcctggaagaagctgctgcccagccagaatggcttccaccacatcctgaagtgggagaacggcagcctgcctagcaacaccagcaacgacagattcagcttcatcgtgaagaacctgagcctgctgattaaggccgctcagcagcaggatagcggcctgtactgtctggaagtgaccagcatcagcggcaaggtgcagaccgccacctttcaggtgttcgtgttcgacaaggtggaaaagccccggctgcaaggccagggcaagatccttgatagaggcagatgccaggtggccctgagctgtctggtttccagagatggcaacgtgtcctacgcctggtacagaggcagcaagctgatccagacagccggcaacctgacctacctggacgaggaagtggacatcaacggcacccacacctacacctgtaatgtgtctaaccccgtgtcctgggagagccacacactgaatctgacccaggactgccagaacgcccaccaagagttcagattctggcccttcctggtcatcatcgtgatcctgagcgccctgttcctgggcaccctggcctgtttttgcgtgtggcgcagaaagcgcaaagagaagcagagcgagacaagccccaaagagttcctgaccatctacgaggacgtgaaggatctgaaaacccggcggaaccacgaacaagagcagacctttcctggcggcggaagcaccatctacagcatgatccagagccagagcagcgcccctacaagccaagagccagcctacacactgtactccctgatccagcctagcagaaagagcggcagccggaagagaaatcacagccccagcttcaacagcacgatctacgaagtgatcggaaagtcccagcctaaggctcagaaccccgccagactgagccggaaagagctggaaaacttcgacgtgtacagcagcactagtagagtgaagttcagcagaagcgccgacgcccctgcctaccagcagggacagaaccaactgtacaacgagctgaacctgggcagacgggaagagtacgacgtgctggacaagcggagaggcagggaccctgagatgggcggaaagccccagcggagaaagaacccccaggaaggactgtataacgaactccagaaagacaagatggccgaagcctacagcgagatcggcatgaagggcgagcggagaagaggcaagggccacgatggcctgtaccagggcctgagcaccgccaccaaggacacctatgacgccctgcacatgcaggccctgcctccaagaagggccaagcgatctggatctggagcaacaaacttctcactactcaaacaagcaggtgacgtggaggagaatcccgggcctatggactggatttggcgcatccttttccttgtcggcgctgctaccggcgcgcattccttcgaacaagttcagcttcaacagcctggcgctgagctggtcaaacctggcgcttctgtgaagatgagctgcaaagccagcggctacgccttcagcagctactggatcaactggatgaagcagaaacccggccagggactcgaatggatcggccaaatctatcccggcgacggcgacaccaactacaacggcaagttcaagggcagagccacactgaccgccgatacctctagcagcacagcctacatgcagctgagcagcctgaccagcgaagatagcgccgtgtacttctgtgcccggtccatcacaacagtcgtgggctgcgctatggactattggggccagggaacaagcgtgaccgtgtctagtacgcgtatccagaaccctgatcctgccgtgtaccagctgcgggatagcaagagcagcgacaagagcgtgtgtctgttcaccgacttcgacagccagaccaacgtgtcccagagcaaggactccgacgtgtacatcaccgataagaccgtgctggacatgcggagcatggacttcaagagcaactccgccgtggcctggtccaacaagtccgatttcgcctgcgccaacgccttcaacaacagcattatccccgaggacacattcttcccaagccccgagagcagctgcggtaccaaaggatgccagggaagcgccgaccatgtggtgtcaatttctggcgtgcccctgcaactccagccaaactctattcagaccaaagtcgatagcattgcctggaaaaaattgctgccctctcagaacgggtttcaccacattctcaaatgggaaaatggctctctgccctccaacacctccaacgatcggtttagctttatcgtcaagaatctgtccctgctcatcaaagcagcccagcagcaagactccggcctgtattgcctcgaagtcacctccatctccgggaaagtgcagacagctacattccaagtgttcgtctttgataaggtcgagaagcctagactccaaggacaggggaagattctggacagaggacggtgtcaggtggcactgtcttgccttgtcagccgcgacggcaatgtgtcttatgcttggtatcggggctccaagctgattcaaaccgctgggaatctgacatacctcgatgaagaggttgacatcaatgggacgcacacgtatacttgcaatgtctccaatcctgtcagctgggagtctcataccctgaacctgacacaggattgtcaaaatgcacatcaagagttccggttttggccgtttcttgtgattatcgtgattctgtctgccctcttcctcggaactctggcttgcttctgtgtctggcggcgcaaacggaaagagaaacagtctgagacttccccgaaagagtttctcacgatatacgaagatgtcaaggacctcaagacccgccgcaaccatgagcaagaacagacattcccaggcggaggctccacaatctactccatgattcagtcccagtctagcgccccaacctctcaagagcctgcttataccctgtacagtctgattcagccctccagaaagtccggctctcggaagaggaaccactctcctagcttcaactccaccatatatgaagtcattggcaagtctcagcccaaagcacagaatcctgccaggctgagcagaaaagaacttgagaatttcgacgtctactccagctctagacgggttaagttttccagatccgcagacgcacccgcttaccaacaagggcagaaccaactctacaatgaacttaatttggggcggagggaagagtacgacgttctggacaaaaggaggggacgagatcccgagatgggcggaaagcctcagcgaaggaagaatccgcaagaggggctttataacgaactccagaaagataaaatggcagaagcctatagtgagattgggatgaagggagaaaggaggaggggtaaaggtcacgatgggttgtaccaaggattgagcacagccactaaagatacctatgatgcgctccacatgcaggccctgccgccaagacgcgccaagagaagcggatctggcgtgaagcagaccctgaatttcgacctgctgaagctggctggcgacgtggaatccaacccaggccctggccatatgaccgagtacaagcccacggtgcgcctcgccacccgcgacgacgtccccagggccgtacgcaccctcgccgccgcgttcgccgactaccccgccacgcgccacaccgtcgatccggaccgccacatcgagcgggtcaccgagctgcaagaactcttcctcacgcgcgtcgggctcgacatcggcaaggtgtgggtcgcggacgacggcgccgcggtggcggtctggaccacgccggagagcgtcgaagcgggggcggtgttcgccgagatcggcccgcgcatggccgagttgagcggttcccggctggccgcgcagcaacagatggaaggcctcctggcgccgcaccggcccaaggagcccgcgtggttcctggccaccgtcggcgtctcgcccgaccaccagggcaagggtctgggcagcgccgtcgtgctccccggagtggaggcggccgagcgcgccggggtgcccgccttcctggagacctccgcgccccgcaacctccccttctacgagcggctcggcttcaccgtcaccgccgacgtcgaggtgcccgaaggaccgcgcacctggtgcatgacccgcaagcccggtgcctga

SEQ ID NO: 6132 - DNA, 5469 bp, Artificial Sequence
  Synthetic Polynucleotide
atggccttaccagtgaccgccttgctcctgccgctggccttgctgctccacgccgccaggccggaagtgcagctggttgaatctggcggaggactggttcaggctggcggatctctgagactgtcttgtgccgccagcggcagaacctttagcatgggctggtttagacaggcccctggcaaagagagagagttcgtcgccgccatcacatactctggcggcagcccttactacgccgactctgtgaagggcagattcaccatcagccgggacaacgccaagaacaccgtgtacctccagatgaacagcctgaagcctgaggacaccgccgtgtactactgcgccgccaatccaacatacggcagcgactggaacgccgagaattggggccagggaacccaagtgacagtgtctagcggtaccggcggaggcggatctggcggcggaggtagcggtggcggaggatctgaattcgacatccagatgacacagagccctagcagcctgtctgccagcgtgggagacagagtgaccatcacatgcaaggccagcgaccacatcaacaactggctggcctggtatcagcagaagcctggacaggcccctaagctgctgatctacggcgctaccacactggaaacaggcgtgcccagcagattttctggcagcggctctggcaccgactacaccctgacaatatccagcctccagcctgaggacttcgccacctactactgtcagcagagctggaacaccccttggacattcggccagggcaccaagctggaaatcaagagactcgaggacctgaagaacgtgttcccacctgaggtggccgtgttcgagcctagcgaggccgagatcagccacacccagaaagccaccctcgtgtgcctggctaccggcttctaccccgaccatgtggaactgtcttggtgggtcaacggcaaagaggtgcacagcggcgtgtctaccgacccccagccactgaaagaacagcccgccctgaacgacagccggtactgcctgagcagcagactgagagtgtccgccaccttctggcagaacccccggaaccacttcagatgccaggtgcagttctacggcctgagcgagaacgacgagtggacccaggacagagccaagcccgtgacccagatcgtgtctgccgaagcctggggcagagccgattgcggatccaagggctgtcagggctctgccgatcacgtggtgtctatcagcggagtgcctctccagctccagcctaacagcatccagaccaaggtggactctatcgcctggaagaagctgctgcccagccagaatggcttccaccacatcctgaagtgggagaacggcagcctgcctagcaacaccagcaacgacagattcagcttcatcgtgaagaacctgagcctgctgattaaggccgctcagcagcaggatagcggcctgtactgtctggaagtgaccagcatcagcggcaaggtgcagaccgccacctttcaggtgttcgtgttcgacaaggtggaaaagccccggctgcaaggccagggcaagatccttgatagaggcagatgccaggtggccctgagctgtctggtttccagagatggcaacgtgtcctacgcctggtacagaggcagcaagctgatccagacagccggcaacctgacctacctggacgaggaagtggacatcaacggcacccacacctacacctgtaatgtgtctaaccccgtgtcctgggagagccacacactgaatctgacccaggactgccagaacgcccaccaagagttcagattctggcccttcctggtcatcatcgtgatcctgagcgccctgttcctgggcaccctggcctgtttttgcgtgtggcgcagaaagcgcaaagagaagcagagcgagacaagccccaaagagttcctgaccatctacgaggacgtgaaggatctgaaaacccggcggaaccacgaacaagagcagacctttcctggcggcggaagcaccatctacagcatgatccagagccagagcagcgcccctacaagccaagagccagcctacacactgtactccctgatccagcctagcagaaagagcggcagccggaagagaaatcacagccccagcttcaacagcacgatctacgaagtgatcggaaagtcccagcctaaggctcagaaccccgccagactgagccggaaagagctggaaaacttcgacgtgtacagcagcactagtagagtgaagttcagcagaagcgccgacgcccctgcctaccagcagggacagaaccaactgtacaacgagctgaacctgggcagacgggaagagtacgacgtgctggacaagcggagaggcagggaccctgagatgggcggaaagccccagcggagaaagaacccccaggaaggactgtataacgaactccagaaagacaagatggccgaagcctacagcgagatcggcatgaagggcgagcggagaagaggcaagggccacgatggcctgtaccagggcctgagcaccgccaccaaggacacctatgacgccctgcacatgcaggccctgcctccaagaagggccaagcgatctggatctggagcaacaaacttctcactactcaaacaagcaggtgacgtggaggagaatcccgggcctatggactggatttggcgcatccttttccttgtcggcgctgctaccggcgcgcattccttcgaacaagttcagcttcaacagcctggcgctgagctggtcaaacctggcgcttctgtgaagatgagctgcaaagccagcggctacgccttcagcagctactggatcaactggatgaagcagaaacccggccagggactcgaatggatcggccaaatctatcccggcgacggcgacaccaactacaacggcaagttcaagggcagagccacactgaccgccgatacctctagcagcacagcctacatgcagctgagcagcctgaccagcgaagatagcgccgtgtacttctgtgcccggtccatcacaacagtcgtgggctgcgctatggactattggggccagggaacaagcgtgaccgtgtctagtacgcgtatccagaaccctgatcctgccgtgtaccagctgcgggatagcaagagcagcgacaagagcgtgtgtctgttcaccgacttcgacagccagaccaacgtgtcccagagcaaggactccgacgtgtacatcaccgataagaccgtgctggacatgcggagcatggacttcaagagcaactccgccgtggcctggtccaacaagtccgatttcgcctgcgccaacgccttcaacaacagcattatccccgaggacacattcttcccaagccccgagagcagctgcggtaccaaaggatgccagggaagcgccgaccatgtggtgtcaatttctggcgtgcccctgcaactccagccaaactctattcagaccaaagtcgatagcattgcctggaaaaaattgctgccctctcagaacgggtttcaccacattctcaaatgggaaaatggctctctgccctccaacacctccaacgatcggtttagctttatcgtcaagaatctgtccctgctcatcaaagcagcccagcagcaagactccggcctgtattgcctcgaagtcacctccatctccgggaaagtgcagacagctacattccaagtgttcgtctttgataaggtcgagaagcctagactccaaggacaggggaagattctggacagaggacggtgtcaggtggcactgtcttgccttgtcagccgcgacggcaatgtgtcttatgcttggtatcggggctccaagctgattcaaaccgctgggaatctgacatacctcgatgaagaggttgacatcaatgggacgcacacgtatacttgcaatgtctccaatcctgtcagctgggagtctcataccctgaacctgacacaggattgtcaaaatgcacatcaagagttccggttttggccgtttcttgtgattatcgtgattctgtctgccctcttcctcggaactctggcttgcttctgtgtctggcggcgcaaacggaaagagaaacagtctgagacttccccgaaagagtttctcacgatatacgaagatgtcaaggacctcaagacccgccgcaaccatgagcaagaacagacattcccaggcggaggctccacaatctactccatgattcagtcccagtctagcgccccaacctctcaagagcctgcttataccctgtacagtctgattcagccctccagaaagtccggctctcggaagaggaaccactctcctagcttcaactccaccatatatgaagtcattggcaagtctcagcccaaagcacagaatcctgccaggctgagcagaaaagaacttgagaatttcgacgtctactccagctctagacgggttaagttttccagatccgcagacgcacccgcttaccaacaagggcagaaccaactctacaatgaacttaatttggggcggagggaagagtacgacgttctggacaaaaggaggggacgagatcccgagatgggcggaaagcctcagcgaaggaagaatccgcaagaggggctttataacgaactccagaaagataaaatggcagaagcctatagtgagattgggatgaagggagaaaggaggaggggtaaaggtcacgatgggttgtaccaaggattgagcacagccactaaagatacctatgatgcgctccacatgcaggccctgccgccaagacgcgccaagagaagcggatctggcgtgaagcagaccctgaatttcgacctgctgaagctggctggcgacgtggaatccaacccaggccctggccatatgaccgagtacaagcccacggtgcgcctcgccacccgcgacgacgtccccagggccgtacgcaccctcgccgccgcgttcgccgactaccccgccacgcgccacaccgtcgatccggaccgccacatcgagcgggtcaccgagctgcaagaactcttcctcacgcgcgtcgggctcgacatcggcaaggtgtgggtcgcggacgacggcgccgcggtggcggtctggaccacgccggagagcgtcgaagcgggggcggtgttcgccgagatcggcccgcgcatggccgagttgagcggttcccggctggccgcgcagcaacagatggaaggcctcctggcgccgcaccggcccaaggagcccgcgtggttcctggccaccgtcggcgtctcgcccgaccaccagggcaagggtctgggcagcgccgtcgtgctccccggagtggaggcggccgagcgcgccggggtgcccgccttcctggagacctccgcgccccgcaacctccccttctacgagcggctcggcttcaccgtcaccgccgacgtcgaggtgcccgaaggaccgcgcacctggtgcatgacccgcaagcccggtgcctga

SEQ ID NO: 6133 - DNA, 5880 bp, Artificial Sequence
  Synthetic Polynucleotide
atggccttaccagtgaccgccttgctcctgccgctggccttgctgctccacgccgccaggccggaagtgcagctggttgaatctggcggaggactggttcaggctggcggatctctgagactgtcttgtgccgccagcggcagaacctttagcatgggctggtttagacaggcccctggcaaagagagagagttcgtcgccgccatcacatactctggcggcagcccttactacgccgactctgtgaagggcagattcaccatcagccgggacaacgccaagaacaccgtgtacctccagatgaacagcctgaagcctgaggacaccgccgtgtactactgcgccgccaatccaacatacggcagcgactggaacgccgagaattggggccagggaacccaagtgacagtgtctagcggtaccggcggaggcggatctggcggcggaggtagcggtggcggaggatctgaattcgacatccagatgacacagagccctagcagcctgtctgccagcgtgggagacagagtgaccatcacatgcaaggccagcgaccacatcaacaactggctggcctggtatcagcagaagcctggacaggcccctaagctgctgatctacggcgctaccacactggaaacaggcgtgcccagcagattttctggcagcggctctggcaccgactacaccctgacaatatccagcctccagcctgaggacttcgccacctactactgtcagcagagctggaacaccccttggacattcggccagggcaccaagctggaaatcaagagactcgaggacctgaagaacgtgttcccacctgaggtggccgtgttcgagcctagcgaggccgagatcagccacacccagaaagccaccctcgtgtgcctggctaccggcttctaccccgaccatgtggaactgtcttggtgggtcaacggcaaagaggtgcacagcggcgtgtctaccgacccccagccactgaaagaacagcccgccctgaacgacagccggtactgcctgagcagcagactgagagtgtccgccaccttctggcagaacccccggaaccacttcagatgccaggtgcagttctacggcctgagcgagaacgacgagtggacccaggacagagccaagcccgtgacccagatcgtgtctgccgaagcctggggcagagccgattgcggatccaagggctgtcagggctctgccgatcacgtggtgtctatcagcggagtgcctctccagctccagcctaacagcatccagaccaaggtggactctatcgcctggaagaagctgctgcccagccagaatggcttccaccacatcctgaagtgggagaacggcagcctgcctagcaacaccagcaacgacagattcagcttcatcgtgaagaacctgagcctgctgattaaggccgctcagcagcaggatagcggcctgtactgtctggaagtgaccagcatcagcggcaaggtgcagaccgccacctttcaggtgttcgtgttcgacaaggtggaaaagccccggctgcaaggccagggcaagatccttgatagaggcagatgccaggtggccctgagctgtctggtttccagagatggcaacgtgtcctacgcctggtacagaggcagcaagctgatccagacagccggcaacctgacctacctggacgaggaagtggacatcaacggcacccacacctacacctgtaatgtgtctaaccccgtgtcctgggagagccacacactgaatctgacccaggactgccagaacgcccaccaagagttcagattctggcccttcctggtcatcatcgtgatcctgagcgccctgttcctgggcaccctggcctgtttttgcgtgtggcgcagaaagcgcaaagagaagcagagcgagacaagccccaaagagttcctgaccatctacgaggacgtgaaggatctgaaaacccggcggaaccacgaacaagagcagacctttcctggcggcggaagcaccatctacagcatgatccagagccagagcagcgcccctacaagccaagagccagcctacacactgtactccctgatccagcctagcagaaagagcggcagccggaagagaaatcacagccccagcttcaacagcacgatctacgaagtgatcggaaagtcccagcctaaggctcagaaccccgccagactgagccggaaagagctggaaaacttcgacgtgtacagcagcactagtagagtgaagttcagcagaagcgccgacgcccctgcctaccagcagggacagaaccaactgtacaacgagctgaacctgggcagacgggaagagtacgacgtgctggacaagcggagaggcagggaccctgagatgggcggaaagccccagcggagaaagaacccccaggaaggactgtataacgaactccagaaagacaagatggccgaagcctacagcgagatcggcatgaagggcgagcggagaagaggcaagggccacgatggcctgtaccagggcctgagcaccgccaccaaggacacctatgacgccctgcacatgcaggccctgcctccaagaagggccaagcgatctggatctggagcaacaaacttctcactactcaaacaagcaggtgacgtggaggagaatcccgggcctatggactggatttggcgcatccttttccttgtcggcgctgctaccggcgcgcattccgggcccgaagtgcaactggttgaatccggtggcggcctggtgcaagcaggcggatctctcagacttagctgtgccgcctccggcagaaccttcacaatgggatggtttaggcaggctccagggaaagagagagagttcgtcgccgccatctctctgtctcccacactggcctactacgccgactctgtgaaaggccggttcaccatctccagagataatgccaagaacaccgtggtgctgcaaatgaactctctgaaacccgaggatacagccctgtactattgtgccgctgaccggaagtccgtgatgagcatcagacccgattactggggacagggcacacaagtcacagtgtcctctggatccggcggcggaggatctggcggaggcggatctgggggcggaggctctttcgaacaagttcagcttcaacagcctggcgctgagctggtcaaacctggcgcttctgtgaagatgagctgcaaagccagcggctacgccttcagcagctactggatcaactggatgaagcagaaacccggccagggactcgaatggatcggccaaatctatcccggcgacggcgacaccaactacaacggcaagttcaagggcagagccacactgaccgccgatacctctagcagcacagcctacatgcagctgagcagcctgaccagcgaagatagcgccgtgtacttctgtgcccggtccatcacaacagtcgtgggctgcgctatggactattggggccagggaacaagcgtgaccgtgtctagtacgcgtatccagaaccctgatcctgccgtgtaccagctgcgggatagcaagagcagcgacaagagcgtgtgtctgttcaccgacttcgacagccagaccaacgtgtcccagagcaaggactccgacgtgtacatcaccgataagaccgtgctggacatgcggagcatggacttcaagagcaactccgccgtggcctggtccaacaagtccgatttcgcctgcgccaacgccttcaacaacagcattatccccgaggacacattcttcccaagccccgagagcagctgcggtaccaaaggatgccagggaagcgccgaccatgtggtgtcaatttctggcgtgcccctgcaactccagccaaactctattcagaccaaagtcgatagcattgcctggaaaaaattgctgccctctcagaacgggtttcaccacattctcaaatgggaaaatggctctctgccctccaacacctccaacgatcggtttagctttatcgtcaagaatctgtccctgctcatcaaagcagcccagcagcaagactccggcctgtattgcctcgaagtcacctccatctccgggaaagtgcagacagctacattccaagtgttcgtctttgataaggtcgagaagcctagactccaaggacaggggaagattctggacagaggacggtgtcaggtggcactgtcttgccttgtcagccgcgacggcaatgtgtcttatgcttggtatcggggctccaagctgattcaaaccgctgggaatctgacatacctcgatgaagaggttgacatcaatgggacgcacacgtatacttgcaatgtctccaatcctgtcagctgggagtctcataccctgaacctgacacaggattgtcaaaatgcacatcaagagttccggttttggccgtttcttgtgattatcgtgattctgtctgccctcttcctcggaactctggcttgcttctgtgtctggcggcgcaaacggaaagagaaacagtctgagacttccccgaaagagtttctcacgatatacgaagatgtcaaggacctcaagacccgccgcaaccatgagcaagaacagacattcccaggcggaggctccacaatctactccatgattcagtcccagtctagcgccccaacctctcaagagcctgcttataccctgtacagtctgattcagccctccagaaagtccggctctcggaagaggaaccactctcctagcttcaactccaccatatatgaagtcattggcaagtctcagcccaaagcacagaatcctgccaggctgagcagaaaagaacttgagaatttcgacgtctactccagctctagacgggttaagttttccagatccgcagacgcacccgcttaccaacaagggcagaaccaactctacaatgaacttaatttggggcggagggaagagtacgacgttctggacaaaaggaggggacgagatcccgagatgggcggaaagcctcagcgaaggaagaatccgcaagaggggctttataacgaactccagaaagataaaatggcagaagcctatagtgagattgggatgaagggagaaaggaggaggggtaaaggtcacgatgggttgtaccaaggattgagcacagccactaaagatacctatgatgcgctccacatgcaggccctgccgccaagacgcgccaagagaagcggatctggcgtgaagcagaccctgaatttcgacctgctgaagctggctggcgacgtggaatccaacccaggccctggccatatgaccgagtacaagcccacggtgcgcctcgccacccgcgacgacgtccccagggccgtacgcaccctcgccgccgcgttcgccgactaccccgccacgcgccacaccgtcgatccggaccgccacatcgagcgggtcaccgagctgcaagaactcttcctcacgcgcgtcgggctcgacatcggcaaggtgtgggtcgcggacgacggcgccgcggtggcggtctggaccacgccggagagcgtcgaagcgggggcggtgttcgccgagatcggcccgcgcatggccgagttgagcggttcccggctggccgcgcagcaacagatggaaggcctcctggcgccgcaccggcccaaggagcccgcgtggttcctggccaccgtcggcgtctcgcccgaccaccagggcaagggtctgggcagcgccgtcgtgctccccggagtggaggcggccgagcgcgccggggtgcccgccttcctggagacctccgcgccccgcaacctccccttctacgagcggctcggcttcaccgtcaccgccgacgtcgaggtgcccgaaggaccgcgcacctggtgcatgacccgcaagcccggtgcctga

SEQ ID NO: 6134 - DNA, 5079 bp, Artificial Sequence
  Synthetic Polynucleotide
atggccttaccagtgaccgccttgctcctgccgctggccttgctgctccacgccgccaggccggaagtgcagctggttgaatctggcggaggactggttcaggctggcggatctctgagactgtcttgtgccgccagcggcagaacctttagcatgggctggtttagacaggcccctggcaaagagagagagttcgtcgccgccatcacatactctggcggcagcccttactacgccgactctgtgaagggcagattcaccatcagccgggacaacgccaagaacaccgtgtacctccagatgaacagcctgaagcctgaggacaccgccgtgtactactgcgccgccaatccaacatacggcagcgactggaacgccgagaattggggccagggaacccaagtgacagtgtctagcctcgaggacctgaagaacgtgttcccacctgaggtggccgtgttcgagcctagcgaggccgagatcagccacacccagaaagccaccctcgtgtgcctggctaccggcttctaccccgaccatgtggaactgtcttggtgggtcaacggcaaagaggtgcacagcggcgtgtctaccgacccccagccactgaaagaacagcccgccctgaacgacagccggtactgcctgagcagcagactgagagtgtccgccaccttctggcagaacccccggaaccacttcagatgccaggtgcagttctacggcctgagcgagaacgacgagtggacccaggacagagccaagcccgtgacccagatcgtgtctgccgaagcctggggcagagccgattgcggatccaagggctgtcagggctctgccgatcacgtggtgtctatcagcggagtgcctctccagctccagcctaacagcatccagaccaaggtggactctatcgcctggaagaagctgctgcccagccagaatggcttccaccacatcctgaagtgggagaacggcagcctgcctagcaacaccagcaacgacagattcagcttcatcgtgaagaacctgagcctgctgattaaggccgctcagcagcaggatagcggcctgtactgtctggaagtgaccagcatcagcggcaaggtgcagaccgccacctttcaggtgttcgtgttcgacaaggtggaaaagccccggctgcaaggccagggcaagatccttgatagaggcagatgccaggtggccctgagctgtctggtttccagagatggcaacgtgtcctacgcctggtacagaggcagcaagctgatccagacagccggcaacctgacctacctggacgaggaagtggacatcaacggcacccacacctacacctgtaatgtgtctaaccccgtgtcctgggagagccacacactgaatctgacccaggactgccagaacgcccaccaagagttcagattctggcccttcctggtcatcatcgtgatcctgagcgccctgttcctgggcaccctggcctgtttttgcgtgtggcgcagaaagcgcaaagagaagcagagcgagacaagccccaaagagttcctgaccatctacgaggacgtgaaggatctgaaaacccggcggaaccacgaacaagagcagacctttcctggcggcggaagcaccatctacagcatgatccagagccagagcagcgcccctacaagccaagagccagcctacacactgtactccctgatccagcctagcagaaagagcggcagccggaagagaaatcacagccccagcttcaacagcacgatctacgaagtgatcggaaagtcccagcctaaggctcagaaccccgccagactgagccggaaagagctggaaaacttcgacgtgtacagcagcactagtagagtgaagttcagcagaagcgccgacgcccctgcctaccagcagggacagaaccaactgtacaacgagctgaacctgggcagacgggaagagtacgacgtgctggacaagcggagaggcagggaccctgagatgggcggaaagccccagcggagaaagaacccccaggaaggactgtataacgaactccagaaagacaagatggccgaagcctacagcgagatcggcatgaagggcgagcggagaagaggcaagggccacgatggcctgtaccagggcctgagcaccgccaccaaggacacctatgacgccctgcacatgcaggccctgcctccaagaagggccaagcgatctggatctggagcaacaaacttctcactactcaaacaagcaggtgacgtggaggagaatcccgggcctatggactggatttggcgcatccttttccttgtcggcgctgctaccggcgcgcattccgggcccgaagtgcaactggttgaatccggtggcggcctggtgcaagcaggcggatctctcagacttagctgtgccgcctccggcagaaccttcacaatgggatggtttaggcaggctccagggaaagagagagagttcgtcgccgccatctctctgtctcccacactggcctactacgccgactctgtgaaaggccggttcaccatctccagagataatgccaagaacaccgtggtgctgcaaatgaactctctgaaacccgaggatacagccctgtactattgtgccgctgaccggaagtccgtgatgagcatcagacccgattactggggacagggcacacaagtcacagtgtcctctacgcgtatccagaaccctgatcctgccgtgtaccagctgcgggatagcaagagcagcgacaagagcgtgtgtctgttcaccgacttcgacagccagaccaacgtgtcccagagcaaggactccgacgtgtacatcaccgataagaccgtgctggacatgcggagcatggacttcaagagcaactccgccgtggcctggtccaacaagtccgatttcgcctgcgccaacgccttcaacaacagcattatccccgaggacacattcttcccaagccccgagagcagctgcggtaccaaaggatgccagggaagcgccgaccatgtggtgtcaatttctggcgtgcccctgcaactccagccaaactctattcagaccaaagtcgatagcattgcctggaaaaaattgctgccctctcagaacgggtttcaccacattctcaaatgggaaaatggctctctgccctccaacacctccaacgatcggtttagctttatcgtcaagaatctgtccctgctcatcaaagcagcccagcagcaagactccggcctgtattgcctcgaagtcacctccatctccgggaaagtgcagacagctacattccaagtgttcgtctttgataaggtcgagaagcctagactccaaggacaggggaagattctggacagaggacggtgtcaggtggcactgtcttgccttgtcagccgcgacggcaatgtgtcttatgcttggtatcggggctccaagctgattcaaaccgctgggaatctgacatacctcgatgaagaggttgacatcaatgggacgcacacgtatacttgcaatgtctccaatcctgtcagctgggagtctcataccctgaacctgacacaggattgtcaaaatgcacatcaagagttccggttttggccgtttcttgtgattatcgtgattctgtctgccctcttcctcggaactctggcttgcttctgtgtctggcggcgcaaacggaaagagaaacagtctgagacttccccgaaagagtttctcacgatatacgaagatgtcaaggacctcaagacccgccgcaaccatgagcaagaacagacattcccaggcggaggctccacaatctactccatgattcagtcccagtctagcgccccaacctctcaagagcctgcttataccctgtacagtctgattcagccctccagaaagtccggctctcggaagaggaaccactctcctagcttcaactccaccatatatgaagtcattggcaagtctcagcccaaagcacagaatcctgccaggctgagcagaaaagaacttgagaatttcgacgtctactccagctctagacgggttaagttttccagatccgcagacgcacccgcttaccaacaagggcagaaccaactctacaatgaacttaatttggggcggagggaagagtacgacgttctggacaaaaggaggggacgagatcccgagatgggcggaaagcctcagcgaaggaagaatccgcaagaggggctttataacgaactccagaaagataaaatggcagaagcctatagtgagattgggatgaagggagaaaggaggaggggtaaaggtcacgatgggttgtaccaaggattgagcacagccactaaagatacctatgatgcgctccacatgcaggccctgccgccaagacgcgccaagagaagcggatctggcgtgaagcagaccctgaatttcgacctgctgaagctggctggcgacgtggaatccaacccaggccctggccatatgaccgagtacaagcccacggtgcgcctcgccacccgcgacgacgtccccagggccgtacgcaccctcgccgccgcgttcgccgactaccccgccacgcgccacaccgtcgatccggaccgccacatcgagcgggtcaccgagctgcaagaactcttcctcacgcgcgtcgggctcgacatcggcaaggtgtgggtcgcggacgacggcgccgcggtggcggtctggaccacgccggagagcgtcgaagcgggggcggtgttcgccgagatcggcccgcgcatggccgagttgagcggttcccggctggccgcgcagcaacagatggaaggcctcctggcgccgcaccggcccaaggagcccgcgtggttcctggccaccgtcggcgtctcgcccgaccaccagggcaagggtctgggcagcgccgtcgtgctccccggagtggaggcggccgagcgcgccggggtgcccgccttcctggagacctccgcgccccgcaacctccccttctacgagcggctcggcttcaccgtcaccgccgacgtcgaggtgcccgaaggaccgcgcacctggtgcatgacccgcaagcccggtgcctga

SEQ ID NO: 6135 - DNA, 2574 bp, Artificial Sequence
  Synthetic Polynucleotide
atggccttaccagtgaccgccttgctcctgccgctggccttgctgctccacgccgccaggccggcatgcgaagtgcagctgcttgaaagtggcggcggactgattcagcctggcggatctctgagactgagctgtgccgccagcggcttcaccttttctagccacgccatgacctgggtccgacaggcacctggaaaagggcttgaatgggtgtccgccatcagcggctctggcgattacacacactacgccgacagcgtgaagggcagattcaccatcagcagagacaacagcaagaacaccgtgtacctccagatgaacagcctgagagccgaggacagcgccgtgtattattgcgccaaggatgaggatggcggcagcctgcttggacacagaggacaaggcaccctggtcaccgtttcttccggtaccggcggaggcggatctggcggcggaggtagcggtggcggaggatctgaattcggatctctcgagaagggctgtcagggctctgccgatcacgtggtgtctatcagcggagtgcctctccagctccagcctaacagcatccagaccaaggtggactctatcgcctggaagaagctgctgcccagccagaatggcttccaccacatcctgaagtgggagaacggcagcctgcctagcaacaccagcaacgacagattcagcttcatcgtgaagaacctgagcctgctgattaaggccgctcagcagcaggatagcggcctgtactgtctggaagtgaccagcatcagcggcaaggtgcagaccgccacctttcaggtgttcgtgttcgacaaggtggaaaagccccggctgcaaggccagggcaagatccttgatagaggcagatgccaggtggccctgagctgtctggtttccagagatggcaacgtgtcctacgcctggtacagaggcagcaagctgatccagacagccggcaacctgacctacctggacgaggaagtggacatcaacggcacccacacctacacctgtaatgtgtctaaccccgtgtcctgggagagccacacactgaatctgacccaggactgccagaacgcccaccaagagttcagattctggcccttcctggtcatcatcgtgatcctgagcgccctgttcctgggcaccctggcctgtttttgcgtgtggcgcagaaagcgcaaagagaagcagagcgagacaagccccaaagagttcctgaccatctacgaggacgtgaaggatctgaaaacccggcggaaccacgaacaagagcagacctttcctggcggcggaagcaccatctacagcatgatccagagccagagcagcgcccctacaagccaagagccagcctacacactgtactccctgatccagcctagcagaaagagcggcagccggaagagaaatcacagccccagcttcaacagcacgatctacgaagtgatcggaaagtcccagcctaaggctcagaaccccgccagactgagccggaaagagctggaaaacttcgacgtgtacagcagcactagtagagtgaagttcagcagaagcgccgacgcccctgcctaccagcagggacagaaccaactgtacaacgagctgaacctgggcagacgggaagagtacgacgtgctggacaagcggagaggcagggaccctgagatgggcggaaagccccagcggagaaagaacccccaggaaggactgtataacgaactccagaaagacaagatggccgaagcctacagcgagatcggcatgaagggcgagcggagaagaggcaagggccacgatggcctgtaccagggcctgagcaccgccaccaaggacacctatgacgccctgcacatgcaggccctgcctccaagaagggccaagcgatctggatctggagcaacaaacttctcactactcaaacaagcaggtgacgtggaggagaatcccgggcctactagaggccatatgaccgagtacaagcccacggtgcgcctcgccacccgcgacgacgtccccagggccgtacgcaccctcgccgccgcgttcgccgactaccccgccacgcgccacaccgtcgatccggaccgccacatcgagcgggtcaccgagctgcaagaactcttcctcacgcgcgtcgggctcgacatcggcaaggtgtgggtcgcggacgacggcgccgcggtggcggtctggaccacgccggagagcgtcgaagcgggggcggtgttcgccgagatcggcccgcgcatggccgagttgagcggttcccggctggccgcgcagcaacagatggaaggcctcctggcgccgcaccggcccaaggagcccgcgtggttcctggccaccgtcggcgtctcgcccgaccaccagggcaagggtctgggcagcgccgtcgtgctccccggagtggaggcggccgagcgcgccggggtgcccgccttcctggagacctccgcgccccgcaacctccccttctacgagcggctcggcttcaccgtcaccgccgacgtcgaggtgcccgaaggaccgcgcacctggtgcatgacccgcaagcccggtgcctga

SEQ ID NO: 6136 - DNA, 2187 bp, Artificial Sequence
  Synthetic Polynucleotide
atggccttaccagtgaccgccttgctcctgccgctggccttgctgctccacgccgccaggccggacatccagatgacacagagccctagcagcctgtctgccagcgtgggagacagagtgaccatcacatgcaaggccagcgaccacatcaacaactggctggcctggtatcagcagaagcctggacaggcccctaagctgctgatctacggcgctaccacactggaaacaggcgtgcccagcagattttctggcagcggctctggcaccgactacaccctgacaatatccagcctccagcctgaggacttcgccacctactactgtcagcagagctggaacaccccttggacattcggccagggcaccaagctggaaatcaagagaggcggaggcggaagtggaggcggaggatctggcggcggaggctctcaagttcagcttcaacagcctggcgctgagctggtcaaacctggcgcttctgtgaagatgagctgcaaagccagcggctacgccttcagcagctactggatcaactggatgaagcagaaacccggccagggactcgaatggatcggccaaatctatcccggcgacggcgacaccaactacaacggcaagttcaagggcagagccacactgaccgccgatacctctagcagcacagcctacatgcagctgagcagcctgaccagcgaagatagcgccgtgtacttctgtgcccggtccatcacaacagtcgtgggctgcgctatggactattggggccagggaacaagcgtgaccgtgtctagtacgcgtaagggctgtcagggctctgccgatcacgtggtgtctatcagcggagtgcctctccagctccagcctaacagcatccagaccaaggtggactctatcgcctggaagaagctgctgcccagccagaatggcttccaccacatcctgaagtgggagaacggcagcctgcctagcaacaccagcaacgacagattcagcttcatcgtgaagaacctgagcctgctgattaaggccgctcagcagcaggatagcggcctgtactgtctggaagtgaccagcatcagcggcaaggtgcagaccgccacctttcaggtgttcgtgttcgacaaggtggaaaagccccggctgcaaggccagggcaagatccttgatagaggcagatgccaggtggccctgagctgtctggtttccagagatggcaacgtgtcctacgcctggtacagaggcagcaagctgatccagacagccggcaacctgacctacctggacgaggaagtggacatcaacggcacccacacctacacctgtaatgtgtctaaccccgtgtcctgggagagccacacactgaatctgacccaggactgccagaacgcccaccaagagttcagattctggcccttcctggtcatcatcgtgatcctgagcgccctgttcctgggcaccctggcctgtttttgcgtgtggcgcagaaagcgcaaagagaagcagagcgagacaagccccaaagagttcctgaccatctacgaggacgtgaaggatctgaaaacccggcggaaccacgaacaagagcagacctttcctggcggcggaagcaccatctacagcatgatccagagccagagcagcgcccctacaagccaagagccagcctacacactgtactccctgatccagcctagcagaaagagcggcagccggaagagaaatcacagccccagcttcaacagcacgatctacgaagtgatcggaaagtcccagcctaaggctcagaaccccgccagactgagccggaaagagctggaaaacttcgacgtgtacagcagcactagtagagtgaagttcagcagaagcgccgacgcccctgcctaccagcagggacagaaccaactgtacaacgagctgaacctgggcagacgggaagagtacgacgtgctggacaagcggagaggcagggaccctgagatgggcggaaagccccagcggagaaagaacccccaggaaggactgtataacgaactccagaaagacaagatggccgaagcctacagcgagatcggcatgaagggcgagcggagaagaggcaagggccacgatggcctgtaccagggcctgagcaccgccaccaaggacacctatgacgccctgcacatgcaggccctgcctccaaga

SEQ ID NO: 6137 - DNA, 2187 bp, Artificial Sequence
  Synthetic Polynucleotide
atggccttaccagtgaccgccttgctcctgccgctggccttgctgctccacgccgccaggccggagatcgtgctgacacagagccctgccaccctgtctctgagccctggcgaaagagccaccctgagctgtagagccagccagagcgtgtccagctacctggcctggtatcagcagaagcccggccaggctccccggctgctgatctacgatgccagcaatagagccaccggcatccccgccagattttccggctctggcagcggcaccgacttcaccctgaccatcagctccctggaacccgaggacttcgccgtgtactactgccagcagcggagcaactggcccatcacattcggccagggcacccggctggaaatcaaaggcggaggcggaagtggaggcggaggatctggcggcggaggctctgaagtgcagctggtggaatcaggcggcggactggtgcagcctggcagaagcctgagactgagctgtgccgccagcggcttcaccttcaacgactacgccatgcactgggtgcgccaggcccctggaaaaggactggaatgggtgtccacaatcagctggaacagcggcagcatcggctacgccgatagcgtgaagggccggttcaccatcagccgggacaacgccaagaagtccctgtacctccagatgaacagcctgcgggccgaggacacagccctgtactattgcgccaaggacatccagtacggcaactactactacggcatggacgtgtggggccagggaaccaccgtgaccgtgtcatctacgcgtaagggctgtcagggctctgccgatcacgtggtgtctatcagcggagtgcctctccagctccagcctaacagcatccagaccaaggtggactctatcgcctggaagaagctgctgcccagccagaatggcttccaccacatcctgaagtgggagaacggcagcctgcctagcaacaccagcaacgacagattcagcttcatcgtgaagaacctgagcctgctgattaaggccgctcagcagcaggatagcggcctgtactgtctggaagtgaccagcatcagcggcaaggtgcagaccgccacctttcaggtgttcgtgttcgacaaggtggaaaagccccggctgcaaggccagggcaagatccttgatagaggcagatgccaggtggccctgagctgtctggtttccagagatggcaacgtgtcctacgcctggtacagaggcagcaagctgatccagacagccggcaacctgacctacctggacgaggaagtggacatcaacggcacccacacctacacctgtaatgtgtctaaccccgtgtcctgggagagccacacactgaatctgacccaggactgccagaacgcccaccaagagttcagattctggcccttcctggtcatcatcgtgatcctgagcgccctgttcctgggcaccctggcctgtttttgcgtgtggcgcagaaagcgcaaagagaagcagagcgagacaagccccaaagagttcctgaccatctacgaggacgtgaaggatctgaaaacccggcggaaccacgaacaagagcagacctttcctggcggcggaagcaccatctacagcatgatccagagccagagcagcgcccctacaagccaagagccagcctacacactgtactccctgatccagcctagcagaaagagcggcagccggaagagaaatcacagccccagcttcaacagcacgatctacgaagtgatcggaaagtcccagcctaaggctcagaaccccgccagactgagccggaaagagctggaaaacttcgacgtgtacagcagcactagtagagtgaagttcagcagaagcgccgacgcccctgcctaccagcagggacagaaccaactgtacaacgagctgaacctgggcagacgggaagagtacgacgtgctggacaagcggagaggcagggaccctgagatgggcggaaagccccagcggagaaagaacccccaggaaggactgtataacgaactccagaaagacaagatggccgaagcctacagcgagatcggcatgaagggcgagcggagaagaggcaagggccacgatggcctgtaccagggcctgagcaccgccaccaaggacacctatgacgccctgcacatgcaggccctgcctccaaga

SEQ ID NO: 6138 - DNA, 1809 bp, Artificial Sequence
  Synthetic Polynucleotide
atggccttaccagtgaccgccttgctcctgccgctggccttgctgctccacgccgccaggccggaagtgcagctggttgaatctggcggaggactggttcaggctggcggatctctgagactgtcttgtgccgccagcggcagaacctttagcatgggctggtttagacaggcccctggcaaagagagagagttcgtcgccgccatcacatactctggcggcagcccttactacgccgactctgtgaagggcagattcaccatcagccgggacaacgccaagaacaccgtgtacctccagatgaacagcctgaagcctgaggacaccgccgtgtactactgcgccgccaatccaacatacggcagcgactggaacgccgagaattggggccagggaacccaagtgacagtgtctagcacgcgtaagggctgtcagggctctgccgatcacgtggtgtctatcagcggagtgcctctccagctccagcctaacagcatccagaccaaggtggactctatcgcctggaagaagctgctgcccagccagaatggcttccaccacatcctgaagtgggagaacggcagcctgcctagcaacaccagcaacgacagattcagcttcatcgtgaagaacctgagcctgctgattaaggccgctcagcagcaggatagcggcctgtactgtctggaagtgaccagcatcagcggcaaggtgcagaccgccacctttcaggtgttcgtgttcgacaaggtggaaaagccccggctgcaaggccagggcaagatccttgatagaggcagatgccaggtggccctgagctgtctggtttccagagatggcaacgtgtcctacgcctggtacagaggcagcaagctgatccagacagccggcaacctgacctacctggacgaggaagtggacatcaacggcacccacacctacacctgtaatgtgtctaaccccgtgtcctgggagagccacacactgaatctgacccaggactgccagaacgcccaccaagagttcagattctggcccttcctggtcatcatcgtgatcctgagcgccctgttcctgggcaccctggcctgtttttgcgtgtggcgcagaaagcgcaaagagaagcagagcgagacaagccccaaagagttcctgaccatctacgaggacgtgaaggatctgaaaacccggcggaaccacgaacaagagcagacctttcctggcggcggaagcaccatctacagcatgatccagagccagagcagcgcccctacaagccaagagccagcctacacactgtactccctgatccagcctagcagaaagagcggcagccggaagagaaatcacagccccagcttcaacagcacgatctacgaagtgatcggaaagtcccagcctaaggctcagaaccccgccagactgagccggaaagagctggaaaacttcgacgtgtacagcagcactagtagagtgaagttcagcagaagcgccgacgcccctgcctaccagcagggacagaaccaactgtacaacgagctgaacctgggcagacgggaagagtacgacgtgctggacaagcggagaggcagggaccctgagatgggcggaaagccccagcggagaaagaacccccaggaaggactgtataacgaactccagaaagacaagatggccgaagcctacagcgagatcggcatgaagggcgagcggagaagaggcaagggccacgatggcctgtaccagggcctgagcaccgccaccaaggacacctatgacgccctgcacatgcaggccctgcctccaaga

SEQ ID NO: 6139 - DNA, 1809 bp, Artificial Sequence
  Synthetic Polynucleotide
atggccttaccagtgaccgccttgctcctgccgctggccttgctgctccacgccgccaggccgcagctccagttgcaagagagcggccctggcttggtaaaaccttccgagacccttagcctcacatgcacggttagtgggggcagcatttcctcaggtgattactattggggatggattcggcaacccccgggtaaaggattggagtggattggtcatatttattatagtggagcgacgtactacaacccaagtctcaaatccagggttacaatatccgtcgatacgagcaggaaccaattcagcttgaaactttctagtgtcaccgcagcagacacagccgtctattactgtacgcgggatgactccagtaattggcggtcccgagggcaagggacactggtcacggtctcctcaacgcgtaagggctgtcagggctctgccgatcacgtggtgtctatcagcggagtgcctctccagctccagcctaacagcatccagaccaaggtggactctatcgcctggaagaagctgctgcccagccagaatggcttccaccacatcctgaagtgggagaacggcagcctgcctagcaacaccagcaacgacagattcagcttcatcgtgaagaacctgagcctgctgattaaggccgctcagcagcaggatagcggcctgtactgtctggaagtgaccagcatcagcggcaaggtgcagaccgccacctttcaggtgttcgtgttcgacaaggtggaaaagccccggctgcaaggccagggcaagatccttgatagaggcagatgccaggtggccctgagctgtctggtttccagagatggcaacgtgtcctacgcctggtacagaggcagcaagctgatccagacagccggcaacctgacctacctggacgaggaagtggacatcaacggcacccacacctacacctgtaatgtgtctaaccccgtgtcctgggagagccacacactgaatctgacccaggactgccagaacgcccaccaagagttcagattctggcccttcctggtcatcatcgtgatcctgagcgccctgttcctgggcaccctggcctgtttttgcgtgtggcgcagaaagcgcaaagagaagcagagcgagacaagccccaaagagttcctgaccatctacgaggacgtgaaggatctgaaaacccggcggaaccacgaacaagagcagacctttcctggcggcggaagcaccatctacagcatgatccagagccagagcagcgcccctacaagccaagagccagcctacacactgtactccctgatccagcctagcagaaagagcggcagccggaagagaaatcacagccccagcttcaacagcacgatctacgaagtgatcggaaagtcccagcctaaggctcagaaccccgccagactgagccggaaagagctggaaaacttcgacgtgtacagcagcactagtagagtgaagttcagcagaagcgccgacgcccctgcctaccagcagggacagaaccaactgtacaacgagctgaacctgggcagacgggaagagtacgacgtgctggacaagcggagaggcagggaccctgagatgggcggaaagccccagcggagaaagaacccccaggaaggactgtataacgaactccagaaagacaagatggccgaagcctacagcgagatcggcatgaagggcgagcggagaagaggcaagggccacgatggcctgtaccagggcctgagcaccgccaccaaggacacctatgacgccctgcacatgcaggccctgcctccaaga

SEQ ID NO: 6140 - DNA, 1809 bp, Artificial Sequence
  Synthetic Polynucleotide
atggccttaccagtgaccgccttgctcctgccgctggccttgctgctccacgccgccaggccgcagctccagctgcaagagtctggacctggcctggtcaagcctagcgagacactgagcctgacctgtaccgtgtccggcgatagcatcagcagcggcgattactactggggctggatcagacagcctcctggcaaaggactggaatggatcggccacatctactacagcggcgtgacctactacaaccccagcctgaagtccagagtgaccatcagcgtggacaccagccggaaccagttctccctgaagctgtctagcgtgacagccgccgataccgccgtgtactactgcaccagagaggacagcagcaactggcggagtagaggccagggaacactggtcacagttagctctacgcgtaagggctgtcagggctctgccgatcacgtggtgtctatcagcggagtgcctctccagctccagcctaacagcatccagaccaaggtggactctatcgcctggaagaagctgctgcccagccagaatggcttccaccacatcctgaagtgggagaacggcagcctgcctagcaacaccagcaacgacagattcagcttcatcgtgaagaacctgagcctgctgattaaggccgctcagcagcaggatagcggcctgtactgtctggaagtgaccagcatcagcggcaaggtgcagaccgccacctttcaggtgttcgtgttcgacaaggtggaaaagccccggctgcaaggccagggcaagatccttgatagaggcagatgccaggtggccctgagctgtctggtttccagagatggcaacgtgtcctacgcctggtacagaggcagcaagctgatccagacagccggcaacctgacctacctggacgaggaagtggacatcaacggcacccacacctacacctgtaatgtgtctaaccccgtgtcctgggagagccacacactgaatctgacccaggactgccagaacgcccaccaagagttcagattctggcccttcctggtcatcatcgtgatcctgagcgccctgttcctgggcaccctggcctgtttttgcgtgtggcgcagaaagcgcaaagagaagcagagcgagacaagccccaaagagttcctgaccatctacgaggacgtgaaggatctgaaaacccggcggaaccacgaacaagagcagacctttcctggcggcggaagcaccatctacagcatgatccagagccagagcagcgcccctacaagccaagagccagcctacacactgtactccctgatccagcctagcagaaagagcggcagccggaagagaaatcacagccccagcttcaacagcacgatctacgaagtgatcggaaagtcccagcctaaggctcagaaccccgccagactgagccggaaagagctggaaaacttcgacgtgtacagcagcactagtagagtgaagttcagcagaagcgccgacgcccctgcctaccagcagggacagaaccaactgtacaacgagctgaacctgggcagacgggaagagtacgacgtgctggacaagcggagaggcagggaccctgagatgggcggaaagccccagcggagaaagaacccccaggaaggactgtataacgaactccagaaagacaagatggccgaagcctacagcgagatcggcatgaagggcgagcggagaagaggcaagggccacgatggcctgtaccagggcctgagcaccgccaccaaggacacctatgacgccctgcacatgcaggccctgcctccaaga

SEQ ID NO: 6141 - DNA, 1815 bp, Artificial Sequence
  Synthetic Polynucleotide
atggccttaccagtgaccgccttgctcctgccgctggccttgctgctccacgccgccaggccggaagttcagctgcaagagtctggcggaggactggttcaacctggcggaagcctgagactgtcttgtgccgcctctggcagaaccttcagcagcctgttcatgggctggttcagacaggcccctggcaaagagagagaactggtcgccgccatcagccggtacagcctgtacacctactacgccgacagcgtgaagggcagattcaccatcagcgccgacaacgccaagaacgccgtgtacctccagatgaacagcctgaagccagaggacacagccgtgtactactgcgccagcaaacttgagtacaccagcaacgactacgacagctggggccagggaacccaagtgacagtctcttctacgcgtaagggctgtcagggctctgccgatcacgtggtgtctatcagcggagtgcctctccagctccagcctaacagcatccagaccaaggtggactctatcgcctggaagaagctgctgcccagccagaatggcttccaccacatcctgaagtgggagaacggcagcctgcctagcaacaccagcaacgacagattcagcttcatcgtgaagaacctgagcctgctgattaaggccgctcagcagcaggatagcggcctgtactgtctggaagtgaccagcatcagcggcaaggtgcagaccgccacctttcaggtgttcgtgttcgacaaggtggaaaagccccggctgcaaggccagggcaagatccttgatagaggcagatgccaggtggccctgagctgtctggtttccagagatggcaacgtgtcctacgcctggtacagaggcagcaagctgatccagacagccggcaacctgacctacctggacgaggaagtggacatcaacggcacccacacctacacctgtaatgtgtctaaccccgtgtcctgggagagccacacactgaatctgacccaggactgccagaacgcccaccaagagttcagattctggcccttcctggtcatcatcgtgatcctgagcgccctgttcctgggcaccctggcctgtttttgcgtgtggcgcagaaagcgcaaagagaagcagagcgagacaagccccaaagagttcctgaccatctacgaggacgtgaaggatctgaaaacccggcggaaccacgaacaagagcagacctttcctggcggcggaagcaccatctacagcatgatccagagccagagcagcgcccctacaagccaagagccagcctacacactgtactccctgatccagcctagcagaaagagcggcagccggaagagaaatcacagccccagcttcaacagcacgatctacgaagtgatcggaaagtcccagcctaaggctcagaaccccgccagactgagccggaaagagctggaaaacttcgacgtgtacagcagcactagtagagtgaagttcagcagaagcgccgacgcccctgcctaccagcagggacagaaccaactgtacaacgagctgaacctgggcagacgggaagagtacgacgtgctggacaagcggagaggcagggaccctgagatgggcggaaagccccagcggagaaagaacccccaggaaggactgtataacgaactccagaaagacaagatggccgaagcctacagcgagatcggcatgaagggcgagcggagaagaggcaagggccacgatggcctgtaccagggcctgagcaccgccaccaaggacacctatgacgccctgcacatgcaggccctgcctccaaga

SEQ ID NO: 6142 - DNA, 1839 bp, Artificial Sequence
  Synthetic Polynucleotide
atggccttaccagtgaccgccttgctcctgccgctggccttgctgctccacgccgccaggccggaagtgcagctggttgaatctggcggaggactggttcagcctggcggatctctgagactgtcttgtgccgcctctggcttcgccagcgactactatatcatcggctggttcagacaggcccctggcaaagagagagagggcgtcagctgtatcagcagcagatacgccaacaccaactacgccgacagcgtgaagggcagattcaccatcagccgggacaacgccaagaacaccgtgtacctccagatgaacagcctgaagcctgaggacaccgccgtgtactactgtgccgccgacaccagaagatacacctgtcctgacattgccaccatgcaccggaacttcgattcttggggccagggcacactggtcaccgtttcttctacgcgtaagggctgtcagggctctgccgatcacgtggtgtctatcagcggagtgcctctccagctccagcctaacagcatccagaccaaggtggactctatcgcctggaagaagctgctgcccagccagaatggcttccaccacatcctgaagtgggagaacggcagcctgcctagcaacaccagcaacgacagattcagcttcatcgtgaagaacctgagcctgctgattaaggccgctcagcagcaggatagcggcctgtactgtctggaagtgaccagcatcagcggcaaggtgcagaccgccacctttcaggtgttcgtgttcgacaaggtggaaaagccccggctgcaaggccagggcaagatccttgatagaggcagatgccaggtggccctgagctgtctggtttccagagatggcaacgtgtcctacgcctggtacagaggcagcaagctgatccagacagccggcaacctgacctacctggacgaggaagtggacatcaacggcacccacacctacacctgtaatgtgtctaaccccgtgtcctgggagagccacacactgaatctgacccaggactgccagaacgcccaccaagagttcagattctggcccttcctggtcatcatcgtgatcctgagcgccctgttcctgggcaccctggcctgtttttgcgtgtggcgcagaaagcgcaaagagaagcagagcgagacaagccccaaagagttcctgaccatctacgaggacgtgaaggatctgaaaacccggcggaaccacgaacaagagcagacctttcctggcggcggaagcaccatctacagcatgatccagagccagagcagcgcccctacaagccaagagccagcctacacactgtactccctgatccagcctagcagaaagagcggcagccggaagagaaatcacagccccagcttcaacagcacgatctacgaagtgatcggaaagtcccagcctaaggctcagaaccccgccagactgagccggaaagagctggaaaacttcgacgtgtacagcagcactagtagagtgaagttcagcagaagcgccgacgcccctgcctaccagcagggacagaaccaactgtacaacgagctgaacctgggcagacgggaagagtacgacgtgctggacaagcggagaggcagggaccctgagatgggcggaaagccccagcggagaaagaacccccaggaaggactgtataacgaactccagaaagacaagatggccgaagcctacagcgagatcggcatgaagggcgagcggagaagaggcaagggccacgatggcctgtaccagggcctgagcaccgccaccaaggacacctatgacgccctgcacatgcaggccctgcctccaaga

SEQ ID NO: 6143 - DNA, 1827 bp, Artificial Sequence
  Synthetic Polynucleotide
atggccttaccagtgaccgccttgctcctgccgctggccttgctgctccacgccgccaggccggaagtgcaactggtggaatctggaggctctctggtgcagccagggggaagcctgagactgtcttgtgccgcttccggcttcaccttcgacgactacgccatgagctgggtgcgccaggtgccaggcaaaggcctggaatgggtgtccagcatcaactggagcggcacccacaccgattacgccgactccgtgaaaggcagattcacaatcagcagaaacaacgccaacaataccctgtacctgcagatgaactccctgaagtctgaggatacagcagtgtattattgcgccaagaactggcgggacgccggcaccacttggtttgagaaaagcggctctgccggacagggaacccaagtgacagtgtcctccacgcgtaagggctgtcagggctctgccgatcacgtggtgtctatcagcggagtgcctctccagctccagcctaacagcatccagaccaaggtggactctatcgcctggaagaagctgctgcccagccagaatggcttccaccacatcctgaagtgggagaacggcagcctgcctagcaacaccagcaacgacagattcagcttcatcgtgaagaacctgagcctgctgattaaggccgctcagcagcaggatagcggcctgtactgtctggaagtgaccagcatcagcggcaaggtgcagaccgccacctttcaggtgttcgtgttcgacaaggtggaaaagccccggctgcaaggccagggcaagatccttgatagaggcagatgccaggtggccctgagctgtctggtttccagagatggcaacgtgtcctacgcctggtacagaggcagcaagctgatccagacagccggcaacctgacctacctggacgaggaagtggacatcaacggcacccacacctacacctgtaatgtgtctaaccccgtgtcctgggagagccacacactgaatctgacccaggactgccagaacgcccaccaagagttcagattctggcccttcctggtcatcatcgtgatcctgagcgccctgttcctgggcaccctggcctgtttttgcgtgtggcgcagaaagcgcaaagagaagcagagcgagacaagccccaaagagttcctgaccatctacgaggacgtgaaggatctgaaaacccggcggaaccacgaacaagagcagacctttcctggcggcggaagcaccatctacagcatgatccagagccagagcagcgcccctacaagccaagagccagcctacacactgtactccctgatccagcctagcagaaagagcggcagccggaagagaaatcacagccccagcttcaacagcacgatctacgaagtgatcggaaagtcccagcctaaggctcagaaccccgccagactgagccggaaagagctggaaaacttcgacgtgtacagcagcactagtagagtgaagttcagcagaagcgccgacgcccctgcctaccagcagggacagaaccaactgtacaacgagctgaacctgggcagacgggaagagtacgacgtgctggacaagcggagaggcagggaccctgagatgggcggaaagccccagcggagaaagaacccccaggaaggactgtataacgaactccagaaagacaagatggccgaagcctacagcgagatcggcatgaagggcgagcggagaagaggcaagggccacgatggcctgtaccagggcctgagcaccgccaccaaggacacctatgacgccctgcacatgcaggccctgcctccaaga

SEQ ID NO: 6144 - DNA, 1812 bp, Artificial Sequence
  Synthetic Polynucleotide
atggccttaccagtgaccgccttgctcctgccgctggccttgctgctccacgccgccaggccggaggtgcagctggttgaatctggcggaggactggttcagcctggcggatctctgagactgtcttgtgccgccagcggcttcaacatcaaggatacctgtatcggctgggttcgcagagcccctggcaaagaggaagaactggtcgccaaaatctgcaagtacagcggccacaccagatacgccgacagcgtgaagggcagattcaccatcagcgccgacaccagcaagaacaccgcctacctccagatgaacagcctgagagccgaggacaccgccgtgtactattgtgccgctgtgtccgtcagagatgggcactacaattactggggccagggcaccaccgtgaccgtttcttcaacgcgtaagggctgtcagggctctgccgatcacgtggtgtctatcagcggagtgcctctccagctccagcctaacagcatccagaccaaggtggactctatcgcctggaagaagctgctgcccagccagaatggcttccaccacatcctgaagtgggagaacggcagcctgcctagcaacaccagcaacgacagattcagcttcatcgtgaagaacctgagcctgctgattaaggccgctcagcagcaggatagcggcctgtactgtctggaagtgaccagcatcagcggcaaggtgcagaccgccacctttcaggtgttcgtgttcgacaaggtggaaaagccccggctgcaaggccagggcaagatccttgatagaggcagatgccaggtggccctgagctgtctggtttccagagatggcaacgtgtcctacgcctggtacagaggcagcaagctgatccagacagccggcaacctgacctacctggacgaggaagtggacatcaacggcacccacacctacacctgtaatgtgtctaaccccgtgtcctgggagagccacacactgaatctgacccaggactgccagaacgcccaccaagagttcagattctggcccttcctggtcatcatcgtgatcctgagcgccctgttcctgggcaccctggcctgtttttgcgtgtggcgcagaaagcgcaaagagaagcagagcgagacaagccccaaagagttcctgaccatctacgaggacgtgaaggatctgaaaacccggcggaaccacgaacaagagcagacctttcctggcggcggaagcaccatctacagcatgatccagagccagagcagcgcccctacaagccaagagccagcctacacactgtactccctgatccagcctagcagaaagagcggcagccggaagagaaatcacagccccagcttcaacagcacgatctacgaagtgatcggaaagtcccagcctaaggctcagaaccccgccagactgagccggaaagagctggaaaacttcgacgtgtacagcagcactagtagagtgaagttcagcagaagcgccgacgcccctgcctaccagcagggacagaaccaactgtacaacgagctgaacctgggcagacgggaagagtacgacgtgctggacaagcggagaggcagggaccctgagatgggcggaaagccccagcggagaaagaacccccaggaaggactgtataacgaactccagaaagacaagatggccgaagcctacagcgagatcggcatgaagggcgagcggagaagaggcaagggccacgatggcctgtaccagggcctgagcaccgccaccaaggacacctatgacgccctgcacatgcaggccctgcctccaaga

SEQ ID NO: 6145 - DNA, 1827 bp, Artificial Sequence
  Synthetic Polynucleotide
atggccttaccagtgaccgccttgctcctgccgctggccttgctgctccacgccgccaggccgggctctgacctgggcatcaagctgctgttcgccgctgccaagggccaggacgacgaagtgcggattctgctggctgctggggccgacgtgaacgccaaggatttcgagggctacacccccctgcacgtggccgcctatgatggacacctggaaatcgtggaagtgctgctgaaggctggcgctgatgtgaatgccaaagacagccagggccggacccctctgcatgaagccgcctacagcggccatctggaaattgtggaagtgctgctgaaagccggggcagacgtgaacgctcaggacgacgctggcgagacaccagccgatctggctgcagcttggggccacgaagatatcgccgaggtgctgcagaagacgcgtaagggctgtcagggctctgccgatcacgtggtgtctatcagcggagtgcctctccagctccagcctaacagcatccagaccaaggtggactctatcgcctggaagaagctgctgcccagccagaatggcttccaccacatcctgaagtgggagaacggcagcctgcctagcaacaccagcaacgacagattcagcttcatcgtgaagaacctgagcctgctgattaaggccgctcagcagcaggatagcggcctgtactgtctggaagtgaccagcatcagcggcaaggtgcagaccgccacctttcaggtgttcgtgttcgacaaggtggaaaagccccggctgcaaggccagggcaagatccttgatagaggcagatgccaggtggccctgagctgtctggtttccagagatggcaacgtgtcctacgcctggtacagaggcagcaagctgatccagacagccggcaacctgacctacctggacgaggaagtggacatcaacggcacccacacctacacctgtaatgtgtctaaccccgtgtcctgggagagccacacactgaatctgacccaggactgccagaacgcccaccaagagttcagattctggcccttcctggtcatcatcgtgatcctgagcgccctgttcctgggcaccctggcctgtttttgcgtgtggcgcagaaagcgcaaagagaagcagagcgagacaagccccaaagagttcctgaccatctacgaggacgtgaaggatctgaaaacccggcggaaccacgaacaagagcagacctttcctggcggcggaagcaccatctacagcatgatccagagccagagcagcgcccctacaagccaagagccagcctacacactgtactccctgatccagcctagcagaaagagcggcagccggaagagaaatcacagccccagcttcaacagcacgatctacgaagtgatcggaaagtcccagcctaaggctcagaaccccgccagactgagccggaaagagctggaaaacttcgacgtgtacagcagcactagtagagtgaagttcagcagaagcgccgacgcccctgcctaccagcagggacagaaccaactgtacaacgagctgaacctgggcagacgggaagagtacgacgtgctggacaagcggagaggcagggaccctgagatgggcggaaagccccagcggagaaagaacccccaggaaggactgtataacgaactccagaaagacaagatggccgaagcctacagcgagatcggcatgaagggcgagcggagaagaggcaagggccacgatggcctgtaccagggcctgagcaccgccaccaaggacacctatgacgccctgcacatgcaggccctgcctccaaga

SEQ ID NO: 6146 - DNA, 1629 bp, Artificial Sequence
  Synthetic Polynucleotide
atggccttaccagtgaccgccttgctcctgccgctggccttgctgctccacgccgccaggccggtggacaacaagttcaacaaagagcggtacagcgcctactacgagatttggcaactgcccaacctgaacgtgcggcagaaggccgccttcatcggatctctgcaggacgaccctagccagagcgccaatctgctggccgaggccaagaagctgaacgacgcccaggcccctaaaacgcgtaagggctgtcagggctctgccgatcacgtggtgtctatcagcggagtgcctctccagctccagcctaacagcatccagaccaaggtggactctatcgcctggaagaagctgctgcccagccagaatggcttccaccacatcctgaagtgggagaacggcagcctgcctagcaacaccagcaacgacagattcagcttcatcgtgaagaacctgagcctgctgattaaggccgctcagcagcaggatagcggcctgtactgtctggaagtgaccagcatcagcggcaaggtgcagaccgccacctttcaggtgttcgtgttcgacaaggtggaaaagccccggctgcaaggccagggcaagatccttgatagaggcagatgccaggtggccctgagctgtctggtttccagagatggcaacgtgtcctacgcctggtacagaggcagcaagctgatccagacagccggcaacctgacctacctggacgaggaagtggacatcaacggcacccacacctacacctgtaatgtgtctaaccccgtgtcctgggagagccacacactgaatctgacccaggactgccagaacgcccaccaagagttcagattctggcccttcctggtcatcatcgtgatcctgagcgccctgttcctgggcaccctggcctgtttttgcgtgtggcgcagaaagcgcaaagagaagcagagcgagacaagccccaaagagttcctgaccatctacgaggacgtgaaggatctgaaaacccggcggaaccacgaacaagagcagacctttcctggcggcggaagcaccatctacagcatgatccagagccagagcagcgcccctacaagccaagagccagcctacacactgtactccctgatccagcctagcagaaagagcggcagccggaagagaaatcacagccccagcttcaacagcacgatctacgaagtgatcggaaagtcccagcctaaggctcagaaccccgccagactgagccggaaagagctggaaaacttcgacgtgtacagcagcactagtagagtgaagttcagcagaagcgccgacgcccctgcctaccagcagggacagaaccaactgtacaacgagctgaacctgggcagacgggaagagtacgacgtgctggacaagcggagaggcagggaccctgagatgggcggaaagccccagcggagaaagaacccccaggaaggactgtataacgaactccagaaagacaagatggccgaagcctacagcgagatcggcatgaagggcgagcggagaagaggcaagggccacgatggcctgtaccagggcctgagcaccgccaccaaggacacctatgacgccctgcacatgcaggccctgcctccaaga

SEQ ID NO: 6147 - DNA, 1722 bp, Artificial Sequence
  Synthetic Polynucleotide
atggccttaccagtgaccgccttgctcctgccgctggccttgctgctccacgccgccaggccgctgccagccccgaagaatttggtcgtttcccgtgtcactgaggactctgcacgtctgagctggaccgcaccggacgcggcgttcgacagctttgcaatcggctactgggagtgggatgatgacggcgaggccattgtgctgaccgttccgggtagcgagcgcagctacgatctgaccggtctgaagccgggtacggaatatccggtgtatattgcgggcgtgaagggtggccagtggagcttcccgctgagcgcgatctttaccaccacgcgtaagggctgtcagggctctgccgatcacgtggtgtctatcagcggagtgcctctccagctccagcctaacagcatccagaccaaggtggactctatcgcctggaagaagctgctgcccagccagaatggcttccaccacatcctgaagtgggagaacggcagcctgcctagcaacaccagcaacgacagattcagcttcatcgtgaagaacctgagcctgctgattaaggccgctcagcagcaggatagcggcctgtactgtctggaagtgaccagcatcagcggcaaggtgcagaccgccacctttcaggtgttcgtgttcgacaaggtggaaaagccccggctgcaaggccagggcaagatccttgatagaggcagatgccaggtggccctgagctgtctggtttccagagatggcaacgtgtcctacgcctggtacagaggcagcaagctgatccagacagccggcaacctgacctacctggacgaggaagtggacatcaacggcacccacacctacacctgtaatgtgtctaaccccgtgtcctgggagagccacacactgaatctgacccaggactgccagaacgcccaccaagagttcagattctggcccttcctggtcatcatcgtgatcctgagcgccctgttcctgggcaccctggcctgtttttgcgtgtggcgcagaaagcgcaaagagaagcagagcgagacaagccccaaagagttcctgaccatctacgaggacgtgaaggatctgaaaacccggcggaaccacgaacaagagcagacctttcctggcggcggaagcaccatctacagcatgatccagagccagagcagcgcccctacaagccaagagccagcctacacactgtactccctgatccagcctagcagaaagagcggcagccggaagagaaatcacagccccagcttcaacagcacgatctacgaagtgatcggaaagtcccagcctaaggctcagaaccccgccagactgagccggaaagagctggaaaacttcgacgtgtacagcagcactagtagagtgaagttcagcagaagcgccgacgcccctgcctaccagcagggacagaaccaactgtacaacgagctgaacctgggcagacgggaagagtacgacgtgctggacaagcggagaggcagggaccctgagatgggcggaaagccccagcggagaaagaacccccaggaaggactgtataacgaactccagaaagacaagatggccgaagcctacagcgagatcggcatgaagggcgagcggagaagaggcaagggccacgatggcctgtaccagggcctgagcaccgccaccaaggacacctatgacgccctgcacatgcaggccctgcctccaaga

SEQ ID NO: 6148 - DNA, 1725 bp, Artificial Sequence
  Synthetic Polynucleotide
atggccttaccagtgaccgccttgctcctgccgctggccttgctgctccacgccgccaggccgatgctgcccgctcctaagaatctggtggtgtccagaatcaccgaggacagcgccagactgtcttggacagctcctgatgccgccttcgacagcttccccatccggtacatcgagacactgatctggggcgaagccatctggctggatgtgcctggaagcgagagaagctacgacctgaccggactgaagcctggcacagagtatgccgtggtcatcaccggcgtgaaaggcggcagattctctagccctctggtggcctctttcaccaccacgcgtaagggctgtcagggctctgccgatcacgtggtgtctatcagcggagtgcctctccagctccagcctaacagcatccagaccaaggtggactctatcgcctggaagaagctgctgcccagccagaatggcttccaccacatcctgaagtgggagaacggcagcctgcctagcaacaccagcaacgacagattcagcttcatcgtgaagaacctgagcctgctgattaaggccgctcagcagcaggatagcggcctgtactgtctggaagtgaccagcatcagcggcaaggtgcagaccgccacctttcaggtgttcgtgttcgacaaggtggaaaagccccggctgcaaggccagggcaagatccttgatagaggcagatgccaggtggccctgagctgtctggtttccagagatggcaacgtgtcctacgcctggtacagaggcagcaagctgatccagacagccggcaacctgacctacctggacgaggaagtggacatcaacggcacccacacctacacctgtaatgtgtctaaccccgtgtcctgggagagccacacactgaatctgacccaggactgccagaacgcccaccaagagttcagattctggcccttcctggtcatcatcgtgatcctgagcgccctgttcctgggcaccctggcctgtttttgcgtgtggcgcagaaagcgcaaagagaagcagagcgagacaagccccaaagagttcctgaccatctacgaggacgtgaaggatctgaaaacccggcggaaccacgaacaagagcagacctttcctggcggcggaagcaccatctacagcatgatccagagccagagcagcgcccctacaagccaagagccagcctacacactgtactccctgatccagcctagcagaaagagcggcagccggaagagaaatcacagccccagcttcaacagcacgatctacgaagtgatcggaaagtcccagcctaaggctcagaaccccgccagactgagccggaaagagctggaaaacttcgacgtgtacagcagcactagtagagtgaagttcagcagaagcgccgacgcccctgcctaccagcagggacagaaccaactgtacaacgagctgaacctgggcagacgggaagagtacgacgtgctggacaagcggagaggcagggaccctgagatgggcggaaagccccagcggagaaagaacccccaggaaggactgtataacgaactccagaaagacaagatggccgaagcctacagcgagatcggcatgaagggcgagcggagaagaggcaagggccacgatggcctgtaccagggcctgagcaccgccaccaaggacacctatgacgccctgcacatgcaggccctgcctccaaga

SEQ ID NO: 6149 - DNA, 2376 bp, Artificial Sequence
  Synthetic Polynucleotide
atggccttaccagtgaccgccttgctcctgccgctggccttgctgctccacgccgccaggccgatggccttaccagtgaccgccttgctcctgccgctggccttgctgctccacgccgccaggccgctgttcaatcaagaggtgcagatccctctgaccgagagctactgtggcccctgtcctaagaactggatctgctacaagaacaactgctaccagttcttcgacgagagcaagaattggtacgagagccaggccagctgcatgagccagaatgccagcctgctgaaggtgtacagcaaagaggaccaggacctgctgaaactggtcaagagctaccactggatgggccttgtgcacatccccaccaatggctcttggcagtgggaggacggcagcattctgagccctaacctgctgaccatcatcgagatgcagaagggcgactgcgccctgtacgccagcagctttaagggctacatcgagaattgcagcaccccgaacacctacatctgtatgcagagaaccgttggcggaggcggaagtggaggcggaggatctggcggcggaggctctgacctctttaatcaagaagtccagattccactcaccgaatcctactgcggaccttgtccaaaaaattggatttgttataagaacaactgttatcaattctttgatgagtctaaaaattggtatgagtcccaggcttcctgcatgtctcagaacgcttctctgctgaaagtctactctaaagaagatcaggatctcctgaagctcgtcaagtcttatcattggatggggctcgtccacattcctaccaacggaagctggcaatgggaagatggctccatcctgtctccaaatctgctcacgattattgaaatgcagaaaggggattgtgctctctacgccagctccttcaagggatatattgagaactgtagcacgcccaatacttatatctgtatgcaacggaccgtgacgcgtaagggctgtcagggctctgccgatcacgtggtgtctatcagcggagtgcctctccagctccagcctaacagcatccagaccaaggtggactctatcgcctggaagaagctgctgcccagccagaatggcttccaccacatcctgaagtgggagaacggcagcctgcctagcaacaccagcaacgacagattcagcttcatcgtgaagaacctgagcctgctgattaaggccgctcagcagcaggatagcggcctgtactgtctggaagtgaccagcatcagcggcaaggtgcagaccgccacctttcaggtgttcgtgttcgacaaggtggaaaagccccggctgcaaggccagggcaagatccttgatagaggcagatgccaggtggccctgagctgtctggtttccagagatggcaacgtgtcctacgcctggtacagaggcagcaagctgatccagacagccggcaacctgacctacctggacgaggaagtggacatcaacggcacccacacctacacctgtaatgtgtctaaccccgtgtcctgggagagccacacactgaatctgacccaggactgccagaacgcccaccaagagttcagattctggcccttcctggtcatcatcgtgatcctgagcgccctgttcctgggcaccctggcctgtttttgcgtgtggcgcagaaagcgcaaagagaagcagagcgagacaagccccaaagagttcctgaccatctacgaggacgtgaaggatctgaaaacccggcggaaccacgaacaagagcagacctttcctggcggcggaagcaccatctacagcatgatccagagccagagcagcgcccctacaagccaagagccagcctacacactgtactccctgatccagcctagcagaaagagcggcagccggaagagaaatcacagccccagcttcaacagcacgatctacgaagtgatcggaaagtcccagcctaaggctcagaaccccgccagactgagccggaaagagctggaaaacttcgacgtgtacagcagcactagtagagtgaagttcagcagaagcgccgacgcccctgcctaccagcagggacagaaccaactgtacaacgagctgaacctgggcagacgggaagagtacgacgtgctggacaagcggagaggcagggaccctgagatgggcggaaagccccagcggagaaagaacccccaggaaggactgtataacgaactccagaaagacaagatggccgaagcctacagcgagatcggcatgaagggcgagcggagaagaggcaagggccacgatggcctgtaccagggcctgagcaccgccaccaaggacacctatgacgccctgcacatgcaggccctgcctccaaga

SEQ ID NO: 6150 - DNA, 2016 bp, Artificial Sequence
  Synthetic Polynucleotide
atggccttaccagtgaccgccttgctcctgccgctggccttgctgctccacgccgccaggccgatggagctgactgatttgctcctggcggccatgcttcttgcagtggcaagactaactctgtccagccccgtagctcctgcctgtgaccccagactcctaaataaactgctgcgtgactcccacctccttcacagccgactgagtcagtgtcccgacgtggaccctttgtctatccctgttctgctgcctgctgtggactttagcctgggagaatggaaaacccagacggaacagagcaaggcacaggacattctaggggcagtgtcccttctactggagggagtgatggcagcacgaggacagttggaaccctcctgcctctcatccctcctgggacagctttctgggcaggttcgcctcctcttgggggccctgcagggcctcctaggaacccagcttcctctacagggcaggaccacagctcacaaggaccccaatgccctcttcttgagcttgcaacaactgcttcggggaaaggtgcgcttcctgcttctggtagaaggtcccaccctctgtgtcagacggaccctgccaaccacagctgtcccaagcagtacttctacgcgtaagggctgtcagggctctgccgatcacgtggtgtctatcagcggagtgcctctccagctccagcctaacagcatccagaccaaggtggactctatcgcctggaagaagctgctgcccagccagaatggcttccaccacatcctgaagtgggagaacggcagcctgcctagcaacaccagcaacgacagattcagcttcatcgtgaagaacctgagcctgctgattaaggccgctcagcagcaggatagcggcctgtactgtctggaagtgaccagcatcagcggcaaggtgcagaccgccacctttcaggtgttcgtgttcgacaaggtggaaaagccccggctgcaaggccagggcaagatccttgatagaggcagatgccaggtggccctgagctgtctggtttccagagatggcaacgtgtcctacgcctggtacagaggcagcaagctgatccagacagccggcaacctgacctacctggacgaggaagtggacatcaacggcacccacacctacacctgtaatgtgtctaaccccgtgtcctgggagagccacacactgaatctgacccaggactgccagaacgcccaccaagagttcagattctggcccttcctggtcatcatcgtgatcctgagcgccctgttcctgggcaccctggcctgtttttgcgtgtggcgcagaaagcgcaaagagaagcagagcgagacaagccccaaagagttcctgaccatctacgaggacgtgaaggatctgaaaacccggcggaaccacgaacaagagcagacctttcctggcggcggaagcaccatctacagcatgatccagagccagagcagcgcccctacaagccaagagccagcctacacactgtactccctgatccagcctagcagaaagagcggcagccggaagagaaatcacagccccagcttcaacagcacgatctacgaagtgatcggaaagtcccagcctaaggctcagaaccccgccagactgagccggaaagagctggaaaacttcgacgtgtacagcagcactagtagagtgaagttcagcagaagcgccgacgcccctgcctaccagcagggacagaaccaactgtacaacgagctgaacctgggcagacgggaagagtacgacgtgctggacaagcggagaggcagggaccctgagatgggcggaaagccccagcggagaaagaacccccaggaaggactgtataacgaactccagaaagacaagatggccgaagcctacagcgagatcggcatgaagggcgagcggagaagaggcaagggccacgatggcctgtaccagggcctgagcaccgccaccaaggacacctatgacgccctgcacatgcaggccctgcctccaaga

SEQ ID NO: 6151 - DNA, 1614 bp, Artificial Sequence
  Synthetic Polynucleotide
atggccttaccagtgaccgccttgctcctgccgctggccttgctgctccacgccgccaggccgatggaccccgacctggaaatcagagccgccttcctgcggcagagaaacacagccctgagaacagaggtggccgagctggaacaagaggtgcagcggctggaaaacgaggtgtcccagtacgagacaagatacggccctctcggaggcggaaaaacgcgtacgcgtaagggctgtcagggctctgccgatcacgtggtgtctatcagcggagtgcctctccagctccagcctaacagcatccagaccaaggtggactctatcgcctggaagaagctgctgcccagccagaatggcttccaccacatcctgaagtgggagaacggcagcctgcctagcaacaccagcaacgacagattcagcttcatcgtgaagaacctgagcctgctgattaaggccgctcagcagcaggatagcggcctgtactgtctggaagtgaccagcatcagcggcaaggtgcagaccgccacctttcaggtgttcgtgttcgacaaggtggaaaagccccggctgcaaggccagggcaagatccttgatagaggcagatgccaggtggccctgagctgtctggtttccagagatggcaacgtgtcctacgcctggtacagaggcagcaagctgatccagacagccggcaacctgacctacctggacgaggaagtggacatcaacggcacccacacctacacctgtaatgtgtctaaccccgtgtcctgggagagccacacactgaatctgacccaggactgccagaacgcccaccaagagttcagattctggcccttcctggtcatcatcgtgatcctgagcgccctgttcctgggcaccctggcctgtttttgcgtgtggcgcagaaagcgcaaagagaagcagagcgagacaagccccaaagagttcctgaccatctacgaggacgtgaaggatctgaaaacccggcggaaccacgaacaagagcagacctttcctggcggcggaagcaccatctacagcatgatccagagccagagcagcgcccctacaagccaagagccagcctacacactgtactccctgatccagcctagcagaaagagcggcagccggaagagaaatcacagccccagcttcaacagcacgatctacgaagtgatcggaaagtcccagcctaaggctcagaaccccgccagactgagccggaaagagctggaaaacttcgacgtgtacagcagcactagtagagtgaagttcagcagaagcgccgacgcccctgcctaccagcagggacagaaccaactgtacaacgagctgaacctgggcagacgggaagagtacgacgtgctggacaagcggagaggcagggaccctgagatgggcggaaagccccagcggagaaagaacccccaggaaggactgtataacgaactccagaaagacaagatggccgaagcctacagcgagatcggcatgaagggcgagcggagaagaggcaagggccacgatggcctgtaccagggcctgagcaccgccaccaaggacacctatgacgccctgcacatgcaggccctgcctccaaga

SEQ ID NO: 6152 - DNA, 1539 bp, Artificial Sequence
  Synthetic Polynucleotide
atggccttaccagtgaccgccttgctcctgccgctggccttgctgctccacgccgccaggccggaagttgctgccctcgagaaggaggtagcagctttggaaaaagaagtcgcagcccttgagaaagaagttgcggctctggagaagacgcgtaagggctgtcagggctctgccgatcacgtggtgtctatcagcggagtgcctctccagctccagcctaacagcatccagaccaaggtggactctatcgcctggaagaagctgctgcccagccagaatggcttccaccacatcctgaagtgggagaacggcagcctgcctagcaacaccagcaacgacagattcagcttcatcgtgaagaacctgagcctgctgattaaggccgctcagcagcaggatagcggcctgtactgtctggaagtgaccagcatcagcggcaaggtgcagaccgccacctttcaggtgttcgtgttcgacaaggtggaaaagccccggctgcaaggccagggcaagatccttgatagaggcagatgccaggtggccctgagctgtctggtttccagagatggcaacgtgtcctacgcctggtacagaggcagcaagctgatccagacagccggcaacctgacctacctggacgaggaagtggacatcaacggcacccacacctacacctgtaatgtgtctaaccccgtgtcctgggagagccacacactgaatctgacccaggactgccagaacgcccaccaagagttcagattctggcccttcctggtcatcatcgtgatcctgagcgccctgttcctgggcaccctggcctgtttttgcgtgtggcgcagaaagcgcaaagagaagcagagcgagacaagccccaaagagttcctgaccatctacgaggacgtgaaggatctgaaaacccggcggaaccacgaacaagagcagacctttcctggcggcggaagcaccatctacagcatgatccagagccagagcagcgcccctacaagccaagagccagcctacacactgtactccctgatccagcctagcagaaagagcggcagccggaagagaaatcacagccccagcttcaacagcacgatctacgaagtgatcggaaagtcccagcctaaggctcagaaccccgccagactgagccggaaagagctggaaaacttcgacgtgtacagcagcactagtagagtgaagttcagcagaagcgccgacgcccctgcctaccagcagggacagaaccaactgtacaacgagctgaacctgggcagacgggaagagtacgacgtgctggacaagcggagaggcagggaccctgagatgggcggaaagccccagcggagaaagaacccccaggaaggactgtataacgaactccagaaagacaagatggccgaagcctacagcgagatcggcatgaagggcgagcggagaagaggcaagggccacgatggcctgtaccagggcctgagcaccgccaccaaggacacctatgacgccctgcacatgcaggccctgcctccaaga

SEQ ID NO: 6153 - DNA, 2313 bp, Artificial Sequence
  Synthetic Polynucleotide
atggccttaccagtgaccgccttgctcctgccgctggccttgctgctccacgccgccaggccgctgttcaatcaagaggtgcagatccctctgaccgagagctactgtggcccctgtcctaagaactggatctgctacaagaacaactgctaccagttcttcgacgagagcaagaattggtacgagagccaggccagctgcatgagccagaatgccagcctgctgaaggtgtacagcaaagaggaccaggacctgctgaaactggtcaagagcgcccactggatgggccttgtgcacatccccaccaatggctcttggcagtgggaggacggcagcattctgagccctaacctgctgaccatcatcgagatgcagaagggcgactgcgccctgtacgccagcagctttaagggcttcatcgagaattgcagcaccccgaacacctacatctgtatgcagagaaccgttggcggaggcggaagtggaggcggaggatctggcggcggaggctctgacctctttaatcaagaagtccagattccactcaccgaatcctactgcggaccttgtccaaaaaattggatttgttataagaacaactgttatcaattctttgatgagtctaaaaattggtatgagtcccaggcttcctgcatgtctcagaacgcttctctgctgaaagtctactctaaagaagatcaggatctcctgaagctcgtcaagtctgcccattggatggggctcgtccacattcctaccaacggaagctggcaatgggaagatggctccatcctgtctccaaatctgctcacgattattgaaatgcagaaaggggattgtgctctctacgccagctccttcaagggatttattgagaactgtagcacgcccaatacttatatctgtatgcaacggaccgtgacgcgtaagggctgtcagggctctgccgatcacgtggtgtctatcagcggagtgcctctccagctccagcctaacagcatccagaccaaggtggactctatcgcctggaagaagctgctgcccagccagaatggcttccaccacatcctgaagtgggagaacggcagcctgcctagcaacaccagcaacgacagattcagcttcatcgtgaagaacctgagcctgctgattaaggccgctcagcagcaggatagcggcctgtactgtctggaagtgaccagcatcagcggcaaggtgcagaccgccacctttcaggtgttcgtgttcgacaaggtggaaaagccccggctgcaaggccagggcaagatccttgatagaggcagatgccaggtggccctgagctgtctggtttccagagatggcaacgtgtcctacgcctggtacagaggcagcaagctgatccagacagccggcaacctgacctacctggacgaggaagtggacatcaacggcacccacacctacacctgtaatgtgtctaaccccgtgtcctgggagagccacacactgaatctgacccaggactgccagaacgcccaccaagagttcagattctggcccttcctggtcatcatcgtgatcctgagcgccctgttcctgggcaccctggcctgtttttgcgtgtggcgcagaaagcgcaaagagaagcagagcgagacaagccccaaagagttcctgaccatctacgaggacgtgaaggatctgaaaacccggcggaaccacgaacaagagcagacctttcctggcggcggaagcaccatctacagcatgatccagagccagagcagcgcccctacaagccaagagccagcctacacactgtactccctgatccagcctagcagaaagagcggcagccggaagagaaatcacagccccagcttcaacagcacgatctacgaagtgatcggaaagtcccagcctaaggctcagaaccccgccagactgagccggaaagagctggaaaacttcgacgtgtacagcagcactagtagagtgaagttcagcagaagcgccgacgcccctgcctaccagcagggacagaaccaactgtacaacgagctgaacctgggcagacgggaagagtacgacgtgctggacaagcggagaggcagggaccctgagatgggcggaaagccccagcggagaaagaacccccaggaaggactgtataacgaactccagaaagacaagatggccgaagcctacagcgagatcggcatgaagggcgagcggagaagaggcaagggccacgatggcctgtaccagggcctgagcaccgccaccaaggacacctatgacgccctgcacatgcaggccctgcctccaaga

SEQ ID NO: 6154 - DNA, 2313 bp, Artificial Sequence
  Synthetic Polynucleotide
atggccttaccagtgaccgccttgctcctgccgctggccttgctgctccacgccgccaggccgctgttcaatcaagaggtgcagatccctctgaccgagagctactgtggcccctgtcctaagaactggatctgctacaagaacaactgctaccagttcttcgacgagagcaagaattggtacgagagccaggccagctgcatgagccagaatgccagcctgctgaaggtgtacagcaaagaggaccaggacctgctgaaactggtcaagagcgcccactggatgggccttgtgcacatccccaccaatggctcttggcagtgggaggacggcagcattctgagccctaacctgctgaccatcatcgagatgcagaagggcgactgcgccctgtacgccagcagctttaagggctacatcgagaattgcagcaccccgaacacctacatctgtatgcagagaaccgtttctggcggaggcggctctggaggaggcggaagtggcggcggaggcgacctctttaatcaagaagtccagattccactcaccgaatcctactgcggaccttgtccaaaaaattggatttgttataagaacaactgttatcaattctttgatgagtctaaaaattggtatgagtcccaggcttcctgcatgtctcagaacgcttctctgctgaaagtctactctaaagaagatcaggatctcctgaagctcgtcaagtctgcccattggatggggctcgtccacattcctaccaacggaagctggcaatgggaagatggctccatcctgtctccaaatctgctcacgattattgaaatgcagaaaggggattgtgctctctacgccagctccttcaagggatatattgagaactgtagcacgcccaatacttatatctgtatgcaacggaccgtgacgcgtaagggctgtcagggctctgccgatcacgtggtgtctatcagcggagtgcctctccagctccagcctaacagcatccagaccaaggtggactctatcgcctggaagaagctgctgcccagccagaatggcttccaccacatcctgaagtgggagaacggcagcctgcctagcaacaccagcaacgacagattcagcttcatcgtgaagaacctgagcctgctgattaaggccgctcagcagcaggatagcggcctgtactgtctggaagtgaccagcatcagcggcaaggtgcagaccgccacctttcaggtgttcgtgttcgacaaggtggaaaagccccggctgcaaggccagggcaagatccttgatagaggcagatgccaggtggccctgagctgtctggtttccagagatggcaacgtgtcctacgcctggtacagaggcagcaagctgatccagacagccggcaacctgacctacctggacgaggaagtggacatcaacggcacccacacctacacctgtaatgtgtctaaccccgtgtcctgggagagccacacactgaatctgacccaggactgccagaacgcccaccaagagttcagattctggcccttcctggtcatcatcgtgatcctgagcgccctgttcctgggcaccctggcctgtttttgcgtgtggcgcagaaagcgcaaagagaagcagagcgagacaagccccaaagagttcctgaccatctacgaggacgtgaaggatctgaaaacccggcggaaccacgaacaagagcagacctttcctggcggcggaagcaccatctacagcatgatccagagccagagcagcgcccctacaagccaagagccagcctacacactgtactccctgatccagcctagcagaaagagcggcagccggaagagaaatcacagccccagcttcaacagcacgatctacgaagtgatcggaaagtcccagcctaaggctcagaaccccgccagactgagccggaaagagctggaaaacttcgacgtgtacagcagcactagtagagtgaagttcagcagaagcgccgacgcccctgcctaccagcagggacagaaccaactgtacaacgagctgaacctgggcagacgggaagagtacgacgtgctggacaagcggagaggcagggaccctgagatgggcggaaagccccagcggagaaagaacccccaggaaggactgtataacgaactccagaaagacaagatggccgaagcctacagcgagatcggcatgaagggcgagcggagaagaggcaagggccacgatggcctgtaccagggcctgagcaccgccaccaaggacacctatgacgccctgcacatgcaggccctgcctccaaga

SEQ ID NO: 6155 - DNA, 3324 bp, Artificial Sequence
  Synthetic Polynucleotide
atggccttaccagtgaccgccttgctcctgccgctggccttgctgctccacgccgccaggccggacatccagatgacacagagccctagcagcctgtctgccagcgtgggagacagagtgaccatcacatgcaaggccagcgaccacatcaacaactggctggcctggtatcagcagaagcctggacaggcccctaagctgctgatctacggcgctaccacactggaaacaggcgtgcccagcagattttctggcagcggctctggcaccgactacaccctgacaatatccagcctccagcctgaggacttcgccacctactactgtcagcagagctggaacaccccttggacattcggccagggcaccaagctggaaatcaagagactcgagacaacacctggcgagagaagtagcctgcctgccttctatcctggcaccagcggctcttgttctggctgtggatctctgagcctgcctctgctggctggactggttgctgctgatgctgtggcctctctgctgattgtgggagccgtgttcctgtgcgccagacctagaagaagccccgctcaagaggacggcaaggtgtacatcaacatgcccggcagaggaagcactagtagagtgaagttcagcagaagcgccgacgcccctgcctaccagcagggacagaaccaactgtacaacgagctgaacctgggcagacgggaagagtacgacgtgctggacaagcggagaggcagggaccctgagatgggcggaaagccccagcggagaaagaacccccaggaaggactgtataacgaactccagaaagacaagatggccgaagcctacagcgagatcggcatgaagggcgagcggagaagaggcaagggccacgatggcctgtaccagggcctgagcaccgccaccaaggacacctatgacgccctgcacatgcaggccctgcctccaagaagggccaagcgatctggatctggagcaacaaacttctcactactcaaacaagcaggtgacgtggaggagaatcccgggcctatggactggatttggcgcatccttttccttgtcggcgctgctaccggcgcgcattccttcgaacaagttcagcttcaacagcctggcgctgagctggtcaaacctggcgcttctgtgaagatgagctgcaaagccagcggctacgccttcagcagctactggatcaactggatgaagcagaaacccggccagggactcgaatggatcggccaaatctatcccggcgacggcgacaccaactacaacggcaagttcaagggcagagccacactgaccgccgatacctctagcagcacagcctacatgcagctgagcagcctgaccagcgaagatagcgccgtgtacttctgtgcccggtccatcacaacagtcgtgggctgcgctatggactattggggccagggaacaagcgtgaccgtgtctagtacgcgtactccagctgctccacctaaagctgtcctgaagctcgaacctcaatggattaacgtcctccaagaagattctgtcaccctgacatgccggggcacccactctccagagtctgattccattcagtggtttcataatgggaacctgattccgactcacacgcagcccagctatcggtttaaagctaacaacaatgactccggggagtatacttgccagacaggacagaccagcctgtctgacccagtgcacctgacagttctgagcgaatggctcgtcctgcagacccctcatcttgagttccaagagggcgaaaccattgtcctgagatgccactcctggaaagataagccccttgtgaaagtcacattttttcagaatggcaagagcaagaagttttctcggagcgatccgaatttcagtattccccaggccaaccactctcacagcggagactatcactgtacaggcaacatcgggtatacactctacagctctaagcccgtcacaattaccgttcaggctcccagcagctccccaatgggcattattgtggccgtcgtgaccggaattgctgtggccgcaatcgtggcagctgtcgtcgctctgatctattgcagaaagaagcggatcagcgccctgccagggtatcctgagtgccgcgaaatgggcgaaactctgcctgagaaacctgctaaccccacaaatcccgatgaagctgacaaagtcggcgctgaaaacacgatcacatactccctgctcatgcatcctgacgctcttgaggaacctgacgatcagaaccggatcagctctagacgggttaagttttccagatccgcagacgcacccgcttaccaacaagggcagaaccaactctacaatgaacttaatttggggcggagggaagagtacgacgttctggacaaaaggaggggacgagatcccgagatgggcggaaagcctcagcgaaggaagaatccgcaagaggggctttataacgaactccagaaagataaaatggcagaagcctatagtgagattgggatgaagggagaaaggaggaggggtaaaggtcacgatgggttgtaccaaggattgagcacagccactaaagatacctatgatgcgctccacatgcaggccctgccgccaagacgcgccaagagaagcggatctggcgtgaagcagaccctgaatttcgacctgctgaagctggctggcgacgtggaatccaacccaggccctggccatatgaccgagtacaagcccacggtgcgcctcgccacccgcgacgacgtccccagggccgtacgcaccctcgccgccgcgttcgccgactaccccgccacgcgccacaccgtcgatccggaccgccacatcgagcgggtcaccgagctgcaagaactcttcctcacgcgcgtcgggctcgacatcggcaaggtgtgggtcgcggacgacggcgccgcggtggcggtctggaccacgccggagagcgtcgaagcgggggcggtgttcgccgagatcggcccgcgcatggccgagttgagcggttcccggctggccgcgcagcaacagatggaaggcctcctggcgccgcaccggcccaaggagcccgcgtggttcctggccaccgtcggcgtctcgcccgaccaccagggcaagggtctgggcagcgccgtcgtgctccccggagtggaggcggccgagcgcgccggggtgcccgccttcctggagacctccgcgccccgcaacctccccttctacgagcggctcggcttcaccgtcaccgccgacgtcgaggtgcccgaaggaccgcgcacctggtgcatgacccgcaagcccggtgcctga

SEQ ID NO: 6156 - DNA, 3480 bp, Artificial Sequence
  Synthetic Polynucleotide
atggccttaccagtgaccgccttgctcctgccgctggccttgctgctccacgccgccaggccggcatgcgaagtgcagctgcttgaaagtggcggcggactgattcagcctggcggatctctgagactgagctgtgccgccagcggcttcaccttttctagccacgccatgacctgggtccgacaggcacctggaaaagggcttgaatgggtgtccgccatcagcggctctggcgattacacacactacgccgacagcgtgaagggcagattcaccatcagcagagacaacagcaagaacaccgtgtacctccagatgaacagcctgagagccgaggacagcgccgtgtattattgcgccaaggatgaggatggcggcagcctgcttggacacagaggacaaggcaccctggtcaccgtttcttccggtaccggcggaggcggatctggcggcggaggtagcggtggcggaggatctgaattcggatctctcgagacaacacctggcgagagaagtagcctgcctgccttctatcctggcaccagcggctcttgttctggctgtggatctctgagcctgcctctgctggctggactggttgctgctgatgctgtggcctctctgctgattgtgggagccgtgttcctgtgcgccagacctagaagaagccccgctcaagaggacggcaaggtgtacatcaacatgcccggcagaggaagcactagtagagtgaagttcagcagaagcgccgacgcccctgcctaccagcagggacagaaccaactgtacaacgagctgaacctgggcagacgggaagagtacgacgtgctggacaagcggagaggcagggaccctgagatgggcggaaagccccagcggagaaagaacccccaggaaggactgtataacgaactccagaaagacaagatggccgaagcctacagcgagatcggcatgaagggcgagcggagaagaggcaagggccacgatggcctgtaccagggcctgagcaccgccaccaaggacacctatgacgccctgcacatgcaggccctgcctccaagaagggccaagcgatctggatctggagcaacaaacttctcactactcaaacaagcaggtgacgtggaggagaatcccgggcctatggactggatttggcgcatccttttccttgtcggcgctgctaccggcgcgcattccgggcccgaagtgcagctggttgaatctggcggaggactggttcaggctggcggatctctgagactgtcttgtgccgccagcggcagaacctttagcatgggctggtttagacaggcccctggcaaagagagagagttcgtcgccgccatcacatactctggcggcagcccttactacgccgactctgtgaagggcagattcaccatcagccgggacaacgccaagaacaccgtgtacctccagatgaacagcctgaagcctgaggacaccgccgtgtactactgcgccgccaatccaacatacggcagcgactggaacgccgagaattggggccagggaacccaagtgacagtgtctagcggatccggcggcggaggatctggcggaggcggatctgggggcggaggctctttcgaaggcagcacgcgtactccagctgctccacctaaagctgtcctgaagctcgaacctcaatggattaacgtcctccaagaagattctgtcaccctgacatgccggggcacccactctccagagtctgattccattcagtggtttcataatgggaacctgattccgactcacacgcagcccagctatcggtttaaagctaacaacaatgactccggggagtatacttgccagacaggacagaccagcctgtctgacccagtgcacctgacagttctgagcgaatggctcgtcctgcagacccctcatcttgagttccaagagggcgaaaccattgtcctgagatgccactcctggaaagataagccccttgtgaaagtcacattttttcagaatggcaagagcaagaagttttctcggagcgatccgaatttcagtattccccaggccaaccactctcacagcggagactatcactgtacaggcaacatcgggtatacactctacagctctaagcccgtcacaattaccgttcaggctcccagcagctccccaatgggcattattgtggccgtcgtgaccggaattgctgtggccgcaatcgtggcagctgtcgtcgctctgatctattgcagaaagaagcggatcagcgccctgccagggtatcctgagtgccgcgaaatgggcgaaactctgcctgagaaacctgctaaccccacaaatcccgatgaagctgacaaagtcggcgctgaaaacacgatcacatactccctgctcatgcatcctgacgctcttgaggaacctgacgatcagaaccggatcagctctagacgggttaagttttccagatccgcagacgcacccgcttaccaacaagggcagaaccaactctacaatgaacttaatttggggcggagggaagagtacgacgttctggacaaaaggaggggacgagatcccgagatgggcggaaagcctcagcgaaggaagaatccgcaagaggggctttataacgaactccagaaagataaaatggcagaagcctatagtgagattgggatgaagggagaaaggaggaggggtaaaggtcacgatgggttgtaccaaggattgagcacagccactaaagatacctatgatgcgctccacatgcaggccctgccgccaagacgcgccaagagaagcggatctggcgtgaagcagaccctgaatttcgacctgctgaagctggctggcgacgtggaatccaacccaggccctggccatatgaccgagtacaagcccacggtgcgcctcgccacccgcgacgacgtccccagggccgtacgcaccctcgccgccgcgttcgccgactaccccgccacgcgccacaccgtcgatccggaccgccacatcgagcgggtcaccgagctgcaagaactcttcctcacgcgcgtcgggctcgacatcggcaaggtgtgggtcgcggacgacggcgccgcggtggcggtctggaccacgccggagagcgtcgaagcgggggcggtgttcgccgagatcggcccgcgcatggccgagttgagcggttcccggctggccgcgcagcaacagatggaaggcctcctggcgccgcaccggcccaaggagcccgcgtggttcctggccaccgtcggcgtctcgcccgaccaccagggcaagggtctgggcagcgccgtcgtgctccccggagtggaggcggccgagcgcgccggggtgcccgccttcctggagacctccgcgccccgcaacctccccttctacgagcggctcggcttcaccgtcaccgccgacgtcgaggtgcccgaaggaccgcgcacctggtgcatgacccgcaagcccggtgcctga

SEQ ID NO: 6157 - DNA, 3927 bp, Artificial Sequence
  Synthetic Polynucleotide
atggccttaccagtgaccgccttgctcctgccgctggccttgctgctccacgccgccaggccggacatccagatgacacagagccctagcagcctgtctgccagcgtgggagacagagtgaccatcacatgcaaggccagcgaccacatcaacaactggctggcctggtatcagcagaagcctggacaggcccctaagctgctgatctacggcgctaccacactggaaacaggcgtgcccagcagattttctggcagcggctctggcaccgactacaccctgacaatatccagcctccagcctgaggacttcgccacctactactgtcagcagagctggaacaccccttggacattcggccagggcaccaagctggaaatcaagagactcgagggacagcctaaggccaatcctaccgtgacactgttccctccaagcagcgaagaactccaggccaacaaggccacacttgtgtgcctgatctccgacttctaccctggggctgtgacagtggcttggaaggccgatggatctcctgtgaaagccggcgtggaaaccaccaagccatccaagcagagcaacaacaaatacgccgccagctcctacctgagcctgacacctgagcagtggaagtcccacagatcctacagctgccaagtgacccacgaaggcagcaccgtggaaaagacagtggcccctacagagtgcagcggatccacaacacctggcgagagaagtagcctgcctgccttctatcctggcaccagcggctcttgttctggctgtggatctctgagcctgcctctgctggctggactggttgctgctgatgctgtggcctctctgctgattgtgggagccgtgttcctgtgcgccagacctagaagaagccccgctcaagaggacggcaaggtgtacatcaacatgcccggcagaggaagcactagtagagtgaagttcagcagaagcgccgacgcccctgcctaccagcagggacagaaccaactgtacaacgagctgaacctgggcagacgggaagagtacgacgtgctggacaagcggagaggcagggaccctgagatgggcggaaagccccagcggagaaagaacccccaggaaggactgtataacgaactccagaaagacaagatggccgaagcctacagcgagatcggcatgaagggcgagcggagaagaggcaagggccacgatggcctgtaccagggcctgagcaccgccaccaaggacacctatgacgccctgcacatgcaggccctgcctccaagaagggccaagcgatctggatctggagcaacaaacttctcactactcaaacaagcaggtgacgtggaggagaatcccgggcctatggactggatttggcgcatccttttccttgtcggcgctgctaccggcgcgcattccttcgaacaagttcagcttcaacagcctggcgctgagctggtcaaacctggcgcttctgtgaagatgagctgcaaagccagcggctacgccttcagcagctactggatcaactggatgaagcagaaacccggccagggactcgaatggatcggccaaatctatcccggcgacggcgacaccaactacaacggcaagttcaagggcagagccacactgaccgccgatacctctagcagcacagcctacatgcagctgagcagcctgaccagcgaagatagcgccgtgtacttctgtgcccggtccatcacaacagtcgtgggctgcgctatggactattggggccagggaacaagcgtgaccgtgtctagtacgcgtgcctctacaaagggaccctccgtgtttcctctggctcccagcagcaagtctacaagcggaggaacagccgctctgggctgcctggtcaaggattactttcccgagcctgtgaccgtgtcctggaatagcggagcactgacaagcggcgtgcacacctttccagccgtgctgcaaagcagcggcctgtactctctgagcagcgtggtcacagtgcctagctctagcctgggcacccagacctacatctgcaatgtgaaccacaagcctagcaacaccaaggtggacaagagagtggaacccaagagctgtggtaccactccagctgctccacctaaagctgtcctgaagctcgaacctcaatggattaacgtcctccaagaagattctgtcaccctgacatgccggggcacccactctccagagtctgattccattcagtggtttcataatgggaacctgattccgactcacacgcagcccagctatcggtttaaagctaacaacaatgactccggggagtatacttgccagacaggacagaccagcctgtctgacccagtgcacctgacagttctgagcgaatggctcgtcctgcagacccctcatcttgagttccaagagggcgaaaccattgtcctgagatgccactcctggaaagataagccccttgtgaaagtcacattttttcagaatggcaagagcaagaagttttctcggagcgatccgaatttcagtattccccaggccaaccactctcacagcggagactatcactgtacaggcaacatcgggtatacactctacagctctaagcccgtcacaattaccgttcaggctcccagcagctccccaatgggcattattgtggccgtcgtgaccggaattgctgtggccgcaatcgtggcagctgtcgtcgctctgatctattgcagaaagaagcggatcagcgccctgccagggtatcctgagtgccgcgaaatgggcgaaactctgcctgagaaacctgctaaccccacaaatcccgatgaagctgacaaagtcggcgctgaaaacacgatcacatactccctgctcatgcatcctgacgctcttgaggaacctgacgatcagaaccggatcagctctagacgggttaagttttccagatccgcagacgcacccgcttaccaacaagggcagaaccaactctacaatgaacttaatttggggcggagggaagagtacgacgttctggacaaaaggaggggacgagatcccgagatgggcggaaagcctcagcgaaggaagaatccgcaagaggggctttataacgaactccagaaagataaaatggcagaagcctatagtgagattgggatgaagggagaaaggaggaggggtaaaggtcacgatgggttgtaccaaggattgagcacagccactaaagatacctatgatgcgctccacatgcaggccctgccgccaagacgcgccaagagaagcggatctggcgtgaagcagaccctgaatttcgacctgctgaagctggctggcgacgtggaatccaacccaggccctggccatatggctacctacgaggtgctgtgcgaggtggcaagaaagctgggcaccgacgacagagaagtggtgctgttcctgctgaacgtgttcatccctcagcctacactggcccagctgatcggtgcactgagagccctgaaagaggaaggccggctgacctttcctctgctggccgaatgcctgttcagagccggaagaagggatctgctgcgggacctgctgcatctggaccccagatttctggaaagacacctggccggcaccatgagctacttcagcccttaccagctgaccgtgctgcacgttgacggcgaactgtgcgccagagatattcggagcctgatcttcctgagcaaggacaccatcggcagccggtctacccctcagacatttctgcactgggtgtactgcatggaaaacctggacctgctcggccccacagatgtggatgccctgatgtccatgctgagaagcctgagcagagtggacctccagagacaggtgcagacactgatgggactgcacctgagcggacctagccacagccagcactacagacacacccct

SEQ ID NO: 6158 - DNA, 4086 bp, Artificial Sequence
  Synthetic Polynucleotide
atggccttaccagtgaccgccttgctcctgccgctggccttgctgctccacgccgccaggccggacatccagatgacacagagccctagcagcctgtctgccagcgtgggagacagagtgaccatcacatgcaaggccagcgaccacatcaacaactggctggcctggtatcagcagaagcctggacaggcccctaagctgctgatctacggcgctaccacactggaaacaggcgtgcccagcagattttctggcagcggctctggcaccgactacaccctgacaatatccagcctccagcctgaggacttcgccacctactactgtcagcagagctggaacaccccttggacattcggccagggcaccaagctggaaatcaagagactcgagggacagcctaaggccaatcctaccgtgacactgttccctccaagcagcgaagaactccaggccaacaaggccacacttgtgtgcctgatctccgacttctaccctggggctgtgacagtggcttggaaggccgatggatctcctgtgaaagccggcgtggaaaccaccaagccatccaagcagagcaacaacaaatacgccgccagctcctacctgagcctgacacctgagcagtggaagtcccacagatcctacagctgccaagtgacccacgaaggcagcaccgtggaaaagacagtggcccctacagagtgcagcggatccacaacacctggcgagagaagtagcctgcctgccttctatcctggcaccagcggctcttgttctggctgtggatctctgagcctgcctctgctggctggactggttgctgctgatgctgtggcctctctgctgattgtgggagccgtgttcctgtgcgccagacctagaagaagccccgctcaagaggacggcaaggtgtacatcaacatgcccggcagaggaagcactagtagagtgaagttcagcagaagcgccgacgcccctgcctaccagcagggacagaaccaactgtacaacgagctgaacctgggcagacgggaagagtacgacgtgctggacaagcggagaggcagggaccctgagatgggcggaaagccccagcggagaaagaacccccaggaaggactgtataacgaactccagaaagacaagatggccgaagcctacagcgagatcggcatgaagggcgagcggagaagaggcaagggccacgatggcctgtaccagggcctgagcaccgccaccaaggacacctatgacgccctgcacatgcaggccctgcctccaagaagggccaagcgatctggatctggagcaacaaacttctcactactcaaacaagcaggtgacgtggaggagaatcccgggcctatggactggatttggcgcatccttttccttgtcggcgctgctaccggcgcgcattccttcgaacaagttcagcttcaacagcctggcgctgagctggtcaaacctggcgcttctgtgaagatgagctgcaaagccagcggctacgccttcagcagctactggatcaactggatgaagcagaaacccggccagggactcgaatggatcggccaaatctatcccggcgacggcgacaccaactacaacggcaagttcaagggcagagccacactgaccgccgatacctctagcagcacagcctacatgcagctgagcagcctgaccagcgaagatagcgccgtgtacttctgtgcccggtccatcacaacagtcgtgggctgcgctatggactattggggccagggaacaagcgtgaccgtgtctagtacgcgtgcctctacaaagggaccctccgtgtttcctctggctcccagcagcaagtctacaagcggaggaacagccgctctgggctgcctggtcaaggattactttcccgagcctgtgaccgtgtcctggaatagcggagcactgacaagcggcgtgcacacctttccagccgtgctgcaaagcagcggcctgtactctctgagcagcgtggtcacagtgcctagctctagcctgggcacccagacctacatctgcaatgtgaaccacaagcctagcaacaccaaggtggacaagagagtggaacccaagagctgtggtaccactccagctgctccacctaaagctgtcctgaagctcgaacctcaatggattaacgtcctccaagaagattctgtcaccctgacatgccggggcacccactctccagagtctgattccattcagtggtttcataatgggaacctgattccgactcacacgcagcccagctatcggtttaaagctaacaacaatgactccggggagtatacttgccagacaggacagaccagcctgtctgacccagtgcacctgacagttctgagcgaatggctcgtcctgcagacccctcatcttgagttccaagagggcgaaaccattgtcctgagatgccactcctggaaagataagccccttgtgaaagtcacattttttcagaatggcaagagcaagaagttttctcggagcgatccgaatttcagtattccccaggccaaccactctcacagcggagactatcactgtacaggcaacatcgggtatacactctacagctctaagcccgtcacaattaccgttcaggctcccagcagctccccaatgggcattattgtggccgtcgtgaccggaattgctgtggccgcaatcgtggcagctgtcgtcgctctgatctattgcagaaagaagcggatcagcgccctgccagggtatcctgagtgccgcgaaatgggcgaaactctgcctgagaaacctgctaaccccacaaatcccgatgaagctgacaaagtcggcgctgaaaacacgatcacatactccctgctcatgcatcctgacgctcttgaggaacctgacgatcagaaccggatcagctctagacgggttaagttttccagatccgcagacgcacccgcttaccaacaagggcagaaccaactctacaatgaacttaatttggggcggagggaagagtacgacgttctggacaaaaggaggggacgagatcccgagatgggcggaaagcctcagcgaaggaagaatccgcaagaggggctttataacgaactccagaaagataaaatggcagaagcctatagtgagattgggatgaagggagaaaggaggaggggtaaaggtcacgatgggttgtaccaaggattgagcacagccactaaagatacctatgatgcgctccacatgcaggccctgccgccaagacgcgccaagagaagcggatctggcgtgaagcagaccctgaatttcgacctgctgaagctggctggcgacgtggaatccaacccaggccctggccatatgtccgactccaaggaggtccctagccttccatttttgcgacacttgctcgaagagttggacagccatgaggacagcttgctgctgtttctgtgtcacgacgcggccccgggctgcacgacggtcacgcaagctttgtgctcgcttagccaacagcgcaagctgaccctcgcggctctggtcgagatgctctacgtgctgcagcgtatggatcttctcaagagccgcttcgggctcagcaaggagggggccgagcaattgctgggcacaagctttctcacgcgctaccgcaagctcatggtttgcgtgggtgaggagctcgactcgagcgagctacgcgctctacgcttgttcgcgtgcaacctgaatccgagcctgagcacggcgctttctgagagcagccgctttgtcgagcttgtactcgcgcttgaaaacgtaggactcgtctcgccatcgagtgtttccgtgcttgcggacatgttgcgcactcttcggcgcctcgatttgtgccagcagcttgttgagtacgaacaacaagagcaagccaggtaccgttactgttacgcggcctcgccctcattgccagttcgtacgttacgtcgggggcacggcgcgagtgaacacgagcagctgtgcatgcccgtgcaagaatcctctgacagccccgagctgctgcgcacgcccgtacaagaatcctccagcgacagccccgagcaaacgact

SEQ ID NO: 6159 - DNA, 3963 bp, Artificial Sequence
  Synthetic Polynucleotide
atggccttaccagtgaccgccttgctcctgccgctggccttgctgctccacgccgccaggccggacatccagatgacacagagccctagcagcctgtctgccagcgtgggagacagagtgaccatcacatgcaaggccagcgaccacatcaacaactggctggcctggtatcagcagaagcctggacaggcccctaagctgctgatctacggcgctaccacactggaaacaggcgtgcccagcagattttctggcagcggctctggcaccgactacaccctgacaatatccagcctccagcctgaggacttcgccacctactactgtcagcagagctggaacaccccttggacattcggccagggcaccaagctggaaatcaagagactcgagggacagcctaaggccaatcctaccgtgacactgttccctccaagcagcgaagaactccaggccaacaaggccacacttgtgtgcctgatctccgacttctaccctggggctgtgacagtggcttggaaggccgatggatctcctgtgaaagccggcgtggaaaccaccaagccatccaagcagagcaacaacaaatacgccgccagctcctacctgagcctgacacctgagcagtggaagtcccacagatcctacagctgccaagtgacccacgaaggcagcaccgtggaaaagacagtggcccctacagagtgcagcggatccacaacacctggcgagagaagtagcctgcctgccttctatcctggcaccagcggctcttgttctggctgtggatctctgagcctgcctctgctggctggactggttgctgctgatgctgtggcctctctgctgattgtgggagccgtgttcctgtgcgccagacctagaagaagccccgctcaagaggacggcaaggtgtacatcaacatgcccggcagaggaagcactagtagagtgaagttcagcagaagcgccgacgcccctgcctaccagcagggacagaaccaactgtacaacgagctgaacctgggcagacgggaagagtacgacgtgctggacaagcggagaggcagggaccctgagatgggcggaaagccccagcggagaaagaacccccaggaaggactgtataacgaactccagaaagacaagatggccgaagcctacagcgagatcggcatgaagggcgagcggagaagaggcaagggccacgatggcctgtaccagggcctgagcaccgccaccaaggacacctatgacgccctgcacatgcaggccctgcctccaagaagggccaagcgatctggatctggagcaacaaacttctcactactcaaacaagcaggtgacgtggaggagaatcccgggcctatggactggatttggcgcatccttttccttgtcggcgctgctaccggcgcgcattccttcgaacaagttcagcttcaacagcctggcgctgagctggtcaaacctggcgcttctgtgaagatgagctgcaaagccagcggctacgccttcagcagctactggatcaactggatgaagcagaaacccggccagggactcgaatggatcggccaaatctatcccggcgacggcgacaccaactacaacggcaagttcaagggcagagccacactgaccgccgatacctctagcagcacagcctacatgcagctgagcagcctgaccagcgaagatagcgccgtgtacttctgtgcccggtccatcacaacagtcgtgggctgcgctatggactattggggccagggaacaagcgtgaccgtgtctagtacgcgtgcctctacaaagggaccctccgtgtttcctctggctcccagcagcaagtctacaagcggaggaacagccgctctgggctgcctggtcaaggattactttcccgagcctgtgaccgtgtcctggaatagcggagcactgacaagcggcgtgcacacctttccagccgtgctgcaaagcagcggcctgtactctctgagcagcgtggtcacagtgcctagctctagcctgggcacccagacctacatctgcaatgtgaaccacaagcctagcaacaccaaggtggacaagagagtggaacccaagagctgtggtaccactccagctgctccacctaaagctgtcctgaagctcgaacctcaatggattaacgtcctccaagaagattctgtcaccctgacatgccggggcacccactctccagagtctgattccattcagtggtttcataatgggaacctgattccgactcacacgcagcccagctatcggtttaaagctaacaacaatgactccggggagtatacttgccagacaggacagaccagcctgtctgacccagtgcacctgacagttctgagcgaatggctcgtcctgcagacccctcatcttgagttccaagagggcgaaaccattgtcctgagatgccactcctggaaagataagccccttgtgaaagtcacattttttcagaatggcaagagcaagaagttttctcggagcgatccgaatttcagtattccccaggccaaccactctcacagcggagactatcactgtacaggcaacatcgggtatacactctacagctctaagcccgtcacaattaccgttcaggctcccagcagctccccaatgggcattattgtggccgtcgtgaccggaattgctgtggccgcaatcgtggcagctgtcgtcgctctgatctattgcagaaagaagcggatcagcgccctgccagggtatcctgagtgccgcgaaatgggcgaaactctgcctgagaaacctgctaaccccacaaatcccgatgaagctgacaaagtcggcgctgaaaacacgatcacatactccctgctcatgcatcctgacgctcttgaggaacctgacgatcagaaccggatcagctctagacgggttaagttttccagatccgcagacgcacccgcttaccaacaagggcagaaccaactctacaatgaacttaatttggggcggagggaagagtacgacgttctggacaaaaggaggggacgagatcccgagatgggcggaaagcctcagcgaaggaagaatccgcaagaggggctttataacgaactccagaaagataaaatggcagaagcctatagtgagattgggatgaagggagaaaggaggaggggtaaaggtcacgatgggttgtaccaaggattgagcacagccactaaagatacctatgatgcgctccacatgcaggccctgccgccaagacgcgccaagagaagcggatctggcgtgaagcagaccctgaatttcgacctgctgaagctggctggcgacgtggaatccaacccaggccctggccatatgaccgagtacaagcccacggtgcgcctcgccacccgcgacgacgtccccagggccgtacgcaccctcgccgccgcgttcgccgactaccccgccacgcgccacaccgtcgatccggaccgccacatcgagcgggtcaccgagctgcaagaactcttcctcacgcgcgtcgggctcgacatcggcaaggtgtgggtcgcggacgacggcgccgcggtggcggtctggaccacgccggagagcgtcgaagcgggggcggtgttcgccgagatcggcccgcgcatggccgagttgagcggttcccggctggccgcgcagcaacagatggaaggcctcctggcgccgcaccggcccaaggagcccgcgtggttcctggccaccgtcggcgtctcgcccgaccaccagggcaagggtctgggcagcgccgtcgtgctccccggagtggaggcggccgagcgcgccggggtgcccgccttcctggagacctccgcgccccgcaacctccccttctacgagcggctcggcttcaccgtcaccgccgacgtcgaggtgcccgaaggaccgcgcacctggtgcatgacccgcaagcccggtgcctga

SEQ ID NO: 6160 - DNA, 4374 bp, Artificial Sequence
  Synthetic Polynucleotide
atggccttaccagtgaccgccttgctcctgccgctggccttgctgctccacgccgccaggccggaagtgcagctggttgaatctggcggaggactggttcaggctggcggatctctgagactgtcttgtgccgccagcggcagaacctttagcatgggctggtttagacaggcccctggcaaagagagagagttcgtcgccgccatcacatactctggcggcagcccttactacgccgactctgtgaagggcagattcaccatcagccgggacaacgccaagaacaccgtgtacctccagatgaacagcctgaagcctgaggacaccgccgtgtactactgcgccgccaatccaacatacggcagcgactggaacgccgagaattggggccagggaacccaagtgacagtgtctagcggtaccggcggaggcggatctggcggcggaggtagcggtggcggaggatctgaattcgacatccagatgacacagagccctagcagcctgtctgccagcgtgggagacagagtgaccatcacatgcaaggccagcgaccacatcaacaactggctggcctggtatcagcagaagcctggacaggcccctaagctgctgatctacggcgctaccacactggaaacaggcgtgcccagcagattttctggcagcggctctggcaccgactacaccctgacaatatccagcctccagcctgaggacttcgccacctactactgtcagcagagctggaacaccccttggacattcggccagggcaccaagctggaaatcaagagactcgagggacagcctaaggccaatcctaccgtgacactgttccctccaagcagcgaagaactccaggccaacaaggccacacttgtgtgcctgatctccgacttctaccctggggctgtgacagtggcttggaaggccgatggatctcctgtgaaagccggcgtggaaaccaccaagccatccaagcagagcaacaacaaatacgccgccagctcctacctgagcctgacacctgagcagtggaagtcccacagatcctacagctgccaagtgacccacgaaggcagcaccgtggaaaagacagtggcccctacagagtgcagcggatccacaacacctggcgagagaagtagcctgcctgccttctatcctggcaccagcggctcttgttctggctgtggatctctgagcctgcctctgctggctggactggttgctgctgatgctgtggcctctctgctgattgtgggagccgtgttcctgtgcgccagacctagaagaagccccgctcaagaggacggcaaggtgtacatcaacatgcccggcagaggaagcactagtagagtgaagttcagcagaagcgccgacgcccctgcctaccagcagggacagaaccaactgtacaacgagctgaacctgggcagacgggaagagtacgacgtgctggacaagcggagaggcagggaccctgagatgggcggaaagccccagcggagaaagaacccccaggaaggactgtataacgaactccagaaagacaagatggccgaagcctacagcgagatcggcatgaagggcgagcggagaagaggcaagggccacgatggcctgtaccagggcctgagcaccgccaccaaggacacctatgacgccctgcacatgcaggccctgcctccaagaagggccaagcgatctggatctggagcaacaaacttctcactactcaaacaagcaggtgacgtggaggagaatcccgggcctatggactggatttggcgcatccttttccttgtcggcgctgctaccggcgcgcattccttcgaacaagttcagcttcaacagcctggcgctgagctggtcaaacctggcgcttctgtgaagatgagctgcaaagccagcggctacgccttcagcagctactggatcaactggatgaagcagaaacccggccagggactcgaatggatcggccaaatctatcccggcgacggcgacaccaactacaacggcaagttcaagggcagagccacactgaccgccgatacctctagcagcacagcctacatgcagctgagcagcctgaccagcgaagatagcgccgtgtacttctgtgcccggtccatcacaacagtcgtgggctgcgctatggactattggggccagggaacaagcgtgaccgtgtctagtacgcgtgcctctacaaagggaccctccgtgtttcctctggctcccagcagcaagtctacaagcggaggaacagccgctctgggctgcctggtcaaggattactttcccgagcctgtgaccgtgtcctggaatagcggagcactgacaagcggcgtgcacacctttccagccgtgctgcaaagcagcggcctgtactctctgagcagcgtggtcacagtgcctagctctagcctgggcacccagacctacatctgcaatgtgaaccacaagcctagcaacaccaaggtggacaagagagtggaacccaagagctgtggtaccactccagctgctccacctaaagctgtcctgaagctcgaacctcaatggattaacgtcctccaagaagattctgtcaccctgacatgccggggcacccactctccagagtctgattccattcagtggtttcataatgggaacctgattccgactcacacgcagcccagctatcggtttaaagctaacaacaatgactccggggagtatacttgccagacaggacagaccagcctgtctgacccagtgcacctgacagttctgagcgaatggctcgtcctgcagacccctcatcttgagttccaagagggcgaaaccattgtcctgagatgccactcctggaaagataagccccttgtgaaagtcacattttttcagaatggcaagagcaagaagttttctcggagcgatccgaatttcagtattccccaggccaaccactctcacagcggagactatcactgtacaggcaacatcgggtatacactctacagctctaagcccgtcacaattaccgttcaggctcccagcagctccccaatgggcattattgtggccgtcgtgaccggaattgctgtggccgcaatcgtggcagctgtcgtcgctctgatctattgcagaaagaagcggatcagcgccctgccagggtatcctgagtgccgcgaaatgggcgaaactctgcctgagaaacctgctaaccccacaaatcccgatgaagctgacaaagtcggcgctgaaaacacgatcacatactccctgctcatgcatcctgacgctcttgaggaacctgacgatcagaaccggatcagctctagacgggttaagttttccagatccgcagacgcacccgcttaccaacaagggcagaaccaactctacaatgaacttaatttggggcggagggaagagtacgacgttctggacaaaaggaggggacgagatcccgagatgggcggaaagcctcagcgaaggaagaatccgcaagaggggctttataacgaactccagaaagataaaatggcagaagcctatagtgagattgggatgaagggagaaaggaggaggggtaaaggtcacgatgggttgtaccaaggattgagcacagccactaaagatacctatgatgcgctccacatgcaggccctgccgccaagacgcgccaagagaagcggatctggcgtgaagcagaccctgaatttcgacctgctgaagctggctggcgacgtggaatccaacccaggccctggccatatgaccgagtacaagcccacggtgcgcctcgccacccgcgacgacgtccccagggccgtacgcaccctcgccgccgcgttcgccgactaccccgccacgcgccacaccgtcgatccggaccgccacatcgagcgggtcaccgagctgcaagaactcttcctcacgcgcgtcgggctcgacatcggcaaggtgtgggtcgcggacgacggcgccgcggtggcggtctggaccacgccggagagcgtcgaagcgggggcggtgttcgccgagatcggcccgcgcatggccgagttgagcggttcccggctggccgcgcagcaacagatggaaggcctcctggcgccgcaccggcccaaggagcccgcgtggttcctggccaccgtcggcgtctcgcccgaccaccagggcaagggtctgggcagcgccgtcgtgctccccggagtggaggcggccgagcgcgccggggtgcccgccttcctggagacctccgcgccccgcaacctccccttctacgagcggctcggcttcaccgtcaccgccgacgtcgaggtgcccgaaggaccgcgcacctggtgcatgacccgcaagcccggtgcctga

SEQ ID NO: 6161 - DNA, 4785 bp, Artificial Sequence
  Synthetic Polynucleotide
atggccttaccagtgaccgccttgctcctgccgctggccttgctgctccacgccgccaggccggaagtgcagctggttgaatctggcggaggactggttcaggctggcggatctctgagactgtcttgtgccgccagcggcagaacctttagcatgggctggtttagacaggcccctggcaaagagagagagttcgtcgccgccatcacatactctggcggcagcccttactacgccgactctgtgaagggcagattcaccatcagccgggacaacgccaagaacaccgtgtacctccagatgaacagcctgaagcctgaggacaccgccgtgtactactgcgccgccaatccaacatacggcagcgactggaacgccgagaattggggccagggaacccaagtgacagtgtctagcggtaccggcggaggcggatctggcggcggaggtagcggtggcggaggatctgaattcgacatccagatgacacagagccctagcagcctgtctgccagcgtgggagacagagtgaccatcacatgcaaggccagcgaccacatcaacaactggctggcctggtatcagcagaagcctggacaggcccctaagctgctgatctacggcgctaccacactggaaacaggcgtgcccagcagattttctggcagcggctctggcaccgactacaccctgacaatatccagcctccagcctgaggacttcgccacctactactgtcagcagagctggaacaccccttggacattcggccagggcaccaagctggaaatcaagagactcgagggacagcctaaggccaatcctaccgtgacactgttccctccaagcagcgaagaactccaggccaacaaggccacacttgtgtgcctgatctccgacttctaccctggggctgtgacagtggcttggaaggccgatggatctcctgtgaaagccggcgtggaaaccaccaagccatccaagcagagcaacaacaaatacgccgccagctcctacctgagcctgacacctgagcagtggaagtcccacagatcctacagctgccaagtgacccacgaaggcagcaccgtggaaaagacagtggcccctacagagtgcagcggatccacaacacctggcgagagaagtagcctgcctgccttctatcctggcaccagcggctcttgttctggctgtggatctctgagcctgcctctgctggctggactggttgctgctgatgctgtggcctctctgctgattgtgggagccgtgttcctgtgcgccagacctagaagaagccccgctcaagaggacggcaaggtgtacatcaacatgcccggcagaggaagcactagtagagtgaagttcagcagaagcgccgacgcccctgcctaccagcagggacagaaccaactgtacaacgagctgaacctgggcagacgggaagagtacgacgtgctggacaagcggagaggcagggaccctgagatgggcggaaagccccagcggagaaagaacccccaggaaggactgtataacgaactccagaaagacaagatggccgaagcctacagcgagatcggcatgaagggcgagcggagaagaggcaagggccacgatggcctgtaccagggcctgagcaccgccaccaaggacacctatgacgccctgcacatgcaggccctgcctccaagaagggccaagcgatctggatctggagcaacaaacttctcactactcaaacaagcaggtgacgtggaggagaatcccgggcctatggactggatttggcgcatccttttccttgtcggcgctgctaccggcgcgcattccgggcccgaagtgcaactggttgaatccggtggcggcctggtgcaagcaggcggatctctcagacttagctgtgccgcctccggcagaaccttcacaatgggatggtttaggcaggctccagggaaagagagagagttcgtcgccgccatctctctgtctcccacactggcctactacgccgactctgtgaaaggccggttcaccatctccagagataatgccaagaacaccgtggtgctgcaaatgaactctctgaaacccgaggatacagccctgtactattgtgccgctgaccggaagtccgtgatgagcatcagacccgattactggggacagggcacacaagtcacagtgtcctctggatccggcggcggaggatctggcggaggcggatctgggggcggaggctctttcgaacaagttcagcttcaacagcctggcgctgagctggtcaaacctggcgcttctgtgaagatgagctgcaaagccagcggctacgccttcagcagctactggatcaactggatgaagcagaaacccggccagggactcgaatggatcggccaaatctatcccggcgacggcgacaccaactacaacggcaagttcaagggcagagccacactgaccgccgatacctctagcagcacagcctacatgcagctgagcagcctgaccagcgaagatagcgccgtgtacttctgtgcccggtccatcacaacagtcgtgggctgcgctatggactattggggccagggaacaagcgtgaccgtgtctagtacgcgtgcctctacaaagggaccctccgtgtttcctctggctcccagcagcaagtctacaagcggaggaacagccgctctgggctgcctggtcaaggattactttcccgagcctgtgaccgtgtcctggaatagcggagcactgacaagcggcgtgcacacctttccagccgtgctgcaaagcagcggcctgtactctctgagcagcgtggtcacagtgcctagctctagcctgggcacccagacctacatctgcaatgtgaaccacaagcctagcaacaccaaggtggacaagagagtggaacccaagagctgtggtaccactccagctgctccacctaaagctgtcctgaagctcgaacctcaatggattaacgtcctccaagaagattctgtcaccctgacatgccggggcacccactctccagagtctgattccattcagtggtttcataatgggaacctgattccgactcacacgcagcccagctatcggtttaaagctaacaacaatgactccggggagtatacttgccagacaggacagaccagcctgtctgacccagtgcacctgacagttctgagcgaatggctcgtcctgcagacccctcatcttgagttccaagagggcgaaaccattgtcctgagatgccactcctggaaagataagccccttgtgaaagtcacattttttcagaatggcaagagcaagaagttttctcggagcgatccgaatttcagtattccccaggccaaccactctcacagcggagactatcactgtacaggcaacatcgggtatacactctacagctctaagcccgtcacaattaccgttcaggctcccagcagctccccaatgggcattattgtggccgtcgtgaccggaattgctgtggccgcaatcgtggcagctgtcgtcgctctgatctattgcagaaagaagcggatcagcgccctgccagggtatcctgagtgccgcgaaatgggcgaaactctgcctgagaaacctgctaaccccacaaatcccgatgaagctgacaaagtcggcgctgaaaacacgatcacatactccctgctcatgcatcctgacgctcttgaggaacctgacgatcagaaccggatcagctctagacgggttaagttttccagatccgcagacgcacccgcttaccaacaagggcagaaccaactctacaatgaacttaatttggggcggagggaagagtacgacgttctggacaaaaggaggggacgagatcccgagatgggcggaaagcctcagcgaaggaagaatccgcaagaggggctttataacgaactccagaaagataaaatggcagaagcctatagtgagattgggatgaagggagaaaggaggaggggtaaaggtcacgatgggttgtaccaaggattgagcacagccactaaagatacctatgatgcgctccacatgcaggccctgccgccaagacgcgccaagagaagcggatctggcgtgaagcagaccctgaatttcgacctgctgaagctggctggcgacgtggaatccaacccaggccctggccatatgaccgagtacaagcccacggtgcgcctcgccacccgcgacgacgtccccagggccgtacgcaccctcgccgccgcgttcgccgactaccccgccacgcgccacaccgtcgatccggaccgccacatcgagcgggtcaccgagctgcaagaactcttcctcacgcgcgtcgggctcgacatcggcaaggtgtgggtcgcggacgacggcgccgcggtggcggtctggaccacgccggagagcgtcgaagcgggggcggtgttcgccgagatcggcccgcgcatggccgagttgagcggttcccggctggccgcgcagcaacagatggaaggcctcctggcgccgcaccggcccaaggagcccgcgtggttcctggccaccgtcggcgtctcgcccgaccaccagggcaagggtctgggcagcgccgtcgtgctccccggagtggaggcggccgagcgcgccggggtgcccgccttcctggagacctccgcgccccgcaacctccccttctacgagcggctcggcttcaccgtcaccgccgacgtcgaggtgcccgaaggaccgcgcacctggtgcatgacccgcaagcccggtgcctga

SEQ ID NO: 6162 - DNA, 3984 bp, Artificial Sequence
  Synthetic Polynucleotide
atggccttaccagtgaccgccttgctcctgccgctggccttgctgctccacgccgccaggccggaagtgcagctggttgaatctggcggaggactggttcaggctggcggatctctgagactgtcttgtgccgccagcggcagaacctttagcatgggctggtttagacaggcccctggcaaagagagagagttcgtcgccgccatcacatactctggcggcagcccttactacgccgactctgtgaagggcagattcaccatcagccgggacaacgccaagaacaccgtgtacctccagatgaacagcctgaagcctgaggacaccgccgtgtactactgcgccgccaatccaacatacggcagcgactggaacgccgagaattggggccagggaacccaagtgacagtgtctagcctcgagggacagcctaaggccaatcctaccgtgacactgttccctccaagcagcgaagaactccaggccaacaaggccacacttgtgtgcctgatctccgacttctaccctggggctgtgacagtggcttggaaggccgatggatctcctgtgaaagccggcgtggaaaccaccaagccatccaagcagagcaacaacaaatacgccgccagctcctacctgagcctgacacctgagcagtggaagtcccacagatcctacagctgccaagtgacccacgaaggcagcaccgtggaaaagacagtggcccctacagagtgcagcggatccacaacacctggcgagagaagtagcctgcctgccttctatcctggcaccagcggctcttgttctggctgtggatctctgagcctgcctctgctggctggactggttgctgctgatgctgtggcctctctgctgattgtgggagccgtgttcctgtgcgccagacctagaagaagccccgctcaagaggacggcaaggtgtacatcaacatgcccggcagaggaagcactagtagagtgaagttcagcagaagcgccgacgcccctgcctaccagcagggacagaaccaactgtacaacgagctgaacctgggcagacgggaagagtacgacgtgctggacaagcggagaggcagggaccctgagatgggcggaaagccccagcggagaaagaacccccaggaaggactgtataacgaactccagaaagacaagatggccgaagcctacagcgagatcggcatgaagggcgagcggagaagaggcaagggccacgatggcctgtaccagggcctgagcaccgccaccaaggacacctatgacgccctgcacatgcaggccctgcctccaagaagggccaagcgatctggatctggagcaacaaacttctcactactcaaacaagcaggtgacgtggaggagaatcccgggcctatggactggatttggcgcatccttttccttgtcggcgctgctaccggcgcgcattccgggcccgaagtgcaactggttgaatccggtggcggcctggtgcaagcaggcggatctctcagacttagctgtgccgcctccggcagaaccttcacaatgggatggtttaggcaggctccagggaaagagagagagttcgtcgccgccatctctctgtctcccacactggcctactacgccgactctgtgaaaggccggttcaccatctccagagataatgccaagaacaccgtggtgctgcaaatgaactctctgaaacccgaggatacagccctgtactattgtgccgctgaccggaagtccgtgatgagcatcagacccgattactggggacagggcacacaagtcacagtgtcctctacgcgtgcctctacaaagggaccctccgtgtttcctctggctcccagcagcaagtctacaagcggaggaacagccgctctgggctgcctggtcaaggattactttcccgagcctgtgaccgtgtcctggaatagcggagcactgacaagcggcgtgcacacctttccagccgtgctgcaaagcagcggcctgtactctctgagcagcgtggtcacagtgcctagctctagcctgggcacccagacctacatctgcaatgtgaaccacaagcctagcaacaccaaggtggacaagagagtggaacccaagagctgtggtaccactccagctgctccacctaaagctgtcctgaagctcgaacctcaatggattaacgtcctccaagaagattctgtcaccctgacatgccggggcacccactctccagagtctgattccattcagtggtttcataatgggaacctgattccgactcacacgcagcccagctatcggtttaaagctaacaacaatgactccggggagtatacttgccagacaggacagaccagcctgtctgacccagtgcacctgacagttctgagcgaatggctcgtcctgcagacccctcatcttgagttccaagagggcgaaaccattgtcctgagatgccactcctggaaagataagccccttgtgaaagtcacattttttcagaatggcaagagcaagaagttttctcggagcgatccgaatttcagtattccccaggccaaccactctcacagcggagactatcactgtacaggcaacatcgggtatacactctacagctctaagcccgtcacaattaccgttcaggctcccagcagctccccaatgggcattattgtggccgtcgtgaccggaattgctgtggccgcaatcgtggcagctgtcgtcgctctgatctattgcagaaagaagcggatcagcgccctgccagggtatcctgagtgccgcgaaatgggcgaaactctgcctgagaaacctgctaaccccacaaatcccgatgaagctgacaaagtcggcgctgaaaacacgatcacatactccctgctcatgcatcctgacgctcttgaggaacctgacgatcagaaccggatcagctctagacgggttaagttttccagatccgcagacgcacccgcttaccaacaagggcagaaccaactctacaatgaacttaatttggggcggagggaagagtacgacgttctggacaaaaggaggggacgagatcccgagatgggcggaaagcctcagcgaaggaagaatccgcaagaggggctttataacgaactccagaaagataaaatggcagaagcctatagtgagattgggatgaagggagaaaggaggaggggtaaaggtcacgatgggttgtaccaaggattgagcacagccactaaagatacctatgatgcgctccacatgcaggccctgccgccaagacgcgccaagagaagcggatctggcgtgaagcagaccctgaatttcgacctgctgaagctggctggcgacgtggaatccaacccaggccctggccatatgaccgagtacaagcccacggtgcgcctcgccacccgcgacgacgtccccagggccgtacgcaccctcgccgccgcgttcgccgactaccccgccacgcgccacaccgtcgatccggaccgccacatcgagcgggtcaccgagctgcaagaactcttcctcacgcgcgtcgggctcgacatcggcaaggtgtgggtcgcggacgacggcgccgcggtggcggtctggaccacgccggagagcgtcgaagcgggggcggtgttcgccgagatcggcccgcgcatggccgagttgagcggttcccggctggccgcgcagcaacagatggaaggcctcctggcgccgcaccggcccaaggagcccgcgtggttcctggccaccgtcggcgtctcgcccgaccaccagggcaagggtctgggcagcgccgtcgtgctccccggagtggaggcggccgagcgcgccggggtgcccgccttcctggagacctccgcgccccgcaacctccccttctacgagcggctcggcttcaccgtcaccgccgacgtcgaggtgcccgaaggaccgcgcacctggtgcatgacccgcaagcccggtgcctga

SEQ ID NO: 6163 - DNA, 4008 bp, Artificial Sequence
  Synthetic Polynucleotide
atggccttaccagtgaccgccttgctcctgccgctggccttgctgctccacgccgccaggccggacatccagatgacacagagccctagcagcctgtctgccagcgtgggagacagagtgaccatcacatgcaaggccagcgaccacatcaacaactggctggcctggtatcagcagaagcctggacaggcccctaagctgctgatctacggcgctaccacactggaaacaggcgtgcccagcagattttctggcagcggctctggcaccgactacaccctgacaatatccagcctccagcctgaggacttcgccacctactactgtcagcagagctggaacaccccttggacattcggccagggcaccaagctggaaatcaagagactcgaggacctgaagaacgtgttcccacctgaggtggccgtgttcgagcctagcgaggccgagatcagccacacccagaaagccaccctcgtgtgcctggctaccggcttctaccccgaccatgtggaactgtcttggtgggtcaacggcaaagaggtgcacagcggcgtgtctaccgacccccagccactgaaagaacagcccgccctgaacgacagccggtactgcctgagcagcagactgagagtgtccgccaccttctggcagaacccccggaaccacttcagatgccaggtgcagttctacggcctgagcgagaacgacgagtggacccaggacagagccaagcccgtgacccagatcgtgtctgccgaagcctggggcagagccgattgcggatccacaacacctggcgagagaagtagcctgcctgccttctatcctggcaccagcggctcttgttctggctgtggatctctgagcctgcctctgctggctggactggttgctgctgatgctgtggcctctctgctgattgtgggagccgtgttcctgtgcgccagacctagaagaagccccgctcaagaggacggcaaggtgtacatcaacatgcccggcagaggaagcactagtagagtgaagttcagcagaagcgccgacgcccctgcctaccagcagggacagaaccaactgtacaacgagctgaacctgggcagacgggaagagtacgacgtgctggacaagcggagaggcagggaccctgagatgggcggaaagccccagcggagaaagaacccccaggaaggactgtataacgaactccagaaagacaagatggccgaagcctacagcgagatcggcatgaagggcgagcggagaagaggcaagggccacgatggcctgtaccagggcctgagcaccgccaccaaggacacctatgacgccctgcacatgcaggccctgcctccaagaagggccaagcgatctggatctggagcaacaaacttctcactactcaaacaagcaggtgacgtggaggagaatcccgggcctatggactggatttggcgcatccttttccttgtcggcgctgctaccggcgcgcattccttcgaacaagttcagcttcaacagcctggcgctgagctggtcaaacctggcgcttctgtgaagatgagctgcaaagccagcggctacgccttcagcagctactggatcaactggatgaagcagaaacccggccagggactcgaatggatcggccaaatctatcccggcgacggcgacaccaactacaacggcaagttcaagggcagagccacactgaccgccgatacctctagcagcacagcctacatgcagctgagcagcctgaccagcgaagatagcgccgtgtacttctgtgcccggtccatcacaacagtcgtgggctgcgctatggactattggggccagggaacaagcgtgaccgtgtctagtacgcgtatccagaaccctgatcctgccgtgtaccagctgcgggatagcaagagcagcgacaagagcgtgtgtctgttcaccgacttcgacagccagaccaacgtgtcccagagcaaggactccgacgtgtacatcaccgataagaccgtgctggacatgcggagcatggacttcaagagcaactccgccgtggcctggtccaacaagtccgatttcgcctgcgccaacgccttcaacaacagcattatccccgaggacacattcttcccaagccccgagagcagctgcggtaccactccagctgctccacctaaagctgtcctgaagctcgaacctcaatggattaacgtcctccaagaagattctgtcaccctgacatgccggggcacccactctccagagtctgattccattcagtggtttcataatgggaacctgattccgactcacacgcagcccagctatcggtttaaagctaacaacaatgactccggggagtatacttgccagacaggacagaccagcctgtctgacccagtgcacctgacagttctgagcgaatggctcgtcctgcagacccctcatcttgagttccaagagggcgaaaccattgtcctgagatgccactcctggaaagataagccccttgtgaaagtcacattttttcagaatggcaagagcaagaagttttctcggagcgatccgaatttcagtattccccaggccaaccactctcacagcggagactatcactgtacaggcaacatcgggtatacactctacagctctaagcccgtcacaattaccgttcaggctcccagcagctccccaatgggcattattgtggccgtcgtgaccggaattgctgtggccgcaatcgtggcagctgtcgtcgctctgatctattgcagaaagaagcggatcagcgccctgccagggtatcctgagtgccgcgaaatgggcgaaactctgcctgagaaacctgctaaccccacaaatcccgatgaagctgacaaagtcggcgctgaaaacacgatcacatactccctgctcatgcatcctgacgctcttgaggaacctgacgatcagaaccggatcagctctagacgggttaagttttccagatccgcagacgcacccgcttaccaacaagggcagaaccaactctacaatgaacttaatttggggcggagggaagagtacgacgttctggacaaaaggaggggacgagatcccgagatgggcggaaagcctcagcgaaggaagaatccgcaagaggggctttataacgaactccagaaagataaaatggcagaagcctatagtgagattgggatgaagggagaaaggaggaggggtaaaggtcacgatgggttgtaccaaggattgagcacagccactaaagatacctatgatgcgctccacatgcaggccctgccgccaagacgcgccaagagaagcggatctggcgtgaagcagaccctgaatttcgacctgctgaagctggctggcgacgtggaatccaacccaggccctggccatatgaccgagtacaagcccacggtgcgcctcgccacccgcgacgacgtccccagggccgtacgcaccctcgccgccgcgttcgccgactaccccgccacgcgccacaccgtcgatccggaccgccacatcgagcgggtcaccgagctgcaagaactcttcctcacgcgcgtcgggctcgacatcggcaaggtgtgggtcgcggacgacggcgccgcggtggcggtctggaccacgccggagagcgtcgaagcgggggcggtgttcgccgagatcggcccgcgcatggccgagttgagcggttcccggctggccgcgcagcaacagatggaaggcctcctggcgccgcaccggcccaaggagcccgcgtggttcctggccaccgtcggcgtctcgcccgaccaccagggcaagggtctgggcagcgccgtcgtgctccccggagtggaggcggccgagcgcgccggggtgcccgccttcctggagacctccgcgccccgcaacctccccttctacgagcggctcggcttcaccgtcaccgccgacgtcgaggtgcccgaaggaccgcgcacctggtgcatgacccgcaagcccggtgcctga

SEQ ID NO: 6164 - DNA, 4419 bp, Artificial Sequence
  Synthetic Polynucleotide
atggccttaccagtgaccgccttgctcctgccgctggccttgctgctccacgccgccaggccggaagtgcagctggttgaatctggcggaggactggttcaggctggcggatctctgagactgtcttgtgccgccagcggcagaacctttagcatgggctggtttagacaggcccctggcaaagagagagagttcgtcgccgccatcacatactctggcggcagcccttactacgccgactctgtgaagggcagattcaccatcagccgggacaacgccaagaacaccgtgtacctccagatgaacagcctgaagcctgaggacaccgccgtgtactactgcgccgccaatccaacatacggcagcgactggaacgccgagaattggggccagggaacccaagtgacagtgtctagcggtaccggcggaggcggatctggcggcggaggtagcggtggcggaggatctgaattcgacatccagatgacacagagccctagcagcctgtctgccagcgtgggagacagagtgaccatcacatgcaaggccagcgaccacatcaacaactggctggcctggtatcagcagaagcctggacaggcccctaagctgctgatctacggcgctaccacactggaaacaggcgtgcccagcagattttctggcagcggctctggcaccgactacaccctgacaatatccagcctccagcctgaggacttcgccacctactactgtcagcagagctggaacaccccttggacattcggccagggcaccaagctggaaatcaagagactcgaggacctgaagaacgtgttcccacctgaggtggccgtgttcgagcctagcgaggccgagatcagccacacccagaaagccaccctcgtgtgcctggctaccggcttctaccccgaccatgtggaactgtcttggtgggtcaacggcaaagaggtgcacagcggcgtgtctaccgacccccagccactgaaagaacagcccgccctgaacgacagccggtactgcctgagcagcagactgagagtgtccgccaccttctggcagaacccccggaaccacttcagatgccaggtgcagttctacggcctgagcgagaacgacgagtggacccaggacagagccaagcccgtgacccagatcgtgtctgccgaagcctggggcagagccgattgcggatccacaacacctggcgagagaagtagcctgcctgccttctatcctggcaccagcggctcttgttctggctgtggatctctgagcctgcctctgctggctggactggttgctgctgatgctgtggcctctctgctgattgtgggagccgtgttcctgtgcgccagacctagaagaagccccgctcaagaggacggcaaggtgtacatcaacatgcccggcagaggaagcactagtagagtgaagttcagcagaagcgccgacgcccctgcctaccagcagggacagaaccaactgtacaacgagctgaacctgggcagacgggaagagtacgacgtgctggacaagcggagaggcagggaccctgagatgggcggaaagccccagcggagaaagaacccccaggaaggactgtataacgaactccagaaagacaagatggccgaagcctacagcgagatcggcatgaagggcgagcggagaagaggcaagggccacgatggcctgtaccagggcctgagcaccgccaccaaggacacctatgacgccctgcacatgcaggccctgcctccaagaagggccaagcgatctggatctggagcaacaaacttctcactactcaaacaagcaggtgacgtggaggagaatcccgggcctatggactggatttggcgcatccttttccttgtcggcgctgctaccggcgcgcattccttcgaacaagttcagcttcaacagcctggcgctgagctggtcaaacctggcgcttctgtgaagatgagctgcaaagccagcggctacgccttcagcagctactggatcaactggatgaagcagaaacccggccagggactcgaatggatcggccaaatctatcccggcgacggcgacaccaactacaacggcaagttcaagggcagagccacactgaccgccgatacctctagcagcacagcctacatgcagctgagcagcctgaccagcgaagatagcgccgtgtacttctgtgcccggtccatcacaacagtcgtgggctgcgctatggactattggggccagggaacaagcgtgaccgtgtctagtacgcgtatccagaaccctgatcctgccgtgtaccagctgcgggatagcaagagcagcgacaagagcgtgtgtctgttcaccgacttcgacagccagaccaacgtgtcccagagcaaggactccgacgtgtacatcaccgataagaccgtgctggacatgcggagcatggacttcaagagcaactccgccgtggcctggtccaacaagtccgatttcgcctgcgccaacgccttcaacaacagcattatccccgaggacacattcttcccaagccccgagagcagctgcggtaccactccagctgctccacctaaagctgtcctgaagctcgaacctcaatggattaacgtcctccaagaagattctgtcaccctgacatgccggggcacccactctccagagtctgattccattcagtggtttcataatgggaacctgattccgactcacacgcagcccagctatcggtttaaagctaacaacaatgactccggggagtatacttgccagacaggacagaccagcctgtctgacccagtgcacctgacagttctgagcgaatggctcgtcctgcagacccctcatcttgagttccaagagggcgaaaccattgtcctgagatgccactcctggaaagataagccccttgtgaaagtcacattttttcagaatggcaagagcaagaagttttctcggagcgatccgaatttcagtattccccaggccaaccactctcacagcggagactatcactgtacaggcaacatcgggtatacactctacagctctaagcccgtcacaattaccgttcaggctcccagcagctccccaatgggcattattgtggccgtcgtgaccggaattgctgtggccgcaatcgtggcagctgtcgtcgctctgatctattgcagaaagaagcggatcagcgccctgccagggtatcctgagtgccgcgaaatgggcgaaactctgcctgagaaacctgctaaccccacaaatcccgatgaagctgacaaagtcggcgctgaaaacacgatcacatactccctgctcatgcatcctgacgctcttgaggaacctgacgatcagaaccggatcagctctagacgggttaagttttccagatccgcagacgcacccgcttaccaacaagggcagaaccaactctacaatgaacttaatttggggcggagggaagagtacgacgttctggacaaaaggaggggacgagatcccgagatgggcggaaagcctcagcgaaggaagaatccgcaagaggggctttataacgaactccagaaagataaaatggcagaagcctatagtgagattgggatgaagggagaaaggaggaggggtaaaggtcacgatgggttgtaccaaggattgagcacagccactaaagatacctatgatgcgctccacatgcaggccctgccgccaagacgcgccaagagaagcggatctggcgtgaagcagaccctgaatttcgacctgctgaagctggctggcgacgtggaatccaacccaggccctggccatatgaccgagtacaagcccacggtgcgcctcgccacccgcgacgacgtccccagggccgtacgcaccctcgccgccgcgttcgccgactaccccgccacgcgccacaccgtcgatccggaccgccacatcgagcgggtcaccgagctgcaagaactcttcctcacgcgcgtcgggctcgacatcggcaaggtgtgggtcgcggacgacggcgccgcggtggcggtctggaccacgccggagagcgtcgaagcgggggcggtgttcgccgagatcggcccgcgcatggccgagttgagcggttcccggctggccgcgcagcaacagatggaaggcctcctggcgccgcaccggcccaaggagcccgcgtggttcctggccaccgtcggcgtctcgcccgaccaccagggcaagggtctgggcagcgccgtcgtgctccccggagtggaggcggccgagcgcgccggggtgcccgccttcctggagacctccgcgccccgcaacctccccttctacgagcggctcggcttcaccgtcaccgccgacgtcgaggtgcccgaaggaccgcgcacctggtgcatgacccgcaagcccggtgcctga

SEQ ID NO: 6165 - DNA, 4830 bp, Artificial Sequence
  Synthetic Polynucleotide
atggccttaccagtgaccgccttgctcctgccgctggccttgctgctccacgccgccaggccggaagtgcagctggttgaatctggcggaggactggttcaggctggcggatctctgagactgtcttgtgccgccagcggcagaacctttagcatgggctggtttagacaggcccctggcaaagagagagagttcgtcgccgccatcacatactctggcggcagcccttactacgccgactctgtgaagggcagattcaccatcagccgggacaacgccaagaacaccgtgtacctccagatgaacagcctgaagcctgaggacaccgccgtgtactactgcgccgccaatccaacatacggcagcgactggaacgccgagaattggggccagggaacccaagtgacagtgtctagcggtaccggcggaggcggatctggcggcggaggtagcggtggcggaggatctgaattcgacatccagatgacacagagccctagcagcctgtctgccagcgtgggagacagagtgaccatcacatgcaaggccagcgaccacatcaacaactggctggcctggtatcagcagaagcctggacaggcccctaagctgctgatctacggcgctaccacactggaaacaggcgtgcccagcagattttctggcagcggctctggcaccgactacaccctgacaatatccagcctccagcctgaggacttcgccacctactactgtcagcagagctggaacaccccttggacattcggccagggcaccaagctggaaatcaagagactcgaggacctgaagaacgtgttcccacctgaggtggccgtgttcgagcctagcgaggccgagatcagccacacccagaaagccaccctcgtgtgcctggctaccggcttctaccccgaccatgtggaactgtcttggtgggtcaacggcaaagaggtgcacagcggcgtgtctaccgacccccagccactgaaagaacagcccgccctgaacgacagccggtactgcctgagcagcagactgagagtgtccgccaccttctggcagaacccccggaaccacttcagatgccaggtgcagttctacggcctgagcgagaacgacgagtggacccaggacagagccaagcccgtgacccagatcgtgtctgccgaagcctggggcagagccgattgcggatccacaacacctggcgagagaagtagcctgcctgccttctatcctggcaccagcggctcttgttctggctgtggatctctgagcctgcctctgctggctggactggttgctgctgatgctgtggcctctctgctgattgtgggagccgtgttcctgtgcgccagacctagaagaagccccgctcaagaggacggcaaggtgtacatcaacatgcccggcagaggaagcactagtagagtgaagttcagcagaagcgccgacgcccctgcctaccagcagggacagaaccaactgtacaacgagctgaacctgggcagacgggaagagtacgacgtgctggacaagcggagaggcagggaccctgagatgggcggaaagccccagcggagaaagaacccccaggaaggactgtataacgaactccagaaagacaagatggccgaagcctacagcgagatcggcatgaagggcgagcggagaagaggcaagggccacgatggcctgtaccagggcctgagcaccgccaccaaggacacctatgacgccctgcacatgcaggccctgcctccaagaagggccaagcgatctggatctggagcaacaaacttctcactactcaaacaagcaggtgacgtggaggagaatcccgggcctatggactggatttggcgcatccttttccttgtcggcgctgctaccggcgcgcattccgggcccgaagtgcaactggttgaatccggtggcggcctggtgcaagcaggcggatctctcagacttagctgtgccgcctccggcagaaccttcacaatgggatggtttaggcaggctccagggaaagagagagagttcgtcgccgccatctctctgtctcccacactggcctactacgccgactctgtgaaaggccggttcaccatctccagagataatgccaagaacaccgtggtgctgcaaatgaactctctgaaacccgaggatacagccctgtactattgtgccgctgaccggaagtccgtgatgagcatcagacccgattactggggacagggcacacaagtcacagtgtcctctggatccggcggcggaggatctggcggaggcggatctgggggcggaggctctttcgaacaagttcagcttcaacagcctggcgctgagctggtcaaacctggcgcttctgtgaagatgagctgcaaagccagcggctacgccttcagcagctactggatcaactggatgaagcagaaacccggccagggactcgaatggatcggccaaatctatcccggcgacggcgacaccaactacaacggcaagttcaagggcagagccacactgaccgccgatacctctagcagcacagcctacatgcagctgagcagcctgaccagcgaagatagcgccgtgtacttctgtgcccggtccatcacaacagtcgtgggctgcgctatggactattggggccagggaacaagcgtgaccgtgtctagtacgcgtatccagaaccctgatcctgccgtgtaccagctgcgggatagcaagagcagcgacaagagcgtgtgtctgttcaccgacttcgacagccagaccaacgtgtcccagagcaaggactccgacgtgtacatcaccgataagaccgtgctggacatgcggagcatggacttcaagagcaactccgccgtggcctggtccaacaagtccgatttcgcctgcgccaacgccttcaacaacagcattatccccgaggacacattcttcccaagccccgagagcagctgcggtaccactccagctgctccacctaaagctgtcctgaagctcgaacctcaatggattaacgtcctccaagaagattctgtcaccctgacatgccggggcacccactctccagagtctgattccattcagtggtttcataatgggaacctgattccgactcacacgcagcccagctatcggtttaaagctaacaacaatgactccggggagtatacttgccagacaggacagaccagcctgtctgacccagtgcacctgacagttctgagcgaatggctcgtcctgcagacccctcatcttgagttccaagagggcgaaaccattgtcctgagatgccactcctggaaagataagccccttgtgaaagtcacattttttcagaatggcaagagcaagaagttttctcggagcgatccgaatttcagtattccccaggccaaccactctcacagcggagactatcactgtacaggcaacatcgggtatacactctacagctctaagcccgtcacaattaccgttcaggctcccagcagctccccaatgggcattattgtggccgtcgtgaccggaattgctgtggccgcaatcgtggcagctgtcgtcgctctgatctattgcagaaagaagcggatcagcgccctgccagggtatcctgagtgccgcgaaatgggcgaaactctgcctgagaaacctgctaaccccacaaatcccgatgaagctgacaaagtcggcgctgaaaacacgatcacatactccctgctcatgcatcctgacgctcttgaggaacctgacgatcagaaccggatcagctctagacgggttaagttttccagatccgcagacgcacccgcttaccaacaagggcagaaccaactctacaatgaacttaatttggggcggagggaagagtacgacgttctggacaaaaggaggggacgagatcccgagatgggcggaaagcctcagcgaaggaagaatccgcaagaggggctttataacgaactccagaaagataaaatggcagaagcctatagtgagattgggatgaagggagaaaggaggaggggtaaaggtcacgatgggttgtaccaaggattgagcacagccactaaagatacctatgatgcgctccacatgcaggccctgccgccaagacgcgccaagagaagcggatctggcgtgaagcagaccctgaatttcgacctgctgaagctggctggcgacgtggaatccaacccaggccctggccatatgaccgagtacaagcccacggtgcgcctcgccacccgcgacgacgtccccagggccgtacgcaccctcgccgccgcgttcgccgactaccccgccacgcgccacaccgtcgatccggaccgccacatcgagcgggtcaccgagctgcaagaactcttcctcacgcgcgtcgggctcgacatcggcaaggtgtgggtcgcggacgacggcgccgcggtggcggtctggaccacgccggagagcgtcgaagcgggggcggtgttcgccgagatcggcccgcgcatggccgagttgagcggttcccggctggccgcgcagcaacagatggaaggcctcctggcgccgcaccggcccaaggagcccgcgtggttcctggccaccgtcggcgtctcgcccgaccaccagggcaagggtctgggcagcgccgtcgtgctccccggagtggaggcggccgagcgcgccggggtgcccgccttcctggagacctccgcgccccgcaacctccccttctacgagcggctcggcttcaccgtcaccgccgacgtcgaggtgcccgaaggaccgcgcacctggtgcatgacccgcaagcccggtgcctga

SEQ ID NO: 6166 - DNA, 4029 bp, Artificial Sequence
  Synthetic Polynucleotide
atggccttaccagtgaccgccttgctcctgccgctggccttgctgctccacgccgccaggccggaagtgcagctggttgaatctggcggaggactggttcaggctggcggatctctgagactgtcttgtgccgccagcggcagaacctttagcatgggctggtttagacaggcccctggcaaagagagagagttcgtcgccgccatcacatactctggcggcagcccttactacgccgactctgtgaagggcagattcaccatcagccgggacaacgccaagaacaccgtgtacctccagatgaacagcctgaagcctgaggacaccgccgtgtactactgcgccgccaatccaacatacggcagcgactggaacgccgagaattggggccagggaacccaagtgacagtgtctagcctcgaggacctgaagaacgtgttcccacctgaggtggccgtgttcgagcctagcgaggccgagatcagccacacccagaaagccaccctcgtgtgcctggctaccggcttctaccccgaccatgtggaactgtcttggtgggtcaacggcaaagaggtgcacagcggcgtgtctaccgacccccagccactgaaagaacagcccgccctgaacgacagccggtactgcctgagcagcagactgagagtgtccgccaccttctggcagaacccccggaaccacttcagatgccaggtgcagttctacggcctgagcgagaacgacgagtggacccaggacagagccaagcccgtgacccagatcgtgtctgccgaagcctggggcagagccgattgcggatccacaacacctggcgagagaagtagcctgcctgccttctatcctggcaccagcggctcttgttctggctgtggatctctgagcctgcctctgctggctggactggttgctgctgatgctgtggcctctctgctgattgtgggagccgtgttcctgtgcgccagacctagaagaagccccgctcaagaggacggcaaggtgtacatcaacatgcccggcagaggaagcactagtagagtgaagttcagcagaagcgccgacgcccctgcctaccagcagggacagaaccaactgtacaacgagctgaacctgggcagacgggaagagtacgacgtgctggacaagcggagaggcagggaccctgagatgggcggaaagccccagcggagaaagaacccccaggaaggactgtataacgaactccagaaagacaagatggccgaagcctacagcgagatcggcatgaagggcgagcggagaagaggcaagggccacgatggcctgtaccagggcctgagcaccgccaccaaggacacctatgacgccctgcacatgcaggccctgcctccaagaagggccaagcgatctggatctggagcaacaaacttctcactactcaaacaagcaggtgacgtggaggagaatcccgggcctatggactggatttggcgcatccttttccttgtcggcgctgctaccggcgcgcattccgggcccgaagtgcaactggttgaatccggtggcggcctggtgcaagcaggcggatctctcagacttagctgtgccgcctccggcagaaccttcacaatgggatggtttaggcaggctccagggaaagagagagagttcgtcgccgccatctctctgtctcccacactggcctactacgccgactctgtgaaaggccggttcaccatctccagagataatgccaagaacaccgtggtgctgcaaatgaactctctgaaacccgaggatacagccctgtactattgtgccgctgaccggaagtccgtgatgagcatcagacccgattactggggacagggcacacaagtcacagtgtcctctacgcgtatccagaaccctgatcctgccgtgtaccagctgcgggatagcaagagcagcgacaagagcgtgtgtctgttcaccgacttcgacagccagaccaacgtgtcccagagcaaggactccgacgtgtacatcaccgataagaccgtgctggacatgcggagcatggacttcaagagcaactccgccgtggcctggtccaacaagtccgatttcgcctgcgccaacgccttcaacaacagcattatccccgaggacacattcttcccaagccccgagagcagctgcggtaccactccagctgctccacctaaagctgtcctgaagctcgaacctcaatggattaacgtcctccaagaagattctgtcaccctgacatgccggggcacccactctccagagtctgattccattcagtggtttcataatgggaacctgattccgactcacacgcagcccagctatcggtttaaagctaacaacaatgactccggggagtatacttgccagacaggacagaccagcctgtctgacccagtgcacctgacagttctgagcgaatggctcgtcctgcagacccctcatcttgagttccaagagggcgaaaccattgtcctgagatgccactcctggaaagataagccccttgtgaaagtcacattttttcagaatggcaagagcaagaagttttctcggagcgatccgaatttcagtattccccaggccaaccactctcacagcggagactatcactgtacaggcaacatcgggtatacactctacagctctaagcccgtcacaattaccgttcaggctcccagcagctccccaatgggcattattgtggccgtcgtgaccggaattgctgtggccgcaatcgtggcagctgtcgtcgctctgatctattgcagaaagaagcggatcagcgccctgccagggtatcctgagtgccgcgaaatgggcgaaactctgcctgagaaacctgctaaccccacaaatcccgatgaagctgacaaagtcggcgctgaaaacacgatcacatactccctgctcatgcatcctgacgctcttgaggaacctgacgatcagaaccggatcagctctagacgggttaagttttccagatccgcagacgcacccgcttaccaacaagggcagaaccaactctacaatgaacttaatttggggcggagggaagagtacgacgttctggacaaaaggaggggacgagatcccgagatgggcggaaagcctcagcgaaggaagaatccgcaagaggggctttataacgaactccagaaagataaaatggcagaagcctatagtgagattgggatgaagggagaaaggaggaggggtaaaggtcacgatgggttgtaccaaggattgagcacagccactaaagatacctatgatgcgctccacatgcaggccctgccgccaagacgcgccaagagaagcggatctggcgtgaagcagaccctgaatttcgacctgctgaagctggctggcgacgtggaatccaacccaggccctggccatatgaccgagtacaagcccacggtgcgcctcgccacccgcgacgacgtccccagggccgtacgcaccctcgccgccgcgttcgccgactaccccgccacgcgccacaccgtcgatccggaccgccacatcgagcgggtcaccgagctgcaagaactcttcctcacgcgcgtcgggctcgacatcggcaaggtgtgggtcgcggacgacggcgccgcggtggcggtctggaccacgccggagagcgtcgaagcgggggcggtgttcgccgagatcggcccgcgcatggccgagttgagcggttcccggctggccgcgcagcaacagatggaaggcctcctggcgccgcaccggcccaaggagcccgcgtggttcctggccaccgtcggcgtctcgcccgaccaccagggcaagggtctgggcagcgccgtcgtgctccccggagtggaggcggccgagcgcgccggggtgcccgccttcctggagacctccgcgccccgcaacctccccttctacgagcggctcggcttcaccgtcaccgccgacgtcgaggtgcccgaaggaccgcgcacctggtgcatgacccgcaagcccggtgcctga

SEQ ID NO: 6167 - DNA, 1758 bp, Artificial Sequence; identical to SEQ ID NO: 2037
  Synthetic Polynucleotide

SEQ ID NO: 6168 - DNA, 1371 bp, Artificial Sequence; identical to SEQ ID NO: 5880
  Synthetic Polynucleotide

SEQ ID NO: 6169 - DNA, 1371 bp, Artificial Sequence; identical to SEQ ID NO: 5881
  Synthetic Polynucleotide

SEQ ID NO: 6170 - DNA, 993 bp, Artificial Sequence; identical to SEQ ID NO: 5882
  Synthetic Polynucleotide

SEQ ID NO: 6171 - DNA, 993 bp, Artificial Sequence; identical to SEQ ID NO: 5883
  Synthetic Polynucleotide

SEQ ID NO: 6172 - DNA, 993 bp, Artificial Sequence; identical to SEQ ID NO: 5884
  Synthetic Polynucleotide

SEQ ID NO: 6173 - DNA, 999 bp, Artificial Sequence; identical to SEQ ID NO: 5885
  Synthetic Polynucleotide

SEQ ID NO: 6174 - DNA, 1023 bp, Artificial Sequence; identical to SEQ ID NO: 5886
  Synthetic Polynucleotide

SEQ ID NO: 6175 - DNA, 1011 bp, Artificial Sequence; identical to SEQ ID NO: 5887
  Synthetic Polynucleotide

SEQ ID NO: 6176 - DNA, 996 bp, Artificial Sequence; identical to SEQ ID NO: 5888
  Synthetic Polynucleotide

SEQ ID NO: 6177 - DNA, 1011 bp, Artificial Sequence; identical to SEQ ID NO: 5889
  Synthetic Polynucleotide

SEQ ID NO: 6178 - DNA, 813 bp, Artificial Sequence; identical to SEQ ID NO: 5890
  Synthetic Polynucleotide

SEQ ID NO: 6179 - DNA, 906 bp, Artificial Sequence; identical to SEQ ID NO: 5891
  Synthetic Polynucleotide

SEQ ID NO: 6180 - DNA, 909 bp, Artificial Sequence; identical to SEQ ID NO: 5892
  Synthetic Polynucleotide

SEQ ID NO: 6181 - DNA, 1560 bp, Artificial Sequence; identical to SEQ ID NO: 5893
  Synthetic Polynucleotide

SEQ ID NO: 6182 - DNA, 1200 bp, Artificial Sequence; identical to SEQ ID NO: 5894
  Synthetic Polynucleotide

SEQ ID NO: 6183 - DNA, 798 bp, Artificial Sequence; identical to SEQ ID NO: 5895
  Synthetic Polynucleotide

SEQ ID NO: 6184 - DNA, 723 bp, Artificial Sequence; identical to SEQ ID NO: 5896
  Synthetic Polynucleotide

SEQ ID NO: 6185 - DNA, 1497 bp, Artificial Sequence; identical to SEQ ID NO: 5897
  Synthetic Polynucleotide

SEQ ID NO: 6186 - DNA, 1497 bp, Artificial Sequence; identical to SEQ ID NO: 5898
  Synthetic Polynucleotide

SEQ ID NO: 6187 - DNA, 3906 bp, Artificial Sequence
  Synthetic Polynucleotide
atggccttaccagtgaccgccttgctcctgccgctggccttgctgctccacgccgccaggccggacatccagatgacacagagccctagcagcctgtctgccagcgtgggagacagagtgaccatcacatgcaaggccagcgaccacatcaacaactggctggcctggtatcagcagaagcctggacaggcccctaagctgctgatctacggcgctaccacactggaaacaggcgtgcccagcagattttctggcagcggctctggcaccgactacaccctgacaatatccagcctccagcctgaggacttcgccacctactactgtcagcagagctggaacaccccttggacattcggccagggcaccaagctggaaatcaagagactcgagacaccagccgctcctccaaaggccgtgctgaaactggaaccccagtggatcaacgtgctgcaagaggacagcgtgaccctgacctgtagaggcacacacagccctgagagcgacagcatccagtggttccacaacggcaatctgatccccacacacacccagcctagctacagattcaaggccaacaacaacgacagcggcgagtacacctgtcagaccggccagacaagcctgagcgatcctgtgcatctgaccgtgctgtctgagtggctggtgctgcagacaccccacctggaatttcaagagggcgagacaatcgtgctgcggtgccacagctggaaggacaagcctctggtcaaagtgacattcttccagaacgggaagtccaagaagttcagcagaagcgaccccaacttcagcatccctcaggccaatcacagccactccggcgattaccactgcaccggcaatatcggctacaccctgtacagcagcaagcccgtgaccatcacagtgcaggcccctagcagtagccctatgggaatcatcgtggccgtggtcacaggcattgccgtggctgctattgtggctgcagtggtggccctgatctactgccggaagaagagaatctctgccctgcctggctaccccgagtgtagagagatgggagagacactgcccgagaagcccgccaatcctaccaatcctgacgaggccgacaaagtgggagccgagaacaccatcacctacagcctgctgatgcaccccgacgcactggaagaacccgacgaccagaatagaatcagcactagtagagtgaagttcagcagaagcgccgacgcccctgcctaccagcagggacagaaccaactgtacaacgagctgaacctgggcagacgggaagagtacgacgtgctggacaagcggagaggcagggaccctgagatgggcggaaagccccagcggagaaagaacccccaggaaggactgtataacgaactccagaaagacaagatggccgaagcctacagcgagatcggcatgaagggcgagcggagaagaggcaagggccacgatggcctgtaccagggcctgagcaccgccaccaaggacacctatgacgccctgcacatgcaggccctgcctccaagaagggccaagcgatctggatctggagcaacaaacttctcactactcaaacaagcaggtgacgtggaggagaatcccgggcctatggactggatttggcgcatccttttccttgtcggcgctgctaccggcgcgcattccttcgaacaagttcagcttcaacagcctggcgctgagctggtcaaacctggcgcttctgtgaagatgagctgcaaagccagcggctacgccttcagcagctactggatcaactggatgaagcagaaacccggccagggactcgaatggatcggccaaatctatcccggcgacggcgacaccaactacaacggcaagttcaagggcagagccacactgaccgccgatacctctagcagcacagcctacatgcagctgagcagcctgaccagcgaagatagcgccgtgtacttctgtgcccggtccatcacaacagtcgtgggctgcgctatggactattggggccagggaacaagcgtgaccgtgtctagtacgcgtactccagctgctccacctaaagctgtcctgaagctcgaacctcaatggattaacgtcctccaagaagattctgtcaccctgacatgccggggcacccactctccagagtctgattccattcagtggtttcataatgggaacctgattccgactcacacgcagcccagctatcggtttaaagctaacaacaatgactccggggagtatacttgccagacaggacagaccagcctgtctgacccagtgcacctgacagttctgagcgaatggctcgtcctgcagacccctcatcttgagttccaagagggcgaaaccattgtcctgagatgccactcctggaaagataagccccttgtgaaagtcacattttttcagaatggcaagagcaagaagttttctcggagcgatccgaatttcagtattccccaggccaaccactctcacagcggagactatcactgtacaggcaacatcgggtatacactctacagctctaagcccgtcacaattaccgttcaggctcccagcagctccccaatgggcattattgtggccgtcgtgaccggaattgctgtggccgcaatcgtggcagctgtcgtcgctctgatctattgcagaaagaagcggatcagcgccctgccagggtatcctgagtgccgcgaaatgggcgaaactctgcctgagaaacctgctaaccccacaaatcccgatgaagctgacaaagtcggcgctgaaaacacgatcacatactccctgctcatgcatcctgacgctcttgaggaacctgacgatcagaaccggatcagctctagacgggttaagttttccagatccgcagacgcacccgcttaccaacaagggcagaaccaactctacaatgaacttaatttggggcggagggaagagtacgacgttctggacaaaaggaggggacgagatcccgagatgggcggaaagcctcagcgaaggaagaatccgcaagaggggctttataacgaactccagaaagataaaatggcagaagcctatagtgagattgggatgaagggagaaaggaggaggggtaaaggtcacgatgggttgtaccaaggattgagcacagccactaaagatacctatgatgcgctccacatgcaggccctgccgccaagacgcgccaagagaagcggatctggcgtgaagcagaccctgaatttcgacctgctgaagctggctggcgacgtggaatccaacccaggccctggccatatgaccgagtacaagcccacggtgcgcctcgccacccgcgacgacgtccccagggccgtacgcaccctcgccgccgcgttcgccgactaccccgccacgcgccacaccgtcgatccggaccgccacatcgagcgggtcaccgagctgcaagaactcttcctcacgcgcgtcgggctcgacatcggcaaggtgtgggtcgcggacgacggcgccgcggtggcggtctggaccacgccggagagcgtcgaagcgggggcggtgttcgccgagatcggcccgcgcatggccgagttgagcggttcccggctggccgcgcagcaacagatggaaggcctcctggcgccgcaccggcccaaggagcccgcgtggttcctggccaccgtcggcgtctcgcccgaccaccagggcaagggtctgggcagcgccgtcgtgctccccggagtggaggcggccgagcgcgccggggtgcccgccttcctggagacctccgcgccccgcaacctccccttctacgagcggctcggcttcaccgtcaccgccgacgtcgaggtgcccgaaggaccgcgcacctggtgcatgacccgcaagcccggtgcctga

SEQ ID NO: 6188 - DNA, 4062 bp, Artificial Sequence
  Synthetic Polynucleotide
atggccttaccagtgaccgccttgctcctgccgctggccttgctgctccacgccgccaggccggcatgcgaagtgcagctgcttgaaagtggcggcggactgattcagcctggcggatctctgagactgagctgtgccgccagcggcttcaccttttctagccacgccatgacctgggtccgacaggcacctggaaaagggcttgaatgggtgtccgccatcagcggctctggcgattacacacactacgccgacagcgtgaagggcagattcaccatcagcagagacaacagcaagaacaccgtgtacctccagatgaacagcctgagagccgaggacagcgccgtgtattattgcgccaaggatgaggatggcggcagcctgcttggacacagaggacaaggcaccctggtcaccgtttcttccggtaccggcggaggcggatctggcggcggaggtagcggtggcggaggatctgaattcggatctctcgagacaccagccgctcctccaaaggccgtgctgaaactggaaccccagtggatcaacgtgctgcaagaggacagcgtgaccctgacctgtagaggcacacacagccctgagagcgacagcatccagtggttccacaacggcaatctgatccccacacacacccagcctagctacagattcaaggccaacaacaacgacagcggcgagtacacctgtcagaccggccagacaagcctgagcgatcctgtgcatctgaccgtgctgtctgagtggctggtgctgcagacaccccacctggaatttcaagagggcgagacaatcgtgctgcggtgccacagctggaaggacaagcctctggtcaaagtgacattcttccagaacgggaagtccaagaagttcagcagaagcgaccccaacttcagcatccctcaggccaatcacagccactccggcgattaccactgcaccggcaatatcggctacaccctgtacagcagcaagcccgtgaccatcacagtgcaggcccctagcagtagccctatgggaatcatcgtggccgtggtcacaggcattgccgtggctgctattgtggctgcagtggtggccctgatctactgccggaagaagagaatctctgccctgcctggctaccccgagtgtagagagatgggagagacactgcccgagaagcccgccaatcctaccaatcctgacgaggccgacaaagtgggagccgagaacaccatcacctacagcctgctgatgcaccccgacgcactggaagaacccgacgaccagaatagaatcagcactagtagagtgaagttcagcagaagcgccgacgcccctgcctaccagcagggacagaaccaactgtacaacgagctgaacctgggcagacgggaagagtacgacgtgctggacaagcggagaggcagggaccctgagatgggcggaaagccccagcggagaaagaacccccaggaaggactgtataacgaactccagaaagacaagatggccgaagcctacagcgagatcggcatgaagggcgagcggagaagaggcaagggccacgatggcctgtaccagggcctgagcaccgccaccaaggacacctatgacgccctgcacatgcaggccctgcctccaagaagggccaagcgatctggatctggagcaacaaacttctcactactcaaacaagcaggtgacgtggaggagaatcccgggcctatggactggatttggcgcatccttttccttgtcggcgctgctaccggcgcgcattccgggcccgaagtgcagctggttgaatctggcggaggactggttcaggctggcggatctctgagactgtcttgtgccgccagcggcagaacctttagcatgggctggtttagacaggcccctggcaaagagagagagttcgtcgccgccatcacatactctggcggcagcccttactacgccgactctgtgaagggcagattcaccatcagccgggacaacgccaagaacaccgtgtacctccagatgaacagcctgaagcctgaggacaccgccgtgtactactgcgccgccaatccaacatacggcagcgactggaacgccgagaattggggccagggaacccaagtgacagtgtctagcggatccggcggcggaggatctggcggaggcggatctgggggcggaggctctttcgaaggcagcacgcgtactccagctgctccacctaaagctgtcctgaagctcgaacctcaatggattaacgtcctccaagaagattctgtcaccctgacatgccggggcacccactctccagagtctgattccattcagtggtttcataatgggaacctgattccgactcacacgcagcccagctatcggtttaaagctaacaacaatgactccggggagtatacttgccagacaggacagaccagcctgtctgacccagtgcacctgacagttctgagcgaatggctcgtcctgcagacccctcatcttgagttccaagagggcgaaaccattgtcctgagatgccactcctggaaagataagccccttgtgaaagtcacattttttcagaatggcaagagcaagaagttttctcggagcgatccgaatttcagtattccccaggccaaccactctcacagcggagactatcactgtacaggcaacatcgggtatacactctacagctctaagcccgtcacaattaccgttcaggctcccagcagctccccaatgggcattattgtggccgtcgtgaccggaattgctgtggccgcaatcgtggcagctgtcgtcgctctgatctattgcagaaagaagcggatcagcgccctgccagggtatcctgagtgccgcgaaatgggcgaaactctgcctgagaaacctgctaaccccacaaatcccgatgaagctgacaaagtcggcgctgaaaacacgatcacatactccctgctcatgcatcctgacgctcttgaggaacctgacgatcagaaccggatcagctctagacgggttaagttttccagatccgcagacgcacccgcttaccaacaagggcagaaccaactctacaatgaacttaatttggggcggagggaagagtacgacgttctggacaaaaggaggggacgagatcccgagatgggcggaaagcctcagcgaaggaagaatccgcaagaggggctttataacgaactccagaaagataaaatggcagaagcctatagtgagattgggatgaagggagaaaggaggaggggtaaaggtcacgatgggttgtaccaaggattgagcacagccactaaagatacctatgatgcgctccacatgcaggccctgccgccaagacgcgccaagagaagcggatctggcgtgaagcagaccctgaatttcgacctgctgaagctggctggcgacgtggaatccaacccaggccctggccatatgaccgagtacaagcccacggtgcgcctcgccacccgcgacgacgtccccagggccgtacgcaccctcgccgccgcgttcgccgactaccccgccacgcgccacaccgtcgatccggaccgccacatcgagcgggtcaccgagctgcaagaactcttcctcacgcgcgtcgggctcgacatcggcaaggtgtgggtcgcggacgacggcgccgcggtggcggtctggaccacgccggagagcgtcgaagcgggggcggtgttcgccgagatcggcccgcgcatggccgagttgagcggttcccggctggccgcgcagcaacagatggaaggcctcctggcgccgcaccggcccaaggagcccgcgtggttcctggccaccgtcggcgtctcgcccgaccaccagggcaagggtctgggcagcgccgtcgtgctccccggagtggaggcggccgagcgcgccggggtgcccgccttcctggagacctccgcgccccgcaacctccccttctacgagcggctcggcttcaccgtcaccgccgacgtcgaggtgcccgaaggaccgcgcacctggtgcatgacccgcaagcccggtgcctga

SEQ ID NO: 6189 - DNA, 4509 bp, Artificial Sequence
  Synthetic Polynucleotide
atggccttaccagtgaccgccttgctcctgccgctggccttgctgctccacgccgccaggccggacatccagatgacacagagccctagcagcctgtctgccagcgtgggagacagagtgaccatcacatgcaaggccagcgaccacatcaacaactggctggcctggtatcagcagaagcctggacaggcccctaagctgctgatctacggcgctaccacactggaaacaggcgtgcccagcagattttctggcagcggctctggcaccgactacaccctgacaatatccagcctccagcctgaggacttcgccacctactactgtcagcagagctggaacaccccttggacattcggccagggcaccaagctggaaatcaagagactcgagggacagcctaaggccaatcctaccgtgacactgttccctccaagcagcgaagaactccaggccaacaaggccacacttgtgtgcctgatctccgacttctaccctggggctgtgacagtggcttggaaggccgatggatctcctgtgaaagccggcgtggaaaccaccaagccatccaagcagagcaacaacaaatacgccgccagctcctacctgagcctgacacctgagcagtggaagtcccacagatcctacagctgccaagtgacccacgaaggcagcaccgtggaaaagacagtggcccctacagagtgcagcggatccacaccagccgctcctccaaaggccgtgctgaaactggaaccccagtggatcaacgtgctgcaagaggacagcgtgaccctgacctgtagaggcacacacagccctgagagcgacagcatccagtggttccacaacggcaatctgatccccacacacacccagcctagctacagattcaaggccaacaacaacgacagcggcgagtacacctgtcagaccggccagacaagcctgagcgatcctgtgcatctgaccgtgctgtctgagtggctggtgctgcagacaccccacctggaatttcaagagggcgagacaatcgtgctgcggtgccacagctggaaggacaagcctctggtcaaagtgacattcttccagaacgggaagtccaagaagttcagcagaagcgaccccaacttcagcatccctcaggccaatcacagccactccggcgattaccactgcaccggcaatatcggctacaccctgtacagcagcaagcccgtgaccatcacagtgcaggcccctagcagtagccctatgggaatcatcgtggccgtggtcacaggcattgccgtggctgctattgtggctgcagtggtggccctgatctactgccggaagaagagaatctctgccctgcctggctaccccgagtgtagagagatgggagagacactgcccgagaagcccgccaatcctaccaatcctgacgaggccgacaaagtgggagccgagaacaccatcacctacagcctgctgatgcaccccgacgcactggaagaacccgacgaccagaatagaatcagcactagtagagtgaagttcagcagaagcgccgacgcccctgcctaccagcagggacagaaccaactgtacaacgagctgaacctgggcagacgggaagagtacgacgtgctggacaagcggagaggcagggaccctgagatgggcggaaagccccagcggagaaagaacccccaggaaggactgtataacgaactccagaaagacaagatggccgaagcctacagcgagatcggcatgaagggcgagcggagaagaggcaagggccacgatggcctgtaccagggcctgagcaccgccaccaaggacacctatgacgccctgcacatgcaggccctgcctccaagaagggccaagcgatctggatctggagcaacaaacttctcactactcaaacaagcaggtgacgtggaggagaatcccgggcctatggactggatttggcgcatccttttccttgtcggcgctgctaccggcgcgcattccttcgaacaagttcagcttcaacagcctggcgctgagctggtcaaacctggcgcttctgtgaagatgagctgcaaagccagcggctacgccttcagcagctactggatcaactggatgaagcagaaacccggccagggactcgaatggatcggccaaatctatcccggcgacggcgacaccaactacaacggcaagttcaagggcagagccacactgaccgccgatacctctagcagcacagcctacatgcagctgagcagcctgaccagcgaagatagcgccgtgtacttctgtgcccggtccatcacaacagtcgtgggctgcgctatggactattggggccagggaacaagcgtgaccgtgtctagtacgcgtgcctctacaaagggaccctccgtgtttcctctggctcccagcagcaagtctacaagcggaggaacagccgctctgggctgcctggtcaaggattactttcccgagcctgtgaccgtgtcctggaatagcggagcactgacaagcggcgtgcacacctttccagccgtgctgcaaagcagcggcctgtactctctgagcagcgtggtcacagtgcctagctctagcctgggcacccagacctacatctgcaatgtgaaccacaagcctagcaacaccaaggtggacaagagagtggaacccaagagctgtggtaccactccagctgctccacctaaagctgtcctgaagctcgaacctcaatggattaacgtcctccaagaagattctgtcaccctgacatgccggggcacccactctccagagtctgattccattcagtggtttcataatgggaacctgattccgactcacacgcagcccagctatcggtttaaagctaacaacaatgactccggggagtatacttgccagacaggacagaccagcctgtctgacccagtgcacctgacagttctgagcgaatggctcgtcctgcagacccctcatcttgagttccaagagggcgaaaccattgtcctgagatgccactcctggaaagataagccccttgtgaaagtcacattttttcagaatggcaagagcaagaagttttctcggagcgatccgaatttcagtattccccaggccaaccactctcacagcggagactatcactgtacaggcaacatcgggtatacactctacagctctaagcccgtcacaattaccgttcaggctcccagcagctccccaatgggcattattgtggccgtcgtgaccggaattgctgtggccgcaatcgtggcagctgtcgtcgctctgatctattgcagaaagaagcggatcagcgccctgccagggtatcctgagtgccgcgaaatgggcgaaactctgcctgagaaacctgctaaccccacaaatcccgatgaagctgacaaagtcggcgctgaaaacacgatcacatactccctgctcatgcatcctgacgctcttgaggaacctgacgatcagaaccggatcagctctagacgggttaagttttccagatccgcagacgcacccgcttaccaacaagggcagaaccaactctacaatgaacttaatttggggcggagggaagagtacgacgttctggacaaaaggaggggacgagatcccgagatgggcggaaagcctcagcgaaggaagaatccgcaagaggggctttataacgaactccagaaagataaaatggcagaagcctatagtgagattgggatgaagggagaaaggaggaggggtaaaggtcacgatgggttgtaccaaggattgagcacagccactaaagatacctatgatgcgctccacatgcaggccctgccgccaagacgcgccaagagaagcggatctggcgtgaagcagaccctgaatttcgacctgctgaagctggctggcgacgtggaatccaacccaggccctggccatatggctacctacgaggtgctgtgcgaggtggcaagaaagctgggcaccgacgacagagaagtggtgctgttcctgctgaacgtgttcatccctcagcctacactggcccagctgatcggtgcactgagagccctgaaagaggaaggccggctgacctttcctctgctggccgaatgcctgttcagagccggaagaagggatctgctgcgggacctgctgcatctggaccccagatttctggaaagacacctggccggcaccatgagctacttcagcccttaccagctgaccgtgctgcacgttgacggcgaactgtgcgccagagatattcggagcctgatcttcctgagcaaggacaccatcggcagccggtctacccctcagacatttctgcactgggtgtactgcatggaaaacctggacctgctcggccccacagatgtggatgccctgatgtccatgctgagaagcctgagcagagtggacctccagagacaggtgcagacactgatgggactgcacctgagcggacctagccacagccagcactacagacacacccct

SEQ ID NO: 6190 - DNA, 4668 bp, Artificial Sequence
  Synthetic Polynucleotide
atggccttaccagtgaccgccttgctcctgccgctggccttgctgctccacgccgccaggccggacatccagatgacacagagccctagcagcctgtctgccagcgtgggagacagagtgaccatcacatgcaaggccagcgaccacatcaacaactggctggcctggtatcagcagaagcctggacaggcccctaagctgctgatctacggcgctaccacactggaaacaggcgtgcccagcagattttctggcagcggctctggcaccgactacaccctgacaatatccagcctccagcctgaggacttcgccacctactactgtcagcagagctggaacaccccttggacattcggccagggcaccaagctggaaatcaagagactcgagggacagcctaaggccaatcctaccgtgacactgttccctccaagcagcgaagaactccaggccaacaaggccacacttgtgtgcctgatctccgacttctaccctggggctgtgacagtggcttggaaggccgatggatctcctgtgaaagccggcgtggaaaccaccaagccatccaagcagagcaacaacaaatacgccgccagctcctacctgagcctgacacctgagcagtggaagtcccacagatcctacagctgccaagtgacccacgaaggcagcaccgtggaaaagacagtggcccctacagagtgcagcggatccacaccagccgctcctccaaaggccgtgctgaaactggaaccccagtggatcaacgtgctgcaagaggacagcgtgaccctgacctgtagaggcacacacagccctgagagcgacagcatccagtggttccacaacggcaatctgatccccacacacacccagcctagctacagattcaaggccaacaacaacgacagcggcgagtacacctgtcagaccggccagacaagcctgagcgatcctgtgcatctgaccgtgctgtctgagtggctggtgctgcagacaccccacctggaatttcaagagggcgagacaatcgtgctgcggtgccacagctggaaggacaagcctctggtcaaagtgacattcttccagaacgggaagtccaagaagttcagcagaagcgaccccaacttcagcatccctcaggccaatcacagccactccggcgattaccactgcaccggcaatatcggctacaccctgtacagcagcaagcccgtgaccatcacagtgcaggcccctagcagtagccctatgggaatcatcgtggccgtggtcacaggcattgccgtggctgctattgtggctgcagtggtggccctgatctactgccggaagaagagaatctctgccctgcctggctaccccgagtgtagagagatgggagagacactgcccgagaagcccgccaatcctaccaatcctgacgaggccgacaaagtgggagccgagaacaccatcacctacagcctgctgatgcaccccgacgcactggaagaacccgacgaccagaatagaatcagcactagtagagtgaagttcagcagaagcgccgacgcccctgcctaccagcagggacagaaccaactgtacaacgagctgaacctgggcagacgggaagagtacgacgtgctggacaagcggagaggcagggaccctgagatgggcggaaagccccagcggagaaagaacccccaggaaggactgtataacgaactccagaaagacaagatggccgaagcctacagcgagatcggcatgaagggcgagcggagaagaggcaagggccacgatggcctgtaccagggcctgagcaccgccaccaaggacacctatgacgccctgcacatgcaggccctgcctccaagaagggccaagcgatctggatctggagcaacaaacttctcactactcaaacaagcaggtgacgtggaggagaatcccgggcctatggactggatttggcgcatccttttccttgtcggcgctgctaccggcgcgcattccttcgaacaagttcagcttcaacagcctggcgctgagctggtcaaacctggcgcttctgtgaagatgagctgcaaagccagcggctacgccttcagcagctactggatcaactggatgaagcagaaacccggccagggactcgaatggatcggccaaatctatcccggcgacggcgacaccaactacaacggcaagttcaagggcagagccacactgaccgccgatacctctagcagcacagcctacatgcagctgagcagcctgaccagcgaagatagcgccgtgtacttctgtgcccggtccatcacaacagtcgtgggctgcgctatggactattggggccagggaacaagcgtgaccgtgtctagtacgcgtgcctctacaaagggaccctccgtgtttcctctggctcccagcagcaagtctacaagcggaggaacagccgctctgggctgcctggtcaaggattactttcccgagcctgtgaccgtgtcctggaatagcggagcactgacaagcggcgtgcacacctttccagccgtgctgcaaagcagcggcctgtactctctgagcagcgtggtcacagtgcctagctctagcctgggcacccagacctacatctgcaatgtgaaccacaagcctagcaacaccaaggtggacaagagagtggaacccaagagctgtggtaccactccagctgctccacctaaagctgtcctgaagctcgaacctcaatggattaacgtcctccaagaagattctgtcaccctgacatgccggggcacccactctccagagtctgattccattcagtggtttcataatgggaacctgattccgactcacacgcagcccagctatcggtttaaagctaacaacaatgactccggggagtatacttgccagacaggacagaccagcctgtctgacccagtgcacctgacagttctgagcgaatggctcgtcctgcagacccctcatcttgagttccaagagggcgaaaccattgtcctgagatgccactcctggaaagataagccccttgtgaaagtcacattttttcagaatggcaagagcaagaagttttctcggagcgatccgaatttcagtattccccaggccaaccactctcacagcggagactatcactgtacaggcaacatcgggtatacactctacagctctaagcccgtcacaattaccgttcaggctcccagcagctccccaatgggcattattgtggccgtcgtgaccggaattgctgtggccgcaatcgtggcagctgtcgtcgctctgatctattgcagaaagaagcggatcagcgccctgccagggtatcctgagtgccgcgaaatgggcgaaactctgcctgagaaacctgctaaccccacaaatcccgatgaagctgacaaagtcggcgctgaaaacacgatcacatactccctgctcatgcatcctgacgctcttgaggaacctgacgatcagaaccggatcagctctagacgggttaagttttccagatccgcagacgcacccgcttaccaacaagggcagaaccaactctacaatgaacttaatttggggcggagggaagagtacgacgttctggacaaaaggaggggacgagatcccgagatgggcggaaagcctcagcgaaggaagaatccgcaagaggggctttataacgaactccagaaagataaaatggcagaagcctatagtgagattgggatgaagggagaaaggaggaggggtaaaggtcacgatgggttgtaccaaggattgagcacagccactaaagatacctatgatgcgctccacatgcaggccctgccgccaagacgcgccaagagaagcggatctggcgtgaagcagaccctgaatttcgacctgctgaagctggctggcgacgtggaatccaacccaggccctggccatatgtccgactccaaggaggtccctagccttccatttttgcgacacttgctcgaagagttggacagccatgaggacagcttgctgctgtttctgtgtcacgacgcggccccgggctgcacgacggtcacgcaagctttgtgctcgcttagccaacagcgcaagctgaccctcgcggctctggtcgagatgctctacgtgctgcagcgtatggatcttctcaagagccgcttcgggctcagcaaggagggggccgagcaattgctgggcacaagctttctcacgcgctaccgcaagctcatggtttgcgtgggtgaggagctcgactcgagcgagctacgcgctctacgcttgttcgcgtgcaacctgaatccgagcctgagcacggcgctttctgagagcagccgctttgtcgagcttgtactcgcgcttgaaaacgtaggactcgtctcgccatcgagtgtttccgtgcttgcggacatgttgcgcactcttcggcgcctcgatttgtgccagcagcttgttgagtacgaacaacaagagcaagccaggtaccgttactgttacgcggcctcgccctcattgccagttcgtacgttacgtcgggggcacggcgcgagtgaacacgagcagctgtgcatgcccgtgcaagaatcctctgacagccccgagctgctgcgcacgcccgtacaagaatcctccagcgacagccccgagcaaacgact

SEQ ID NO: 6191 - DNA, 4545 bp, Artificial Sequence
  Synthetic Polynucleotide
atggccttaccagtgaccgccttgctcctgccgctggccttgctgctccacgccgccaggccggacatccagatgacacagagccctagcagcctgtctgccagcgtgggagacagagtgaccatcacatgcaaggccagcgaccacatcaacaactggctggcctggtatcagcagaagcctggacaggcccctaagctgctgatctacggcgctaccacactggaaacaggcgtgcccagcagattttctggcagcggctctggcaccgactacaccctgacaatatccagcctccagcctgaggacttcgccacctactactgtcagcagagctggaacaccccttggacattcggccagggcaccaagctggaaatcaagagactcgagggacagcctaaggccaatcctaccgtgacactgttccctccaagcagcgaagaactccaggccaacaaggccacacttgtgtgcctgatctccgacttctaccctggggctgtgacagtggcttggaaggccgatggatctcctgtgaaagccggcgtggaaaccaccaagccatccaagcagagcaacaacaaatacgccgccagctcctacctgagcctgacacctgagcagtggaagtcccacagatcctacagctgccaagtgacccacgaaggcagcaccgtggaaaagacagtggcccctacagagtgcagcggatccacaccagccgctcctccaaaggccgtgctgaaactggaaccccagtggatcaacgtgctgcaagaggacagcgtgaccctgacctgtagaggcacacacagccctgagagcgacagcatccagtggttccacaacggcaatctgatccccacacacacccagcctagctacagattcaaggccaacaacaacgacagcggcgagtacacctgtcagaccggccagacaagcctgagcgatcctgtgcatctgaccgtgctgtctgagtggctggtgctgcagacaccccacctggaatttcaagagggcgagacaatcgtgctgcggtgccacagctggaaggacaagcctctggtcaaagtgacattcttccagaacgggaagtccaagaagttcagcagaagcgaccccaacttcagcatccctcaggccaatcacagccactccggcgattaccactgcaccggcaatatcggctacaccctgtacagcagcaagcccgtgaccatcacagtgcaggcccctagcagtagccctatgggaatcatcgtggccgtggtcacaggcattgccgtggctgctattgtggctgcagtggtggccctgatctactgccggaagaagagaatctctgccctgcctggctaccccgagtgtagagagatgggagagacactgcccgagaagcccgccaatcctaccaatcctgacgaggccgacaaagtgggagccgagaacaccatcacctacagcctgctgatgcaccccgacgcactggaagaacccgacgaccagaatagaatcagcactagtagagtgaagttcagcagaagcgccgacgcccctgcctaccagcagggacagaaccaactgtacaacgagctgaacctgggcagacgggaagagtacgacgtgctggacaagcggagaggcagggaccctgagatgggcggaaagccccagcggagaaagaacccccaggaaggactgtataacgaactccagaaagacaagatggccgaagcctacagcgagatcggcatgaagggcgagcggagaagaggcaagggccacgatggcctgtaccagggcctgagcaccgccaccaaggacacctatgacgccctgcacatgcaggccctgcctccaagaagggccaagcgatctggatctggagcaacaaacttctcactactcaaacaagcaggtgacgtggaggagaatcccgggcctatggactggatttggcgcatccttttccttgtcggcgctgctaccggcgcgcattccttcgaacaagttcagcttcaacagcctggcgctgagctggtcaaacctggcgcttctgtgaagatgagctgcaaagccagcggctacgccttcagcagctactggatcaactggatgaagcagaaacccggccagggactcgaatggatcggccaaatctatcccggcgacggcgacaccaactacaacggcaagttcaagggcagagccacactgaccgccgatacctctagcagcacagcctacatgcagctgagcagcctgaccagcgaagatagcgccgtgtacttctgtgcccggtccatcacaacagtcgtgggctgcgctatggactattggggccagggaacaagcgtgaccgtgtctagtacgcgtgcctctacaaagggaccctccgtgtttcctctggctcccagcagcaagtctacaagcggaggaacagccgctctgggctgcctggtcaaggattactttcccgagcctgtgaccgtgtcctggaatagcggagcactgacaagcggcgtgcacacctttccagccgtgctgcaaagcagcggcctgtactctctgagcagcgtggtcacagtgcctagctctagcctgggcacccagacctacatctgcaatgtgaaccacaagcctagcaacaccaaggtggacaagagagtggaacccaagagctgtggtaccactccagctgctccacctaaagctgtcctgaagctcgaacctcaatggattaacgtcctccaagaagattctgtcaccctgacatgccggggcacccactctccagagtctgattccattcagtggtttcataatgggaacctgattccgactcacacgcagcccagctatcggtttaaagctaacaacaatgactccggggagtatacttgccagacaggacagaccagcctgtctgacccagtgcacctgacagttctgagcgaatggctcgtcctgcagacccctcatcttgagttccaagagggcgaaaccattgtcctgagatgccactcctggaaagataagccccttgtgaaagtcacattttttcagaatggcaagagcaagaagttttctcggagcgatccgaatttcagtattccccaggccaaccactctcacagcggagactatcactgtacaggcaacatcgggtatacactctacagctctaagcccgtcacaattaccgttcaggctcccagcagctccccaatgggcattattgtggccgtcgtgaccggaattgctgtggccgcaatcgtggcagctgtcgtcgctctgatctattgcagaaagaagcggatcagcgccctgccagggtatcctgagtgccgcgaaatgggcgaaactctgcctgagaaacctgctaaccccacaaatcccgatgaagctgacaaagtcggcgctgaaaacacgatcacatactccctgctcatgcatcctgacgctcttgaggaacctgacgatcagaaccggatcagctctagacgggttaagttttccagatccgcagacgcacccgcttaccaacaagggcagaaccaactctacaatgaacttaatttggggcggagggaagagtacgacgttctggacaaaaggaggggacgagatcccgagatgggcggaaagcctcagcgaaggaagaatccgcaagaggggctttataacgaactccagaaagataaaatggcagaagcctatagtgagattgggatgaagggagaaaggaggaggggtaaaggtcacgatgggttgtaccaaggattgagcacagccactaaagatacctatgatgcgctccacatgcaggccctgccgccaagacgcgccaagagaagcggatctggcgtgaagcagaccctgaatttcgacctgctgaagctggctggcgacgtggaatccaacccaggccctggccatatgaccgagtacaagcccacggtgcgcctcgccacccgcgacgacgtccccagggccgtacgcaccctcgccgccgcgttcgccgactaccccgccacgcgccacaccgtcgatccggaccgccacatcgagcgggtcaccgagctgcaagaactcttcctcacgcgcgtcgggctcgacatcggcaaggtgtgggtcgcggacgacggcgccgcggtggcggtctggaccacgccggagagcgtcgaagcgggggcggtgttcgccgagatcggcccgcgcatggccgagttgagcggttcccggctggccgcgcagcaacagatggaaggcctcctggcgccgcaccggcccaaggagcccgcgtggttcctggccaccgtcggcgtctcgcccgaccaccagggcaagggtctgggcagcgccgtcgtgctccccggagtggaggcggccgagcgcgccggggtgcccgccttcctggagacctccgcgccccgcaacctccccttctacgagcggctcggcttcaccgtcaccgccgacgtcgaggtgcccgaaggaccgcgcacctggtgcatgacccgcaagcccggtgcctga

SEQ ID NO: 6192 - DNA, 4956 bp, Artificial Sequence
  Synthetic Polynucleotide
atggccttaccagtgaccgccttgctcctgccgctggccttgctgctccacgccgccaggccggaagtgcagctggttgaatctggcggaggactggttcaggctggcggatctctgagactgtcttgtgccgccagcggcagaacctttagcatgggctggtttagacaggcccctggcaaagagagagagttcgtcgccgccatcacatactctggcggcagcccttactacgccgactctgtgaagggcagattcaccatcagccgggacaacgccaagaacaccgtgtacctccagatgaacagcctgaagcctgaggacaccgccgtgtactactgcgccgccaatccaacatacggcagcgactggaacgccgagaattggggccagggaacccaagtgacagtgtctagcggtaccggcggaggcggatctggcggcggaggtagcggtggcggaggatctgaattcgacatccagatgacacagagccctagcagcctgtctgccagcgtgggagacagagtgaccatcacatgcaaggccagcgaccacatcaacaactggctggcctggtatcagcagaagcctggacaggcccctaagctgctgatctacggcgctaccacactggaaacaggcgtgcccagcagattttctggcagcggctctggcaccgactacaccctgacaatatccagcctccagcctgaggacttcgccacctactactgtcagcagagctggaacaccccttggacattcggccagggcaccaagctggaaatcaagagactcgagggacagcctaaggccaatcctaccgtgacactgttccctccaagcagcgaagaactccaggccaacaaggccacacttgtgtgcctgatctccgacttctaccctggggctgtgacagtggcttggaaggccgatggatctcctgtgaaagccggcgtggaaaccaccaagccatccaagcagagcaacaacaaatacgccgccagctcctacctgagcctgacacctgagcagtggaagtcccacagatcctacagctgccaagtgacccacgaaggcagcaccgtggaaaagacagtggcccctacagagtgcagcggatccacaccagccgctcctccaaaggccgtgctgaaactggaaccccagtggatcaacgtgctgcaagaggacagcgtgaccctgacctgtagaggcacacacagccctgagagcgacagcatccagtggttccacaacggcaatctgatccccacacacacccagcctagctacagattcaaggccaacaacaacgacagcggcgagtacacctgtcagaccggccagacaagcctgagcgatcctgtgcatctgaccgtgctgtctgagtggctggtgctgcagacaccccacctggaatttcaagagggcgagacaatcgtgctgcggtgccacagctggaaggacaagcctctggtcaaagtgacattcttccagaacgggaagtccaagaagttcagcagaagcgaccccaacttcagcatccctcaggccaatcacagccactccggcgattaccactgcaccggcaatatcggctacaccctgtacagcagcaagcccgtgaccatcacagtgcaggcccctagcagtagccctatgggaatcatcgtggccgtggtcacaggcattgccgtggctgctattgtggctgcagtggtggccctgatctactgccggaagaagagaatctctgccctgcctggctaccccgagtgtagagagatgggagagacactgcccgagaagcccgccaatcctaccaatcctgacgaggccgacaaagtgggagccgagaacaccatcacctacagcctgctgatgcaccccgacgcactggaagaacccgacgaccagaatagaatcagcactagtagagtgaagttcagcagaagcgccgacgcccctgcctaccagcagggacagaaccaactgtacaacgagctgaacctgggcagacgggaagagtacgacgtgctggacaagcggagaggcagggaccctgagatgggcggaaagccccagcggagaaagaacccccaggaaggactgtataacgaactccagaaagacaagatggccgaagcctacagcgagatcggcatgaagggcgagcggagaagaggcaagggccacgatggcctgtaccagggcctgagcaccgccaccaaggacacctatgacgccctgcacatgcaggccctgcctccaagaagggccaagcgatctggatctggagcaacaaacttctcactactcaaacaagcaggtgacgtggaggagaatcccgggcctatggactggatttggcgcatccttttccttgtcggcgctgctaccggcgcgcattccttcgaacaagttcagcttcaacagcctggcgctgagctggtcaaacctggcgcttctgtgaagatgagctgcaaagccagcggctacgccttcagcagctactggatcaactggatgaagcagaaacccggccagggactcgaatggatcggccaaatctatcccggcgacggcgacaccaactacaacggcaagttcaagggcagagccacactgaccgccgatacctctagcagcacagcctacatgcagctgagcagcctgaccagcgaagatagcgccgtgtacttctgtgcccggtccatcacaacagtcgtgggctgcgctatggactattggggccagggaacaagcgtgaccgtgtctagtacgcgtgcctctacaaagggaccctccgtgtttcctctggctcccagcagcaagtctacaagcggaggaacagccgctctgggctgcctggtcaaggattactttcccgagcctgtgaccgtgtcctggaatagcggagcactgacaagcggcgtgcacacctttccagccgtgctgcaaagcagcggcctgtactctctgagcagcgtggtcacagtgcctagctctagcctgggcacccagacctacatctgcaatgtgaaccacaagcctagcaacaccaaggtggacaagagagtggaacccaagagctgtggtaccactccagctgctccacctaaagctgtcctgaagctcgaacctcaatggattaacgtcctccaagaagattctgtcaccctgacatgccggggcacccactctccagagtctgattccattcagtggtttcataatgggaacctgattccgactcacacgcagcccagctatcggtttaaagctaacaacaatgactccggggagtatacttgccagacaggacagaccagcctgtctgacccagtgcacctgacagttctgagcgaatggctcgtcctgcagacccctcatcttgagttccaagagggcgaaaccattgtcctgagatgccactcctggaaagataagccccttgtgaaagtcacattttttcagaatggcaagagcaagaagttttctcggagcgatccgaatttcagtattccccaggccaaccactctcacagcggagactatcactgtacaggcaacatcgggtatacactctacagctctaagcccgtcacaattaccgttcaggctcccagcagctccccaatgggcattattgtggccgtcgtgaccggaattgctgtggccgcaatcgtggcagctgtcgtcgctctgatctattgcagaaagaagcggatcagcgccctgccagggtatcctgagtgccgcgaaatgggcgaaactctgcctgagaaacctgctaaccccacaaatcccgatgaagctgacaaagtcggcgctgaaaacacgatcacatactccctgctcatgcatcctgacgctcttgaggaacctgacgatcagaaccggatcagctctagacgggttaagttttccagatccgcagacgcacccgcttaccaacaagggcagaaccaactctacaatgaacttaatttggggcggagggaagagtacgacgttctggacaaaaggaggggacgagatcccgagatgggcggaaagcctcagcgaaggaagaatccgcaagaggggctttataacgaactccagaaagataaaatggcagaagcctatagtgagattgggatgaagggagaaaggaggaggggtaaaggtcacgatgggttgtaccaaggattgagcacagccactaaagatacctatgatgcgctccacatgcaggccctgccgccaagacgcgccaagagaagcggatctggcgtgaagcagaccctgaatttcgacctgctgaagctggctggcgacgtggaatccaacccaggccctggccatatgaccgagtacaagcccacggtgcgcctcgccacccgcgacgacgtccccagggccgtacgcaccctcgccgccgcgttcgccgactaccccgccacgcgccacaccgtcgatccggaccgccacatcgagcgggtcaccgagctgcaagaactcttcctcacgcgcgtcgggctcgacatcggcaaggtgtgggtcgcggacgacggcgccgcggtggcggtctggaccacgccggagagcgtcgaagcgggggcggtgttcgccgagatcggcccgcgcatggccgagttgagcggttcccggctggccgcgcagcaacagatggaaggcctcctggcgccgcaccggcccaaggagcccgcgtggttcctggccaccgtcggcgtctcgcccgaccaccagggcaagggtctgggcagcgccgtcgtgctccccggagtggaggcggccgagcgcgccggggtgcccgccttcctggagacctccgcgccccgcaacctccccttctacgagcggctcggcttcaccgtcaccgccgacgtcgaggtgcccgaaggaccgcgcacctggtgcatgacccgcaagcccggtgcctga

SEQ ID NO: 6193 - DNA, 5367 bp, Artificial Sequence
  Synthetic Polynucleotide
atggccttaccagtgaccgccttgctcctgccgctggccttgctgctccacgccgccaggccggaagtgcagctggttgaatctggcggaggactggttcaggctggcggatctctgagactgtcttgtgccgccagcggcagaacctttagcatgggctggtttagacaggcccctggcaaagagagagagttcgtcgccgccatcacatactctggcggcagcccttactacgccgactctgtgaagggcagattcaccatcagccgggacaacgccaagaacaccgtgtacctccagatgaacagcctgaagcctgaggacaccgccgtgtactactgcgccgccaatccaacatacggcagcgactggaacgccgagaattggggccagggaacccaagtgacagtgtctagcggtaccggcggaggcggatctggcggcggaggtagcggtggcggaggatctgaattcgacatccagatgacacagagccctagcagcctgtctgccagcgtgggagacagagtgaccatcacatgcaaggccagcgaccacatcaacaactggctggcctggtatcagcagaagcctggacaggcccctaagctgctgatctacggcgctaccacactggaaacaggcgtgcccagcagattttctggcagcggctctggcaccgactacaccctgacaatatccagcctccagcctgaggacttcgccacctactactgtcagcagagctggaacaccccttggacattcggccagggcaccaagctggaaatcaagagactcgagggacagcctaaggccaatcctaccgtgacactgttccctccaagcagcgaagaactccaggccaacaaggccacacttgtgtgcctgatctccgacttctaccctggggctgtgacagtggcttggaaggccgatggatctcctgtgaaagccggcgtggaaaccaccaagccatccaagcagagcaacaacaaatacgccgccagctcctacctgagcctgacacctgagcagtggaagtcccacagatcctacagctgccaagtgacccacgaaggcagcaccgtggaaaagacagtggcccctacagagtgcagcggatccacaccagccgctcctccaaaggccgtgctgaaactggaaccccagtggatcaacgtgctgcaagaggacagcgtgaccctgacctgtagaggcacacacagccctgagagcgacagcatccagtggttccacaacggcaatctgatccccacacacacccagcctagctacagattcaaggccaacaacaacgacagcggcgagtacacctgtcagaccggccagacaagcctgagcgatcctgtgcatctgaccgtgctgtctgagtggctggtgctgcagacaccccacctggaatttcaagagggcgagacaatcgtgctgcggtgccacagctggaaggacaagcctctggtcaaagtgacattcttccagaacgggaagtccaagaagttcagcagaagcgaccccaacttcagcatccctcaggccaatcacagccactccggcgattaccactgcaccggcaatatcggctacaccctgtacagcagcaagcccgtgaccatcacagtgcaggcccctagcagtagccctatgggaatcatcgtggccgtggtcacaggcattgccgtggctgctattgtggctgcagtggtggccctgatctactgccggaagaagagaatctctgccctgcctggctaccccgagtgtagagagatgggagagacactgcccgagaagcccgccaatcctaccaatcctgacgaggccgacaaagtgggagccgagaacaccatcacctacagcctgctgatgcaccccgacgcactggaagaacccgacgaccagaatagaatcagcactagtagagtgaagttcagcagaagcgccgacgcccctgcctaccagcagggacagaaccaactgtacaacgagctgaacctgggcagacgggaagagtacgacgtgctggacaagcggagaggcagggaccctgagatgggcggaaagccccagcggagaaagaacccccaggaaggactgtataacgaactccagaaagacaagatggccgaagcctacagcgagatcggcatgaagggcgagcggagaagaggcaagggccacgatggcctgtaccagggcctgagcaccgccaccaaggacacctatgacgccctgcacatgcaggccctgcctccaagaagggccaagcgatctggatctggagcaacaaacttctcactactcaaacaagcaggtgacgtggaggagaatcccgggcctatggactggatttggcgcatccttttccttgtcggcgctgctaccggcgcgcattccgggcccgaagtgcaactggttgaatccggtggcggcctggtgcaagcaggcggatctctcagacttagctgtgccgcctccggcagaaccttcacaatgggatggtttaggcaggctccagggaaagagagagagttcgtcgccgccatctctctgtctcccacactggcctactacgccgactctgtgaaaggccggttcaccatctccagagataatgccaagaacaccgtggtgctgcaaatgaactctctgaaacccgaggatacagccctgtactattgtgccgctgaccggaagtccgtgatgagcatcagacccgattactggggacagggcacacaagtcacagtgtcctctggatccggcggcggaggatctggcggaggcggatctgggggcggaggctctttcgaacaagttcagcttcaacagcctggcgctgagctggtcaaacctggcgcttctgtgaagatgagctgcaaagccagcggctacgccttcagcagctactggatcaactggatgaagcagaaacccggccagggactcgaatggatcggccaaatctatcccggcgacggcgacaccaactacaacggcaagttcaagggcagagccacactgaccgccgatacctctagcagcacagcctacatgcagctgagcagcctgaccagcgaagatagcgccgtgtacttctgtgcccggtccatcacaacagtcgtgggctgcgctatggactattggggccagggaacaagcgtgaccgtgtctagtacgcgtgcctctacaaagggaccctccgtgtttcctctggctcccagcagcaagtctacaagcggaggaacagccgctctgggctgcctggtcaaggattactttcccgagcctgtgaccgtgtcctggaatagcggagcactgacaagcggcgtgcacacctttccagccgtgctgcaaagcagcggcctgtactctctgagcagcgtggtcacagtgcctagctctagcctgggcacccagacctacatctgcaatgtgaaccacaagcctagcaacaccaaggtggacaagagagtggaacccaagagctgtggtaccactccagctgctccacctaaagctgtcctgaagctcgaacctcaatggattaacgtcctccaagaagattctgtcaccctgacatgccggggcacccactctccagagtctgattccattcagtggtttcataatgggaacctgattccgactcacacgcagcccagctatcggtttaaagctaacaacaatgactccggggagtatacttgccagacaggacagaccagcctgtctgacccagtgcacctgacagttctgagcgaatggctcgtcctgcagacccctcatcttgagttccaagagggcgaaaccattgtcctgagatgccactcctggaaagataagccccttgtgaaagtcacattttttcagaatggcaagagcaagaagttttctcggagcgatccgaatttcagtattccccaggccaaccactctcacagcggagactatcactgtacaggcaacatcgggtatacactctacagctctaagcccgtcacaattaccgttcaggctcccagcagctccccaatgggcattattgtggccgtcgtgaccggaattgctgtggccgcaatcgtggcagctgtcgtcgctctgatctattgcagaaagaagcggatcagcgccctgccagggtatcctgagtgccgcgaaatgggcgaaactctgcctgagaaacctgctaaccccacaaatcccgatgaagctgacaaagtcggcgctgaaaacacgatcacatactccctgctcatgcatcctgacgctcttgaggaacctgacgatcagaaccggatcagctctagacgggttaagttttccagatccgcagacgcacccgcttaccaacaagggcagaaccaactctacaatgaacttaatttggggcggagggaagagtacgacgttctggacaaaaggaggggacgagatcccgagatgggcggaaagcctcagcgaaggaagaatccgcaagaggggctttataacgaactccagaaagataaaatggcagaagcctatagtgagattgggatgaagggagaaaggaggaggggtaaaggtcacgatgggttgtaccaaggattgagcacagccactaaagatacctatgatgcgctccacatgcaggccctgccgccaagacgcgccaagagaagcggatctggcgtgaagcagaccctgaatttcgacctgctgaagctggctggcgacgtggaatccaacccaggccctggccatatgaccgagtacaagcccacggtgcgcctcgccacccgcgacgacgtccccagggccgtacgcaccctcgccgccgcgttcgccgactaccccgccacgcgccacaccgtcgatccggaccgccacatcgagcgggtcaccgagctgcaagaactcttcctcacgcgcgtcgggctcgacatcggcaaggtgtgggtcgcggacgacggcgccgcggtggcggtctggaccacgccggagagcgtcgaagcgggggcggtgttcgccgagatcggcccgcgcatggccgagttgagcggttcccggctggccgcgcagcaacagatggaaggcctcctggcgccgcaccggcccaaggagcccgcgtggttcctggccaccgtcggcgtctcgcccgaccaccagggcaagggtctgggcagcgccgtcgtgctccccggagtggaggcggccgagcgcgccggggtgcccgccttcctggagacctccgcgccccgcaacctccccttctacgagcggctcggcttcaccgtcaccgccgacgtcgaggtgcccgaaggaccgcgcacctggtgcatgacccgcaagcccggtgcctga

SEQ ID NO: 6194 - DNA, 4566 bp, Artificial Sequence
  Synthetic Polynucleotide
atggccttaccagtgaccgccttgctcctgccgctggccttgctgctccacgccgccaggccggaagtgcagctggttgaatctggcggaggactggttcaggctggcggatctctgagactgtcttgtgccgccagcggcagaacctttagcatgggctggtttagacaggcccctggcaaagagagagagttcgtcgccgccatcacatactctggcggcagcccttactacgccgactctgtgaagggcagattcaccatcagccgggacaacgccaagaacaccgtgtacctccagatgaacagcctgaagcctgaggacaccgccgtgtactactgcgccgccaatccaacatacggcagcgactggaacgccgagaattggggccagggaacccaagtgacagtgtctagcctcgagggacagcctaaggccaatcctaccgtgacactgttccctccaagcagcgaagaactccaggccaacaaggccacacttgtgtgcctgatctccgacttctaccctggggctgtgacagtggcttggaaggccgatggatctcctgtgaaagccggcgtggaaaccaccaagccatccaagcagagcaacaacaaatacgccgccagctcctacctgagcctgacacctgagcagtggaagtcccacagatcctacagctgccaagtgacccacgaaggcagcaccgtggaaaagacagtggcccctacagagtgcagcggatccacaccagccgctcctccaaaggccgtgctgaaactggaaccccagtggatcaacgtgctgcaagaggacagcgtgaccctgacctgtagaggcacacacagccctgagagcgacagcatccagtggttccacaacggcaatctgatccccacacacacccagcctagctacagattcaaggccaacaacaacgacagcggcgagtacacctgtcagaccggccagacaagcctgagcgatcctgtgcatctgaccgtgctgtctgagtggctggtgctgcagacaccccacctggaatttcaagagggcgagacaatcgtgctgcggtgccacagctggaaggacaagcctctggtcaaagtgacattcttccagaacgggaagtccaagaagttcagcagaagcgaccccaacttcagcatccctcaggccaatcacagccactccggcgattaccactgcaccggcaatatcggctacaccctgtacagcagcaagcccgtgaccatcacagtgcaggcccctagcagtagccctatgggaatcatcgtggccgtggtcacaggcattgccgtggctgctattgtggctgcagtggtggccctgatctactgccggaagaagagaatctctgccctgcctggctaccccgagtgtagagagatgggagagacactgcccgagaagcccgccaatcctaccaatcctgacgaggccgacaaagtgggagccgagaacaccatcacctacagcctgctgatgcaccccgacgcactggaagaacccgacgaccagaatagaatcagcactagtagagtgaagttcagcagaagcgccgacgcccctgcctaccagcagggacagaaccaactgtacaacgagctgaacctgggcagacgggaagagtacgacgtgctggacaagcggagaggcagggaccctgagatgggcggaaagccccagcggagaaagaacccccaggaaggactgtataacgaactccagaaagacaagatggccgaagcctacagcgagatcggcatgaagggcgagcggagaagaggcaagggccacgatggcctgtaccagggcctgagcaccgccaccaaggacacctatgacgccctgcacatgcaggccctgcctccaagaagggccaagcgatctggatctggagcaacaaacttctcactactcaaacaagcaggtgacgtggaggagaatcccgggcctatggactggatttggcgcatccttttccttgtcggcgctgctaccggcgcgcattccgggcccgaagtgcaactggttgaatccggtggcggcctggtgcaagcaggcggatctctcagacttagctgtgccgcctccggcagaaccttcacaatgggatggtttaggcaggctccagggaaagagagagagttcgtcgccgccatctctctgtctcccacactggcctactacgccgactctgtgaaaggccggttcaccatctccagagataatgccaagaacaccgtggtgctgcaaatgaactctctgaaacccgaggatacagccctgtactattgtgccgctgaccggaagtccgtgatgagcatcagacccgattactggggacagggcacacaagtcacagtgtcctctacgcgtgcctctacaaagggaccctccgtgtttcctctggctcccagcagcaagtctacaagcggaggaacagccgctctgggctgcctggtcaaggattactttcccgagcctgtgaccgtgtcctggaatagcggagcactgacaagcggcgtgcacacctttccagccgtgctgcaaagcagcggcctgtactctctgagcagcgtggtcacagtgcctagctctagcctgggcacccagacctacatctgcaatgtgaaccacaagcctagcaacaccaaggtggacaagagagtggaacccaagagctgtggtaccactccagctgctccacctaaagctgtcctgaagctcgaacctcaatggattaacgtcctccaagaagattctgtcaccctgacatgccggggcacccactctccagagtctgattccattcagtggtttcataatgggaacctgattccgactcacacgcagcccagctatcggtttaaagctaacaacaatgactccggggagtatacttgccagacaggacagaccagcctgtctgacccagtgcacctgacagttctgagcgaatggctcgtcctgcagacccctcatcttgagttccaagagggcgaaaccattgtcctgagatgccactcctggaaagataagccccttgtgaaagtcacattttttcagaatggcaagagcaagaagttttctcggagcgatccgaatttcagtattccccaggccaaccactctcacagcggagactatcactgtacaggcaacatcgggtatacactctacagctctaagcccgtcacaattaccgttcaggctcccagcagctccccaatgggcattattgtggccgtcgtgaccggaattgctgtggccgcaatcgtggcagctgtcgtcgctctgatctattgcagaaagaagcggatcagcgccctgccagggtatcctgagtgccgcgaaatgggcgaaactctgcctgagaaacctgctaaccccacaaatcccgatgaagctgacaaagtcggcgctgaaaacacgatcacatactccctgctcatgcatcctgacgctcttgaggaacctgacgatcagaaccggatcagctctagacgggttaagttttccagatccgcagacgcacccgcttaccaacaagggcagaaccaactctacaatgaacttaatttggggcggagggaagagtacgacgttctggacaaaaggaggggacgagatcccgagatgggcggaaagcctcagcgaaggaagaatccgcaagaggggctttataacgaactccagaaagataaaatggcagaagcctatagtgagattgggatgaagggagaaaggaggaggggtaaaggtcacgatgggttgtaccaaggattgagcacagccactaaagatacctatgatgcgctccacatgcaggccctgccgccaagacgcgccaagagaagcggatctggcgtgaagcagaccctgaatttcgacctgctgaagctggctggcgacgtggaatccaacccaggccctggccatatgaccgagtacaagcccacggtgcgcctcgccacccgcgacgacgtccccagggccgtacgcaccctcgccgccgcgttcgccgactaccccgccacgcgccacaccgtcgatccggaccgccacatcgagcgggtcaccgagctgcaagaactcttcctcacgcgcgtcgggctcgacatcggcaaggtgtgggtcgcggacgacggcgccgcggtggcggtctggaccacgccggagagcgtcgaagcgggggcggtgttcgccgagatcggcccgcgcatggccgagttgagcggttcccggctggccgcgcagcaacagatggaaggcctcctggcgccgcaccggcccaaggagcccgcgtggttcctggccaccgtcggcgtctcgcccgaccaccagggcaagggtctgggcagcgccgtcgtgctccccggagtggaggcggccgagcgcgccggggtgcccgccttcctggagacctccgcgccccgcaacctccccttctacgagcggctcggcttcaccgtcaccgccgacgtcgaggtgcccgaaggaccgcgcacctggtgcatgacccgcaagcccggtgcctga

SEQ ID NO: 6195 - DNA, 4590 bp, Artificial Sequence
  Synthetic Polynucleotide
atggccttaccagtgaccgccttgctcctgccgctggccttgctgctccacgccgccaggccggacatccagatgacacagagccctagcagcctgtctgccagcgtgggagacagagtgaccatcacatgcaaggccagcgaccacatcaacaactggctggcctggtatcagcagaagcctggacaggcccctaagctgctgatctacggcgctaccacactggaaacaggcgtgcccagcagattttctggcagcggctctggcaccgactacaccctgacaatatccagcctccagcctgaggacttcgccacctactactgtcagcagagctggaacaccccttggacattcggccagggcaccaagctggaaatcaagagactcgaggacctgaagaacgtgttcccacctgaggtggccgtgttcgagcctagcgaggccgagatcagccacacccagaaagccaccctcgtgtgcctggctaccggcttctaccccgaccatgtggaactgtcttggtgggtcaacggcaaagaggtgcacagcggcgtgtctaccgacccccagccactgaaagaacagcccgccctgaacgacagccggtactgcctgagcagcagactgagagtgtccgccaccttctggcagaacccccggaaccacttcagatgccaggtgcagttctacggcctgagcgagaacgacgagtggacccaggacagagccaagcccgtgacccagatcgtgtctgccgaagcctggggcagagccgattgcggatccacaccagccgctcctccaaaggccgtgctgaaactggaaccccagtggatcaacgtgctgcaagaggacagcgtgaccctgacctgtagaggcacacacagccctgagagcgacagcatccagtggttccacaacggcaatctgatccccacacacacccagcctagctacagattcaaggccaacaacaacgacagcggcgagtacacctgtcagaccggccagacaagcctgagcgatcctgtgcatctgaccgtgctgtctgagtggctggtgctgcagacaccccacctggaatttcaagagggcgagacaatcgtgctgcggtgccacagctggaaggacaagcctctggtcaaagtgacattcttccagaacgggaagtccaagaagttcagcagaagcgaccccaacttcagcatccctcaggccaatcacagccactccggcgattaccactgcaccggcaatatcggctacaccctgtacagcagcaagcccgtgaccatcacagtgcaggcccctagcagtagccctatgggaatcatcgtggccgtggtcacaggcattgccgtggctgctattgtggctgcagtggtggccctgatctactgccggaagaagagaatctctgccctgcctggctaccccgagtgtagagagatgggagagacactgcccgagaagcccgccaatcctaccaatcctgacgaggccgacaaagtgggagccgagaacaccatcacctacagcctgctgatgcaccccgacgcactggaagaacccgacgaccagaatagaatcagcactagtagagtgaagttcagcagaagcgccgacgcccctgcctaccagcagggacagaaccaactgtacaacgagctgaacctgggcagacgggaagagtacgacgtgctggacaagcggagaggcagggaccctgagatgggcggaaagccccagcggagaaagaacccccaggaaggactgtataacgaactccagaaagacaagatggccgaagcctacagcgagatcggcatgaagggcgagcggagaagaggcaagggccacgatggcctgtaccagggcctgagcaccgccaccaaggacacctatgacgccctgcacatgcaggccctgcctccaagaagggccaagcgatctggatctggagcaacaaacttctcactactcaaacaagcaggtgacgtggaggagaatcccgggcctatggactggatttggcgcatccttttccttgtcggcgctgctaccggcgcgcattccttcgaacaagttcagcttcaacagcctggcgctgagctggtcaaacctggcgcttctgtgaagatgagctgcaaagccagcggctacgccttcagcagctactggatcaactggatgaagcagaaacccggccagggactcgaatggatcggccaaatctatcccggcgacggcgacaccaactacaacggcaagttcaagggcagagccacactgaccgccgatacctctagcagcacagcctacatgcagctgagcagcctgaccagcgaagatagcgccgtgtacttctgtgcccggtccatcacaacagtcgtgggctgcgctatggactattggggccagggaacaagcgtgaccgtgtctagtacgcgtatccagaaccctgatcctgccgtgtaccagctgcgggatagcaagagcagcgacaagagcgtgtgtctgttcaccgacttcgacagccagaccaacgtgtcccagagcaaggactccgacgtgtacatcaccgataagaccgtgctggacatgcggagcatggacttcaagagcaactccgccgtggcctggtccaacaagtccgatttcgcctgcgccaacgccttcaacaacagcattatccccgaggacacattcttcccaagccccgagagcagctgcggtaccactccagctgctccacctaaagctgtcctgaagctcgaacctcaatggattaacgtcctccaagaagattctgtcaccctgacatgccggggcacccactctccagagtctgattccattcagtggtttcataatgggaacctgattccgactcacacgcagcccagctatcggtttaaagctaacaacaatgactccggggagtatacttgccagacaggacagaccagcctgtctgacccagtgcacctgacagttctgagcgaatggctcgtcctgcagacccctcatcttgagttccaagagggcgaaaccattgtcctgagatgccactcctggaaagataagccccttgtgaaagtcacattttttcagaatggcaagagcaagaagttttctcggagcgatccgaatttcagtattccccaggccaaccactctcacagcggagactatcactgtacaggcaacatcgggtatacactctacagctctaagcccgtcacaattaccgttcaggctcccagcagctccccaatgggcattattgtggccgtcgtgaccggaattgctgtggccgcaatcgtggcagctgtcgtcgctctgatctattgcagaaagaagcggatcagcgccctgccagggtatcctgagtgccgcgaaatgggcgaaactctgcctgagaaacctgctaaccccacaaatcccgatgaagctgacaaagtcggcgctgaaaacacgatcacatactccctgctcatgcatcctgacgctcttgaggaacctgacgatcagaaccggatcagctctagacgggttaagttttccagatccgcagacgcacccgcttaccaacaagggcagaaccaactctacaatgaacttaatttggggcggagggaagagtacgacgttctggacaaaaggaggggacgagatcccgagatgggcggaaagcctcagcgaaggaagaatccgcaagaggggctttataacgaactccagaaagataaaatggcagaagcctatagtgagattgggatgaagggagaaaggaggaggggtaaaggtcacgatgggttgtaccaaggattgagcacagccactaaagatacctatgatgcgctccacatgcaggccctgccgccaagacgcgccaagagaagcggatctggcgtgaagcagaccctgaatttcgacctgctgaagctggctggcgacgtggaatccaacccaggccctggccatatgaccgagtacaagcccacggtgcgcctcgccacccgcgacgacgtccccagggccgtacgcaccctcgccgccgcgttcgccgactaccccgccacgcgccacaccgtcgatccggaccgccacatcgagcgggtcaccgagctgcaagaactcttcctcacgcgcgtcgggctcgacatcggcaaggtgtgggtcgcggacgacggcgccgcggtggcggtctggaccacgccggagagcgtcgaagcgggggcggtgttcgccgagatcggcccgcgcatggccgagttgagcggttcccggctggccgcgcagcaacagatggaaggcctcctggcgccgcaccggcccaaggagcccgcgtggttcctggccaccgtcggcgtctcgcccgaccaccagggcaagggtctgggcagcgccgtcgtgctccccggagtggaggcggccgagcgcgccggggtgcccgccttcctggagacctccgcgccccgcaacctccccttctacgagcggctcggcttcaccgtcaccgccgacgtcgaggtgcccgaaggaccgcgcacctggtgcatgacccgcaagcccggtgcctga

SEQ ID NO: 6196 - DNA, 5001 bp, Artificial Sequence
  Synthetic Polynucleotide
atggccttaccagtgaccgccttgctcctgccgctggccttgctgctccacgccgccaggccggaagtgcagctggttgaatctggcggaggactggttcaggctggcggatctctgagactgtcttgtgccgccagcggcagaacctttagcatgggctggtttagacaggcccctggcaaagagagagagttcgtcgccgccatcacatactctggcggcagcccttactacgccgactctgtgaagggcagattcaccatcagccgggacaacgccaagaacaccgtgtacctccagatgaacagcctgaagcctgaggacaccgccgtgtactactgcgccgccaatccaacatacggcagcgactggaacgccgagaattggggccagggaacccaagtgacagtgtctagcggtaccggcggaggcggatctggcggcggaggtagcggtggcggaggatctgaattcgacatccagatgacacagagccctagcagcctgtctgccagcgtgggagacagagtgaccatcacatgcaaggccagcgaccacatcaacaactggctggcctggtatcagcagaagcctggacaggcccctaagctgctgatctacggcgctaccacactggaaacaggcgtgcccagcagattttctggcagcggctctggcaccgactacaccctgacaatatccagcctccagcctgaggacttcgccacctactactgtcagcagagctggaacaccccttggacattcggccagggcaccaagctggaaatcaagagactcgaggacctgaagaacgtgttcccacctgaggtggccgtgttcgagcctagcgaggccgagatcagccacacccagaaagccaccctcgtgtgcctggctaccggcttctaccccgaccatgtggaactgtcttggtgggtcaacggcaaagaggtgcacagcggcgtgtctaccgacccccagccactgaaagaacagcccgccctgaacgacagccggtactgcctgagcagcagactgagagtgtccgccaccttctggcagaacccccggaaccacttcagatgccaggtgcagttctacggcctgagcgagaacgacgagtggacccaggacagagccaagcccgtgacccagatcgtgtctgccgaagcctggggcagagccgattgcggatccacaccagccgctcctccaaaggccgtgctgaaactggaaccccagtggatcaacgtgctgcaagaggacagcgtgaccctgacctgtagaggcacacacagccctgagagcgacagcatccagtggttccacaacggcaatctgatccccacacacacccagcctagctacagattcaaggccaacaacaacgacagcggcgagtacacctgtcagaccggccagacaagcctgagcgatcctgtgcatctgaccgtgctgtctgagtggctggtgctgcagacaccccacctggaatttcaagagggcgagacaatcgtgctgcggtgccacagctggaaggacaagcctctggtcaaagtgacattcttccagaacgggaagtccaagaagttcagcagaagcgaccccaacttcagcatccctcaggccaatcacagccactccggcgattaccactgcaccggcaatatcggctacaccctgtacagcagcaagcccgtgaccatcacagtgcaggcccctagcagtagccctatgggaatcatcgtggccgtggtcacaggcattgccgtggctgctattgtggctgcagtggtggccctgatctactgccggaagaagagaatctctgccctgcctggctaccccgagtgtagagagatgggagagacactgcccgagaagcccgccaatcctaccaatcctgacgaggccgacaaagtgggagccgagaacaccatcacctacagcctgctgatgcaccccgacgcactggaagaacccgacgaccagaatagaatcagcactagtagagtgaagttcagcagaagcgccgacgcccctgcctaccagcagggacagaaccaactgtacaacgagctgaacctgggcagacgggaagagtacgacgtgctggacaagcggagaggcagggaccctgagatgggcggaaagccccagcggagaaagaacccccaggaaggactgtataacgaactccagaaagacaagatggccgaagcctacagcgagatcggcatgaagggcgagcggagaagaggcaagggccacgatggcctgtaccagggcctgagcaccgccaccaaggacacctatgacgccctgcacatgcaggccctgcctccaagaagggccaagcgatctggatctggagcaacaaacttctcactactcaaacaagcaggtgacgtggaggagaatcccgggcctatggactggatttggcgcatccttttccttgtcggcgctgctaccggcgcgcattccttcgaacaagttcagcttcaacagcctggcgctgagctggtcaaacctggcgcttctgtgaagatgagctgcaaagccagcggctacgccttcagcagctactggatcaactggatgaagcagaaacccggccagggactcgaatggatcggccaaatctatcccggcgacggcgacaccaactacaacggcaagttcaagggcagagccacactgaccgccgatacctctagcagcacagcctacatgcagctgagcagcctgaccagcgaagatagcgccgtgtacttctgtgcccggtccatcacaacagtcgtgggctgcgctatggactattggggccagggaacaagcgtgaccgtgtctagtacgcgtatccagaaccctgatcctgccgtgtaccagctgcgggatagcaagagcagcgacaagagcgtgtgtctgttcaccgacttcgacagccagaccaacgtgtcccagagcaaggactccgacgtgtacatcaccgataagaccgtgctggacatgcggagcatggacttcaagagcaactccgccgtggcctggtccaacaagtccgatttcgcctgcgccaacgccttcaacaacagcattatccccgaggacacattcttcccaagccccgagagcagctgcggtaccactccagctgctccacctaaagctgtcctgaagctcgaacctcaatggattaacgtcctccaagaagattctgtcaccctgacatgccggggcacccactctccagagtctgattccattcagtggtttcataatgggaacctgattccgactcacacgcagcccagctatcggtttaaagctaacaacaatgactccggggagtatacttgccagacaggacagaccagcctgtctgacccagtgcacctgacagttctgagcgaatggctcgtcctgcagacccctcatcttgagttccaagagggcgaaaccattgtcctgagatgccactcctggaaagataagccccttgtgaaagtcacattttttcagaatggcaagagcaagaagttttctcggagcgatccgaatttcagtattccccaggccaaccactctcacagcggagactatcactgtacaggcaacatcgggtatacactctacagctctaagcccgtcacaattaccgttcaggctcccagcagctccccaatgggcattattgtggccgtcgtgaccggaattgctgtggccgcaatcgtggcagctgtcgtcgctctgatctattgcagaaagaagcggatcagcgccctgccagggtatcctgagtgccgcgaaatgggcgaaactctgcctgagaaacctgctaaccccacaaatcccgatgaagctgacaaagtcggcgctgaaaacacgatcacatactccctgctcatgcatcctgacgctcttgaggaacctgacgatcagaaccggatcagctctagacgggttaagttttccagatccgcagacgcacccgcttaccaacaagggcagaaccaactctacaatgaacttaatttggggcggagggaagagtacgacgttctggacaaaaggaggggacgagatcccgagatgggcggaaagcctcagcgaaggaagaatccgcaagaggggctttataacgaactccagaaagataaaatggcagaagcctatagtgagattgggatgaagggagaaaggaggaggggtaaaggtcacgatgggttgtaccaaggattgagcacagccactaaagatacctatgatgcgctccacatgcaggccctgccgccaagacgcgccaagagaagcggatctggcgtgaagcagaccctgaatttcgacctgctgaagctggctggcgacgtggaatccaacccaggccctggccatatgaccgagtacaagcccacggtgcgcctcgccacccgcgacgacgtccccagggccgtacgcaccctcgccgccgcgttcgccgactaccccgccacgcgccacaccgtcgatccggaccgccacatcgagcgggtcaccgagctgcaagaactcttcctcacgcgcgtcgggctcgacatcggcaaggtgtgggtcgcggacgacggcgccgcggtggcggtctggaccacgccggagagcgtcgaagcgggggcggtgttcgccgagatcggcccgcgcatggccgagttgagcggttcccggctggccgcgcagcaacagatggaaggcctcctggcgccgcaccggcccaaggagcccgcgtggttcctggccaccgtcggcgtctcgcccgaccaccagggcaagggtctgggcagcgccgtcgtgctccccggagtggaggcggccgagcgcgccggggtgcccgccttcctggagacctccgcgccccgcaacctccccttctacgagcggctcggcttcaccgtcaccgccgacgtcgaggtgcccgaaggaccgcgcacctggtgcatgacccgcaagcccggtgcctga

SEQ ID NO: 6197 - DNA, 5412 bp, Artificial Sequence
  Synthetic Polynucleotide
atggccttaccagtgaccgccttgctcctgccgctggccttgctgctccacgccgccaggccggaagtgcagctggttgaatctggcggaggactggttcaggctggcggatctctgagactgtcttgtgccgccagcggcagaacctttagcatgggctggtttagacaggcccctggcaaagagagagagttcgtcgccgccatcacatactctggcggcagcccttactacgccgactctgtgaagggcagattcaccatcagccgggacaacgccaagaacaccgtgtacctccagatgaacagcctgaagcctgaggacaccgccgtgtactactgcgccgccaatccaacatacggcagcgactggaacgccgagaattggggccagggaacccaagtgacagtgtctagcggtaccggcggaggcggatctggcggcggaggtagcggtggcggaggatctgaattcgacatccagatgacacagagccctagcagcctgtctgccagcgtgggagacagagtgaccatcacatgcaaggccagcgaccacatcaacaactggctggcctggtatcagcagaagcctggacaggcccctaagctgctgatctacggcgctaccacactggaaacaggcgtgcccagcagattttctggcagcggctctggcaccgactacaccctgacaatatccagcctccagcctgaggacttcgccacctactactgtcagcagagctggaacaccccttggacattcggccagggcaccaagctggaaatcaagagactcgaggacctgaagaacgtgttcccacctgaggtggccgtgttcgagcctagcgaggccgagatcagccacacccagaaagccaccctcgtgtgcctggctaccggcttctaccccgaccatgtggaactgtcttggtgggtcaacggcaaagaggtgcacagcggcgtgtctaccgacccccagccactgaaagaacagcccgccctgaacgacagccggtactgcctgagcagcagactgagagtgtccgccaccttctggcagaacccccggaaccacttcagatgccaggtgcagttctacggcctgagcgagaacgacgagtggacccaggacagagccaagcccgtgacccagatcgtgtctgccgaagcctggggcagagccgattgcggatccacaccagccgctcctccaaaggccgtgctgaaactggaaccccagtggatcaacgtgctgcaagaggacagcgtgaccctgacctgtagaggcacacacagccctgagagcgacagcatccagtggttccacaacggcaatctgatccccacacacacccagcctagctacagattcaaggccaacaacaacgacagcggcgagtacacctgtcagaccggccagacaagcctgagcgatcctgtgcatctgaccgtgctgtctgagtggctggtgctgcagacaccccacctggaatttcaagagggcgagacaatcgtgctgcggtgccacagctggaaggacaagcctctggtcaaagtgacattcttccagaacgggaagtccaagaagttcagcagaagcgaccccaacttcagcatccctcaggccaatcacagccactccggcgattaccactgcaccggcaatatcggctacaccctgtacagcagcaagcccgtgaccatcacagtgcaggcccctagcagtagccctatgggaatcatcgtggccgtggtcacaggcattgccgtggctgctattgtggctgcagtggtggccctgatctactgccggaagaagagaatctctgccctgcctggctaccccgagtgtagagagatgggagagacactgcccgagaagcccgccaatcctaccaatcctgacgaggccgacaaagtgggagccgagaacaccatcacctacagcctgctgatgcaccccgacgcactggaagaacccgacgaccagaatagaatcagcactagtagagtgaagttcagcagaagcgccgacgcccctgcctaccagcagggacagaaccaactgtacaacgagctgaacctgggcagacgggaagagtacgacgtgctggacaagcggagaggcagggaccctgagatgggcggaaagccccagcggagaaagaacccccaggaaggactgtataacgaactccagaaagacaagatggccgaagcctacagcgagatcggcatgaagggcgagcggagaagaggcaagggccacgatggcctgtaccagggcctgagcaccgccaccaaggacacctatgacgccctgcacatgcaggccctgcctccaagaagggccaagcgatctggatctggagcaacaaacttctcactactcaaacaagcaggtgacgtggaggagaatcccgggcctatggactggatttggcgcatccttttccttgtcggcgctgctaccggcgcgcattccgggcccgaagtgcaactggttgaatccggtggcggcctggtgcaagcaggcggatctctcagacttagctgtgccgcctccggcagaaccttcacaatgggatggtttaggcaggctccagggaaagagagagagttcgtcgccgccatctctctgtctcccacactggcctactacgccgactctgtgaaaggccggttcaccatctccagagataatgccaagaacaccgtggtgctgcaaatgaactctctgaaacccgaggatacagccctgtactattgtgccgctgaccggaagtccgtgatgagcatcagacccgattactggggacagggcacacaagtcacagtgtcctctggatccggcggcggaggatctggcggaggcggatctgggggcggaggctctttcgaacaagttcagcttcaacagcctggcgctgagctggtcaaacctggcgcttctgtgaagatgagctgcaaagccagcggctacgccttcagcagctactggatcaactggatgaagcagaaacccggccagggactcgaatggatcggccaaatctatcccggcgacggcgacaccaactacaacggcaagttcaagggcagagccacactgaccgccgatacctctagcagcacagcctacatgcagctgagcagcctgaccagcgaagatagcgccgtgtacttctgtgcccggtccatcacaacagtcgtgggctgcgctatggactattggggccagggaacaagcgtgaccgtgtctagtacgcgtatccagaaccctgatcctgccgtgtaccagctgcgggatagcaagagcagcgacaagagcgtgtgtctgttcaccgacttcgacagccagaccaacgtgtcccagagcaaggactccgacgtgtacatcaccgataagaccgtgctggacatgcggagcatggacttcaagagcaactccgccgtggcctggtccaacaagtccgatttcgcctgcgccaacgccttcaacaacagcattatccccgaggacacattcttcccaagccccgagagcagctgcggtaccactccagctgctccacctaaagctgtcctgaagctcgaacctcaatggattaacgtcctccaagaagattctgtcaccctgacatgccggggcacccactctccagagtctgattccattcagtggtttcataatgggaacctgattccgactcacacgcagcccagctatcggtttaaagctaacaacaatgactccggggagtatacttgccagacaggacagaccagcctgtctgacccagtgcacctgacagttctgagcgaatggctcgtcctgcagacccctcatcttgagttccaagagggcgaaaccattgtcctgagatgccactcctggaaagataagccccttgtgaaagtcacattttttcagaatggcaagagcaagaagttttctcggagcgatccgaatttcagtattccccaggccaaccactctcacagcggagactatcactgtacaggcaacatcgggtatacactctacagctctaagcccgtcacaattaccgttcaggctcccagcagctccccaatgggcattattgtggccgtcgtgaccggaattgctgtggccgcaatcgtggcagctgtcgtcgctctgatctattgcagaaagaagcggatcagcgccctgccagggtatcctgagtgccgcgaaatgggcgaaactctgcctgagaaacctgctaaccccacaaatcccgatgaagctgacaaagtcggcgctgaaaacacgatcacatactccctgctcatgcatcctgacgctcttgaggaacctgacgatcagaaccggatcagctctagacgggttaagttttccagatccgcagacgcacccgcttaccaacaagggcagaaccaactctacaatgaacttaatttggggcggagggaagagtacgacgttctggacaaaaggaggggacgagatcccgagatgggcggaaagcctcagcgaaggaagaatccgcaagaggggctttataacgaactccagaaagataaaatggcagaagcctatagtgagattgggatgaagggagaaaggaggaggggtaaaggtcacgatgggttgtaccaaggattgagcacagccactaaagatacctatgatgcgctccacatgcaggccctgccgccaagacgcgccaagagaagcggatctggcgtgaagcagaccctgaatttcgacctgctgaagctggctggcgacgtggaatccaacccaggccctggccatatgaccgagtacaagcccacggtgcgcctcgccacccgcgacgacgtccccagggccgtacgcaccctcgccgccgcgttcgccgactaccccgccacgcgccacaccgtcgatccggaccgccacatcgagcgggtcaccgagctgcaagaactcttcctcacgcgcgtcgggctcgacatcggcaaggtgtgggtcgcggacgacggcgccgcggtggcggtctggaccacgccggagagcgtcgaagcgggggcggtgttcgccgagatcggcccgcgcatggccgagttgagcggttcccggctggccgcgcagcaacagatggaaggcctcctggcgccgcaccggcccaaggagcccgcgtggttcctggccaccgtcggcgtctcgcccgaccaccagggcaagggtctgggcagcgccgtcgtgctccccggagtggaggcggccgagcgcgccggggtgcccgccttcctggagacctccgcgccccgcaacctccccttctacgagcggctcggcttcaccgtcaccgccgacgtcgaggtgcccgaaggaccgcgcacctggtgcatgacccgcaagcccggtgcctga

SEQ ID NO: 6198 - DNA, 4611 bp, Artificial Sequence
  Synthetic Polynucleotide
atggccttaccagtgaccgccttgctcctgccgctggccttgctgctccacgccgccaggccggaagtgcagctggttgaatctggcggaggactggttcaggctggcggatctctgagactgtcttgtgccgccagcggcagaacctttagcatgggctggtttagacaggcccctggcaaagagagagagttcgtcgccgccatcacatactctggcggcagcccttactacgccgactctgtgaagggcagattcaccatcagccgggacaacgccaagaacaccgtgtacctccagatgaacagcctgaagcctgaggacaccgccgtgtactactgcgccgccaatccaacatacggcagcgactggaacgccgagaattggggccagggaacccaagtgacagtgtctagcctcgaggacctgaagaacgtgttcccacctgaggtggccgtgttcgagcctagcgaggccgagatcagccacacccagaaagccaccctcgtgtgcctggctaccggcttctaccccgaccatgtggaactgtcttggtgggtcaacggcaaagaggtgcacagcggcgtgtctaccgacccccagccactgaaagaacagcccgccctgaacgacagccggtactgcctgagcagcagactgagagtgtccgccaccttctggcagaacccccggaaccacttcagatgccaggtgcagttctacggcctgagcgagaacgacgagtggacccaggacagagccaagcccgtgacccagatcgtgtctgccgaagcctggggcagagccgattgcggatccacaccagccgctcctccaaaggccgtgctgaaactggaaccccagtggatcaacgtgctgcaagaggacagcgtgaccctgacctgtagaggcacacacagccctgagagcgacagcatccagtggttccacaacggcaatctgatccccacacacacccagcctagctacagattcaaggccaacaacaacgacagcggcgagtacacctgtcagaccggccagacaagcctgagcgatcctgtgcatctgaccgtgctgtctgagtggctggtgctgcagacaccccacctggaatttcaagagggcgagacaatcgtgctgcggtgccacagctggaaggacaagcctctggtcaaagtgacattcttccagaacgggaagtccaagaagttcagcagaagcgaccccaacttcagcatccctcaggccaatcacagccactccggcgattaccactgcaccggcaatatcggctacaccctgtacagcagcaagcccgtgaccatcacagtgcaggcccctagcagtagccctatgggaatcatcgtggccgtggtcacaggcattgccgtggctgctattgtggctgcagtggtggccctgatctactgccggaagaagagaatctctgccctgcctggctaccccgagtgtagagagatgggagagacactgcccgagaagcccgccaatcctaccaatcctgacgaggccgacaaagtgggagccgagaacaccatcacctacagcctgctgatgcaccccgacgcactggaagaacccgacgaccagaatagaatcagcactagtagagtgaagttcagcagaagcgccgacgcccctgcctaccagcagggacagaaccaactgtacaacgagctgaacctgggcagacgggaagagtacgacgtgctggacaagcggagaggcagggaccctgagatgggcggaaagccccagcggagaaagaacccccaggaaggactgtataacgaactccagaaagacaagatggccgaagcctacagcgagatcggcatgaagggcgagcggagaagaggcaagggccacgatggcctgtaccagggcctgagcaccgccaccaaggacacctatgacgccctgcacatgcaggccctgcctccaagaagggccaagcgatctggatctggagcaacaaacttctcactactcaaacaagcaggtgacgtggaggagaatcccgggcctatggactggatttggcgcatccttttccttgtcggcgctgctaccggcgcgcattccgggcccgaagtgcaactggttgaatccggtggcggcctggtgcaagcaggcggatctctcagacttagctgtgccgcctccggcagaaccttcacaatgggatggtttaggcaggctccagggaaagagagagagttcgtcgccgccatctctctgtctcccacactggcctactacgccgactctgtgaaaggccggttcaccatctccagagataatgccaagaacaccgtggtgctgcaaatgaactctctgaaacccgaggatacagccctgtactattgtgccgctgaccggaagtccgtgatgagcatcagacccgattactggggacagggcacacaagtcacagtgtcctctacgcgtatccagaaccctgatcctgccgtgtaccagctgcgggatagcaagagcagcgacaagagcgtgtgtctgttcaccgacttcgacagccagaccaacgtgtcccagagcaaggactccgacgtgtacatcaccgataagaccgtgctggacatgcggagcatggacttcaagagcaactccgccgtggcctggtccaacaagtccgatttcgcctgcgccaacgccttcaacaacagcattatccccgaggacacattcttcccaagccccgagagcagctgcggtaccactccagctgctccacctaaagctgtcctgaagctcgaacctcaatggattaacgtcctccaagaagattctgtcaccctgacatgccggggcacccactctccagagtctgattccattcagtggtttcataatgggaacctgattccgactcacacgcagcccagctatcggtttaaagctaacaacaatgactccggggagtatacttgccagacaggacagaccagcctgtctgacccagtgcacctgacagttctgagcgaatggctcgtcctgcagacccctcatcttgagttccaagagggcgaaaccattgtcctgagatgccactcctggaaagataagccccttgtgaaagtcacattttttcagaatggcaagagcaagaagttttctcggagcgatccgaatttcagtattccccaggccaaccactctcacagcggagactatcactgtacaggcaacatcgggtatacactctacagctctaagcccgtcacaattaccgttcaggctcccagcagctccccaatgggcattattgtggccgtcgtgaccggaattgctgtggccgcaatcgtggcagctgtcgtcgctctgatctattgcagaaagaagcggatcagcgccctgccagggtatcctgagtgccgcgaaatgggcgaaactctgcctgagaaacctgctaaccccacaaatcccgatgaagctgacaaagtcggcgctgaaaacacgatcacatactccctgctcatgcatcctgacgctcttgaggaacctgacgatcagaaccggatcagctctagacgggttaagttttccagatccgcagacgcacccgcttaccaacaagggcagaaccaactctacaatgaacttaatttggggcggagggaagagtacgacgttctggacaaaaggaggggacgagatcccgagatgggcggaaagcctcagcgaaggaagaatccgcaagaggggctttataacgaactccagaaagataaaatggcagaagcctatagtgagattgggatgaagggagaaaggaggaggggtaaaggtcacgatgggttgtaccaaggattgagcacagccactaaagatacctatgatgcgctccacatgcaggccctgccgccaagacgcgccaagagaagcggatctggcgtgaagcagaccctgaatttcgacctgctgaagctggctggcgacgtggaatccaacccaggccctggccatatgaccgagtacaagcccacggtgcgcctcgccacccgcgacgacgtccccagggccgtacgcaccctcgccgccgcgttcgccgactaccccgccacgcgccacaccgtcgatccggaccgccacatcgagcgggtcaccgagctgcaagaactcttcctcacgcgcgtcgggctcgacatcggcaaggtgtgggtcgcggacgacggcgccgcggtggcggtctggaccacgccggagagcgtcgaagcgggggcggtgttcgccgagatcggcccgcgcatggccgagttgagcggttcccggctggccgcgcagcaacagatggaaggcctcctggcgccgcaccggcccaaggagcccgcgtggttcctggccaccgtcggcgtctcgcccgaccaccagggcaagggtctgggcagcgccgtcgtgctccccggagtggaggcggccgagcgcgccggggtgcccgccttcctggagacctccgcgccccgcaacctccccttctacgagcggctcggcttcaccgtcaccgccgacgtcgaggtgcccgaaggaccgcgcacctggtgcatgacccgcaagcccggtgcctga

SEQ ID NO: 6199 - DNA, 2340 bp, Artificial Sequence
  Synthetic Polynucleotide
atggccttaccagtgaccgccttgctcctgccgctggccttgctgctccacgccgccaggccggcatgcgaagtgcagctgcttgaaagtggcggcggactgattcagcctggcggatctctgagactgagctgtgccgccagcggcttcaccttttctagccacgccatgacctgggtccgacaggcacctggaaaagggcttgaatgggtgtccgccatcagcggctctggcgattacacacactacgccgacagcgtgaagggcagattcaccatcagcagagacaacagcaagaacaccgtgtacctccagatgaacagcctgagagccgaggacagcgccgtgtattattgcgccaaggatgaggatggcggcagcctgcttggacacagaggacaaggcaccctggtcaccgtttcttccggtaccggcggaggcggatctggcggcggaggtagcggtggcggaggatctgaattcggatctctcgagacaccagccgctcctccaaaggccgtgctgaaactggaaccccagtggatcaacgtgctgcaagaggacagcgtgaccctgacctgtagaggcacacacagccctgagagcgacagcatccagtggttccacaacggcaatctgatccccacacacacccagcctagctacagattcaaggccaacaacaacgacagcggcgagtacacctgtcagaccggccagacaagcctgagcgatcctgtgcatctgaccgtgctgtctgagtggctggtgctgcagacaccccacctggaatttcaagagggcgagacaatcgtgctgcggtgccacagctggaaggacaagcctctggtcaaagtgacattcttccagaacgggaagtccaagaagttcagcagaagcgaccccaacttcagcatccctcaggccaatcacagccactccggcgattaccactgcaccggcaatatcggctacaccctgtacagcagcaagcccgtgaccatcacagtgcaggcccctagcagtagccctatgggaatcatcgtggccgtggtcacaggcattgccgtggctgctattgtggctgcagtggtggccctgatctactgccggaagaagagaatctctgccctgcctggctaccccgagtgtagagagatgggagagacactgcccgagaagcccgccaatcctaccaatcctgacgaggccgacaaagtgggagccgagaacaccatcacctacagcctgctgatgcaccccgacgcactggaagaacccgacgaccagaatagaatcagcactagtagagtgaagttcagcagaagcgccgacgcccctgcctaccagcagggacagaaccaactgtacaacgagctgaacctgggcagacgggaagagtacgacgtgctggacaagcggagaggcagggaccctgagatgggcggaaagccccagcggagaaagaacccccaggaaggactgtataacgaactccagaaagacaagatggccgaagcctacagcgagatcggcatgaagggcgagcggagaagaggcaagggccacgatggcctgtaccagggcctgagcaccgccaccaaggacacctatgacgccctgcacatgcaggccctgcctccaagaagggccaagcgatctggatctggagcaacaaacttctcactactcaaacaagcaggtgacgtggaggagaatcccgggcctactagaggccatatgaccgagtacaagcccacggtgcgcctcgccacccgcgacgacgtccccagggccgtacgcaccctcgccgccgcgttcgccgactaccccgccacgcgccacaccgtcgatccggaccgccacatcgagcgggtcaccgagctgcaagaactcttcctcacgcgcgtcgggctcgacatcggcaaggtgtgggtcgcggacgacggcgccgcggtggcggtctggaccacgccggagagcgtcgaagcgggggcggtgttcgccgagatcggcccgcgcatggccgagttgagcggttcccggctggccgcgcagcaacagatggaaggcctcctggcgccgcaccggcccaaggagcccgcgtggttcctggccaccgtcggcgtctcgcccgaccaccagggcaagggtctgggcagcgccgtcgtgctccccggagtggaggcggccgagcgcgccggggtgcccgccttcctggagacctccgcgccccgcaacctccccttctacgagcggctcggcttcaccgtcaccgccgacgtcgaggtgcccgaaggaccgcgcacctggtgcatgacccgcaagcccggtgcctga

SEQ ID NO: 6200 - DNA, 1953 bp, Artificial Sequence
  Synthetic Polynucleotide
atggccttaccagtgaccgccttgctcctgccgctggccttgctgctccacgccgccaggccggacatccagatgacacagagccctagcagcctgtctgccagcgtgggagacagagtgaccatcacatgcaaggccagcgaccacatcaacaactggctggcctggtatcagcagaagcctggacaggcccctaagctgctgatctacggcgctaccacactggaaacaggcgtgcccagcagattttctggcagcggctctggcaccgactacaccctgacaatatccagcctccagcctgaggacttcgccacctactactgtcagcagagctggaacaccccttggacattcggccagggcaccaagctggaaatcaagagaggcggaggcggaagtggaggcggaggatctggcggcggaggctctcaagttcagcttcaacagcctggcgctgagctggtcaaacctggcgcttctgtgaagatgagctgcaaagccagcggctacgccttcagcagctactggatcaactggatgaagcagaaacccggccagggactcgaatggatcggccaaatctatcccggcgacggcgacaccaactacaacggcaagttcaagggcagagccacactgaccgccgatacctctagcagcacagcctacatgcagctgagcagcctgaccagcgaagatagcgccgtgtacttctgtgcccggtccatcacaacagtcgtgggctgcgctatggactattggggccagggaacaagcgtgaccgtgtctagtacgcgtacaccagccgctcctccaaaggccgtgctgaaactggaaccccagtggatcaacgtgctgcaagaggacagcgtgaccctgacctgtagaggcacacacagccctgagagcgacagcatccagtggttccacaacggcaatctgatccccacacacacccagcctagctacagattcaaggccaacaacaacgacagcggcgagtacacctgtcagaccggccagacaagcctgagcgatcctgtgcatctgaccgtgctgtctgagtggctggtgctgcagacaccccacctggaatttcaagagggcgagacaatcgtgctgcggtgccacagctggaaggacaagcctctggtcaaagtgacattcttccagaacgggaagtccaagaagttcagcagaagcgaccccaacttcagcatccctcaggccaatcacagccactccggcgattaccactgcaccggcaatatcggctacaccctgtacagcagcaagcccgtgaccatcacagtgcaggcccctagcagtagccctatgggaatcatcgtggccgtggtcacaggcattgccgtggctgctattgtggctgcagtggtggccctgatctactgccggaagaagagaatctctgccctgcctggctaccccgagtgtagagagatgggagagacactgcccgagaagcccgccaatcctaccaatcctgacgaggccgacaaagtgggagccgagaacaccatcacctacagcctgctgatgcaccccgacgcactggaagaacccgacgaccagaatagaatcagcactagtagagtgaagttcagcagaagcgccgacgcccctgcctaccagcagggacagaaccaactgtacaacgagctgaacctgggcagacgggaagagtacgacgtgctggacaagcggagaggcagggaccctgagatgggcggaaagccccagcggagaaagaacccccaggaaggactgtataacgaactccagaaagacaagatggccgaagcctacagcgagatcggcatgaagggcgagcggagaagaggcaagggccacgatggcctgtaccagggcctgagcaccgccaccaaggacacctatgacgccctgcacatgcaggccctgcctccaaga

SEQ ID NO: 6201 - DNA, 1953 bp, Artificial Sequence
  Synthetic Polynucleotide
atggccttaccagtgaccgccttgctcctgccgctggccttgctgctccacgccgccaggccggagatcgtgctgacacagagccctgccaccctgtctctgagccctggcgaaagagccaccctgagctgtagagccagccagagcgtgtccagctacctggcctggtatcagcagaagcccggccaggctccccggctgctgatctacgatgccagcaatagagccaccggcatccccgccagattttccggctctggcagcggcaccgacttcaccctgaccatcagctccctggaacccgaggacttcgccgtgtactactgccagcagcggagcaactggcccatcacattcggccagggcacccggctggaaatcaaaggcggaggcggaagtggaggcggaggatctggcggcggaggctctgaagtgcagctggtggaatcaggcggcggactggtgcagcctggcagaagcctgagactgagctgtgccgccagcggcttcaccttcaacgactacgccatgcactgggtgcgccaggcccctggaaaaggactggaatgggtgtccacaatcagctggaacagcggcagcatcggctacgccgatagcgtgaagggccggttcaccatcagccgggacaacgccaagaagtccctgtacctccagatgaacagcctgcgggccgaggacacagccctgtactattgcgccaaggacatccagtacggcaactactactacggcatggacgtgtggggccagggaaccaccgtgaccgtgtcatctacgcgtacaccagccgctcctccaaaggccgtgctgaaactggaaccccagtggatcaacgtgctgcaagaggacagcgtgaccctgacctgtagaggcacacacagccctgagagcgacagcatccagtggttccacaacggcaatctgatccccacacacacccagcctagctacagattcaaggccaacaacaacgacagcggcgagtacacctgtcagaccggccagacaagcctgagcgatcctgtgcatctgaccgtgctgtctgagtggctggtgctgcagacaccccacctggaatttcaagagggcgagacaatcgtgctgcggtgccacagctggaaggacaagcctctggtcaaagtgacattcttccagaacgggaagtccaagaagttcagcagaagcgaccccaacttcagcatccctcaggccaatcacagccactccggcgattaccactgcaccggcaatatcggctacaccctgtacagcagcaagcccgtgaccatcacagtgcaggcccctagcagtagccctatgggaatcatcgtggccgtggtcacaggcattgccgtggctgctattgtggctgcagtggtggccctgatctactgccggaagaagagaatctctgccctgcctggctaccccgagtgtagagagatgggagagacactgcccgagaagcccgccaatcctaccaatcctgacgaggccgacaaagtgggagccgagaacaccatcacctacagcctgctgatgcaccccgacgcactggaagaacccgacgaccagaatagaatcagcactagtagagtgaagttcagcagaagcgccgacgcccctgcctaccagcagggacagaaccaactgtacaacgagctgaacctgggcagacgggaagagtacgacgtgctggacaagcggagaggcagggaccctgagatgggcggaaagccccagcggagaaagaacccccaggaaggactgtataacgaactccagaaagacaagatggccgaagcctacagcgagatcggcatgaagggcgagcggagaagaggcaagggccacgatggcctgtaccagggcctgagcaccgccaccaaggacacctatgacgccctgcacatgcaggccctgcctccaaga

SEQ ID NO: 6202 - DNA, 1575 bp, Artificial Sequence
  Synthetic Polynucleotide
atggccttaccagtgaccgccttgctcctgccgctggccttgctgctccacgccgccaggccggaagtgcagctggttgaatctggcggaggactggttcaggctggcggatctctgagactgtcttgtgccgccagcggcagaacctttagcatgggctggtttagacaggcccctggcaaagagagagagttcgtcgccgccatcacatactctggcggcagcccttactacgccgactctgtgaagggcagattcaccatcagccgggacaacgccaagaacaccgtgtacctccagatgaacagcctgaagcctgaggacaccgccgtgtactactgcgccgccaatccaacatacggcagcgactggaacgccgagaattggggccagggaacccaagtgacagtgtctagcacgcgtacaccagccgctcctccaaaggccgtgctgaaactggaaccccagtggatcaacgtgctgcaagaggacagcgtgaccctgacctgtagaggcacacacagccctgagagcgacagcatccagtggttccacaacggcaatctgatccccacacacacccagcctagctacagattcaaggccaacaacaacgacagcggcgagtacacctgtcagaccggccagacaagcctgagcgatcctgtgcatctgaccgtgctgtctgagtggctggtgctgcagacaccccacctggaatttcaagagggcgagacaatcgtgctgcggtgccacagctggaaggacaagcctctggtcaaagtgacattcttccagaacgggaagtccaagaagttcagcagaagcgaccccaacttcagcatccctcaggccaatcacagccactccggcgattaccactgcaccggcaatatcggctacaccctgtacagcagcaagcccgtgaccatcacagtgcaggcccctagcagtagccctatgggaatcatcgtggccgtggtcacaggcattgccgtggctgctattgtggctgcagtggtggccctgatctactgccggaagaagagaatctctgccctgcctggctaccccgagtgtagagagatgggagagacactgcccgagaagcccgccaatcctaccaatcctgacgaggccgacaaagtgggagccgagaacaccatcacctacagcctgctgatgcaccccgacgcactggaagaacccgacgaccagaatagaatcagcactagtagagtgaagttcagcagaagcgccgacgcccctgcctaccagcagggacagaaccaactgtacaacgagctgaacctgggcagacgggaagagtacgacgtgctggacaagcggagaggcagggaccctgagatgggcggaaagccccagcggagaaagaacccccaggaaggactgtataacgaactccagaaagacaagatggccgaagcctacagcgagatcggcatgaagggcgagcggagaagaggcaagggccacgatggcctgtaccagggcctgagcaccgccaccaaggacacctatgacgccctgcacatgcaggccctgcctccaaga

SEQ ID NO: 6203 - DNA, 1575 bp, Artificial Sequence
  Synthetic Polynucleotide
atggccttaccagtgaccgccttgctcctgccgctggccttgctgctccacgccgccaggccgcagctccagttgcaagagagcggccctggcttggtaaaaccttccgagacccttagcctcacatgcacggttagtgggggcagcatttcctcaggtgattactattggggatggattcggcaacccccgggtaaaggattggagtggattggtcatatttattatagtggagcgacgtactacaacccaagtctcaaatccagggttacaatatccgtcgatacgagcaggaaccaattcagcttgaaactttctagtgtcaccgcagcagacacagccgtctattactgtacgcgggatgactccagtaattggcggtcccgagggcaagggacactggtcacggtctcctcaacgcgtacaccagccgctcctccaaaggccgtgctgaaactggaaccccagtggatcaacgtgctgcaagaggacagcgtgaccctgacctgtagaggcacacacagccctgagagcgacagcatccagtggttccacaacggcaatctgatccccacacacacccagcctagctacagattcaaggccaacaacaacgacagcggcgagtacacctgtcagaccggccagacaagcctgagcgatcctgtgcatctgaccgtgctgtctgagtggctggtgctgcagacaccccacctggaatttcaagagggcgagacaatcgtgctgcggtgccacagctggaaggacaagcctctggtcaaagtgacattcttccagaacgggaagtccaagaagttcagcagaagcgaccccaacttcagcatccctcaggccaatcacagccactccggcgattaccactgcaccggcaatatcggctacaccctgtacagcagcaagcccgtgaccatcacagtgcaggcccctagcagtagccctatgggaatcatcgtggccgtggtcacaggcattgccgtggctgctattgtggctgcagtggtggccctgatctactgccggaagaagagaatctctgccctgcctggctaccccgagtgtagagagatgggagagacactgcccgagaagcccgccaatcctaccaatcctgacgaggccgacaaagtgggagccgagaacaccatcacctacagcctgctgatgcaccccgacgcactggaagaacccgacgaccagaatagaatcagcactagtagagtgaagttcagcagaagcgccgacgcccctgcctaccagcagggacagaaccaactgtacaacgagctgaacctgggcagacgggaagagtacgacgtgctggacaagcggagaggcagggaccctgagatgggcggaaagccccagcggagaaagaacccccaggaaggactgtataacgaactccagaaagacaagatggccgaagcctacagcgagatcggcatgaagggcgagcggagaagaggcaagggccacgatggcctgtaccagggcctgagcaccgccaccaaggacacctatgacgccctgcacatgcaggccctgcctccaaga

SEQ ID NO: 6204 - DNA, 1575 bp, Artificial Sequence
  Synthetic Polynucleotide
atggccttaccagtgaccgccttgctcctgccgctggccttgctgctccacgccgccaggccgcagctccagctgcaagagtctggacctggcctggtcaagcctagcgagacactgagcctgacctgtaccgtgtccggcgatagcatcagcagcggcgattactactggggctggatcagacagcctcctggcaaaggactggaatggatcggccacatctactacagcggcgtgacctactacaaccccagcctgaagtccagagtgaccatcagcgtggacaccagccggaaccagttctccctgaagctgtctagcgtgacagccgccgataccgccgtgtactactgcaccagagaggacagcagcaactggcggagtagaggccagggaacactggtcacagttagctctacgcgtacaccagccgctcctccaaaggccgtgctgaaactggaaccccagtggatcaacgtgctgcaagaggacagcgtgaccctgacctgtagaggcacacacagccctgagagcgacagcatccagtggttccacaacggcaatctgatccccacacacacccagcctagctacagattcaaggccaacaacaacgacagcggcgagtacacctgtcagaccggccagacaagcctgagcgatcctgtgcatctgaccgtgctgtctgagtggctggtgctgcagacaccccacctggaatttcaagagggcgagacaatcgtgctgcggtgccacagctggaaggacaagcctctggtcaaagtgacattcttccagaacgggaagtccaagaagttcagcagaagcgaccccaacttcagcatccctcaggccaatcacagccactccggcgattaccactgcaccggcaatatcggctacaccctgtacagcagcaagcccgtgaccatcacagtgcaggcccctagcagtagccctatgggaatcatcgtggccgtggtcacaggcattgccgtggctgctattgtggctgcagtggtggccctgatctactgccggaagaagagaatctctgccctgcctggctaccccgagtgtagagagatgggagagacactgcccgagaagcccgccaatcctaccaatcctgacgaggccgacaaagtgggagccgagaacaccatcacctacagcctgctgatgcaccccgacgcactggaagaacccgacgaccagaatagaatcagcactagtagagtgaagttcagcagaagcgccgacgcccctgcctaccagcagggacagaaccaactgtacaacgagctgaacctgggcagacgggaagagtacgacgtgctggacaagcggagaggcagggaccctgagatgggcggaaagccccagcggagaaagaacccccaggaaggactgtataacgaactccagaaagacaagatggccgaagcctacagcgagatcggcatgaagggcgagcggagaagaggcaagggccacgatggcctgtaccagggcctgagcaccgccaccaaggacacctatgacgccctgcacatgcaggccctgcctccaaga

SEQ ID NO: 6205 - DNA, 1581 bp, Artificial Sequence
  Synthetic Polynucleotide
atggccttaccagtgaccgccttgctcctgccgctggccttgctgctccacgccgccaggccggaagttcagctgcaagagtctggcggaggactggttcaacctggcggaagcctgagactgtcttgtgccgcctctggcagaaccttcagcagcctgttcatgggctggttcagacaggcccctggcaaagagagagaactggtcgccgccatcagccggtacagcctgtacacctactacgccgacagcgtgaagggcagattcaccatcagcgccgacaacgccaagaacgccgtgtacctccagatgaacagcctgaagccagaggacacagccgtgtactactgcgccagcaaacttgagtacaccagcaacgactacgacagctggggccagggaacccaagtgacagtctcttctacgcgtacaccagccgctcctccaaaggccgtgctgaaactggaaccccagtggatcaacgtgctgcaagaggacagcgtgaccctgacctgtagaggcacacacagccctgagagcgacagcatccagtggttccacaacggcaatctgatccccacacacacccagcctagctacagattcaaggccaacaacaacgacagcggcgagtacacctgtcagaccggccagacaagcctgagcgatcctgtgcatctgaccgtgctgtctgagtggctggtgctgcagacaccccacctggaatttcaagagggcgagacaatcgtgctgcggtgccacagctggaaggacaagcctctggtcaaagtgacattcttccagaacgggaagtccaagaagttcagcagaagcgaccccaacttcagcatccctcaggccaatcacagccactccggcgattaccactgcaccggcaatatcggctacaccctgtacagcagcaagcccgtgaccatcacagtgcaggcccctagcagtagccctatgggaatcatcgtggccgtggtcacaggcattgccgtggctgctattgtggctgcagtggtggccctgatctactgccggaagaagagaatctctgccctgcctggctaccccgagtgtagagagatgggagagacactgcccgagaagcccgccaatcctaccaatcctgacgaggccgacaaagtgggagccgagaacaccatcacctacagcctgctgatgcaccccgacgcactggaagaacccgacgaccagaatagaatcagcactagtagagtgaagttcagcagaagcgccgacgcccctgcctaccagcagggacagaaccaactgtacaacgagctgaacctgggcagacgggaagagtacgacgtgctggacaagcggagaggcagggaccctgagatgggcggaaagccccagcggagaaagaacccccaggaaggactgtataacgaactccagaaagacaagatggccgaagcctacagcgagatcggcatgaagggcgagcggagaagaggcaagggccacgatggcctgtaccagggcctgagcaccgccaccaaggacacctatgacgccctgcacatgcaggccctgcctccaaga

SEQ ID NO: 6206 - DNA, 1605 bp, Artificial Sequence
  Synthetic Polynucleotide
atggccttaccagtgaccgccttgctcctgccgctggccttgctgctccacgccgccaggccggaagtgcagctggttgaatctggcggaggactggttcagcctggcggatctctgagactgtcttgtgccgcctctggcttcgccagcgactactatatcatcggctggttcagacaggcccctggcaaagagagagagggcgtcagctgtatcagcagcagatacgccaacaccaactacgccgacagcgtgaagggcagattcaccatcagccgggacaacgccaagaacaccgtgtacctccagatgaacagcctgaagcctgaggacaccgccgtgtactactgtgccgccgacaccagaagatacacctgtcctgacattgccaccatgcaccggaacttcgattcttggggccagggcacactggtcaccgtttcttctacgcgtacaccagccgctcctccaaaggccgtgctgaaactggaaccccagtggatcaacgtgctgcaagaggacagcgtgaccctgacctgtagaggcacacacagccctgagagcgacagcatccagtggttccacaacggcaatctgatccccacacacacccagcctagctacagattcaaggccaacaacaacgacagcggcgagtacacctgtcagaccggccagacaagcctgagcgatcctgtgcatctgaccgtgctgtctgagtggctggtgctgcagacaccccacctggaatttcaagagggcgagacaatcgtgctgcggtgccacagctggaaggacaagcctctggtcaaagtgacattcttccagaacgggaagtccaagaagttcagcagaagcgaccccaacttcagcatccctcaggccaatcacagccactccggcgattaccactgcaccggcaatatcggctacaccctgtacagcagcaagcccgtgaccatcacagtgcaggcccctagcagtagccctatgggaatcatcgtggccgtggtcacaggcattgccgtggctgctattgtggctgcagtggtggccctgatctactgccggaagaagagaatctctgccctgcctggctaccccgagtgtagagagatgggagagacactgcccgagaagcccgccaatcctaccaatcctgacgaggccgacaaagtgggagccgagaacaccatcacctacagcctgctgatgcaccccgacgcactggaagaacccgacgaccagaatagaatcagcactagtagagtgaagttcagcagaagcgccgacgcccctgcctaccagcagggacagaaccaactgtacaacgagctgaacctgggcagacgggaagagtacgacgtgctggacaagcggagaggcagggaccctgagatgggcggaaagccccagcggagaaagaacccccaggaaggactgtataacgaactccagaaagacaagatggccgaagcctacagcgagatcggcatgaagggcgagcggagaagaggcaagggccacgatggcctgtaccagggcctgagcaccgccaccaaggacacctatgacgccctgcacatgcaggccctgcctccaaga

SEQ ID NO: 6207 - DNA, 1593 bp, Artificial Sequence
  Synthetic Polynucleotide
atggccttaccagtgaccgccttgctcctgccgctggccttgctgctccacgccgccaggccggaagtgcaactggtggaatctggaggctctctggtgcagccagggggaagcctgagactgtcttgtgccgcttccggcttcaccttcgacgactacgccatgagctgggtgcgccaggtgccaggcaaaggcctggaatgggtgtccagcatcaactggagcggcacccacaccgattacgccgactccgtgaaaggcagattcacaatcagcagaaacaacgccaacaataccctgtacctgcagatgaactccctgaagtctgaggatacagcagtgtattattgcgccaagaactggcgggacgccggcaccacttggtttgagaaaagcggctctgccggacagggaacccaagtgacagtgtcctccacgcgtacaccagccgctcctccaaaggccgtgctgaaactggaaccccagtggatcaacgtgctgcaagaggacagcgtgaccctgacctgtagaggcacacacagccctgagagcgacagcatccagtggttccacaacggcaatctgatccccacacacacccagcctagctacagattcaaggccaacaacaacgacagcggcgagtacacctgtcagaccggccagacaagcctgagcgatcctgtgcatctgaccgtgctgtctgagtggctggtgctgcagacaccccacctggaatttcaagagggcgagacaatcgtgctgcggtgccacagctggaaggacaagcctctggtcaaagtgacattcttccagaacgggaagtccaagaagttcagcagaagcgaccccaacttcagcatccctcaggccaatcacagccactccggcgattaccactgcaccggcaatatcggctacaccctgtacagcagcaagcccgtgaccatcacagtgcaggcccctagcagtagccctatgggaatcatcgtggccgtggtcacaggcattgccgtggctgctattgtggctgcagtggtggccctgatctactgccggaagaagagaatctctgccctgcctggctaccccgagtgtagagagatgggagagacactgcccgagaagcccgccaatcctaccaatcctgacgaggccgacaaagtgggagccgagaacaccatcacctacagcctgctgatgcaccccgacgcactggaagaacccgacgaccagaatagaatcagcactagtagagtgaagttcagcagaagcgccgacgcccctgcctaccagcagggacagaaccaactgtacaacgagctgaacctgggcagacgggaagagtacgacgtgctggacaagcggagaggcagggaccctgagatgggcggaaagccccagcggagaaagaacccccaggaaggactgtataacgaactccagaaagacaagatggccgaagcctacagcgagatcggcatgaagggcgagcggagaagaggcaagggccacgatggcctgtaccagggcctgagcaccgccaccaaggacacctatgacgccctgcacatgcaggccctgcctccaaga

SEQ ID NO: 6208 - DNA, 1578 bp, Artificial Sequence
  Synthetic Polynucleotide
atggccttaccagtgaccgccttgctcctgccgctggccttgctgctccacgccgccaggccggaggtgcagctggttgaatctggcggaggactggttcagcctggcggatctctgagactgtcttgtgccgccagcggcttcaacatcaaggatacctgtatcggctgggttcgcagagcccctggcaaagaggaagaactggtcgccaaaatctgcaagtacagcggccacaccagatacgccgacagcgtgaagggcagattcaccatcagcgccgacaccagcaagaacaccgcctacctccagatgaacagcctgagagccgaggacaccgccgtgtactattgtgccgctgtgtccgtcagagatgggcactacaattactggggccagggcaccaccgtgaccgtttcttcaacgcgtacaccagccgctcctccaaaggccgtgctgaaactggaaccccagtggatcaacgtgctgcaagaggacagcgtgaccctgacctgtagaggcacacacagccctgagagcgacagcatccagtggttccacaacggcaatctgatccccacacacacccagcctagctacagattcaaggccaacaacaacgacagcggcgagtacacctgtcagaccggccagacaagcctgagcgatcctgtgcatctgaccgtgctgtctgagtggctggtgctgcagacaccccacctggaatttcaagagggcgagacaatcgtgctgcggtgccacagctggaaggacaagcctctggtcaaagtgacattcttccagaacgggaagtccaagaagttcagcagaagcgaccccaacttcagcatccctcaggccaatcacagccactccggcgattaccactgcaccggcaatatcggctacaccctgtacagcagcaagcccgtgaccatcacagtgcaggcccctagcagtagccctatgggaatcatcgtggccgtggtcacaggcattgccgtggctgctattgtggctgcagtggtggccctgatctactgccggaagaagagaatctctgccctgcctggctaccccgagtgtagagagatgggagagacactgcccgagaagcccgccaatcctaccaatcctgacgaggccgacaaagtgggagccgagaacaccatcacctacagcctgctgatgcaccccgacgcactggaagaacccgacgaccagaatagaatcagcactagtagagtgaagttcagcagaagcgccgacgcccctgcctaccagcagggacagaaccaactgtacaacgagctgaacctgggcagacgggaagagtacgacgtgctggacaagcggagaggcagggaccctgagatgggcggaaagccccagcggagaaagaacccccaggaaggactgtataacgaactccagaaagacaagatggccgaagcctacagcgagatcggcatgaagggcgagcggagaagaggcaagggccacgatggcctgtaccagggcctgagcaccgccaccaaggacacctatgacgccctgcacatgcaggccctgcctccaaga

SEQ ID NO: 6209 - DNA, 1593 bp, Artificial Sequence
  Synthetic Polynucleotide
atggccttaccagtgaccgccttgctcctgccgctggccttgctgctccacgccgccaggccgggctctgacctgggcatcaagctgctgttcgccgctgccaagggccaggacgacgaagtgcggattctgctggctgctggggccgacgtgaacgccaaggatttcgagggctacacccccctgcacgtggccgcctatgatggacacctggaaatcgtggaagtgctgctgaaggctggcgctgatgtgaatgccaaagacagccagggccggacccctctgcatgaagccgcctacagcggccatctggaaattgtggaagtgctgctgaaagccggggcagacgtgaacgctcaggacgacgctggcgagacaccagccgatctggctgcagcttggggccacgaagatatcgccgaggtgctgcagaagacgcgtacaccagccgctcctccaaaggccgtgctgaaactggaaccccagtggatcaacgtgctgcaagaggacagcgtgaccctgacctgtagaggcacacacagccctgagagcgacagcatccagtggttccacaacggcaatctgatccccacacacacccagcctagctacagattcaaggccaacaacaacgacagcggcgagtacacctgtcagaccggccagacaagcctgagcgatcctgtgcatctgaccgtgctgtctgagtggctggtgctgcagacaccccacctggaatttcaagagggcgagacaatcgtgctgcggtgccacagctggaaggacaagcctctggtcaaagtgacattcttccagaacgggaagtccaagaagttcagcagaagcgaccccaacttcagcatccctcaggccaatcacagccactccggcgattaccactgcaccggcaatatcggctacaccctgtacagcagcaagcccgtgaccatcacagtgcaggcccctagcagtagccctatgggaatcatcgtggccgtggtcacaggcattgccgtggctgctattgtggctgcagtggtggccctgatctactgccggaagaagagaatctctgccctgcctggctaccccgagtgtagagagatgggagagacactgcccgagaagcccgccaatcctaccaatcctgacgaggccgacaaagtgggagccgagaacaccatcacctacagcctgctgatgcaccccgacgcactggaagaacccgacgaccagaatagaatcagcactagtagagtgaagttcagcagaagcgccgacgcccctgcctaccagcagggacagaaccaactgtacaacgagctgaacctgggcagacgggaagagtacgacgtgctggacaagcggagaggcagggaccctgagatgggcggaaagccccagcggagaaagaacccccaggaaggactgtataacgaactccagaaagacaagatggccgaagcctacagcgagatcggcatgaagggcgagcggagaagaggcaagggccacgatggcctgtaccagggcctgagcaccgccaccaaggacacctatgacgccctgcacatgcaggccctgcctccaaga

SEQ ID NO: 6210 - DNA, 1395 bp, Artificial Sequence
  Synthetic Polynucleotide
atggccttaccagtgaccgccttgctcctgccgctggccttgctgctccacgccgccaggccggtggacaacaagttcaacaaagagcggtacagcgcctactacgagatttggcaactgcccaacctgaacgtgcggcagaaggccgccttcatcggatctctgcaggacgaccctagccagagcgccaatctgctggccgaggccaagaagctgaacgacgcccaggcccctaaaacgcgtacaccagccgctcctccaaaggccgtgctgaaactggaaccccagtggatcaacgtgctgcaagaggacagcgtgaccctgacctgtagaggcacacacagccctgagagcgacagcatccagtggttccacaacggcaatctgatccccacacacacccagcctagctacagattcaaggccaacaacaacgacagcggcgagtacacctgtcagaccggccagacaagcctgagcgatcctgtgcatctgaccgtgctgtctgagtggctggtgctgcagacaccccacctggaatttcaagagggcgagacaatcgtgctgcggtgccacagctggaaggacaagcctctggtcaaagtgacattcttccagaacgggaagtccaagaagttcagcagaagcgaccccaacttcagcatccctcaggccaatcacagccactccggcgattaccactgcaccggcaatatcggctacaccctgtacagcagcaagcccgtgaccatcacagtgcaggcccctagcagtagccctatgggaatcatcgtggccgtggtcacaggcattgccgtggctgctattgtggctgcagtggtggccctgatctactgccggaagaagagaatctctgccctgcctggctaccccgagtgtagagagatgggagagacactgcccgagaagcccgccaatcctaccaatcctgacgaggccgacaaagtgggagccgagaacaccatcacctacagcctgctgatgcaccccgacgcactggaagaacccgacgaccagaatagaatcagcactagtagagtgaagttcagcagaagcgccgacgcccctgcctaccagcagggacagaaccaactgtacaacgagctgaacctgggcagacgggaagagtacgacgtgctggacaagcggagaggcagggaccctgagatgggcggaaagccccagcggagaaagaacccccaggaaggactgtataacgaactccagaaagacaagatggccgaagcctacagcgagatcggcatgaagggcgagcggagaagaggcaagggccacgatggcctgtaccagggcctgagcaccgccaccaaggacacctatgacgccctgcacatgcaggccctgcctccaaga

SEQ ID NO: 6211 - DNA, 1488 bp, Artificial Sequence
  Synthetic Polynucleotide
atggccttaccagtgaccgccttgctcctgccgctggccttgctgctccacgccgccaggccgctgccagccccgaagaatttggtcgtttcccgtgtcactgaggactctgcacgtctgagctggaccgcaccggacgcggcgttcgacagctttgcaatcggctactgggagtgggatgatgacggcgaggccattgtgctgaccgttccgggtagcgagcgcagctacgatctgaccggtctgaagccgggtacggaatatccggtgtatattgcgggcgtgaagggtggccagtggagcttcccgctgagcgcgatctttaccaccacgcgtacaccagccgctcctccaaaggccgtgctgaaactggaaccccagtggatcaacgtgctgcaagaggacagcgtgaccctgacctgtagaggcacacacagccctgagagcgacagcatccagtggttccacaacggcaatctgatccccacacacacccagcctagctacagattcaaggccaacaacaacgacagcggcgagtacacctgtcagaccggccagacaagcctgagcgatcctgtgcatctgaccgtgctgtctgagtggctggtgctgcagacaccccacctggaatttcaagagggcgagacaatcgtgctgcggtgccacagctggaaggacaagcctctggtcaaagtgacattcttccagaacgggaagtccaagaagttcagcagaagcgaccccaacttcagcatccctcaggccaatcacagccactccggcgattaccactgcaccggcaatatcggctacaccctgtacagcagcaagcccgtgaccatcacagtgcaggcccctagcagtagccctatgggaatcatcgtggccgtggtcacaggcattgccgtggctgctattgtggctgcagtggtggccctgatctactgccggaagaagagaatctctgccctgcctggctaccccgagtgtagagagatgggagagacactgcccgagaagcccgccaatcctaccaatcctgacgaggccgacaaagtgggagccgagaacaccatcacctacagcctgctgatgcaccccgacgcactggaagaacccgacgaccagaatagaatcagcactagtagagtgaagttcagcagaagcgccgacgcccctgcctaccagcagggacagaaccaactgtacaacgagctgaacctgggcagacgggaagagtacgacgtgctggacaagcggagaggcagggaccctgagatgggcggaaagccccagcggagaaagaacccccaggaaggactgtataacgaactccagaaagacaagatggccgaagcctacagcgagatcggcatgaagggcgagcggagaagaggcaagggccacgatggcctgtaccagggcctgagcaccgccaccaaggacacctatgacgccctgcacatgcaggccctgcctccaaga

SEQ ID NO: 6212 - DNA, 1491 bp, Artificial Sequence
  Synthetic Polynucleotide
atggccttaccagtgaccgccttgctcctgccgctggccttgctgctccacgccgccaggccgatgctgcccgctcctaagaatctggtggtgtccagaatcaccgaggacagcgccagactgtcttggacagctcctgatgccgccttcgacagcttccccatccggtacatcgagacactgatctggggcgaagccatctggctggatgtgcctggaagcgagagaagctacgacctgaccggactgaagcctggcacagagtatgccgtggtcatcaccggcgtgaaaggcggcagattctctagccctctggtggcctctttcaccaccacgcgtacaccagccgctcctccaaaggccgtgctgaaactggaaccccagtggatcaacgtgctgcaagaggacagcgtgaccctgacctgtagaggcacacacagccctgagagcgacagcatccagtggttccacaacggcaatctgatccccacacacacccagcctagctacagattcaaggccaacaacaacgacagcggcgagtacacctgtcagaccggccagacaagcctgagcgatcctgtgcatctgaccgtgctgtctgagtggctggtgctgcagacaccccacctggaatttcaagagggcgagacaatcgtgctgcggtgccacagctggaaggacaagcctctggtcaaagtgacattcttccagaacgggaagtccaagaagttcagcagaagcgaccccaacttcagcatccctcaggccaatcacagccactccggcgattaccactgcaccggcaatatcggctacaccctgtacagcagcaagcccgtgaccatcacagtgcaggcccctagcagtagccctatgggaatcatcgtggccgtggtcacaggcattgccgtggctgctattgtggctgcagtggtggccctgatctactgccggaagaagagaatctctgccctgcctggctaccccgagtgtagagagatgggagagacactgcccgagaagcccgccaatcctaccaatcctgacgaggccgacaaagtgggagccgagaacaccatcacctacagcctgctgatgcaccccgacgcactggaagaacccgacgaccagaatagaatcagcactagtagagtgaagttcagcagaagcgccgacgcccctgcctaccagcagggacagaaccaactgtacaacgagctgaacctgggcagacgggaagagtacgacgtgctggacaagcggagaggcagggaccctgagatgggcggaaagccccagcggagaaagaacccccaggaaggactgtataacgaactccagaaagacaagatggccgaagcctacagcgagatcggcatgaagggcgagcggagaagaggcaagggccacgatggcctgtaccagggcctgagcaccgccaccaaggacacctatgacgccctgcacatgcaggccctgcctccaaga

SEQ ID NO: 6213 - DNA, 2142 bp, Artificial Sequence
  Synthetic Polynucleotide
atggccttaccagtgaccgccttgctcctgccgctggccttgctgctccacgccgccaggccgatggccttaccagtgaccgccttgctcctgccgctggccttgctgctccacgccgccaggccgctgttcaatcaagaggtgcagatccctctgaccgagagctactgtggcccctgtcctaagaactggatctgctacaagaacaactgctaccagttcttcgacgagagcaagaattggtacgagagccaggccagctgcatgagccagaatgccagcctgctgaaggtgtacagcaaagaggaccaggacctgctgaaactggtcaagagctaccactggatgggccttgtgcacatccccaccaatggctcttggcagtgggaggacggcagcattctgagccctaacctgctgaccatcatcgagatgcagaagggcgactgcgccctgtacgccagcagctttaagggctacatcgagaattgcagcaccccgaacacctacatctgtatgcagagaaccgttggcggaggcggaagtggaggcggaggatctggcggcggaggctctgacctctttaatcaagaagtccagattccactcaccgaatcctactgcggaccttgtccaaaaaattggatttgttataagaacaactgttatcaattctttgatgagtctaaaaattggtatgagtcccaggcttcctgcatgtctcagaacgcttctctgctgaaagtctactctaaagaagatcaggatctcctgaagctcgtcaagtcttatcattggatggggctcgtccacattcctaccaacggaagctggcaatgggaagatggctccatcctgtctccaaatctgctcacgattattgaaatgcagaaaggggattgtgctctctacgccagctccttcaagggatatattgagaactgtagcacgcccaatacttatatctgtatgcaacggaccgtgacgcgtacaccagccgctcctccaaaggccgtgctgaaactggaaccccagtggatcaacgtgctgcaagaggacagcgtgaccctgacctgtagaggcacacacagccctgagagcgacagcatccagtggttccacaacggcaatctgatccccacacacacccagcctagctacagattcaaggccaacaacaacgacagcggcgagtacacctgtcagaccggccagacaagcctgagcgatcctgtgcatctgaccgtgctgtctgagtggctggtgctgcagacaccccacctggaatttcaagagggcgagacaatcgtgctgcggtgccacagctggaaggacaagcctctggtcaaagtgacattcttccagaacgggaagtccaagaagttcagcagaagcgaccccaacttcagcatccctcaggccaatcacagccactccggcgattaccactgcaccggcaatatcggctacaccctgtacagcagcaagcccgtgaccatcacagtgcaggcccctagcagtagccctatgggaatcatcgtggccgtggtcacaggcattgccgtggctgctattgtggctgcagtggtggccctgatctactgccggaagaagagaatctctgccctgcctggctaccccgagtgtagagagatgggagagacactgcccgagaagcccgccaatcctaccaatcctgacgaggccgacaaagtgggagccgagaacaccatcacctacagcctgctgatgcaccccgacgcactggaagaacccgacgaccagaatagaatcagcactagtagagtgaagttcagcagaagcgccgacgcccctgcctaccagcagggacagaaccaactgtacaacgagctgaacctgggcagacgggaagagtacgacgtgctggacaagcggagaggcagggaccctgagatgggcggaaagccccagcggagaaagaacccccaggaaggactgtataacgaactccagaaagacaagatggccgaagcctacagcgagatcggcatgaagggcgagcggagaagaggcaagggccacgatggcctgtaccagggcctgagcaccgccaccaaggacacctatgacgccctgcacatgcaggccctgcctccaaga

SEQ ID NO: 6214 - DNA, 1782 bp, Artificial Sequence
  Synthetic Polynucleotide
atggccttaccagtgaccgccttgctcctgccgctggccttgctgctccacgccgccaggccgatggagctgactgatttgctcctggcggccatgcttcttgcagtggcaagactaactctgtccagccccgtagctcctgcctgtgaccccagactcctaaataaactgctgcgtgactcccacctccttcacagccgactgagtcagtgtcccgacgtggaccctttgtctatccctgttctgctgcctgctgtggactttagcctgggagaatggaaaacccagacggaacagagcaaggcacaggacattctaggggcagtgtcccttctactggagggagtgatggcagcacgaggacagttggaaccctcctgcctctcatccctcctgggacagctttctgggcaggttcgcctcctcttgggggccctgcagggcctcctaggaacccagcttcctctacagggcaggaccacagctcacaaggaccccaatgccctcttcttgagcttgcaacaactgcttcggggaaaggtgcgcttcctgcttctggtagaaggtcccaccctctgtgtcagacggaccctgccaaccacagctgtcccaagcagtacttctacgcgtacaccagccgctcctccaaaggccgtgctgaaactggaaccccagtggatcaacgtgctgcaagaggacagcgtgaccctgacctgtagaggcacacacagccctgagagcgacagcatccagtggttccacaacggcaatctgatccccacacacacccagcctagctacagattcaaggccaacaacaacgacagcggcgagtacacctgtcagaccggccagacaagcctgagcgatcctgtgcatctgaccgtgctgtctgagtggctggtgctgcagacaccccacctggaatttcaagagggcgagacaatcgtgctgcggtgccacagctggaaggacaagcctctggtcaaagtgacattcttccagaacgggaagtccaagaagttcagcagaagcgaccccaacttcagcatccctcaggccaatcacagccactccggcgattaccactgcaccggcaatatcggctacaccctgtacagcagcaagcccgtgaccatcacagtgcaggcccctagcagtagccctatgggaatcatcgtggccgtggtcacaggcattgccgtggctgctattgtggctgcagtggtggccctgatctactgccggaagaagagaatctctgccctgcctggctaccccgagtgtagagagatgggagagacactgcccgagaagcccgccaatcctaccaatcctgacgaggccgacaaagtgggagccgagaacaccatcacctacagcctgctgatgcaccccgacgcactggaagaacccgacgaccagaatagaatcagcactagtagagtgaagttcagcagaagcgccgacgcccctgcctaccagcagggacagaaccaactgtacaacgagctgaacctgggcagacgggaagagtacgacgtgctggacaagcggagaggcagggaccctgagatgggcggaaagccccagcggagaaagaacccccaggaaggactgtataacgaactccagaaagacaagatggccgaagcctacagcgagatcggcatgaagggcgagcggagaagaggcaagggccacgatggcctgtaccagggcctgagcaccgccaccaaggacacctatgacgccctgcacatgcaggccctgcctccaaga

SEQ ID NO: 6215 - DNA, 1380 bp, Artificial Sequence
  Synthetic Polynucleotide
atggccttaccagtgaccgccttgctcctgccgctggccttgctgctccacgccgccaggccgatggaccccgacctggaaatcagagccgccttcctgcggcagagaaacacagccctgagaacagaggtggccgagctggaacaagaggtgcagcggctggaaaacgaggtgtcccagtacgagacaagatacggccctctcggaggcggaaaaacgcgtacgcgtacaccagccgctcctccaaaggccgtgctgaaactggaaccccagtggatcaacgtgctgcaagaggacagcgtgaccctgacctgtagaggcacacacagccctgagagcgacagcatccagtggttccacaacggcaatctgatccccacacacacccagcctagctacagattcaaggccaacaacaacgacagcggcgagtacacctgtcagaccggccagacaagcctgagcgatcctgtgcatctgaccgtgctgtctgagtggctggtgctgcagacaccccacctggaatttcaagagggcgagacaatcgtgctgcggtgccacagctggaaggacaagcctctggtcaaagtgacattcttccagaacgggaagtccaagaagttcagcagaagcgaccccaacttcagcatccctcaggccaatcacagccactccggcgattaccactgcaccggcaatatcggctacaccctgtacagcagcaagcccgtgaccatcacagtgcaggcccctagcagtagccctatgggaatcatcgtggccgtggtcacaggcattgccgtggctgctattgtggctgcagtggtggccctgatctactgccggaagaagagaatctctgccctgcctggctaccccgagtgtagagagatgggagagacactgcccgagaagcccgccaatcctaccaatcctgacgaggccgacaaagtgggagccgagaacaccatcacctacagcctgctgatgcaccccgacgcactggaagaacccgacgaccagaatagaatcagcactagtagagtgaagttcagcagaagcgccgacgcccctgcctaccagcagggacagaaccaactgtacaacgagctgaacctgggcagacgggaagagtacgacgtgctggacaagcggagaggcagggaccctgagatgggcggaaagccccagcggagaaagaacccccaggaaggactgtataacgaactccagaaagacaagatggccgaagcctacagcgagatcggcatgaagggcgagcggagaagaggcaagggccacgatggcctgtaccagggcctgagcaccgccaccaaggacacctatgacgccctgcacatgcaggccctgcctccaaga

SEQ ID NO: 6216 - DNA, 1305 bp, Artificial Sequence
  Synthetic Polynucleotide
atggccttaccagtgaccgccttgctcctgccgctggccttgctgctccacgccgccaggccggaagttgctgccctcgagaaggaggtagcagctttggaaaaagaagtcgcagcccttgagaaagaagttgcggctctggagaagacgcgtacaccagccgctcctccaaaggccgtgctgaaactggaaccccagtggatcaacgtgctgcaagaggacagcgtgaccctgacctgtagaggcacacacagccctgagagcgacagcatccagtggttccacaacggcaatctgatccccacacacacccagcctagctacagattcaaggccaacaacaacgacagcggcgagtacacctgtcagaccggccagacaagcctgagcgatcctgtgcatctgaccgtgctgtctgagtggctggtgctgcagacaccccacctggaatttcaagagggcgagacaatcgtgctgcggtgccacagctggaaggacaagcctctggtcaaagtgacattcttccagaacgggaagtccaagaagttcagcagaagcgaccccaacttcagcatccctcaggccaatcacagccactccggcgattaccactgcaccggcaatatcggctacaccctgtacagcagcaagcccgtgaccatcacagtgcaggcccctagcagtagccctatgggaatcatcgtggccgtggtcacaggcattgccgtggctgctattgtggctgcagtggtggccctgatctactgccggaagaagagaatctctgccctgcctggctaccccgagtgtagagagatgggagagacactgcccgagaagcccgccaatcctaccaatcctgacgaggccgacaaagtgggagccgagaacaccatcacctacagcctgctgatgcaccccgacgcactggaagaacccgacgaccagaatagaatcagcactagtagagtgaagttcagcagaagcgccgacgcccctgcctaccagcagggacagaaccaactgtacaacgagctgaacctgggcagacgggaagagtacgacgtgctggacaagcggagaggcagggaccctgagatgggcggaaagccccagcggagaaagaacccccaggaaggactgtataacgaactccagaaagacaagatggccgaagcctacagcgagatcggcatgaagggcgagcggagaagaggcaagggccacgatggcctgtaccagggcctgagcaccgccaccaaggacacctatgacgccctgcacatgcaggccctgcctccaaga

SEQ ID NO: 6217 - DNA, 2079 bp, Artificial Sequence
  Synthetic Polynucleotide
atggccttaccagtgaccgccttgctcctgccgctggccttgctgctccacgccgccaggccgctgttcaatcaagaggtgcagatccctctgaccgagagctactgtggcccctgtcctaagaactggatctgctacaagaacaactgctaccagttcttcgacgagagcaagaattggtacgagagccaggccagctgcatgagccagaatgccagcctgctgaaggtgtacagcaaagaggaccaggacctgctgaaactggtcaagagcgcccactggatgggccttgtgcacatccccaccaatggctcttggcagtgggaggacggcagcattctgagccctaacctgctgaccatcatcgagatgcagaagggcgactgcgccctgtacgccagcagctttaagggcttcatcgagaattgcagcaccccgaacacctacatctgtatgcagagaaccgttggcggaggcggaagtggaggcggaggatctggcggcggaggctctgacctctttaatcaagaagtccagattccactcaccgaatcctactgcggaccttgtccaaaaaattggatttgttataagaacaactgttatcaattctttgatgagtctaaaaattggtatgagtcccaggcttcctgcatgtctcagaacgcttctctgctgaaagtctactctaaagaagatcaggatctcctgaagctcgtcaagtctgcccattggatggggctcgtccacattcctaccaacggaagctggcaatgggaagatggctccatcctgtctccaaatctgctcacgattattgaaatgcagaaaggggattgtgctctctacgccagctccttcaagggatttattgagaactgtagcacgcccaatacttatatctgtatgcaacggaccgtgacgcgtacaccagccgctcctccaaaggccgtgctgaaactggaaccccagtggatcaacgtgctgcaagaggacagcgtgaccctgacctgtagaggcacacacagccctgagagcgacagcatccagtggttccacaacggcaatctgatccccacacacacccagcctagctacagattcaaggccaacaacaacgacagcggcgagtacacctgtcagaccggccagacaagcctgagcgatcctgtgcatctgaccgtgctgtctgagtggctggtgctgcagacaccccacctggaatttcaagagggcgagacaatcgtgctgcggtgccacagctggaaggacaagcctctggtcaaagtgacattcttccagaacgggaagtccaagaagttcagcagaagcgaccccaacttcagcatccctcaggccaatcacagccactccggcgattaccactgcaccggcaatatcggctacaccctgtacagcagcaagcccgtgaccatcacagtgcaggcccctagcagtagccctatgggaatcatcgtggccgtggtcacaggcattgccgtggctgctattgtggctgcagtggtggccctgatctactgccggaagaagagaatctctgccctgcctggctaccccgagtgtagagagatgggagagacactgcccgagaagcccgccaatcctaccaatcctgacgaggccgacaaagtgggagccgagaacaccatcacctacagcctgctgatgcaccccgacgcactggaagaacccgacgaccagaatagaatcagcactagtagagtgaagttcagcagaagcgccgacgcccctgcctaccagcagggacagaaccaactgtacaacgagctgaacctgggcagacgggaagagtacgacgtgctggacaagcggagaggcagggaccctgagatgggcggaaagccccagcggagaaagaacccccaggaaggactgtataacgaactccagaaagacaagatggccgaagcctacagcgagatcggcatgaagggcgagcggagaagaggcaagggccacgatggcctgtaccagggcctgagcaccgccaccaaggacacctatgacgccctgcacatgcaggccctgcctccaaga

SEQ ID NO: 6218 - DNA, 2079 bp, Artificial Sequence
  Synthetic Polynucleotide
atggccttaccagtgaccgccttgctcctgccgctggccttgctgctccacgccgccaggccgctgttcaatcaagaggtgcagatccctctgaccgagagctactgtggcccctgtcctaagaactggatctgctacaagaacaactgctaccagttcttcgacgagagcaagaattggtacgagagccaggccagctgcatgagccagaatgccagcctgctgaaggtgtacagcaaagaggaccaggacctgctgaaactggtcaagagcgcccactggatgggccttgtgcacatccccaccaatggctcttggcagtgggaggacggcagcattctgagccctaacctgctgaccatcatcgagatgcagaagggcgactgcgccctgtacgccagcagctttaagggctacatcgagaattgcagcaccccgaacacctacatctgtatgcagagaaccgtttctggcggaggcggctctggaggaggcggaagtggcggcggaggcgacctctttaatcaagaagtccagattccactcaccgaatcctactgcggaccttgtccaaaaaattggatttgttataagaacaactgttatcaattctttgatgagtctaaaaattggtatgagtcccaggcttcctgcatgtctcagaacgcttctctgctgaaagtctactctaaagaagatcaggatctcctgaagctcgtcaagtctgcccattggatggggctcgtccacattcctaccaacggaagctggcaatgggaagatggctccatcctgtctccaaatctgctcacgattattgaaatgcagaaaggggattgtgctctctacgccagctccttcaagggatatattgagaactgtagcacgcccaatacttatatctgtatgcaacggaccgtgacgcgtacaccagccgctcctccaaaggccgtgctgaaactggaaccccagtggatcaacgtgctgcaagaggacagcgtgaccctgacctgtagaggcacacacagccctgagagcgacagcatccagtggttccacaacggcaatctgatccccacacacacccagcctagctacagattcaaggccaacaacaacgacagcggcgagtacacctgtcagaccggccagacaagcctgagcgatcctgtgcatctgaccgtgctgtctgagtggctggtgctgcagacaccccacctggaatttcaagagggcgagacaatcgtgctgcggtgccacagctggaaggacaagcctctggtcaaagtgacattcttccagaacgggaagtccaagaagttcagcagaagcgaccccaacttcagcatccctcaggccaatcacagccactccggcgattaccactgcaccggcaatatcggctacaccctgtacagcagcaagcccgtgaccatcacagtgcaggcccctagcagtagccctatgggaatcatcgtggccgtggtcacaggcattgccgtggctgctattgtggctgcagtggtggccctgatctactgccggaagaagagaatctctgccctgcctggctaccccgagtgtagagagatgggagagacactgcccgagaagcccgccaatcctaccaatcctgacgaggccgacaaagtgggagccgagaacaccatcacctacagcctgctgatgcaccccgacgcactggaagaacccgacgaccagaatagaatcagcactagtagagtgaagttcagcagaagcgccgacgcccctgcctaccagcagggacagaaccaactgtacaacgagctgaacctgggcagacgggaagagtacgacgtgctggacaagcggagaggcagggaccctgagatgggcggaaagccccagcggagaaagaacccccaggaaggactgtataacgaactccagaaagacaagatggccgaagcctacagcgagatcggcatgaagggcgagcggagaagaggcaagggccacgatggcctgtaccagggcctgagcaccgccaccaaggacacctatgacgccctgcacatgcaggccctgcctccaaga

SEQ ID NO: 6219 - DNA, 3600 bp, Artificial Sequence
  Synthetic Polynucleotide
atggccttaccagtgaccgccttgctcctgccgctggccttgctgctccacgccgccaggccggacatccagatgacacagagccctagcagcctgtctgccagcgtgggagacagagtgaccatcacatgcaaggccagcgaccacatcaacaactggctggcctggtatcagcagaagcctggacaggcccctaagctgctgatctacggcgctaccacactggaaacaggcgtgcccagcagattttctggcagcggctctggcaccgactacaccctgacaatatccagcctccagcctgaggacttcgccacctactactgtcagcagagctggaacaccccttggacattcggccagggcaccaagctggaaatcaagagactcgagacaacacctggcgagagaagtagcctgcctgccttctatcctggcaccagcggctcttgttctggctgtggatctctgagcctgcctctgctggctggactggttgctgctgatgctgtggcctctctgctgattgtgggagccgtgttcctgtgcgccagacctagaagaagccccgctcaagaggacggcaaggtgtacatcaacatgcccggcagaggaagcactagtagagtgaagttcagcagaagcgccgacgcccctgcctaccagcagggacagaaccaactgtacaacgagctgaacctgggcagacgggaagagtacgacgtgctggacaagcggagaggcagggaccctgagatgggcggaaagccccagcggagaaagaacccccaggaaggactgtataacgaactccagaaagacaagatggccgaagcctacagcgagatcggcatgaagggcgagcggagaagaggcaagggccacgatggcctgtaccagggcctgagcaccgccaccaaggacacctatgacgccctgcacatgcaggccctgcctccaagaagggccaagcgatctggatctggagcaacaaacttctcactactcaaacaagcaggtgacgtggaggagaatcccgggcctatggactggatttggcgcatccttttccttgtcggcgctgctaccggcgcgcattccttcgaacaagttcagcttcaacagcctggcgctgagctggtcaaacctggcgcttctgtgaagatgagctgcaaagccagcggctacgccttcagcagctactggatcaactggatgaagcagaaacccggccagggactcgaatggatcggccaaatctatcccggcgacggcgacaccaactacaacggcaagttcaagggcagagccacactgaccgccgatacctctagcagcacagcctacatgcagctgagcagcctgaccagcgaagatagcgccgtgtacttctgtgcccggtccatcacaacagtcgtgggctgcgctatggactattggggccagggaacaagcgtgaccgtgtctagtacgcgtcaagtggtggacacaacaaaagccgtcatcaccctgcaaccaccttgggtttcagtctttcaagaagagacagttaccctgcactgtgaagtcctgcacttgcccggaagcagctccacacagtggttcctcaacggcacagctacccagacaagcaccccttcctaccggatcacatctgcctccgtgaacgattccggcgagtataggtgtcagaggggcctgtctggccgcagcgatcctatccagcttgagattcatcgtggatggttgctcctccaagtgtcctccagggtgttcaccgaaggcgaacctctggcactgaggtgccatgcttggaaagataagctcgtctacaatgtcctctactaccgcaatggcaaggcttttaagttttttcattggaactctaatctcacgatcctgaaaacgaacatctcccacaatgggacataccactgctctggcatgggaaaacatcggtacacctctgccggcatctctgtcacagtcaaagaactgttccctgcaccagtcctgaacgcttccgtgacctctccactgcttgagggaaatctggtcaccctgtcctgcgaaactaagttgctgcttcagaggcccggactccagctctacttttcattctatatgggctctaagaccctgagaggccggaacaccagcagcgaatatcagattctgacagctcggcgcgaggactccgggctctattggtgtgaagctgctacagaggacggaaacgtgctgaaacggtcccctgaactggaactgcaagtcctgggccttcagctgccaactccagtgtggtttcatgtcctgttctatctggctgtggggattatgttccttgtgaataccgtgctctgggttaccattcggaaagaactcaagcgcaagaaaaaatgggatcttgagataagcctggacagcgggcatgagaagaaagtcatcagttcccttcaagaggacagacatctcgaagaggaactcaaatgtcaagaacaaaaagaagaacaactccaagagggtgtccatcggaaagagccacagggcgctacaagctctagacgggttaagttttccagatccgcagacgcacccgcttaccaacaagggcagaaccaactctacaatgaacttaatttggggcggagggaagagtacgacgttctggacaaaaggaggggacgagatcccgagatgggcggaaagcctcagcgaaggaagaatccgcaagaggggctttataacgaactccagaaagataaaatggcagaagcctatagtgagattgggatgaagggagaaaggaggaggggtaaaggtcacgatgggttgtaccaaggattgagcacagccactaaagatacctatgatgcgctccacatgcaggccctgccgccaagacgcgccaagagaagcggatctggcgtgaagcagaccctgaatttcgacctgctgaagctggctggcgacgtggaatccaacccaggccctggccatatgaccgagtacaagcccacggtgcgcctcgccacccgcgacgacgtccccagggccgtacgcaccctcgccgccgcgttcgccgactaccccgccacgcgccacaccgtcgatccggaccgccacatcgagcgggtcaccgagctgcaagaactcttcctcacgcgcgtcgggctcgacatcggcaaggtgtgggtcgcggacgacggcgccgcggtggcggtctggaccacgccggagagcgtcgaagcgggggcggtgttcgccgagatcggcccgcgcatggccgagttgagcggttcccggctggccgcgcagcaacagatggaaggcctcctggcgccgcaccggcccaaggagcccgcgtggttcctggccaccgtcggcgtctcgcccgaccaccagggcaagggtctgggcagcgccgtcgtgctccccggagtggaggcggccgagcgcgccggggtgcccgccttcctggagacctccgcgccccgcaacctccccttctacgagcggctcggcttcaccgtcaccgccgacgtcgaggtgcccgaaggaccgcgcacctggtgcatgacccgcaagcccggtgcctga

SEQ ID NO: 6220 - DNA, 3756 bp, Artificial Sequence
  Synthetic Polynucleotide
atggccttaccagtgaccgccttgctcctgccgctggccttgctgctccacgccgccaggccggcatgcgaagtgcagctgcttgaaagtggcggcggactgattcagcctggcggatctctgagactgagctgtgccgccagcggcttcaccttttctagccacgccatgacctgggtccgacaggcacctggaaaagggcttgaatgggtgtccgccatcagcggctctggcgattacacacactacgccgacagcgtgaagggcagattcaccatcagcagagacaacagcaagaacaccgtgtacctccagatgaacagcctgagagccgaggacagcgccgtgtattattgcgccaaggatgaggatggcggcagcctgcttggacacagaggacaaggcaccctggtcaccgtttcttccggtaccggcggaggcggatctggcggcggaggtagcggtggcggaggatctgaattcggatctctcgagacaacacctggcgagagaagtagcctgcctgccttctatcctggcaccagcggctcttgttctggctgtggatctctgagcctgcctctgctggctggactggttgctgctgatgctgtggcctctctgctgattgtgggagccgtgttcctgtgcgccagacctagaagaagccccgctcaagaggacggcaaggtgtacatcaacatgcccggcagaggaagcactagtagagtgaagttcagcagaagcgccgacgcccctgcctaccagcagggacagaaccaactgtacaacgagctgaacctgggcagacgggaagagtacgacgtgctggacaagcggagaggcagggaccctgagatgggcggaaagccccagcggagaaagaacccccaggaaggactgtataacgaactccagaaagacaagatggccgaagcctacagcgagatcggcatgaagggcgagcggagaagaggcaagggccacgatggcctgtaccagggcctgagcaccgccaccaaggacacctatgacgccctgcacatgcaggccctgcctccaagaagggccaagcgatctggatctggagcaacaaacttctcactactcaaacaagcaggtgacgtggaggagaatcccgggcctatggactggatttggcgcatccttttccttgtcggcgctgctaccggcgcgcattccgggcccgaagtgcagctggttgaatctggcggaggactggttcaggctggcggatctctgagactgtcttgtgccgccagcggcagaacctttagcatgggctggtttagacaggcccctggcaaagagagagagttcgtcgccgccatcacatactctggcggcagcccttactacgccgactctgtgaagggcagattcaccatcagccgggacaacgccaagaacaccgtgtacctccagatgaacagcctgaagcctgaggacaccgccgtgtactactgcgccgccaatccaacatacggcagcgactggaacgccgagaattggggccagggaacccaagtgacagtgtctagcggatccggcggcggaggatctggcggaggcggatctgggggcggaggctctttcgaaggcagcacgcgtcaagtggtggacacaacaaaagccgtcatcaccctgcaaccaccttgggtttcagtctttcaagaagagacagttaccctgcactgtgaagtcctgcacttgcccggaagcagctccacacagtggttcctcaacggcacagctacccagacaagcaccccttcctaccggatcacatctgcctccgtgaacgattccggcgagtataggtgtcagaggggcctgtctggccgcagcgatcctatccagcttgagattcatcgtggatggttgctcctccaagtgtcctccagggtgttcaccgaaggcgaacctctggcactgaggtgccatgcttggaaagataagctcgtctacaatgtcctctactaccgcaatggcaaggcttttaagttttttcattggaactctaatctcacgatcctgaaaacgaacatctcccacaatgggacataccactgctctggcatgggaaaacatcggtacacctctgccggcatctctgtcacagtcaaagaactgttccctgcaccagtcctgaacgcttccgtgacctctccactgcttgagggaaatctggtcaccctgtcctgcgaaactaagttgctgcttcagaggcccggactccagctctacttttcattctatatgggctctaagaccctgagaggccggaacaccagcagcgaatatcagattctgacagctcggcgcgaggactccgggctctattggtgtgaagctgctacagaggacggaaacgtgctgaaacggtcccctgaactggaactgcaagtcctgggccttcagctgccaactccagtgtggtttcatgtcctgttctatctggctgtggggattatgttccttgtgaataccgtgctctgggttaccattcggaaagaactcaagcgcaagaaaaaatgggatcttgagataagcctggacagcgggcatgagaagaaagtcatcagttcccttcaagaggacagacatctcgaagaggaactcaaatgtcaagaacaaaaagaagaacaactccaagagggtgtccatcggaaagagccacagggcgctacaagctctagacgggttaagttttccagatccgcagacgcacccgcttaccaacaagggcagaaccaactctacaatgaacttaatttggggcggagggaagagtacgacgttctggacaaaaggaggggacgagatcccgagatgggcggaaagcctcagcgaaggaagaatccgcaagaggggctttataacgaactccagaaagataaaatggcagaagcctatagtgagattgggatgaagggagaaaggaggaggggtaaaggtcacgatgggttgtaccaaggattgagcacagccactaaagatacctatgatgcgctccacatgcaggccctgccgccaagacgcgccaagagaagcggatctggcgtgaagcagaccctgaatttcgacctgctgaagctggctggcgacgtggaatccaacccaggccctggccatatgaccgagtacaagcccacggtgcgcctcgccacccgcgacgacgtccccagggccgtacgcaccctcgccgccgcgttcgccgactaccccgccacgcgccacaccgtcgatccggaccgccacatcgagcgggtcaccgagctgcaagaactcttcctcacgcgcgtcgggctcgacatcggcaaggtgtgggtcgcggacgacggcgccgcggtggcggtctggaccacgccggagagcgtcgaagcgggggcggtgttcgccgagatcggcccgcgcatggccgagttgagcggttcccggctggccgcgcagcaacagatggaaggcctcctggcgccgcaccggcccaaggagcccgcgtggttcctggccaccgtcggcgtctcgcccgaccaccagggcaagggtctgggcagcgccgtcgtgctccccggagtggaggcggccgagcgcgccggggtgcccgccttcctggagacctccgcgccccgcaacctccccttctacgagcggctcggcttcaccgtcaccgccgacgtcgaggtgcccgaaggaccgcgcacctggtgcatgacccgcaagcccggtgcctga

SEQ ID NO: 6221 - DNA, 4203 bp, Artificial Sequence
  Synthetic Polynucleotide
atggccttaccagtgaccgccttgctcctgccgctggccttgctgctccacgccgccaggccggacatccagatgacacagagccctagcagcctgtctgccagcgtgggagacagagtgaccatcacatgcaaggccagcgaccacatcaacaactggctggcctggtatcagcagaagcctggacaggcccctaagctgctgatctacggcgctaccacactggaaacaggcgtgcccagcagattttctggcagcggctctggcaccgactacaccctgacaatatccagcctccagcctgaggacttcgccacctactactgtcagcagagctggaacaccccttggacattcggccagggcaccaagctggaaatcaagagactcgagggacagcctaaggccaatcctaccgtgacactgttccctccaagcagcgaagaactccaggccaacaaggccacacttgtgtgcctgatctccgacttctaccctggggctgtgacagtggcttggaaggccgatggatctcctgtgaaagccggcgtggaaaccaccaagccatccaagcagagcaacaacaaatacgccgccagctcctacctgagcctgacacctgagcagtggaagtcccacagatcctacagctgccaagtgacccacgaaggcagcaccgtggaaaagacagtggcccctacagagtgcagcggatccacaacacctggcgagagaagtagcctgcctgccttctatcctggcaccagcggctcttgttctggctgtggatctctgagcctgcctctgctggctggactggttgctgctgatgctgtggcctctctgctgattgtgggagccgtgttcctgtgcgccagacctagaagaagccccgctcaagaggacggcaaggtgtacatcaacatgcccggcagaggaagcactagtagagtgaagttcagcagaagcgccgacgcccctgcctaccagcagggacagaaccaactgtacaacgagctgaacctgggcagacgggaagagtacgacgtgctggacaagcggagaggcagggaccctgagatgggcggaaagccccagcggagaaagaacccccaggaaggactgtataacgaactccagaaagacaagatggccgaagcctacagcgagatcggcatgaagggcgagcggagaagaggcaagggccacgatggcctgtaccagggcctgagcaccgccaccaaggacacctatgacgccctgcacatgcaggccctgcctccaagaagggccaagcgatctggatctggagcaacaaacttctcactactcaaacaagcaggtgacgtggaggagaatcccgggcctatggactggatttggcgcatccttttccttgtcggcgctgctaccggcgcgcattccttcgaacaagttcagcttcaacagcctggcgctgagctggtcaaacctggcgcttctgtgaagatgagctgcaaagccagcggctacgccttcagcagctactggatcaactggatgaagcagaaacccggccagggactcgaatggatcggccaaatctatcccggcgacggcgacaccaactacaacggcaagttcaagggcagagccacactgaccgccgatacctctagcagcacagcctacatgcagctgagcagcctgaccagcgaagatagcgccgtgtacttctgtgcccggtccatcacaacagtcgtgggctgcgctatggactattggggccagggaacaagcgtgaccgtgtctagtacgcgtgcctctacaaagggaccctccgtgtttcctctggctcccagcagcaagtctacaagcggaggaacagccgctctgggctgcctggtcaaggattactttcccgagcctgtgaccgtgtcctggaatagcggagcactgacaagcggcgtgcacacctttccagccgtgctgcaaagcagcggcctgtactctctgagcagcgtggtcacagtgcctagctctagcctgggcacccagacctacatctgcaatgtgaaccacaagcctagcaacaccaaggtggacaagagagtggaacccaagagctgtggtacccaagtggtggacacaacaaaagccgtcatcaccctgcaaccaccttgggtttcagtctttcaagaagagacagttaccctgcactgtgaagtcctgcacttgcccggaagcagctccacacagtggttcctcaacggcacagctacccagacaagcaccccttcctaccggatcacatctgcctccgtgaacgattccggcgagtataggtgtcagaggggcctgtctggccgcagcgatcctatccagcttgagattcatcgtggatggttgctcctccaagtgtcctccagggtgttcaccgaaggcgaacctctggcactgaggtgccatgcttggaaagataagctcgtctacaatgtcctctactaccgcaatggcaaggcttttaagttttttcattggaactctaatctcacgatcctgaaaacgaacatctcccacaatgggacataccactgctctggcatgggaaaacatcggtacacctctgccggcatctctgtcacagtcaaagaactgttccctgcaccagtcctgaacgcttccgtgacctctccactgcttgagggaaatctggtcaccctgtcctgcgaaactaagttgctgcttcagaggcccggactccagctctacttttcattctatatgggctctaagaccctgagaggccggaacaccagcagcgaatatcagattctgacagctcggcgcgaggactccgggctctattggtgtgaagctgctacagaggacggaaacgtgctgaaacggtcccctgaactggaactgcaagtcctgggccttcagctgccaactccagtgtggtttcatgtcctgttctatctggctgtggggattatgttccttgtgaataccgtgctctgggttaccattcggaaagaactcaagcgcaagaaaaaatgggatcttgagataagcctggacagcgggcatgagaagaaagtcatcagttcccttcaagaggacagacatctcgaagaggaactcaaatgtcaagaacaaaaagaagaacaactccaagagggtgtccatcggaaagagccacagggcgctacaagctctagacgggttaagttttccagatccgcagacgcacccgcttaccaacaagggcagaaccaactctacaatgaacttaatttggggcggagggaagagtacgacgttctggacaaaaggaggggacgagatcccgagatgggcggaaagcctcagcgaaggaagaatccgcaagaggggctttataacgaactccagaaagataaaatggcagaagcctatagtgagattgggatgaagggagaaaggaggaggggtaaaggtcacgatgggttgtaccaaggattgagcacagccactaaagatacctatgatgcgctccacatgcaggccctgccgccaagacgcgccaagagaagcggatctggcgtgaagcagaccctgaatttcgacctgctgaagctggctggcgacgtggaatccaacccaggccctggccatatggctacctacgaggtgctgtgcgaggtggcaagaaagctgggcaccgacgacagagaagtggtgctgttcctgctgaacgtgttcatccctcagcctacactggcccagctgatcggtgcactgagagccctgaaagaggaaggccggctgacctttcctctgctggccgaatgcctgttcagagccggaagaagggatctgctgcgggacctgctgcatctggaccccagatttctggaaagacacctggccggcaccatgagctacttcagcccttaccagctgaccgtgctgcacgttgacggcgaactgtgcgccagagatattcggagcctgatcttcctgagcaaggacaccatcggcagccggtctacccctcagacatttctgcactgggtgtactgcatggaaaacctggacctgctcggccccacagatgtggatgccctgatgtccatgctgagaagcctgagcagagtggacctccagagacaggtgcagacactgatgggactgcacctgagcggacctagccacagccagcactacagacacacccct

SEQ ID NO: 6222 - DNA, 4362 bp, Artificial Sequence
  Synthetic Polynucleotide
atggccttaccagtgaccgccttgctcctgccgctggccttgctgctccacgccgccaggccggacatccagatgacacagagccctagcagcctgtctgccagcgtgggagacagagtgaccatcacatgcaaggccagcgaccacatcaacaactggctggcctggtatcagcagaagcctggacaggcccctaagctgctgatctacggcgctaccacactggaaacaggcgtgcccagcagattttctggcagcggctctggcaccgactacaccctgacaatatccagcctccagcctgaggacttcgccacctactactgtcagcagagctggaacaccccttggacattcggccagggcaccaagctggaaatcaagagactcgagggacagcctaaggccaatcctaccgtgacactgttccctccaagcagcgaagaactccaggccaacaaggccacacttgtgtgcctgatctccgacttctaccctggggctgtgacagtggcttggaaggccgatggatctcctgtgaaagccggcgtggaaaccaccaagccatccaagcagagcaacaacaaatacgccgccagctcctacctgagcctgacacctgagcagtggaagtcccacagatcctacagctgccaagtgacccacgaaggcagcaccgtggaaaagacagtggcccctacagagtgcagcggatccacaacacctggcgagagaagtagcctgcctgccttctatcctggcaccagcggctcttgttctggctgtggatctctgagcctgcctctgctggctggactggttgctgctgatgctgtggcctctctgctgattgtgggagccgtgttcctgtgcgccagacctagaagaagccccgctcaagaggacggcaaggtgtacatcaacatgcccggcagaggaagcactagtagagtgaagttcagcagaagcgccgacgcccctgcctaccagcagggacagaaccaactgtacaacgagctgaacctgggcagacgggaagagtacgacgtgctggacaagcggagaggcagggaccctgagatgggcggaaagccccagcggagaaagaacccccaggaaggactgtataacgaactccagaaagacaagatggccgaagcctacagcgagatcggcatgaagggcgagcggagaagaggcaagggccacgatggcctgtaccagggcctgagcaccgccaccaaggacacctatgacgccctgcacatgcaggccctgcctccaagaagggccaagcgatctggatctggagcaacaaacttctcactactcaaacaagcaggtgacgtggaggagaatcccgggcctatggactggatttggcgcatccttttccttgtcggcgctgctaccggcgcgcattccttcgaacaagttcagcttcaacagcctggcgctgagctggtcaaacctggcgcttctgtgaagatgagctgcaaagccagcggctacgccttcagcagctactggatcaactggatgaagcagaaacccggccagggactcgaatggatcggccaaatctatcccggcgacggcgacaccaactacaacggcaagttcaagggcagagccacactgaccgccgatacctctagcagcacagcctacatgcagctgagcagcctgaccagcgaagatagcgccgtgtacttctgtgcccggtccatcacaacagtcgtgggctgcgctatggactattggggccagggaacaagcgtgaccgtgtctagtacgcgtgcctctacaaagggaccctccgtgtttcctctggctcccagcagcaagtctacaagcggaggaacagccgctctgggctgcctggtcaaggattactttcccgagcctgtgaccgtgtcctggaatagcggagcactgacaagcggcgtgcacacctttccagccgtgctgcaaagcagcggcctgtactctctgagcagcgtggtcacagtgcctagctctagcctgggcacccagacctacatctgcaatgtgaaccacaagcctagcaacaccaaggtggacaagagagtggaacccaagagctgtggtacccaagtggtggacacaacaaaagccgtcatcaccctgcaaccaccttgggtttcagtctttcaagaagagacagttaccctgcactgtgaagtcctgcacttgcccggaagcagctccacacagtggttcctcaacggcacagctacccagacaagcaccccttcctaccggatcacatctgcctccgtgaacgattccggcgagtataggtgtcagaggggcctgtctggccgcagcgatcctatccagcttgagattcatcgtggatggttgctcctccaagtgtcctccagggtgttcaccgaaggcgaacctctggcactgaggtgccatgcttggaaagataagctcgtctacaatgtcctctactaccgcaatggcaaggcttttaagttttttcattggaactctaatctcacgatcctgaaaacgaacatctcccacaatgggacataccactgctctggcatgggaaaacatcggtacacctctgccggcatctctgtcacagtcaaagaactgttccctgcaccagtcctgaacgcttccgtgacctctccactgcttgagggaaatctggtcaccctgtcctgcgaaactaagttgctgcttcagaggcccggactccagctctacttttcattctatatgggctctaagaccctgagaggccggaacaccagcagcgaatatcagattctgacagctcggcgcgaggactccgggctctattggtgtgaagctgctacagaggacggaaacgtgctgaaacggtcccctgaactggaactgcaagtcctgggccttcagctgccaactccagtgtggtttcatgtcctgttctatctggctgtggggattatgttccttgtgaataccgtgctctgggttaccattcggaaagaactcaagcgcaagaaaaaatgggatcttgagataagcctggacagcgggcatgagaagaaagtcatcagttcccttcaagaggacagacatctcgaagaggaactcaaatgtcaagaacaaaaagaagaacaactccaagagggtgtccatcggaaagagccacagggcgctacaagctctagacgggttaagttttccagatccgcagacgcacccgcttaccaacaagggcagaaccaactctacaatgaacttaatttggggcggagggaagagtacgacgttctggacaaaaggaggggacgagatcccgagatgggcggaaagcctcagcgaaggaagaatccgcaagaggggctttataacgaactccagaaagataaaatggcagaagcctatagtgagattgggatgaagggagaaaggaggaggggtaaaggtcacgatgggttgtaccaaggattgagcacagccactaaagatacctatgatgcgctccacatgcaggccctgccgccaagacgcgccaagagaagcggatctggcgtgaagcagaccctgaatttcgacctgctgaagctggctggcgacgtggaatccaacccaggccctggccatatgtccgactccaaggaggtccctagccttccatttttgcgacacttgctcgaagagttggacagccatgaggacagcttgctgctgtttctgtgtcacgacgcggccccgggctgcacgacggtcacgcaagctttgtgctcgcttagccaacagcgcaagctgaccctcgcggctctggtcgagatgctctacgtgctgcagcgtatggatcttctcaagagccgcttcgggctcagcaaggagggggccgagcaattgctgggcacaagctttctcacgcgctaccgcaagctcatggtttgcgtgggtgaggagctcgactcgagcgagctacgcgctctacgcttgttcgcgtgcaacctgaatccgagcctgagcacggcgctttctgagagcagccgctttgtcgagcttgtactcgcgcttgaaaacgtaggactcgtctcgccatcgagtgtttccgtgcttgcggacatgttgcgcactcttcggcgcctcgatttgtgccagcagcttgttgagtacgaacaacaagagcaagccaggtaccgttactgttacgcggcctcgccctcattgccagttcgtacgttacgtcgggggcacggcgcgagtgaacacgagcagctgtgcatgcccgtgcaagaatcctctgacagccccgagctgctgcgcacgcccgtacaagaatcctccagcgacagccccgagcaaacgact

SEQ ID NO: 6223 - DNA, 4239 bp, Artificial Sequence
  Synthetic Polynucleotide
atggccttaccagtgaccgccttgctcctgccgctggccttgctgctccacgccgccaggccggacatccagatgacacagagccctagcagcctgtctgccagcgtgggagacagagtgaccatcacatgcaaggccagcgaccacatcaacaactggctggcctggtatcagcagaagcctggacaggcccctaagctgctgatctacggcgctaccacactggaaacaggcgtgcccagcagattttctggcagcggctctggcaccgactacaccctgacaatatccagcctccagcctgaggacttcgccacctactactgtcagcagagctggaacaccccttggacattcggccagggcaccaagctggaaatcaagagactcgagggacagcctaaggccaatcctaccgtgacactgttccctccaagcagcgaagaactccaggccaacaaggccacacttgtgtgcctgatctccgacttctaccctggggctgtgacagtggcttggaaggccgatggatctcctgtgaaagccggcgtggaaaccaccaagccatccaagcagagcaacaacaaatacgccgccagctcctacctgagcctgacacctgagcagtggaagtcccacagatcctacagctgccaagtgacccacgaaggcagcaccgtggaaaagacagtggcccctacagagtgcagcggatccacaacacctggcgagagaagtagcctgcctgccttctatcctggcaccagcggctcttgttctggctgtggatctctgagcctgcctctgctggctggactggttgctgctgatgctgtggcctctctgctgattgtgggagccgtgttcctgtgcgccagacctagaagaagccccgctcaagaggacggcaaggtgtacatcaacatgcccggcagaggaagcactagtagagtgaagttcagcagaagcgccgacgcccctgcctaccagcagggacagaaccaactgtacaacgagctgaacctgggcagacgggaagagtacgacgtgctggacaagcggagaggcagggaccctgagatgggcggaaagccccagcggagaaagaacccccaggaaggactgtataacgaactccagaaagacaagatggccgaagcctacagcgagatcggcatgaagggcgagcggagaagaggcaagggccacgatggcctgtaccagggcctgagcaccgccaccaaggacacctatgacgccctgcacatgcaggccctgcctccaagaagggccaagcgatctggatctggagcaacaaacttctcactactcaaacaagcaggtgacgtggaggagaatcccgggcctatggactggatttggcgcatccttttccttgtcggcgctgctaccggcgcgcattccttcgaacaagttcagcttcaacagcctggcgctgagctggtcaaacctggcgcttctgtgaagatgagctgcaaagccagcggctacgccttcagcagctactggatcaactggatgaagcagaaacccggccagggactcgaatggatcggccaaatctatcccggcgacggcgacaccaactacaacggcaagttcaagggcagagccacactgaccgccgatacctctagcagcacagcctacatgcagctgagcagcctgaccagcgaagatagcgccgtgtacttctgtgcccggtccatcacaacagtcgtgggctgcgctatggactattggggccagggaacaagcgtgaccgtgtctagtacgcgtgcctctacaaagggaccctccgtgtttcctctggctcccagcagcaagtctacaagcggaggaacagccgctctgggctgcctggtcaaggattactttcccgagcctgtgaccgtgtcctggaatagcggagcactgacaagcggcgtgcacacctttccagccgtgctgcaaagcagcggcctgtactctctgagcagcgtggtcacagtgcctagctctagcctgggcacccagacctacatctgcaatgtgaaccacaagcctagcaacaccaaggtggacaagagagtggaacccaagagctgtggtacccaagtggtggacacaacaaaagccgtcatcaccctgcaaccaccttgggtttcagtctttcaagaagagacagttaccctgcactgtgaagtcctgcacttgcccggaagcagctccacacagtggttcctcaacggcacagctacccagacaagcaccccttcctaccggatcacatctgcctccgtgaacgattccggcgagtataggtgtcagaggggcctgtctggccgcagcgatcctatccagcttgagattcatcgtggatggttgctcctccaagtgtcctccagggtgttcaccgaaggcgaacctctggcactgaggtgccatgcttggaaagataagctcgtctacaatgtcctctactaccgcaatggcaaggcttttaagttttttcattggaactctaatctcacgatcctgaaaacgaacatctcccacaatgggacataccactgctctggcatgggaaaacatcggtacacctctgccggcatctctgtcacagtcaaagaactgttccctgcaccagtcctgaacgcttccgtgacctctccactgcttgagggaaatctggtcaccctgtcctgcgaaactaagttgctgcttcagaggcccggactccagctctacttttcattctatatgggctctaagaccctgagaggccggaacaccagcagcgaatatcagattctgacagctcggcgcgaggactccgggctctattggtgtgaagctgctacagaggacggaaacgtgctgaaacggtcccctgaactggaactgcaagtcctgggccttcagctgccaactccagtgtggtttcatgtcctgttctatctggctgtggggattatgttccttgtgaataccgtgctctgggttaccattcggaaagaactcaagcgcaagaaaaaatgggatcttgagataagcctggacagcgggcatgagaagaaagtcatcagttcccttcaagaggacagacatctcgaagaggaactcaaatgtcaagaacaaaaagaagaacaactccaagagggtgtccatcggaaagagccacagggcgctacaagctctagacgggttaagttttccagatccgcagacgcacccgcttaccaacaagggcagaaccaactctacaatgaacttaatttggggcggagggaagagtacgacgttctggacaaaaggaggggacgagatcccgagatgggcggaaagcctcagcgaaggaagaatccgcaagaggggctttataacgaactccagaaagataaaatggcagaagcctatagtgagattgggatgaagggagaaaggaggaggggtaaaggtcacgatgggttgtaccaaggattgagcacagccactaaagatacctatgatgcgctccacatgcaggccctgccgccaagacgcgccaagagaagcggatctggcgtgaagcagaccctgaatttcgacctgctgaagctggctggcgacgtggaatccaacccaggccctggccatatgaccgagtacaagcccacggtgcgcctcgccacccgcgacgacgtccccagggccgtacgcaccctcgccgccgcgttcgccgactaccccgccacgcgccacaccgtcgatccggaccgccacatcgagcgggtcaccgagctgcaagaactcttcctcacgcgcgtcgggctcgacatcggcaaggtgtgggtcgcggacgacggcgccgcggtggcggtctggaccacgccggagagcgtcgaagcgggggcggtgttcgccgagatcggcccgcgcatggccgagttgagcggttcccggctggccgcgcagcaacagatggaaggcctcctggcgccgcaccggcccaaggagcccgcgtggttcctggccaccgtcggcgtctcgcccgaccaccagggcaagggtctgggcagcgccgtcgtgctccccggagtggaggcggccgagcgcgccggggtgcccgccttcctggagacctccgcgccccgcaacctccccttctacgagcggctcggcttcaccgtcaccgccgacgtcgaggtgcccgaaggaccgcgcacctggtgcatgacccgcaagcccggtgcctga

SEQ ID NO: 6224 - DNA, 4650 bp, Artificial Sequence
  Synthetic Polynucleotide
atggccttaccagtgaccgccttgctcctgccgctggccttgctgctccacgccgccaggccggaagtgcagctggttgaatctggcggaggactggttcaggctggcggatctctgagactgtcttgtgccgccagcggcagaacctttagcatgggctggtttagacaggcccctggcaaagagagagagttcgtcgccgccatcacatactctggcggcagcccttactacgccgactctgtgaagggcagattcaccatcagccgggacaacgccaagaacaccgtgtacctccagatgaacagcctgaagcctgaggacaccgccgtgtactactgcgccgccaatccaacatacggcagcgactggaacgccgagaattggggccagggaacccaagtgacagtgtctagcggtaccggcggaggcggatctggcggcggaggtagcggtggcggaggatctgaattcgacatccagatgacacagagccctagcagcctgtctgccagcgtgggagacagagtgaccatcacatgcaaggccagcgaccacatcaacaactggctggcctggtatcagcagaagcctggacaggcccctaagctgctgatctacggcgctaccacactggaaacaggcgtgcccagcagattttctggcagcggctctggcaccgactacaccctgacaatatccagcctccagcctgaggacttcgccacctactactgtcagcagagctggaacaccccttggacattcggccagggcaccaagctggaaatcaagagactcgagggacagcctaaggccaatcctaccgtgacactgttccctccaagcagcgaagaactccaggccaacaaggccacacttgtgtgcctgatctccgacttctaccctggggctgtgacagtggcttggaaggccgatggatctcctgtgaaagccggcgtggaaaccaccaagccatccaagcagagcaacaacaaatacgccgccagctcctacctgagcctgacacctgagcagtggaagtcccacagatcctacagctgccaagtgacccacgaaggcagcaccgtggaaaagacagtggcccctacagagtgcagcggatccacaacacctggcgagagaagtagcctgcctgccttctatcctggcaccagcggctcttgttctggctgtggatctctgagcctgcctctgctggctggactggttgctgctgatgctgtggcctctctgctgattgtgggagccgtgttcctgtgcgccagacctagaagaagccccgctcaagaggacggcaaggtgtacatcaacatgcccggcagaggaagcactagtagagtgaagttcagcagaagcgccgacgcccctgcctaccagcagggacagaaccaactgtacaacgagctgaacctgggcagacgggaagagtacgacgtgctggacaagcggagaggcagggaccctgagatgggcggaaagccccagcggagaaagaacccccaggaaggactgtataacgaactccagaaagacaagatggccgaagcctacagcgagatcggcatgaagggcgagcggagaagaggcaagggccacgatggcctgtaccagggcctgagcaccgccaccaaggacacctatgacgccctgcacatgcaggccctgcctccaagaagggccaagcgatctggatctggagcaacaaacttctcactactcaaacaagcaggtgacgtggaggagaatcccgggcctatggactggatttggcgcatccttttccttgtcggcgctgctaccggcgcgcattccttcgaacaagttcagcttcaacagcctggcgctgagctggtcaaacctggcgcttctgtgaagatgagctgcaaagccagcggctacgccttcagcagctactggatcaactggatgaagcagaaacccggccagggactcgaatggatcggccaaatctatcccggcgacggcgacaccaactacaacggcaagttcaagggcagagccacactgaccgccgatacctctagcagcacagcctacatgcagctgagcagcctgaccagcgaagatagcgccgtgtacttctgtgcccggtccatcacaacagtcgtgggctgcgctatggactattggggccagggaacaagcgtgaccgtgtctagtacgcgtgcctctacaaagggaccctccgtgtttcctctggctcccagcagcaagtctacaagcggaggaacagccgctctgggctgcctggtcaaggattactttcccgagcctgtgaccgtgtcctggaatagcggagcactgacaagcggcgtgcacacctttccagccgtgctgcaaagcagcggcctgtactctctgagcagcgtggtcacagtgcctagctctagcctgggcacccagacctacatctgcaatgtgaaccacaagcctagcaacaccaaggtggacaagagagtggaacccaagagctgtggtacccaagtggtggacacaacaaaagccgtcatcaccctgcaaccaccttgggtttcagtctttcaagaagagacagttaccctgcactgtgaagtcctgcacttgcccggaagcagctccacacagtggttcctcaacggcacagctacccagacaagcaccccttcctaccggatcacatctgcctccgtgaacgattccggcgagtataggtgtcagaggggcctgtctggccgcagcgatcctatccagcttgagattcatcgtggatggttgctcctccaagtgtcctccagggtgttcaccgaaggcgaacctctggcactgaggtgccatgcttggaaagataagctcgtctacaatgtcctctactaccgcaatggcaaggcttttaagttttttcattggaactctaatctcacgatcctgaaaacgaacatctcccacaatgggacataccactgctctggcatgggaaaacatcggtacacctctgccggcatctctgtcacagtcaaagaactgttccctgcaccagtcctgaacgcttccgtgacctctccactgcttgagggaaatctggtcaccctgtcctgcgaaactaagttgctgcttcagaggcccggactccagctctacttttcattctatatgggctctaagaccctgagaggccggaacaccagcagcgaatatcagattctgacagctcggcgcgaggactccgggctctattggtgtgaagctgctacagaggacggaaacgtgctgaaacggtcccctgaactggaactgcaagtcctgggccttcagctgccaactccagtgtggtttcatgtcctgttctatctggctgtggggattatgttccttgtgaataccgtgctctgggttaccattcggaaagaactcaagcgcaagaaaaaatgggatcttgagataagcctggacagcgggcatgagaagaaagtcatcagttcccttcaagaggacagacatctcgaagaggaactcaaatgtcaagaacaaaaagaagaacaactccaagagggtgtccatcggaaagagccacagggcgctacaagctctagacgggttaagttttccagatccgcagacgcacccgcttaccaacaagggcagaaccaactctacaatgaacttaatttggggcggagggaagagtacgacgttctggacaaaaggaggggacgagatcccgagatgggcggaaagcctcagcgaaggaagaatccgcaagaggggctttataacgaactccagaaagataaaatggcagaagcctatagtgagattgggatgaagggagaaaggaggaggggtaaaggtcacgatgggttgtaccaaggattgagcacagccactaaagatacctatgatgcgctccacatgcaggccctgccgccaagacgcgccaagagaagcggatctggcgtgaagcagaccctgaatttcgacctgctgaagctggctggcgacgtggaatccaacccaggccctggccatatgaccgagtacaagcccacggtgcgcctcgccacccgcgacgacgtccccagggccgtacgcaccctcgccgccgcgttcgccgactaccccgccacgcgccacaccgtcgatccggaccgccacatcgagcgggtcaccgagctgcaagaactcttcctcacgcgcgtcgggctcgacatcggcaaggtgtgggtcgcggacgacggcgccgcggtggcggtctggaccacgccggagagcgtcgaagcgggggcggtgttcgccgagatcggcccgcgcatggccgagttgagcggttcccggctggccgcgcagcaacagatggaaggcctcctggcgccgcaccggcccaaggagcccgcgtggttcctggccaccgtcggcgtctcgcccgaccaccagggcaagggtctgggcagcgccgtcgtgctccccggagtggaggcggccgagcgcgccggggtgcccgccttcctggagacctccgcgccccgcaacctccccttctacgagcggctcggcttcaccgtcaccgccgacgtcgaggtgcccgaaggaccgcgcacctggtgcatgacccgcaagcccggtgcctga

SEQ ID NO: 6225 - DNA, 5061 bp, Artificial Sequence
  Synthetic Polynucleotide
atggccttaccagtgaccgccttgctcctgccgctggccttgctgctccacgccgccaggccggaagtgcagctggttgaatctggcggaggactggttcaggctggcggatctctgagactgtcttgtgccgccagcggcagaacctttagcatgggctggtttagacaggcccctggcaaagagagagagttcgtcgccgccatcacatactctggcggcagcccttactacgccgactctgtgaagggcagattcaccatcagccgggacaacgccaagaacaccgtgtacctccagatgaacagcctgaagcctgaggacaccgccgtgtactactgcgccgccaatccaacatacggcagcgactggaacgccgagaattggggccagggaacccaagtgacagtgtctagcggtaccggcggaggcggatctggcggcggaggtagcggtggcggaggatctgaattcgacatccagatgacacagagccctagcagcctgtctgccagcgtgggagacagagtgaccatcacatgcaaggccagcgaccacatcaacaactggctggcctggtatcagcagaagcctggacaggcccctaagctgctgatctacggcgctaccacactggaaacaggcgtgcccagcagattttctggcagcggctctggcaccgactacaccctgacaatatccagcctccagcctgaggacttcgccacctactactgtcagcagagctggaacaccccttggacattcggccagggcaccaagctggaaatcaagagactcgagggacagcctaaggccaatcctaccgtgacactgttccctccaagcagcgaagaactccaggccaacaaggccacacttgtgtgcctgatctccgacttctaccctggggctgtgacagtggcttggaaggccgatggatctcctgtgaaagccggcgtggaaaccaccaagccatccaagcagagcaacaacaaatacgccgccagctcctacctgagcctgacacctgagcagtggaagtcccacagatcctacagctgccaagtgacccacgaaggcagcaccgtggaaaagacagtggcccctacagagtgcagcggatccacaacacctggcgagagaagtagcctgcctgccttctatcctggcaccagcggctcttgttctggctgtggatctctgagcctgcctctgctggctggactggttgctgctgatgctgtggcctctctgctgattgtgggagccgtgttcctgtgcgccagacctagaagaagccccgctcaagaggacggcaaggtgtacatcaacatgcccggcagaggaagcactagtagagtgaagttcagcagaagcgccgacgcccctgcctaccagcagggacagaaccaactgtacaacgagctgaacctgggcagacgggaagagtacgacgtgctggacaagcggagaggcagggaccctgagatgggcggaaagccccagcggagaaagaacccccaggaaggactgtataacgaactccagaaagacaagatggccgaagcctacagcgagatcggcatgaagggcgagcggagaagaggcaagggccacgatggcctgtaccagggcctgagcaccgccaccaaggacacctatgacgccctgcacatgcaggccctgcctccaagaagggccaagcgatctggatctggagcaacaaacttctcactactcaaacaagcaggtgacgtggaggagaatcccgggcctatggactggatttggcgcatccttttccttgtcggcgctgctaccggcgcgcattccgggcccgaagtgcaactggttgaatccggtggcggcctggtgcaagcaggcggatctctcagacttagctgtgccgcctccggcagaaccttcacaatgggatggtttaggcaggctccagggaaagagagagagttcgtcgccgccatctctctgtctcccacactggcctactacgccgactctgtgaaaggccggttcaccatctccagagataatgccaagaacaccgtggtgctgcaaatgaactctctgaaacccgaggatacagccctgtactattgtgccgctgaccggaagtccgtgatgagcatcagacccgattactggggacagggcacacaagtcacagtgtcctctggatccggcggcggaggatctggcggaggcggatctgggggcggaggctctttcgaacaagttcagcttcaacagcctggcgctgagctggtcaaacctggcgcttctgtgaagatgagctgcaaagccagcggctacgccttcagcagctactggatcaactggatgaagcagaaacccggccagggactcgaatggatcggccaaatctatcccggcgacggcgacaccaactacaacggcaagttcaagggcagagccacactgaccgccgatacctctagcagcacagcctacatgcagctgagcagcctgaccagcgaagatagcgccgtgtacttctgtgcccggtccatcacaacagtcgtgggctgcgctatggactattggggccagggaacaagcgtgaccgtgtctagtacgcgtgcctctacaaagggaccctccgtgtttcctctggctcccagcagcaagtctacaagcggaggaacagccgctctgggctgcctggtcaaggattactttcccgagcctgtgaccgtgtcctggaatagcggagcactgacaagcggcgtgcacacctttccagccgtgctgcaaagcagcggcctgtactctctgagcagcgtggtcacagtgcctagctctagcctgggcacccagacctacatctgcaatgtgaaccacaagcctagcaacaccaaggtggacaagagagtggaacccaagagctgtggtacccaagtggtggacacaacaaaagccgtcatcaccctgcaaccaccttgggtttcagtctttcaagaagagacagttaccctgcactgtgaagtcctgcacttgcccggaagcagctccacacagtggttcctcaacggcacagctacccagacaagcaccccttcctaccggatcacatctgcctccgtgaacgattccggcgagtataggtgtcagaggggcctgtctggccgcagcgatcctatccagcttgagattcatcgtggatggttgctcctccaagtgtcctccagggtgttcaccgaaggcgaacctctggcactgaggtgccatgcttggaaagataagctcgtctacaatgtcctctactaccgcaatggcaaggcttttaagttttttcattggaactctaatctcacgatcctgaaaacgaacatctcccacaatgggacataccactgctctggcatgggaaaacatcggtacacctctgccggcatctctgtcacagtcaaagaactgttccctgcaccagtcctgaacgcttccgtgacctctccactgcttgagggaaatctggtcaccctgtcctgcgaaactaagttgctgcttcagaggcccggactccagctctacttttcattctatatgggctctaagaccctgagaggccggaacaccagcagcgaatatcagattctgacagctcggcgcgaggactccgggctctattggtgtgaagctgctacagaggacggaaacgtgctgaaacggtcccctgaactggaactgcaagtcctgggccttcagctgccaactccagtgtggtttcatgtcctgttctatctggctgtggggattatgttccttgtgaataccgtgctctgggttaccattcggaaagaactcaagcgcaagaaaaaatgggatcttgagataagcctggacagcgggcatgagaagaaagtcatcagttcccttcaagaggacagacatctcgaagaggaactcaaatgtcaagaacaaaaagaagaacaactccaagagggtgtccatcggaaagagccacagggcgctacaagctctagacgggttaagttttccagatccgcagacgcacccgcttaccaacaagggcagaaccaactctacaatgaacttaatttggggcggagggaagagtacgacgttctggacaaaaggaggggacgagatcccgagatgggcggaaagcctcagcgaaggaagaatccgcaagaggggctttataacgaactccagaaagataaaatggcagaagcctatagtgagattgggatgaagggagaaaggaggaggggtaaaggtcacgatgggttgtaccaaggattgagcacagccactaaagatacctatgatgcgctccacatgcaggccctgccgccaagacgcgccaagagaagcggatctggcgtgaagcagaccctgaatttcgacctgctgaagctggctggcgacgtggaatccaacccaggccctggccatatgaccgagtacaagcccacggtgcgcctcgccacccgcgacgacgtccccagggccgtacgcaccctcgccgccgcgttcgccgactaccccgccacgcgccacaccgtcgatccggaccgccacatcgagcgggtcaccgagctgcaagaactcttcctcacgcgcgtcgggctcgacatcggcaaggtgtgggtcgcggacgacggcgccgcggtggcggtctggaccacgccggagagcgtcgaagcgggggcggtgttcgccgagatcggcccgcgcatggccgagttgagcggttcccggctggccgcgcagcaacagatggaaggcctcctggcgccgcaccggcccaaggagcccgcgtggttcctggccaccgtcggcgtctcgcccgaccaccagggcaagggtctgggcagcgccgtcgtgctccccggagtggaggcggccgagcgcgccggggtgcccgccttcctggagacctccgcgccccgcaacctccccttctacgagcggctcggcttcaccgtcaccgccgacgtcgaggtgcccgaaggaccgcgcacctggtgcatgacccgcaagcccggtgcctga

SEQ ID NO: 6226 - DNA, 4260 bp, Artificial Sequence
  Synthetic Polynucleotide
atggccttaccagtgaccgccttgctcctgccgctggccttgctgctccacgccgccaggccggaagtgcagctggttgaatctggcggaggactggttcaggctggcggatctctgagactgtcttgtgccgccagcggcagaacctttagcatgggctggtttagacaggcccctggcaaagagagagagttcgtcgccgccatcacatactctggcggcagcccttactacgccgactctgtgaagggcagattcaccatcagccgggacaacgccaagaacaccgtgtacctccagatgaacagcctgaagcctgaggacaccgccgtgtactactgcgccgccaatccaacatacggcagcgactggaacgccgagaattggggccagggaacccaagtgacagtgtctagcctcgagggacagcctaaggccaatcctaccgtgacactgttccctccaagcagcgaagaactccaggccaacaaggccacacttgtgtgcctgatctccgacttctaccctggggctgtgacagtggcttggaaggccgatggatctcctgtgaaagccggcgtggaaaccaccaagccatccaagcagagcaacaacaaatacgccgccagctcctacctgagcctgacacctgagcagtggaagtcccacagatcctacagctgccaagtgacccacgaaggcagcaccgtggaaaagacagtggcccctacagagtgcagcggatccacaacacctggcgagagaagtagcctgcctgccttctatcctggcaccagcggctcttgttctggctgtggatctctgagcctgcctctgctggctggactggttgctgctgatgctgtggcctctctgctgattgtgggagccgtgttcctgtgcgccagacctagaagaagccccgctcaagaggacggcaaggtgtacatcaacatgcccggcagaggaagcactagtagagtgaagttcagcagaagcgccgacgcccctgcctaccagcagggacagaaccaactgtacaacgagctgaacctgggcagacgggaagagtacgacgtgctggacaagcggagaggcagggaccctgagatgggcggaaagccccagcggagaaagaacccccaggaaggactgtataacgaactccagaaagacaagatggccgaagcctacagcgagatcggcatgaagggcgagcggagaagaggcaagggccacgatggcctgtaccagggcctgagcaccgccaccaaggacacctatgacgccctgcacatgcaggccctgcctccaagaagggccaagcgatctggatctggagcaacaaacttctcactactcaaacaagcaggtgacgtggaggagaatcccgggcctatggactggatttggcgcatccttttccttgtcggcgctgctaccggcgcgcattccgggcccgaagtgcaactggttgaatccggtggcggcctggtgcaagcaggcggatctctcagacttagctgtgccgcctccggcagaaccttcacaatgggatggtttaggcaggctccagggaaagagagagagttcgtcgccgccatctctctgtctcccacactggcctactacgccgactctgtgaaaggccggttcaccatctccagagataatgccaagaacaccgtggtgctgcaaatgaactctctgaaacccgaggatacagccctgtactattgtgccgctgaccggaagtccgtgatgagcatcagacccgattactggggacagggcacacaagtcacagtgtcctctacgcgtgcctctacaaagggaccctccgtgtttcctctggctcccagcagcaagtctacaagcggaggaacagccgctctgggctgcctggtcaaggattactttcccgagcctgtgaccgtgtcctggaatagcggagcactgacaagcggcgtgcacacctttccagccgtgctgcaaagcagcggcctgtactctctgagcagcgtggtcacagtgcctagctctagcctgggcacccagacctacatctgcaatgtgaaccacaagcctagcaacaccaaggtggacaagagagtggaacccaagagctgtggtacccaagtggtggacacaacaaaagccgtcatcaccctgcaaccaccttgggtttcagtctttcaagaagagacagttaccctgcactgtgaagtcctgcacttgcccggaagcagctccacacagtggttcctcaacggcacagctacccagacaagcaccccttcctaccggatcacatctgcctccgtgaacgattccggcgagtataggtgtcagaggggcctgtctggccgcagcgatcctatccagcttgagattcatcgtggatggttgctcctccaagtgtcctccagggtgttcaccgaaggcgaacctctggcactgaggtgccatgcttggaaagataagctcgtctacaatgtcctctactaccgcaatggcaaggcttttaagttttttcattggaactctaatctcacgatcctgaaaacgaacatctcccacaatgggacataccactgctctggcatgggaaaacatcggtacacctctgccggcatctctgtcacagtcaaagaactgttccctgcaccagtcctgaacgcttccgtgacctctccactgcttgagggaaatctggtcaccctgtcctgcgaaactaagttgctgcttcagaggcccggactccagctctacttttcattctatatgggctctaagaccctgagaggccggaacaccagcagcgaatatcagattctgacagctcggcgcgaggactccgggctctattggtgtgaagctgctacagaggacggaaacgtgctgaaacggtcccctgaactggaactgcaagtcctgggccttcagctgccaactccagtgtggtttcatgtcctgttctatctggctgtggggattatgttccttgtgaataccgtgctctgggttaccattcggaaagaactcaagcgcaagaaaaaatgggatcttgagataagcctggacagcgggcatgagaagaaagtcatcagttcccttcaagaggacagacatctcgaagaggaactcaaatgtcaagaacaaaaagaagaacaactccaagagggtgtccatcggaaagagccacagggcgctacaagctctagacgggttaagttttccagatccgcagacgcacccgcttaccaacaagggcagaaccaactctacaatgaacttaatttggggcggagggaagagtacgacgttctggacaaaaggaggggacgagatcccgagatgggcggaaagcctcagcgaaggaagaatccgcaagaggggctttataacgaactccagaaagataaaatggcagaagcctatagtgagattgggatgaagggagaaaggaggaggggtaaaggtcacgatgggttgtaccaaggattgagcacagccactaaagatacctatgatgcgctccacatgcaggccctgccgccaagacgcgccaagagaagcggatctggcgtgaagcagaccctgaatttcgacctgctgaagctggctggcgacgtggaatccaacccaggccctggccatatgaccgagtacaagcccacggtgcgcctcgccacccgcgacgacgtccccagggccgtacgcaccctcgccgccgcgttcgccgactaccccgccacgcgccacaccgtcgatccggaccgccacatcgagcgggtcaccgagctgcaagaactcttcctcacgcgcgtcgggctcgacatcggcaaggtgtgggtcgcggacgacggcgccgcggtggcggtctggaccacgccggagagcgtcgaagcgggggcggtgttcgccgagatcggcccgcgcatggccgagttgagcggttcccggctggccgcgcagcaacagatggaaggcctcctggcgccgcaccggcccaaggagcccgcgtggttcctggccaccgtcggcgtctcgcccgaccaccagggcaagggtctgggcagcgccgtcgtgctccccggagtggaggcggccgagcgcgccggggtgcccgccttcctggagacctccgcgccccgcaacctccccttctacgagcggctcggcttcaccgtcaccgccgacgtcgaggtgcccgaaggaccgcgcacctggtgcatgacccgcaagcccggtgcctga

SEQ ID NO: 6227 - DNA, 4284 bp, Artificial Sequence
  Synthetic Polynucleotide
atggccttaccagtgaccgccttgctcctgccgctggccttgctgctccacgccgccaggccggacatccagatgacacagagccctagcagcctgtctgccagcgtgggagacagagtgaccatcacatgcaaggccagcgaccacatcaacaactggctggcctggtatcagcagaagcctggacaggcccctaagctgctgatctacggcgctaccacactggaaacaggcgtgcccagcagattttctggcagcggctctggcaccgactacaccctgacaatatccagcctccagcctgaggacttcgccacctactactgtcagcagagctggaacaccccttggacattcggccagggcaccaagctggaaatcaagagactcgaggacctgaagaacgtgttcccacctgaggtggccgtgttcgagcctagcgaggccgagatcagccacacccagaaagccaccctcgtgtgcctggctaccggcttctaccccgaccatgtggaactgtcttggtgggtcaacggcaaagaggtgcacagcggcgtgtctaccgacccccagccactgaaagaacagcccgccctgaacgacagccggtactgcctgagcagcagactgagagtgtccgccaccttctggcagaacccccggaaccacttcagatgccaggtgcagttctacggcctgagcgagaacgacgagtggacccaggacagagccaagcccgtgacccagatcgtgtctgccgaagcctggggcagagccgattgcggatccacaacacctggcgagagaagtagcctgcctgccttctatcctggcaccagcggctcttgttctggctgtggatctctgagcctgcctctgctggctggactggttgctgctgatgctgtggcctctctgctgattgtgggagccgtgttcctgtgcgccagacctagaagaagccccgctcaagaggacggcaaggtgtacatcaacatgcccggcagaggaagcactagtagagtgaagttcagcagaagcgccgacgcccctgcctaccagcagggacagaaccaactgtacaacgagctgaacctgggcagacgggaagagtacgacgtgctggacaagcggagaggcagggaccctgagatgggcggaaagccccagcggagaaagaacccccaggaaggactgtataacgaactccagaaagacaagatggccgaagcctacagcgagatcggcatgaagggcgagcggagaagaggcaagggccacgatggcctgtaccagggcctgagcaccgccaccaaggacacctatgacgccctgcacatgcaggccctgcctccaagaagggccaagcgatctggatctggagcaacaaacttctcactactcaaacaagcaggtgacgtggaggagaatcccgggcctatggactggatttggcgcatccttttccttgtcggcgctgctaccggcgcgcattccttcgaacaagttcagcttcaacagcctggcgctgagctggtcaaacctggcgcttctgtgaagatgagctgcaaagccagcggctacgccttcagcagctactggatcaactggatgaagcagaaacccggccagggactcgaatggatcggccaaatctatcccggcgacggcgacaccaactacaacggcaagttcaagggcagagccacactgaccgccgatacctctagcagcacagcctacatgcagctgagcagcctgaccagcgaagatagcgccgtgtacttctgtgcccggtccatcacaacagtcgtgggctgcgctatggactattggggccagggaacaagcgtgaccgtgtctagtacgcgtatccagaaccctgatcctgccgtgtaccagctgcgggatagcaagagcagcgacaagagcgtgtgtctgttcaccgacttcgacagccagaccaacgtgtcccagagcaaggactccgacgtgtacatcaccgataagaccgtgctggacatgcggagcatggacttcaagagcaactccgccgtggcctggtccaacaagtccgatttcgcctgcgccaacgccttcaacaacagcattatccccgaggacacattcttcccaagccccgagagcagctgcggtacccaagtggtggacacaacaaaagccgtcatcaccctgcaaccaccttgggtttcagtctttcaagaagagacagttaccctgcactgtgaagtcctgcacttgcccggaagcagctccacacagtggttcctcaacggcacagctacccagacaagcaccccttcctaccggatcacatctgcctccgtgaacgattccggcgagtataggtgtcagaggggcctgtctggccgcagcgatcctatccagcttgagattcatcgtggatggttgctcctccaagtgtcctccagggtgttcaccgaaggcgaacctctggcactgaggtgccatgcttggaaagataagctcgtctacaatgtcctctactaccgcaatggcaaggcttttaagttttttcattggaactctaatctcacgatcctgaaaacgaacatctcccacaatgggacataccactgctctggcatgggaaaacatcggtacacctctgccggcatctctgtcacagtcaaagaactgttccctgcaccagtcctgaacgcttccgtgacctctccactgcttgagggaaatctggtcaccctgtcctgcgaaactaagttgctgcttcagaggcccggactccagctctacttttcattctatatgggctctaagaccctgagaggccggaacaccagcagcgaatatcagattctgacagctcggcgcgaggactccgggctctattggtgtgaagctgctacagaggacggaaacgtgctgaaacggtcccctgaactggaactgcaagtcctgggccttcagctgccaactccagtgtggtttcatgtcctgttctatctggctgtggggattatgttccttgtgaataccgtgctctgggttaccattcggaaagaactcaagcgcaagaaaaaatgggatcttgagataagcctggacagcgggcatgagaagaaagtcatcagttcccttcaagaggacagacatctcgaagaggaactcaaatgtcaagaacaaaaagaagaacaactccaagagggtgtccatcggaaagagccacagggcgctacaagctctagacgggttaagttttccagatccgcagacgcacccgcttaccaacaagggcagaaccaactctacaatgaacttaatttggggcggagggaagagtacgacgttctggacaaaaggaggggacgagatcccgagatgggcggaaagcctcagcgaaggaagaatccgcaagaggggctttataacgaactccagaaagataaaatggcagaagcctatagtgagattgggatgaagggagaaaggaggaggggtaaaggtcacgatgggttgtaccaaggattgagcacagccactaaagatacctatgatgcgctccacatgcaggccctgccgccaagacgcgccaagagaagcggatctggcgtgaagcagaccctgaatttcgacctgctgaagctggctggcgacgtggaatccaacccaggccctggccatatgaccgagtacaagcccacggtgcgcctcgccacccgcgacgacgtccccagggccgtacgcaccctcgccgccgcgttcgccgactaccccgccacgcgccacaccgtcgatccggaccgccacatcgagcgggtcaccgagctgcaagaactcttcctcacgcgcgtcgggctcgacatcggcaaggtgtgggtcgcggacgacggcgccgcggtggcggtctggaccacgccggagagcgtcgaagcgggggcggtgttcgccgagatcggcccgcgcatggccgagttgagcggttcccggctggccgcgcagcaacagatggaaggcctcctggcgccgcaccggcccaaggagcccgcgtggttcctggccaccgtcggcgtctcgcccgaccaccagggcaagggtctgggcagcgccgtcgtgctccccggagtggaggcggccgagcgcgccggggtgcccgccttcctggagacctccgcgccccgcaacctccccttctacgagcggctcggcttcaccgtcaccgccgacgtcgaggtgcccgaaggaccgcgcacctggtgcatgacccgcaagcccggtgcctga

SEQ ID NO: 6228 - DNA, 4695 bp, Artificial Sequence
  Synthetic Polynucleotide
atggccttaccagtgaccgccttgctcctgccgctggccttgctgctccacgccgccaggccggaagtgcagctggttgaatctggcggaggactggttcaggctggcggatctctgagactgtcttgtgccgccagcggcagaacctttagcatgggctggtttagacaggcccctggcaaagagagagagttcgtcgccgccatcacatactctggcggcagcccttactacgccgactctgtgaagggcagattcaccatcagccgggacaacgccaagaacaccgtgtacctccagatgaacagcctgaagcctgaggacaccgccgtgtactactgcgccgccaatccaacatacggcagcgactggaacgccgagaattggggccagggaacccaagtgacagtgtctagcggtaccggcggaggcggatctggcggcggaggtagcggtggcggaggatctgaattcgacatccagatgacacagagccctagcagcctgtctgccagcgtgggagacagagtgaccatcacatgcaaggccagcgaccacatcaacaactggctggcctggtatcagcagaagcctggacaggcccctaagctgctgatctacggcgctaccacactggaaacaggcgtgcccagcagattttctggcagcggctctggcaccgactacaccctgacaatatccagcctccagcctgaggacttcgccacctactactgtcagcagagctggaacaccccttggacattcggccagggcaccaagctggaaatcaagagactcgaggacctgaagaacgtgttcccacctgaggtggccgtgttcgagcctagcgaggccgagatcagccacacccagaaagccaccctcgtgtgcctggctaccggcttctaccccgaccatgtggaactgtcttggtgggtcaacggcaaagaggtgcacagcggcgtgtctaccgacccccagccactgaaagaacagcccgccctgaacgacagccggtactgcctgagcagcagactgagagtgtccgccaccttctggcagaacccccggaaccacttcagatgccaggtgcagttctacggcctgagcgagaacgacgagtggacccaggacagagccaagcccgtgacccagatcgtgtctgccgaagcctggggcagagccgattgcggatccacaacacctggcgagagaagtagcctgcctgccttctatcctggcaccagcggctcttgttctggctgtggatctctgagcctgcctctgctggctggactggttgctgctgatgctgtggcctctctgctgattgtgggagccgtgttcctgtgcgccagacctagaagaagccccgctcaagaggacggcaaggtgtacatcaacatgcccggcagaggaagcactagtagagtgaagttcagcagaagcgccgacgcccctgcctaccagcagggacagaaccaactgtacaacgagctgaacctgggcagacgggaagagtacgacgtgctggacaagcggagaggcagggaccctgagatgggcggaaagccccagcggagaaagaacccccaggaaggactgtataacgaactccagaaagacaagatggccgaagcctacagcgagatcggcatgaagggcgagcggagaagaggcaagggccacgatggcctgtaccagggcctgagcaccgccaccaaggacacctatgacgccctgcacatgcaggccctgcctccaagaagggccaagcgatctggatctggagcaacaaacttctcactactcaaacaagcaggtgacgtggaggagaatcccgggcctatggactggatttggcgcatccttttccttgtcggcgctgctaccggcgcgcattccttcgaacaagttcagcttcaacagcctggcgctgagctggtcaaacctggcgcttctgtgaagatgagctgcaaagccagcggctacgccttcagcagctactggatcaactggatgaagcagaaacccggccagggactcgaatggatcggccaaatctatcccggcgacggcgacaccaactacaacggcaagttcaagggcagagccacactgaccgccgatacctctagcagcacagcctacatgcagctgagcagcctgaccagcgaagatagcgccgtgtacttctgtgcccggtccatcacaacagtcgtgggctgcgctatggactattggggccagggaacaagcgtgaccgtgtctagtacgcgtatccagaaccctgatcctgccgtgtaccagctgcgggatagcaagagcagcgacaagagcgtgtgtctgttcaccgacttcgacagccagaccaacgtgtcccagagcaaggactccgacgtgtacatcaccgataagaccgtgctggacatgcggagcatggacttcaagagcaactccgccgtggcctggtccaacaagtccgatttcgcctgcgccaacgccttcaacaacagcattatccccgaggacacattcttcccaagccccgagagcagctgcggtacccaagtggtggacacaacaaaagccgtcatcaccctgcaaccaccttgggtttcagtctttcaagaagagacagttaccctgcactgtgaagtcctgcacttgcccggaagcagctccacacagtggttcctcaacggcacagctacccagacaagcaccccttcctaccggatcacatctgcctccgtgaacgattccggcgagtataggtgtcagaggggcctgtctggccgcagcgatcctatccagcttgagattcatcgtggatggttgctcctccaagtgtcctccagggtgttcaccgaaggcgaacctctggcactgaggtgccatgcttggaaagataagctcgtctacaatgtcctctactaccgcaatggcaaggcttttaagttttttcattggaactctaatctcacgatcctgaaaacgaacatctcccacaatgggacataccactgctctggcatgggaaaacatcggtacacctctgccggcatctctgtcacagtcaaagaactgttccctgcaccagtcctgaacgcttccgtgacctctccactgcttgagggaaatctggtcaccctgtcctgcgaaactaagttgctgcttcagaggcccggactccagctctacttttcattctatatgggctctaagaccctgagaggccggaacaccagcagcgaatatcagattctgacagctcggcgcgaggactccgggctctattggtgtgaagctgctacagaggacggaaacgtgctgaaacggtcccctgaactggaactgcaagtcctgggccttcagctgccaactccagtgtggtttcatgtcctgttctatctggctgtggggattatgttccttgtgaataccgtgctctgggttaccattcggaaagaactcaagcgcaagaaaaaatgggatcttgagataagcctggacagcgggcatgagaagaaagtcatcagttcccttcaagaggacagacatctcgaagaggaactcaaatgtcaagaacaaaaagaagaacaactccaagagggtgtccatcggaaagagccacagggcgctacaagctctagacgggttaagttttccagatccgcagacgcacccgcttaccaacaagggcagaaccaactctacaatgaacttaatttggggcggagggaagagtacgacgttctggacaaaaggaggggacgagatcccgagatgggcggaaagcctcagcgaaggaagaatccgcaagaggggctttataacgaactccagaaagataaaatggcagaagcctatagtgagattgggatgaagggagaaaggaggaggggtaaaggtcacgatgggttgtaccaaggattgagcacagccactaaagatacctatgatgcgctccacatgcaggccctgccgccaagacgcgccaagagaagcggatctggcgtgaagcagaccctgaatttcgacctgctgaagctggctggcgacgtggaatccaacccaggccctggccatatgaccgagtacaagcccacggtgcgcctcgccacccgcgacgacgtccccagggccgtacgcaccctcgccgccgcgttcgccgactaccccgccacgcgccacaccgtcgatccggaccgccacatcgagcgggtcaccgagctgcaagaactcttcctcacgcgcgtcgggctcgacatcggcaaggtgtgggtcgcggacgacggcgccgcggtggcggtctggaccacgccggagagcgtcgaagcgggggcggtgttcgccgagatcggcccgcgcatggccgagttgagcggttcccggctggccgcgcagcaacagatggaaggcctcctggcgccgcaccggcccaaggagcccgcgtggttcctggccaccgtcggcgtctcgcccgaccaccagggcaagggtctgggcagcgccgtcgtgctccccggagtggaggcggccgagcgcgccggggtgcccgccttcctggagacctccgcgccccgcaacctccccttctacgagcggctcggcttcaccgtcaccgccgacgtcgaggtgcccgaaggaccgcgcacctggtgcatgacccgcaagcccggtgcctga

SEQ ID NO: 6229 - DNA, 5106 bp, Artificial Sequence
  Synthetic Polynucleotide
atggccttaccagtgaccgccttgctcctgccgctggccttgctgctccacgccgccaggccggaagtgcagctggttgaatctggcggaggactggttcaggctggcggatctctgagactgtcttgtgccgccagcggcagaacctttagcatgggctggtttagacaggcccctggcaaagagagagagttcgtcgccgccatcacatactctggcggcagcccttactacgccgactctgtgaagggcagattcaccatcagccgggacaacgccaagaacaccgtgtacctccagatgaacagcctgaagcctgaggacaccgccgtgtactactgcgccgccaatccaacatacggcagcgactggaacgccgagaattggggccagggaacccaagtgacagtgtctagcggtaccggcggaggcggatctggcggcggaggtagcggtggcggaggatctgaattcgacatccagatgacacagagccctagcagcctgtctgccagcgtgggagacagagtgaccatcacatgcaaggccagcgaccacatcaacaactggctggcctggtatcagcagaagcctggacaggcccctaagctgctgatctacggcgctaccacactggaaacaggcgtgcccagcagattttctggcagcggctctggcaccgactacaccctgacaatatccagcctccagcctgaggacttcgccacctactactgtcagcagagctggaacaccccttggacattcggccagggcaccaagctggaaatcaagagactcgaggacctgaagaacgtgttcccacctgaggtggccgtgttcgagcctagcgaggccgagatcagccacacccagaaagccaccctcgtgtgcctggctaccggcttctaccccgaccatgtggaactgtcttggtgggtcaacggcaaagaggtgcacagcggcgtgtctaccgacccccagccactgaaagaacagcccgccctgaacgacagccggtactgcctgagcagcagactgagagtgtccgccaccttctggcagaacccccggaaccacttcagatgccaggtgcagttctacggcctgagcgagaacgacgagtggacccaggacagagccaagcccgtgacccagatcgtgtctgccgaagcctggggcagagccgattgcggatccacaacacctggcgagagaagtagcctgcctgccttctatcctggcaccagcggctcttgttctggctgtggatctctgagcctgcctctgctggctggactggttgctgctgatgctgtggcctctctgctgattgtgggagccgtgttcctgtgcgccagacctagaagaagccccgctcaagaggacggcaaggtgtacatcaacatgcccggcagaggaagcactagtagagtgaagttcagcagaagcgccgacgcccctgcctaccagcagggacagaaccaactgtacaacgagctgaacctgggcagacgggaagagtacgacgtgctggacaagcggagaggcagggaccctgagatgggcggaaagccccagcggagaaagaacccccaggaaggactgtataacgaactccagaaagacaagatggccgaagcctacagcgagatcggcatgaagggcgagcggagaagaggcaagggccacgatggcctgtaccagggcctgagcaccgccaccaaggacacctatgacgccctgcacatgcaggccctgcctccaagaagggccaagcgatctggatctggagcaacaaacttctcactactcaaacaagcaggtgacgtggaggagaatcccgggcctatggactggatttggcgcatccttttccttgtcggcgctgctaccggcgcgcattccgggcccgaagtgcaactggttgaatccggtggcggcctggtgcaagcaggcggatctctcagacttagctgtgccgcctccggcagaaccttcacaatgggatggtttaggcaggctccagggaaagagagagagttcgtcgccgccatctctctgtctcccacactggcctactacgccgactctgtgaaaggccggttcaccatctccagagataatgccaagaacaccgtggtgctgcaaatgaactctctgaaacccgaggatacagccctgtactattgtgccgctgaccggaagtccgtgatgagcatcagacccgattactggggacagggcacacaagtcacagtgtcctctggatccggcggcggaggatctggcggaggcggatctgggggcggaggctctttcgaacaagttcagcttcaacagcctggcgctgagctggtcaaacctggcgcttctgtgaagatgagctgcaaagccagcggctacgccttcagcagctactggatcaactggatgaagcagaaacccggccagggactcgaatggatcggccaaatctatcccggcgacggcgacaccaactacaacggcaagttcaagggcagagccacactgaccgccgatacctctagcagcacagcctacatgcagctgagcagcctgaccagcgaagatagcgccgtgtacttctgtgcccggtccatcacaacagtcgtgggctgcgctatggactattggggccagggaacaagcgtgaccgtgtctagtacgcgtatccagaaccctgatcctgccgtgtaccagctgcgggatagcaagagcagcgacaagagcgtgtgtctgttcaccgacttcgacagccagaccaacgtgtcccagagcaaggactccgacgtgtacatcaccgataagaccgtgctggacatgcggagcatggacttcaagagcaactccgccgtggcctggtccaacaagtccgatttcgcctgcgccaacgccttcaacaacagcattatccccgaggacacattcttcccaagccccgagagcagctgcggtacccaagtggtggacacaacaaaagccgtcatcaccctgcaaccaccttgggtttcagtctttcaagaagagacagttaccctgcactgtgaagtcctgcacttgcccggaagcagctccacacagtggttcctcaacggcacagctacccagacaagcaccccttcctaccggatcacatctgcctccgtgaacgattccggcgagtataggtgtcagaggggcctgtctggccgcagcgatcctatccagcttgagattcatcgtggatggttgctcctccaagtgtcctccagggtgttcaccgaaggcgaacctctggcactgaggtgccatgcttggaaagataagctcgtctacaatgtcctctactaccgcaatggcaaggcttttaagttttttcattggaactctaatctcacgatcctgaaaacgaacatctcccacaatgggacataccactgctctggcatgggaaaacatcggtacacctctgccggcatctctgtcacagtcaaagaactgttccctgcaccagtcctgaacgcttccgtgacctctccactgcttgagggaaatctggtcaccctgtcctgcgaaactaagttgctgcttcagaggcccggactccagctctacttttcattctatatgggctctaagaccctgagaggccggaacaccagcagcgaatatcagattctgacagctcggcgcgaggactccgggctctattggtgtgaagctgctacagaggacggaaacgtgctgaaacggtcccctgaactggaactgcaagtcctgggccttcagctgccaactccagtgtggtttcatgtcctgttctatctggctgtggggattatgttccttgtgaataccgtgctctgggttaccattcggaaagaactcaagcgcaagaaaaaatgggatcttgagataagcctggacagcgggcatgagaagaaagtcatcagttcccttcaagaggacagacatctcgaagaggaactcaaatgtcaagaacaaaaagaagaacaactccaagagggtgtccatcggaaagagccacagggcgctacaagctctagacgggttaagttttccagatccgcagacgcacccgcttaccaacaagggcagaaccaactctacaatgaacttaatttggggcggagggaagagtacgacgttctggacaaaaggaggggacgagatcccgagatgggcggaaagcctcagcgaaggaagaatccgcaagaggggctttataacgaactccagaaagataaaatggcagaagcctatagtgagattgggatgaagggagaaaggaggaggggtaaaggtcacgatgggttgtaccaaggattgagcacagccactaaagatacctatgatgcgctccacatgcaggccctgccgccaagacgcgccaagagaagcggatctggcgtgaagcagaccctgaatttcgacctgctgaagctggctggcgacgtggaatccaacccaggccctggccatatgaccgagtacaagcccacggtgcgcctcgccacccgcgacgacgtccccagggccgtacgcaccctcgccgccgcgttcgccgactaccccgccacgcgccacaccgtcgatccggaccgccacatcgagcgggtcaccgagctgcaagaactcttcctcacgcgcgtcgggctcgacatcggcaaggtgtgggtcgcggacgacggcgccgcggtggcggtctggaccacgccggagagcgtcgaagcgggggcggtgttcgccgagatcggcccgcgcatggccgagttgagcggttcccggctggccgcgcagcaacagatggaaggcctcctggcgccgcaccggcccaaggagcccgcgtggttcctggccaccgtcggcgtctcgcccgaccaccagggcaagggtctgggcagcgccgtcgtgctccccggagtggaggcggccgagcgcgccggggtgcccgccttcctggagacctccgcgccccgcaacctccccttctacgagcggctcggcttcaccgtcaccgccgacgtcgaggtgcccgaaggaccgcgcacctggtgcatgacccgcaagcccggtgcctga

SEQ ID NO: 6230 - DNA, 4305 bp, Artificial Sequence
  Synthetic Polynucleotide
atggccttaccagtgaccgccttgctcctgccgctggccttgctgctccacgccgccaggccggaagtgcagctggttgaatctggcggaggactggttcaggctggcggatctctgagactgtcttgtgccgccagcggcagaacctttagcatgggctggtttagacaggcccctggcaaagagagagagttcgtcgccgccatcacatactctggcggcagcccttactacgccgactctgtgaagggcagattcaccatcagccgggacaacgccaagaacaccgtgtacctccagatgaacagcctgaagcctgaggacaccgccgtgtactactgcgccgccaatccaacatacggcagcgactggaacgccgagaattggggccagggaacccaagtgacagtgtctagcctcgaggacctgaagaacgtgttcccacctgaggtggccgtgttcgagcctagcgaggccgagatcagccacacccagaaagccaccctcgtgtgcctggctaccggcttctaccccgaccatgtggaactgtcttggtgggtcaacggcaaagaggtgcacagcggcgtgtctaccgacccccagccactgaaagaacagcccgccctgaacgacagccggtactgcctgagcagcagactgagagtgtccgccaccttctggcagaacccccggaaccacttcagatgccaggtgcagttctacggcctgagcgagaacgacgagtggacccaggacagagccaagcccgtgacccagatcgtgtctgccgaagcctggggcagagccgattgcggatccacaacacctggcgagagaagtagcctgcctgccttctatcctggcaccagcggctcttgttctggctgtggatctctgagcctgcctctgctggctggactggttgctgctgatgctgtggcctctctgctgattgtgggagccgtgttcctgtgcgccagacctagaagaagccccgctcaagaggacggcaaggtgtacatcaacatgcccggcagaggaagcactagtagagtgaagttcagcagaagcgccgacgcccctgcctaccagcagggacagaaccaactgtacaacgagctgaacctgggcagacgggaagagtacgacgtgctggacaagcggagaggcagggaccctgagatgggcggaaagccccagcggagaaagaacccccaggaaggactgtataacgaactccagaaagacaagatggccgaagcctacagcgagatcggcatgaagggcgagcggagaagaggcaagggccacgatggcctgtaccagggcctgagcaccgccaccaaggacacctatgacgccctgcacatgcaggccctgcctccaagaagggccaagcgatctggatctggagcaacaaacttctcactactcaaacaagcaggtgacgtggaggagaatcccgggcctatggactggatttggcgcatccttttccttgtcggcgctgctaccggcgcgcattccgggcccgaagtgcaactggttgaatccggtggcggcctggtgcaagcaggcggatctctcagacttagctgtgccgcctccggcagaaccttcacaatgggatggtttaggcaggctccagggaaagagagagagttcgtcgccgccatctctctgtctcccacactggcctactacgccgactctgtgaaaggccggttcaccatctccagagataatgccaagaacaccgtggtgctgcaaatgaactctctgaaacccgaggatacagccctgtactattgtgccgctgaccggaagtccgtgatgagcatcagacccgattactggggacagggcacacaagtcacagtgtcctctacgcgtatccagaaccctgatcctgccgtgtaccagctgcgggatagcaagagcagcgacaagagcgtgtgtctgttcaccgacttcgacagccagaccaacgtgtcccagagcaaggactccgacgtgtacatcaccgataagaccgtgctggacatgcggagcatggacttcaagagcaactccgccgtggcctggtccaacaagtccgatttcgcctgcgccaacgccttcaacaacagcattatccccgaggacacattcttcccaagccccgagagcagctgcggtacccaagtggtggacacaacaaaagccgtcatcaccctgcaaccaccttgggtttcagtctttcaagaagagacagttaccctgcactgtgaagtcctgcacttgcccggaagcagctccacacagtggttcctcaacggcacagctacccagacaagcaccccttcctaccggatcacatctgcctccgtgaacgattccggcgagtataggtgtcagaggggcctgtctggccgcagcgatcctatccagcttgagattcatcgtggatggttgctcctccaagtgtcctccagggtgttcaccgaaggcgaacctctggcactgaggtgccatgcttggaaagataagctcgtctacaatgtcctctactaccgcaatggcaaggcttttaagttttttcattggaactctaatctcacgatcctgaaaacgaacatctcccacaatgggacataccactgctctggcatgggaaaacatcggtacacctctgccggcatctctgtcacagtcaaagaactgttccctgcaccagtcctgaacgcttccgtgacctctccactgcttgagggaaatctggtcaccctgtcctgcgaaactaagttgctgcttcagaggcccggactccagctctacttttcattctatatgggctctaagaccctgagaggccggaacaccagcagcgaatatcagattctgacagctcggcgcgaggactccgggctctattggtgtgaagctgctacagaggacggaaacgtgctgaaacggtcccctgaactggaactgcaagtcctgggccttcagctgccaactccagtgtggtttcatgtcctgttctatctggctgtggggattatgttccttgtgaataccgtgctctgggttaccattcggaaagaactcaagcgcaagaaaaaatgggatcttgagataagcctggacagcgggcatgagaagaaagtcatcagttcccttcaagaggacagacatctcgaagaggaactcaaatgtcaagaacaaaaagaagaacaactccaagagggtgtccatcggaaagagccacagggcgctacaagctctagacgggttaagttttccagatccgcagacgcacccgcttaccaacaagggcagaaccaactctacaatgaacttaatttggggcggagggaagagtacgacgttctggacaaaaggaggggacgagatcccgagatgggcggaaagcctcagcgaaggaagaatccgcaagaggggctttataacgaactccagaaagataaaatggcagaagcctatagtgagattgggatgaagggagaaaggaggaggggtaaaggtcacgatgggttgtaccaaggattgagcacagccactaaagatacctatgatgcgctccacatgcaggccctgccgccaagacgcgccaagagaagcggatctggcgtgaagcagaccctgaatttcgacctgctgaagctggctggcgacgtggaatccaacccaggccctggccatatgaccgagtacaagcccacggtgcgcctcgccacccgcgacgacgtccccagggccgtacgcaccctcgccgccgcgttcgccgactaccccgccacgcgccacaccgtcgatccggaccgccacatcgagcgggtcaccgagctgcaagaactcttcctcacgcgcgtcgggctcgacatcggcaaggtgtgggtcgcggacgacggcgccgcggtggcggtctggaccacgccggagagcgtcgaagcgggggcggtgttcgccgagatcggcccgcgcatggccgagttgagcggttcccggctggccgcgcagcaacagatggaaggcctcctggcgccgcaccggcccaaggagcccgcgtggttcctggccaccgtcggcgtctcgcccgaccaccagggcaagggtctgggcagcgccgtcgtgctccccggagtggaggcggccgagcgcgccggggtgcccgccttcctggagacctccgcgccccgcaacctccccttctacgagcggctcggcttcaccgtcaccgccgacgtcgaggtgcccgaaggaccgcgcacctggtgcatgacccgcaagcccggtgcctga

SEQ ID NO: 6231 - DNA, 1758 bp, Artificial Sequence; identical to SEQ ID NO: 2037
  Synthetic Polynucleotide

SEQ ID NO: 6232 - DNA, 1371 bp, Artificial Sequence; identical to SEQ ID NO: 5880
  Synthetic Polynucleotide

SEQ ID NO: 6233 - DNA, 1371 bp, Artificial Sequence; identical to SEQ ID NO: 5881
  Synthetic Polynucleotide

SEQ ID NO: 6234 - DNA, 993 bp, Artificial Sequence; identical to SEQ ID NO: 5882
  Synthetic Polynucleotide

SEQ ID NO: 6235 - DNA, 993 bp, Artificial Sequence; identical to SEQ ID NO: 5883
  Synthetic Polynucleotide

SEQ ID NO: 6236 - DNA, 993 bp, Artificial Sequence; identical to SEQ ID NO: 5884
  Synthetic Polynucleotide

SEQ ID NO: 6237 - DNA, 999 bp, Artificial Sequence; identical to SEQ ID NO: 5885
  Synthetic Polynucleotide

SEQ ID NO: 6238 - DNA, 1023 bp, Artificial Sequence; identical to SEQ ID NO: 5886
  Synthetic Polynucleotide

SEQ ID NO: 6239 - DNA, 1011 bp, Artificial Sequence; identical to SEQ ID NO: 5887
  Synthetic Polynucleotide

SEQ ID NO: 6240 - DNA, 996 bp, Artificial Sequence; identical to SEQ ID NO: 5888
  Synthetic Polynucleotide

SEQ ID NO: 6241 - DNA, 1011 bp, Artificial Sequence; identical to SEQ ID NO: 5889
  Synthetic Polynucleotide

SEQ ID NO: 6242 - DNA, 813 bp, Artificial Sequence; identical to SEQ ID NO: 5890
  Synthetic Polynucleotide

SEQ ID NO: 6243 - DNA, 906 bp, Artificial Sequence; identical to SEQ ID NO: 5891
  Synthetic Polynucleotide

SEQ ID NO: 6244 - DNA, 909 bp, Artificial Sequence; identical to SEQ ID NO: 5892
  Synthetic Polynucleotide

SEQ ID NO: 6245 - DNA, 1560 bp, Artificial Sequence; identical to SEQ ID NO: 5893
  Synthetic Polynucleotide

SEQ ID NO: 6246 - DNA, 1200 bp, Artificial Sequence; identical to SEQ ID NO: 5894
  Synthetic Polynucleotide

SEQ ID NO: 6247 - DNA, 798 bp, Artificial Sequence; identical to SEQ ID NO: 5895
  Synthetic Polynucleotide

SEQ ID NO: 6248 - DNA, 723 bp, Artificial Sequence; identical to SEQ ID NO: 5896
  Synthetic Polynucleotide

SEQ ID NO: 6249 - DNA, 1497 bp, Artificial Sequence; identical to SEQ ID NO: 5897
  Synthetic Polynucleotide

SEQ ID NO: 6250 - DNA, 1497 bp, Artificial Sequence; identical to SEQ ID NO: 5898
  Synthetic Polynucleotide

SEQ ID NO: 6251 - DNA, 4458 bp, Artificial Sequence
  Synthetic Polynucleotide
atggccttaccagtgaccgccttgctcctgccgctggccttgctgctccacgccgccaggccggacatccagatgacacagagccctagcagcctgtctgccagcgtgggagacagagtgaccatcacatgcaaggccagcgaccacatcaacaactggctggcctggtatcagcagaagcctggacaggcccctaagctgctgatctacggcgctaccacactggaaacaggcgtgcccagcagattttctggcagcggctctggcaccgactacaccctgacaatatccagcctccagcctgaggacttcgccacctactactgtcagcagagctggaacaccccttggacattcggccagggcaccaagctggaaatcaagagactcgagcaggtggtggataccaccaaggccgtgattaccctccagcctccttgggtgtccgtgttccaagaggaaaccgtgacactgcactgcgaggtgctgcatctgcctggctctagcagcacccagtggtttctgaatggcaccgccacacagaccagcacacccagctacagaatcaccagcgccagcgtgaacgacagcggcgagtacagatgccagagaggactgagcggcagaagcgaccccattcagctggaaatccacagaggctggctgctgctccaggtgtccagcagagtgtttacagagggcgagcccctggctctgagatgtcacgcctggaaggacaagctggtgtacaacgtgctgtactaccggaacggcaaagccttcaagttcttccactggaacagcaacctgaccatcctcaagaccaacatcagccacaacggcacctaccactgtagcggcatgggcaagcacagatacacaagcgccggcatcagcgtgaccgtgaaagagctgtttcccgctcctgtgctgaacgcctctgtgacaagtccactgctggaaggcaaccttgtgaccctgagctgcgagacaaagctgctgctgcaaagacctggcctccagctgtacttcagcttctacatgggcagcaagaccctgcggggcagaaataccagctccgagtaccagatcctgaccgccagaagagaggacagcggcctgtattggtgcgaagccgccaccgaggatggcaatgtgctgaagagaagccccgagctggaactccaggtgctgggactgcaactgcctacacctgtgtggttccacgtgctgttttacctggccgtgggcatcatgtttctggtcaacaccgtcctgtgggtcaccatcagaaaagagctgaagcggaagaagaagtgggacctcgaaatcagcctggactccggccacgaaaagaaagtgatctccagcctgcaagaggaccggcacctggaagaggaactgaagtgccaagagcagaaagaggaacagctgcaagaaggcgtgcaccgcaaagaacctcaaggcgctacaagcactagtagagtgaagttcagcagaagcgccgacgcccctgcctaccagcagggacagaaccaactgtacaacgagctgaacctgggcagacgggaagagtacgacgtgctggacaagcggagaggcagggaccctgagatgggcggaaagccccagcggagaaagaacccccaggaaggactgtataacgaactccagaaagacaagatggccgaagcctacagcgagatcggcatgaagggcgagcggagaagaggcaagggccacgatggcctgtaccagggcctgagcaccgccaccaaggacacctatgacgccctgcacatgcaggccctgcctccaagaagggccaagcgatctggatctggagcaacaaacttctcactactcaaacaagcaggtgacgtggaggagaatcccgggcctatggactggatttggcgcatccttttccttgtcggcgctgctaccggcgcgcattccttcgaacaagttcagcttcaacagcctggcgctgagctggtcaaacctggcgcttctgtgaagatgagctgcaaagccagcggctacgccttcagcagctactggatcaactggatgaagcagaaacccggccagggactcgaatggatcggccaaatctatcccggcgacggcgacaccaactacaacggcaagttcaagggcagagccacactgaccgccgatacctctagcagcacagcctacatgcagctgagcagcctgaccagcgaagatagcgccgtgtacttctgtgcccggtccatcacaacagtcgtgggctgcgctatggactattggggccagggaacaagcgtgaccgtgtctagtacgcgtcaagtggtggacacaacaaaagccgtcatcaccctgcaaccaccttgggtttcagtctttcaagaagagacagttaccctgcactgtgaagtcctgcacttgcccggaagcagctccacacagtggttcctcaacggcacagctacccagacaagcaccccttcctaccggatcacatctgcctccgtgaacgattccggcgagtataggtgtcagaggggcctgtctggccgcagcgatcctatccagcttgagattcatcgtggatggttgctcctccaagtgtcctccagggtgttcaccgaaggcgaacctctggcactgaggtgccatgcttggaaagataagctcgtctacaatgtcctctactaccgcaatggcaaggcttttaagttttttcattggaactctaatctcacgatcctgaaaacgaacatctcccacaatgggacataccactgctctggcatgggaaaacatcggtacacctctgccggcatctctgtcacagtcaaagaactgttccctgcaccagtcctgaacgcttccgtgacctctccactgcttgagggaaatctggtcaccctgtcctgcgaaactaagttgctgcttcagaggcccggactccagctctacttttcattctatatgggctctaagaccctgagaggccggaacaccagcagcgaatatcagattctgacagctcggcgcgaggactccgggctctattggtgtgaagctgctacagaggacggaaacgtgctgaaacggtcccctgaactggaactgcaagtcctgggccttcagctgccaactccagtgtggtttcatgtcctgttctatctggctgtggggattatgttccttgtgaataccgtgctctgggttaccattcggaaagaactcaagcgcaagaaaaaatgggatcttgagataagcctggacagcgggcatgagaagaaagtcatcagttcccttcaagaggacagacatctcgaagaggaactcaaatgtcaagaacaaaaagaagaacaactccaagagggtgtccatcggaaagagccacagggcgctacaagctctagacgggttaagttttccagatccgcagacgcacccgcttaccaacaagggcagaaccaactctacaatgaacttaatttggggcggagggaagagtacgacgttctggacaaaaggaggggacgagatcccgagatgggcggaaagcctcagcgaaggaagaatccgcaagaggggctttataacgaactccagaaagataaaatggcagaagcctatagtgagattgggatgaagggagaaaggaggaggggtaaaggtcacgatgggttgtaccaaggattgagcacagccactaaagatacctatgatgcgctccacatgcaggccctgccgccaagacgcgccaagagaagcggatctggcgtgaagcagaccctgaatttcgacctgctgaagctggctggcgacgtggaatccaacccaggccctggccatatgaccgagtacaagcccacggtgcgcctcgccacccgcgacgacgtccccagggccgtacgcaccctcgccgccgcgttcgccgactaccccgccacgcgccacaccgtcgatccggaccgccacatcgagcgggtcaccgagctgcaagaactcttcctcacgcgcgtcgggctcgacatcggcaaggtgtgggtcgcggacgacggcgccgcggtggcggtctggaccacgccggagagcgtcgaagcgggggcggtgttcgccgagatcggcccgcgcatggccgagttgagcggttcccggctggccgcgcagcaacagatggaaggcctcctggcgccgcaccggcccaaggagcccgcgtggttcctggccaccgtcggcgtctcgcccgaccaccagggcaagggtctgggcagcgccgtcgtgctccccggagtggaggcggccgagcgcgccggggtgcccgccttcctggagacctccgcgccccgcaacctccccttctacgagcggctcggcttcaccgtcaccgccgacgtcgaggtgcccgaaggaccgcgcacctggtgcatgacccgcaagcccggtgcctga

SEQ ID NO: 6252 - DNA, 4614 bp, Artificial Sequence
  Synthetic Polynucleotide
atggccttaccagtgaccgccttgctcctgccgctggccttgctgctccacgccgccaggccggcatgcgaagtgcagctgcttgaaagtggcggcggactgattcagcctggcggatctctgagactgagctgtgccgccagcggcttcaccttttctagccacgccatgacctgggtccgacaggcacctggaaaagggcttgaatgggtgtccgccatcagcggctctggcgattacacacactacgccgacagcgtgaagggcagattcaccatcagcagagacaacagcaagaacaccgtgtacctccagatgaacagcctgagagccgaggacagcgccgtgtattattgcgccaaggatgaggatggcggcagcctgcttggacacagaggacaaggcaccctggtcaccgtttcttccggtaccggcggaggcggatctggcggcggaggtagcggtggcggaggatctgaattcggatctctcgagcaggtggtggataccaccaaggccgtgattaccctccagcctccttgggtgtccgtgttccaagaggaaaccgtgacactgcactgcgaggtgctgcatctgcctggctctagcagcacccagtggtttctgaatggcaccgccacacagaccagcacacccagctacagaatcaccagcgccagcgtgaacgacagcggcgagtacagatgccagagaggactgagcggcagaagcgaccccattcagctggaaatccacagaggctggctgctgctccaggtgtccagcagagtgtttacagagggcgagcccctggctctgagatgtcacgcctggaaggacaagctggtgtacaacgtgctgtactaccggaacggcaaagccttcaagttcttccactggaacagcaacctgaccatcctcaagaccaacatcagccacaacggcacctaccactgtagcggcatgggcaagcacagatacacaagcgccggcatcagcgtgaccgtgaaagagctgtttcccgctcctgtgctgaacgcctctgtgacaagtccactgctggaaggcaaccttgtgaccctgagctgcgagacaaagctgctgctgcaaagacctggcctccagctgtacttcagcttctacatgggcagcaagaccctgcggggcagaaataccagctccgagtaccagatcctgaccgccagaagagaggacagcggcctgtattggtgcgaagccgccaccgaggatggcaatgtgctgaagagaagccccgagctggaactccaggtgctgggactgcaactgcctacacctgtgtggttccacgtgctgttttacctggccgtgggcatcatgtttctggtcaacaccgtcctgtgggtcaccatcagaaaagagctgaagcggaagaagaagtgggacctcgaaatcagcctggactccggccacgaaaagaaagtgatctccagcctgcaagaggaccggcacctggaagaggaactgaagtgccaagagcagaaagaggaacagctgcaagaaggcgtgcaccgcaaagaacctcaaggcgctacaagcactagtagagtgaagttcagcagaagcgccgacgcccctgcctaccagcagggacagaaccaactgtacaacgagctgaacctgggcagacgggaagagtacgacgtgctggacaagcggagaggcagggaccctgagatgggcggaaagccccagcggagaaagaacccccaggaaggactgtataacgaactccagaaagacaagatggccgaagcctacagcgagatcggcatgaagggcgagcggagaagaggcaagggccacgatggcctgtaccagggcctgagcaccgccaccaaggacacctatgacgccctgcacatgcaggccctgcctccaagaagggccaagcgatctggatctggagcaacaaacttctcactactcaaacaagcaggtgacgtggaggagaatcccgggcctatggactggatttggcgcatccttttccttgtcggcgctgctaccggcgcgcattccgggcccgaagtgcagctggttgaatctggcggaggactggttcaggctggcggatctctgagactgtcttgtgccgccagcggcagaacctttagcatgggctggtttagacaggcccctggcaaagagagagagttcgtcgccgccatcacatactctggcggcagcccttactacgccgactctgtgaagggcagattcaccatcagccgggacaacgccaagaacaccgtgtacctccagatgaacagcctgaagcctgaggacaccgccgtgtactactgcgccgccaatccaacatacggcagcgactggaacgccgagaattggggccagggaacccaagtgacagtgtctagcggatccggcggcggaggatctggcggaggcggatctgggggcggaggctctttcgaaggcagcacgcgtcaagtggtggacacaacaaaagccgtcatcaccctgcaaccaccttgggtttcagtctttcaagaagagacagttaccctgcactgtgaagtcctgcacttgcccggaagcagctccacacagtggttcctcaacggcacagctacccagacaagcaccccttcctaccggatcacatctgcctccgtgaacgattccggcgagtataggtgtcagaggggcctgtctggccgcagcgatcctatccagcttgagattcatcgtggatggttgctcctccaagtgtcctccagggtgttcaccgaaggcgaacctctggcactgaggtgccatgcttggaaagataagctcgtctacaatgtcctctactaccgcaatggcaaggcttttaagttttttcattggaactctaatctcacgatcctgaaaacgaacatctcccacaatgggacataccactgctctggcatgggaaaacatcggtacacctctgccggcatctctgtcacagtcaaagaactgttccctgcaccagtcctgaacgcttccgtgacctctccactgcttgagggaaatctggtcaccctgtcctgcgaaactaagttgctgcttcagaggcccggactccagctctacttttcattctatatgggctctaagaccctgagaggccggaacaccagcagcgaatatcagattctgacagctcggcgcgaggactccgggctctattggtgtgaagctgctacagaggacggaaacgtgctgaaacggtcccctgaactggaactgcaagtcctgggccttcagctgccaactccagtgtggtttcatgtcctgttctatctggctgtggggattatgttccttgtgaataccgtgctctgggttaccattcggaaagaactcaagcgcaagaaaaaatgggatcttgagataagcctggacagcgggcatgagaagaaagtcatcagttcccttcaagaggacagacatctcgaagaggaactcaaatgtcaagaacaaaaagaagaacaactccaagagggtgtccatcggaaagagccacagggcgctacaagctctagacgggttaagttttccagatccgcagacgcacccgcttaccaacaagggcagaaccaactctacaatgaacttaatttggggcggagggaagagtacgacgttctggacaaaaggaggggacgagatcccgagatgggcggaaagcctcagcgaaggaagaatccgcaagaggggctttataacgaactccagaaagataaaatggcagaagcctatagtgagattgggatgaagggagaaaggaggaggggtaaaggtcacgatgggttgtaccaaggattgagcacagccactaaagatacctatgatgcgctccacatgcaggccctgccgccaagacgcgccaagagaagcggatctggcgtgaagcagaccctgaatttcgacctgctgaagctggctggcgacgtggaatccaacccaggccctggccatatgaccgagtacaagcccacggtgcgcctcgccacccgcgacgacgtccccagggccgtacgcaccctcgccgccgcgttcgccgactaccccgccacgcgccacaccgtcgatccggaccgccacatcgagcgggtcaccgagctgcaagaactcttcctcacgcgcgtcgggctcgacatcggcaaggtgtgggtcgcggacgacggcgccgcggtggcggtctggaccacgccggagagcgtcgaagcgggggcggtgttcgccgagatcggcccgcgcatggccgagttgagcggttcccggctggccgcgcagcaacagatggaaggcctcctggcgccgcaccggcccaaggagcccgcgtggttcctggccaccgtcggcgtctcgcccgaccaccagggcaagggtctgggcagcgccgtcgtgctccccggagtggaggcggccgagcgcgccggggtgcccgccttcctggagacctccgcgccccgcaacctccccttctacgagcggctcggcttcaccgtcaccgccgacgtcgaggtgcccgaaggaccgcgcacctggtgcatgacccgcaagcccggtgcctga

SEQ ID NO: 6253 - DNA, 5061 bp, Artificial Sequence
  Synthetic Polynucleotide
atggccttaccagtgaccgccttgctcctgccgctggccttgctgctccacgccgccaggccggacatccagatgacacagagccctagcagcctgtctgccagcgtgggagacagagtgaccatcacatgcaaggccagcgaccacatcaacaactggctggcctggtatcagcagaagcctggacaggcccctaagctgctgatctacggcgctaccacactggaaacaggcgtgcccagcagattttctggcagcggctctggcaccgactacaccctgacaatatccagcctccagcctgaggacttcgccacctactactgtcagcagagctggaacaccccttggacattcggccagggcaccaagctggaaatcaagagactcgagggacagcctaaggccaatcctaccgtgacactgttccctccaagcagcgaagaactccaggccaacaaggccacacttgtgtgcctgatctccgacttctaccctggggctgtgacagtggcttggaaggccgatggatctcctgtgaaagccggcgtggaaaccaccaagccatccaagcagagcaacaacaaatacgccgccagctcctacctgagcctgacacctgagcagtggaagtcccacagatcctacagctgccaagtgacccacgaaggcagcaccgtggaaaagacagtggcccctacagagtgcagcggatcccaggtggtggataccaccaaggccgtgattaccctccagcctccttgggtgtccgtgttccaagaggaaaccgtgacactgcactgcgaggtgctgcatctgcctggctctagcagcacccagtggtttctgaatggcaccgccacacagaccagcacacccagctacagaatcaccagcgccagcgtgaacgacagcggcgagtacagatgccagagaggactgagcggcagaagcgaccccattcagctggaaatccacagaggctggctgctgctccaggtgtccagcagagtgtttacagagggcgagcccctggctctgagatgtcacgcctggaaggacaagctggtgtacaacgtgctgtactaccggaacggcaaagccttcaagttcttccactggaacagcaacctgaccatcctcaagaccaacatcagccacaacggcacctaccactgtagcggcatgggcaagcacagatacacaagcgccggcatcagcgtgaccgtgaaagagctgtttcccgctcctgtgctgaacgcctctgtgacaagtccactgctggaaggcaaccttgtgaccctgagctgcgagacaaagctgctgctgcaaagacctggcctccagctgtacttcagcttctacatgggcagcaagaccctgcggggcagaaataccagctccgagtaccagatcctgaccgccagaagagaggacagcggcctgtattggtgcgaagccgccaccgaggatggcaatgtgctgaagagaagccccgagctggaactccaggtgctgggactgcaactgcctacacctgtgtggttccacgtgctgttttacctggccgtgggcatcatgtttctggtcaacaccgtcctgtgggtcaccatcagaaaagagctgaagcggaagaagaagtgggacctcgaaatcagcctggactccggccacgaaaagaaagtgatctccagcctgcaagaggaccggcacctggaagaggaactgaagtgccaagagcagaaagaggaacagctgcaagaaggcgtgcaccgcaaagaacctcaaggcgctacaagcactagtagagtgaagttcagcagaagcgccgacgcccctgcctaccagcagggacagaaccaactgtacaacgagctgaacctgggcagacgggaagagtacgacgtgctggacaagcggagaggcagggaccctgagatgggcggaaagccccagcggagaaagaacccccaggaaggactgtataacgaactccagaaagacaagatggccgaagcctacagcgagatcggcatgaagggcgagcggagaagaggcaagggccacgatggcctgtaccagggcctgagcaccgccaccaaggacacctatgacgccctgcacatgcaggccctgcctccaagaagggccaagcgatctggatctggagcaacaaacttctcactactcaaacaagcaggtgacgtggaggagaatcccgggcctatggactggatttggcgcatccttttccttgtcggcgctgctaccggcgcgcattccttcgaacaagttcagcttcaacagcctggcgctgagctggtcaaacctggcgcttctgtgaagatgagctgcaaagccagcggctacgccttcagcagctactggatcaactggatgaagcagaaacccggccagggactcgaatggatcggccaaatctatcccggcgacggcgacaccaactacaacggcaagttcaagggcagagccacactgaccgccgatacctctagcagcacagcctacatgcagctgagcagcctgaccagcgaagatagcgccgtgtacttctgtgcccggtccatcacaacagtcgtgggctgcgctatggactattggggccagggaacaagcgtgaccgtgtctagtacgcgtgcctctacaaagggaccctccgtgtttcctctggctcccagcagcaagtctacaagcggaggaacagccgctctgggctgcctggtcaaggattactttcccgagcctgtgaccgtgtcctggaatagcggagcactgacaagcggcgtgcacacctttccagccgtgctgcaaagcagcggcctgtactctctgagcagcgtggtcacagtgcctagctctagcctgggcacccagacctacatctgcaatgtgaaccacaagcctagcaacaccaaggtggacaagagagtggaacccaagagctgtggtacccaagtggtggacacaacaaaagccgtcatcaccctgcaaccaccttgggtttcagtctttcaagaagagacagttaccctgcactgtgaagtcctgcacttgcccggaagcagctccacacagtggttcctcaacggcacagctacccagacaagcaccccttcctaccggatcacatctgcctccgtgaacgattccggcgagtataggtgtcagaggggcctgtctggccgcagcgatcctatccagcttgagattcatcgtggatggttgctcctccaagtgtcctccagggtgttcaccgaaggcgaacctctggcactgaggtgccatgcttggaaagataagctcgtctacaatgtcctctactaccgcaatggcaaggcttttaagttttttcattggaactctaatctcacgatcctgaaaacgaacatctcccacaatgggacataccactgctctggcatgggaaaacatcggtacacctctgccggcatctctgtcacagtcaaagaactgttccctgcaccagtcctgaacgcttccgtgacctctccactgcttgagggaaatctggtcaccctgtcctgcgaaactaagttgctgcttcagaggcccggactccagctctacttttcattctatatgggctctaagaccctgagaggccggaacaccagcagcgaatatcagattctgacagctcggcgcgaggactccgggctctattggtgtgaagctgctacagaggacggaaacgtgctgaaacggtcccctgaactggaactgcaagtcctgggccttcagctgccaactccagtgtggtttcatgtcctgttctatctggctgtggggattatgttccttgtgaataccgtgctctgggttaccattcggaaagaactcaagcgcaagaaaaaatgggatcttgagataagcctggacagcgggcatgagaagaaagtcatcagttcccttcaagaggacagacatctcgaagaggaactcaaatgtcaagaacaaaaagaagaacaactccaagagggtgtccatcggaaagagccacagggcgctacaagctctagacgggttaagttttccagatccgcagacgcacccgcttaccaacaagggcagaaccaactctacaatgaacttaatttggggcggagggaagagtacgacgttctggacaaaaggaggggacgagatcccgagatgggcggaaagcctcagcgaaggaagaatccgcaagaggggctttataacgaactccagaaagataaaatggcagaagcctatagtgagattgggatgaagggagaaaggaggaggggtaaaggtcacgatgggttgtaccaaggattgagcacagccactaaagatacctatgatgcgctccacatgcaggccctgccgccaagacgcgccaagagaagcggatctggcgtgaagcagaccctgaatttcgacctgctgaagctggctggcgacgtggaatccaacccaggccctggccatatggctacctacgaggtgctgtgcgaggtggcaagaaagctgggcaccgacgacagagaagtggtgctgttcctgctgaacgtgttcatccctcagcctacactggcccagctgatcggtgcactgagagccctgaaagaggaaggccggctgacctttcctctgctggccgaatgcctgttcagagccggaagaagggatctgctgcgggacctgctgcatctggaccccagatttctggaaagacacctggccggcaccatgagctacttcagcccttaccagctgaccgtgctgcacgttgacggcgaactgtgcgccagagatattcggagcctgatcttcctgagcaaggacaccatcggcagccggtctacccctcagacatttctgcactgggtgtactgcatggaaaacctggacctgctcggccccacagatgtggatgccctgatgtccatgctgagaagcctgagcagagtggacctccagagacaggtgcagacactgatgggactgcacctgagcggacctagccacagccagcactacagacacacccct

SEQ ID NO: 6254 - DNA, 5220 bp, Artificial Sequence
  Synthetic Polynucleotide
atggccttaccagtgaccgccttgctcctgccgctggccttgctgctccacgccgccaggccggacatccagatgacacagagccctagcagcctgtctgccagcgtgggagacagagtgaccatcacatgcaaggccagcgaccacatcaacaactggctggcctggtatcagcagaagcctggacaggcccctaagctgctgatctacggcgctaccacactggaaacaggcgtgcccagcagattttctggcagcggctctggcaccgactacaccctgacaatatccagcctccagcctgaggacttcgccacctactactgtcagcagagctggaacaccccttggacattcggccagggcaccaagctggaaatcaagagactcgagggacagcctaaggccaatcctaccgtgacactgttccctccaagcagcgaagaactccaggccaacaaggccacacttgtgtgcctgatctccgacttctaccctggggctgtgacagtggcttggaaggccgatggatctcctgtgaaagccggcgtggaaaccaccaagccatccaagcagagcaacaacaaatacgccgccagctcctacctgagcctgacacctgagcagtggaagtcccacagatcctacagctgccaagtgacccacgaaggcagcaccgtggaaaagacagtggcccctacagagtgcagcggatcccaggtggtggataccaccaaggccgtgattaccctccagcctccttgggtgtccgtgttccaagaggaaaccgtgacactgcactgcgaggtgctgcatctgcctggctctagcagcacccagtggtttctgaatggcaccgccacacagaccagcacacccagctacagaatcaccagcgccagcgtgaacgacagcggcgagtacagatgccagagaggactgagcggcagaagcgaccccattcagctggaaatccacagaggctggctgctgctccaggtgtccagcagagtgtttacagagggcgagcccctggctctgagatgtcacgcctggaaggacaagctggtgtacaacgtgctgtactaccggaacggcaaagccttcaagttcttccactggaacagcaacctgaccatcctcaagaccaacatcagccacaacggcacctaccactgtagcggcatgggcaagcacagatacacaagcgccggcatcagcgtgaccgtgaaagagctgtttcccgctcctgtgctgaacgcctctgtgacaagtccactgctggaaggcaaccttgtgaccctgagctgcgagacaaagctgctgctgcaaagacctggcctccagctgtacttcagcttctacatgggcagcaagaccctgcggggcagaaataccagctccgagtaccagatcctgaccgccagaagagaggacagcggcctgtattggtgcgaagccgccaccgaggatggcaatgtgctgaagagaagccccgagctggaactccaggtgctgggactgcaactgcctacacctgtgtggttccacgtgctgttttacctggccgtgggcatcatgtttctggtcaacaccgtcctgtgggtcaccatcagaaaagagctgaagcggaagaagaagtgggacctcgaaatcagcctggactccggccacgaaaagaaagtgatctccagcctgcaagaggaccggcacctggaagaggaactgaagtgccaagagcagaaagaggaacagctgcaagaaggcgtgcaccgcaaagaacctcaaggcgctacaagcactagtagagtgaagttcagcagaagcgccgacgcccctgcctaccagcagggacagaaccaactgtacaacgagctgaacctgggcagacgggaagagtacgacgtgctggacaagcggagaggcagggaccctgagatgggcggaaagccccagcggagaaagaacccccaggaaggactgtataacgaactccagaaagacaagatggccgaagcctacagcgagatcggcatgaagggcgagcggagaagaggcaagggccacgatggcctgtaccagggcctgagcaccgccaccaaggacacctatgacgccctgcacatgcaggccctgcctccaagaagggccaagcgatctggatctggagcaacaaacttctcactactcaaacaagcaggtgacgtggaggagaatcccgggcctatggactggatttggcgcatccttttccttgtcggcgctgctaccggcgcgcattccttcgaacaagttcagcttcaacagcctggcgctgagctggtcaaacctggcgcttctgtgaagatgagctgcaaagccagcggctacgccttcagcagctactggatcaactggatgaagcagaaacccggccagggactcgaatggatcggccaaatctatcccggcgacggcgacaccaactacaacggcaagttcaagggcagagccacactgaccgccgatacctctagcagcacagcctacatgcagctgagcagcctgaccagcgaagatagcgccgtgtacttctgtgcccggtccatcacaacagtcgtgggctgcgctatggactattggggccagggaacaagcgtgaccgtgtctagtacgcgtgcctctacaaagggaccctccgtgtttcctctggctcccagcagcaagtctacaagcggaggaacagccgctctgggctgcctggtcaaggattactttcccgagcctgtgaccgtgtcctggaatagcggagcactgacaagcggcgtgcacacctttccagccgtgctgcaaagcagcggcctgtactctctgagcagcgtggtcacagtgcctagctctagcctgggcacccagacctacatctgcaatgtgaaccacaagcctagcaacaccaaggtggacaagagagtggaacccaagagctgtggtacccaagtggtggacacaacaaaagccgtcatcaccctgcaaccaccttgggtttcagtctttcaagaagagacagttaccctgcactgtgaagtcctgcacttgcccggaagcagctccacacagtggttcctcaacggcacagctacccagacaagcaccccttcctaccggatcacatctgcctccgtgaacgattccggcgagtataggtgtcagaggggcctgtctggccgcagcgatcctatccagcttgagattcatcgtggatggttgctcctccaagtgtcctccagggtgttcaccgaaggcgaacctctggcactgaggtgccatgcttggaaagataagctcgtctacaatgtcctctactaccgcaatggcaaggcttttaagttttttcattggaactctaatctcacgatcctgaaaacgaacatctcccacaatgggacataccactgctctggcatgggaaaacatcggtacacctctgccggcatctctgtcacagtcaaagaactgttccctgcaccagtcctgaacgcttccgtgacctctccactgcttgagggaaatctggtcaccctgtcctgcgaaactaagttgctgcttcagaggcccggactccagctctacttttcattctatatgggctctaagaccctgagaggccggaacaccagcagcgaatatcagattctgacagctcggcgcgaggactccgggctctattggtgtgaagctgctacagaggacggaaacgtgctgaaacggtcccctgaactggaactgcaagtcctgggccttcagctgccaactccagtgtggtttcatgtcctgttctatctggctgtggggattatgttccttgtgaataccgtgctctgggttaccattcggaaagaactcaagcgcaagaaaaaatgggatcttgagataagcctggacagcgggcatgagaagaaagtcatcagttcccttcaagaggacagacatctcgaagaggaactcaaatgtcaagaacaaaaagaagaacaactccaagagggtgtccatcggaaagagccacagggcgctacaagctctagacgggttaagttttccagatccgcagacgcacccgcttaccaacaagggcagaaccaactctacaatgaacttaatttggggcggagggaagagtacgacgttctggacaaaaggaggggacgagatcccgagatgggcggaaagcctcagcgaaggaagaatccgcaagaggggctttataacgaactccagaaagataaaatggcagaagcctatagtgagattgggatgaagggagaaaggaggaggggtaaaggtcacgatgggttgtaccaaggattgagcacagccactaaagatacctatgatgcgctccacatgcaggccctgccgccaagacgcgccaagagaagcggatctggcgtgaagcagaccctgaatttcgacctgctgaagctggctggcgacgtggaatccaacccaggccctggccatatgtccgactccaaggaggtccctagccttccatttttgcgacacttgctcgaagagttggacagccatgaggacagcttgctgctgtttctgtgtcacgacgcggccccgggctgcacgacggtcacgcaagctttgtgctcgcttagccaacagcgcaagctgaccctcgcggctctggtcgagatgctctacgtgctgcagcgtatggatcttctcaagagccgcttcgggctcagcaaggagggggccgagcaattgctgggcacaagctttctcacgcgctaccgcaagctcatggtttgcgtgggtgaggagctcgactcgagcgagctacgcgctctacgcttgttcgcgtgcaacctgaatccgagcctgagcacggcgctttctgagagcagccgctttgtcgagcttgtactcgcgcttgaaaacgtaggactcgtctcgccatcgagtgtttccgtgcttgcggacatgttgcgcactcttcggcgcctcgatttgtgccagcagcttgttgagtacgaacaacaagagcaagccaggtaccgttactgttacgcggcctcgccctcattgccagttcgtacgttacgtcgggggcacggcgcgagtgaacacgagcagctgtgcatgcccgtgcaagaatcctctgacagccccgagctgctgcgcacgcccgtacaagaatcctccagcgacagccccgagcaaacgact

SEQ ID NO: 6255 - DNA, 5097 bp, Artificial Sequence
  Synthetic Polynucleotide
atggccttaccagtgaccgccttgctcctgccgctggccttgctgctccacgccgccaggccggacatccagatgacacagagccctagcagcctgtctgccagcgtgggagacagagtgaccatcacatgcaaggccagcgaccacatcaacaactggctggcctggtatcagcagaagcctggacaggcccctaagctgctgatctacggcgctaccacactggaaacaggcgtgcccagcagattttctggcagcggctctggcaccgactacaccctgacaatatccagcctccagcctgaggacttcgccacctactactgtcagcagagctggaacaccccttggacattcggccagggcaccaagctggaaatcaagagactcgagggacagcctaaggccaatcctaccgtgacactgttccctccaagcagcgaagaactccaggccaacaaggccacacttgtgtgcctgatctccgacttctaccctggggctgtgacagtggcttggaaggccgatggatctcctgtgaaagccggcgtggaaaccaccaagccatccaagcagagcaacaacaaatacgccgccagctcctacctgagcctgacacctgagcagtggaagtcccacagatcctacagctgccaagtgacccacgaaggcagcaccgtggaaaagacagtggcccctacagagtgcagcggatcccaggtggtggataccaccaaggccgtgattaccctccagcctccttgggtgtccgtgttccaagaggaaaccgtgacactgcactgcgaggtgctgcatctgcctggctctagcagcacccagtggtttctgaatggcaccgccacacagaccagcacacccagctacagaatcaccagcgccagcgtgaacgacagcggcgagtacagatgccagagaggactgagcggcagaagcgaccccattcagctggaaatccacagaggctggctgctgctccaggtgtccagcagagtgtttacagagggcgagcccctggctctgagatgtcacgcctggaaggacaagctggtgtacaacgtgctgtactaccggaacggcaaagccttcaagttcttccactggaacagcaacctgaccatcctcaagaccaacatcagccacaacggcacctaccactgtagcggcatgggcaagcacagatacacaagcgccggcatcagcgtgaccgtgaaagagctgtttcccgctcctgtgctgaacgcctctgtgacaagtccactgctggaaggcaaccttgtgaccctgagctgcgagacaaagctgctgctgcaaagacctggcctccagctgtacttcagcttctacatgggcagcaagaccctgcggggcagaaataccagctccgagtaccagatcctgaccgccagaagagaggacagcggcctgtattggtgcgaagccgccaccgaggatggcaatgtgctgaagagaagccccgagctggaactccaggtgctgggactgcaactgcctacacctgtgtggttccacgtgctgttttacctggccgtgggcatcatgtttctggtcaacaccgtcctgtgggtcaccatcagaaaagagctgaagcggaagaagaagtgggacctcgaaatcagcctggactccggccacgaaaagaaagtgatctccagcctgcaagaggaccggcacctggaagaggaactgaagtgccaagagcagaaagaggaacagctgcaagaaggcgtgcaccgcaaagaacctcaaggcgctacaagcactagtagagtgaagttcagcagaagcgccgacgcccctgcctaccagcagggacagaaccaactgtacaacgagctgaacctgggcagacgggaagagtacgacgtgctggacaagcggagaggcagggaccctgagatgggcggaaagccccagcggagaaagaacccccaggaaggactgtataacgaactccagaaagacaagatggccgaagcctacagcgagatcggcatgaagggcgagcggagaagaggcaagggccacgatggcctgtaccagggcctgagcaccgccaccaaggacacctatgacgccctgcacatgcaggccctgcctccaagaagggccaagcgatctggatctggagcaacaaacttctcactactcaaacaagcaggtgacgtggaggagaatcccgggcctatggactggatttggcgcatccttttccttgtcggcgctgctaccggcgcgcattccttcgaacaagttcagcttcaacagcctggcgctgagctggtcaaacctggcgcttctgtgaagatgagctgcaaagccagcggctacgccttcagcagctactggatcaactggatgaagcagaaacccggccagggactcgaatggatcggccaaatctatcccggcgacggcgacaccaactacaacggcaagttcaagggcagagccacactgaccgccgatacctctagcagcacagcctacatgcagctgagcagcctgaccagcgaagatagcgccgtgtacttctgtgcccggtccatcacaacagtcgtgggctgcgctatggactattggggccagggaacaagcgtgaccgtgtctagtacgcgtgcctctacaaagggaccctccgtgtttcctctggctcccagcagcaagtctacaagcggaggaacagccgctctgggctgcctggtcaaggattactttcccgagcctgtgaccgtgtcctggaatagcggagcactgacaagcggcgtgcacacctttccagccgtgctgcaaagcagcggcctgtactctctgagcagcgtggtcacagtgcctagctctagcctgggcacccagacctacatctgcaatgtgaaccacaagcctagcaacaccaaggtggacaagagagtggaacccaagagctgtggtacccaagtggtggacacaacaaaagccgtcatcaccctgcaaccaccttgggtttcagtctttcaagaagagacagttaccctgcactgtgaagtcctgcacttgcccggaagcagctccacacagtggttcctcaacggcacagctacccagacaagcaccccttcctaccggatcacatctgcctccgtgaacgattccggcgagtataggtgtcagaggggcctgtctggccgcagcgatcctatccagcttgagattcatcgtggatggttgctcctccaagtgtcctccagggtgttcaccgaaggcgaacctctggcactgaggtgccatgcttggaaagataagctcgtctacaatgtcctctactaccgcaatggcaaggcttttaagttttttcattggaactctaatctcacgatcctgaaaacgaacatctcccacaatgggacataccactgctctggcatgggaaaacatcggtacacctctgccggcatctctgtcacagtcaaagaactgttccctgcaccagtcctgaacgcttccgtgacctctccactgcttgagggaaatctggtcaccctgtcctgcgaaactaagttgctgcttcagaggcccggactccagctctacttttcattctatatgggctctaagaccctgagaggccggaacaccagcagcgaatatcagattctgacagctcggcgcgaggactccgggctctattggtgtgaagctgctacagaggacggaaacgtgctgaaacggtcccctgaactggaactgcaagtcctgggccttcagctgccaactccagtgtggtttcatgtcctgttctatctggctgtggggattatgttccttgtgaataccgtgctctgggttaccattcggaaagaactcaagcgcaagaaaaaatgggatcttgagataagcctggacagcgggcatgagaagaaagtcatcagttcccttcaagaggacagacatctcgaagaggaactcaaatgtcaagaacaaaaagaagaacaactccaagagggtgtccatcggaaagagccacagggcgctacaagctctagacgggttaagttttccagatccgcagacgcacccgcttaccaacaagggcagaaccaactctacaatgaacttaatttggggcggagggaagagtacgacgttctggacaaaaggaggggacgagatcccgagatgggcggaaagcctcagcgaaggaagaatccgcaagaggggctttataacgaactccagaaagataaaatggcagaagcctatagtgagattgggatgaagggagaaaggaggaggggtaaaggtcacgatgggttgtaccaaggattgagcacagccactaaagatacctatgatgcgctccacatgcaggccctgccgccaagacgcgccaagagaagcggatctggcgtgaagcagaccctgaatttcgacctgctgaagctggctggcgacgtggaatccaacccaggccctggccatatgaccgagtacaagcccacggtgcgcctcgccacccgcgacgacgtccccagggccgtacgcaccctcgccgccgcgttcgccgactaccccgccacgcgccacaccgtcgatccggaccgccacatcgagcgggtcaccgagctgcaagaactcttcctcacgcgcgtcgggctcgacatcggcaaggtgtgggtcgcggacgacggcgccgcggtggcggtctggaccacgccggagagcgtcgaagcgggggcggtgttcgccgagatcggcccgcgcatggccgagttgagcggttcccggctggccgcgcagcaacagatggaaggcctcctggcgccgcaccggcccaaggagcccgcgtggttcctggccaccgtcggcgtctcgcccgaccaccagggcaagggtctgggcagcgccgtcgtgctccccggagtggaggcggccgagcgcgccggggtgcccgccttcctggagacctccgcgccccgcaacctccccttctacgagcggctcggcttcaccgtcaccgccgacgtcgaggtgcccgaaggaccgcgcacctggtgcatgacccgcaagcccggtgcctga

SEQ ID NO: 6256 - DNA, 5508 bp, Artificial Sequence
  Synthetic Polynucleotide
atggccttaccagtgaccgccttgctcctgccgctggccttgctgctccacgccgccaggccggaagtgcagctggttgaatctggcggaggactggttcaggctggcggatctctgagactgtcttgtgccgccagcggcagaacctttagcatgggctggtttagacaggcccctggcaaagagagagagttcgtcgccgccatcacatactctggcggcagcccttactacgccgactctgtgaagggcagattcaccatcagccgggacaacgccaagaacaccgtgtacctccagatgaacagcctgaagcctgaggacaccgccgtgtactactgcgccgccaatccaacatacggcagcgactggaacgccgagaattggggccagggaacccaagtgacagtgtctagcggtaccggcggaggcggatctggcggcggaggtagcggtggcggaggatctgaattcgacatccagatgacacagagccctagcagcctgtctgccagcgtgggagacagagtgaccatcacatgcaaggccagcgaccacatcaacaactggctggcctggtatcagcagaagcctggacaggcccctaagctgctgatctacggcgctaccacactggaaacaggcgtgcccagcagattttctggcagcggctctggcaccgactacaccctgacaatatccagcctccagcctgaggacttcgccacctactactgtcagcagagctggaacaccccttggacattcggccagggcaccaagctggaaatcaagagactcgagggacagcctaaggccaatcctaccgtgacactgttccctccaagcagcgaagaactccaggccaacaaggccacacttgtgtgcctgatctccgacttctaccctggggctgtgacagtggcttggaaggccgatggatctcctgtgaaagccggcgtggaaaccaccaagccatccaagcagagcaacaacaaatacgccgccagctcctacctgagcctgacacctgagcagtggaagtcccacagatcctacagctgccaagtgacccacgaaggcagcaccgtggaaaagacagtggcccctacagagtgcagcggatcccaggtggtggataccaccaaggccgtgattaccctccagcctccttgggtgtccgtgttccaagaggaaaccgtgacactgcactgcgaggtgctgcatctgcctggctctagcagcacccagtggtttctgaatggcaccgccacacagaccagcacacccagctacagaatcaccagcgccagcgtgaacgacagcggcgagtacagatgccagagaggactgagcggcagaagcgaccccattcagctggaaatccacagaggctggctgctgctccaggtgtccagcagagtgtttacagagggcgagcccctggctctgagatgtcacgcctggaaggacaagctggtgtacaacgtgctgtactaccggaacggcaaagccttcaagttcttccactggaacagcaacctgaccatcctcaagaccaacatcagccacaacggcacctaccactgtagcggcatgggcaagcacagatacacaagcgccggcatcagcgtgaccgtgaaagagctgtttcccgctcctgtgctgaacgcctctgtgacaagtccactgctggaaggcaaccttgtgaccctgagctgcgagacaaagctgctgctgcaaagacctggcctccagctgtacttcagcttctacatgggcagcaagaccctgcggggcagaaataccagctccgagtaccagatcctgaccgccagaagagaggacagcggcctgtattggtgcgaagccgccaccgaggatggcaatgtgctgaagagaagccccgagctggaactccaggtgctgggactgcaactgcctacacctgtgtggttccacgtgctgttttacctggccgtgggcatcatgtttctggtcaacaccgtcctgtgggtcaccatcagaaaagagctgaagcggaagaagaagtgggacctcgaaatcagcctggactccggccacgaaaagaaagtgatctccagcctgcaagaggaccggcacctggaagaggaactgaagtgccaagagcagaaagaggaacagctgcaagaaggcgtgcaccgcaaagaacctcaaggcgctacaagcactagtagagtgaagttcagcagaagcgccgacgcccctgcctaccagcagggacagaaccaactgtacaacgagctgaacctgggcagacgggaagagtacgacgtgctggacaagcggagaggcagggaccctgagatgggcggaaagccccagcggagaaagaacccccaggaaggactgtataacgaactccagaaagacaagatggccgaagcctacagcgagatcggcatgaagggcgagcggagaagaggcaagggccacgatggcctgtaccagggcctgagcaccgccaccaaggacacctatgacgccctgcacatgcaggccctgcctccaagaagggccaagcgatctggatctggagcaacaaacttctcactactcaaacaagcaggtgacgtggaggagaatcccgggcctatggactggatttggcgcatccttttccttgtcggcgctgctaccggcgcgcattccttcgaacaagttcagcttcaacagcctggcgctgagctggtcaaacctggcgcttctgtgaagatgagctgcaaagccagcggctacgccttcagcagctactggatcaactggatgaagcagaaacccggccagggactcgaatggatcggccaaatctatcccggcgacggcgacaccaactacaacggcaagttcaagggcagagccacactgaccgccgatacctctagcagcacagcctacatgcagctgagcagcctgaccagcgaagatagcgccgtgtacttctgtgcccggtccatcacaacagtcgtgggctgcgctatggactattggggccagggaacaagcgtgaccgtgtctagtacgcgtgcctctacaaagggaccctccgtgtttcctctggctcccagcagcaagtctacaagcggaggaacagccgctctgggctgcctggtcaaggattactttcccgagcctgtgaccgtgtcctggaatagcggagcactgacaagcggcgtgcacacctttccagccgtgctgcaaagcagcggcctgtactctctgagcagcgtggtcacagtgcctagctctagcctgggcacccagacctacatctgcaatgtgaaccacaagcctagcaacaccaaggtggacaagagagtggaacccaagagctgtggtacccaagtggtggacacaacaaaagccgtcatcaccctgcaaccaccttgggtttcagtctttcaagaagagacagttaccctgcactgtgaagtcctgcacttgcccggaagcagctccacacagtggttcctcaacggcacagctacccagacaagcaccccttcctaccggatcacatctgcctccgtgaacgattccggcgagtataggtgtcagaggggcctgtctggccgcagcgatcctatccagcttgagattcatcgtggatggttgctcctccaagtgtcctccagggtgttcaccgaaggcgaacctctggcactgaggtgccatgcttggaaagataagctcgtctacaatgtcctctactaccgcaatggcaaggcttttaagttttttcattggaactctaatctcacgatcctgaaaacgaacatctcccacaatgggacataccactgctctggcatgggaaaacatcggtacacctctgccggcatctctgtcacagtcaaagaactgttccctgcaccagtcctgaacgcttccgtgacctctccactgcttgagggaaatctggtcaccctgtcctgcgaaactaagttgctgcttcagaggcccggactccagctctacttttcattctatatgggctctaagaccctgagaggccggaacaccagcagcgaatatcagattctgacagctcggcgcgaggactccgggctctattggtgtgaagctgctacagaggacggaaacgtgctgaaacggtcccctgaactggaactgcaagtcctgggccttcagctgccaactccagtgtggtttcatgtcctgttctatctggctgtggggattatgttccttgtgaataccgtgctctgggttaccattcggaaagaactcaagcgcaagaaaaaatgggatcttgagataagcctggacagcgggcatgagaagaaagtcatcagttcccttcaagaggacagacatctcgaagaggaactcaaatgtcaagaacaaaaagaagaacaactccaagagggtgtccatcggaaagagccacagggcgctacaagctctagacgggttaagttttccagatccgcagacgcacccgcttaccaacaagggcagaaccaactctacaatgaacttaatttggggcggagggaagagtacgacgttctggacaaaaggaggggacgagatcccgagatgggcggaaagcctcagcgaaggaagaatccgcaagaggggctttataacgaactccagaaagataaaatggcagaagcctatagtgagattgggatgaagggagaaaggaggaggggtaaaggtcacgatgggttgtaccaaggattgagcacagccactaaagatacctatgatgcgctccacatgcaggccctgccgccaagacgcgccaagagaagcggatctggcgtgaagcagaccctgaatttcgacctgctgaagctggctggcgacgtggaatccaacccaggccctggccatatgaccgagtacaagcccacggtgcgcctcgccacccgcgacgacgtccccagggccgtacgcaccctcgccgccgcgttcgccgactaccccgccacgcgccacaccgtcgatccggaccgccacatcgagcgggtcaccgagctgcaagaactcttcctcacgcgcgtcgggctcgacatcggcaaggtgtgggtcgcggacgacggcgccgcggtggcggtctggaccacgccggagagcgtcgaagcgggggcggtgttcgccgagatcggcccgcgcatggccgagttgagcggttcccggctggccgcgcagcaacagatggaaggcctcctggcgccgcaccggcccaaggagcccgcgtggttcctggccaccgtcggcgtctcgcccgaccaccagggcaagggtctgggcagcgccgtcgtgctccccggagtggaggcggccgagcgcgccggggtgcccgccttcctggagacctccgcgccccgcaacctccccttctacgagcggctcggcttcaccgtcaccgccgacgtcgaggtgcccgaaggaccgcgcacctggtgcatgacccgcaagcccggtgcctga

SEQ ID NO: 6257 - DNA, 5919 bp, Artificial Sequence
  Synthetic Polynucleotide
atggccttaccagtgaccgccttgctcctgccgctggccttgctgctccacgccgccaggccggaagtgcagctggttgaatctggcggaggactggttcaggctggcggatctctgagactgtcttgtgccgccagcggcagaacctttagcatgggctggtttagacaggcccctggcaaagagagagagttcgtcgccgccatcacatactctggcggcagcccttactacgccgactctgtgaagggcagattcaccatcagccgggacaacgccaagaacaccgtgtacctccagatgaacagcctgaagcctgaggacaccgccgtgtactactgcgccgccaatccaacatacggcagcgactggaacgccgagaattggggccagggaacccaagtgacagtgtctagcggtaccggcggaggcggatctggcggcggaggtagcggtggcggaggatctgaattcgacatccagatgacacagagccctagcagcctgtctgccagcgtgggagacagagtgaccatcacatgcaaggccagcgaccacatcaacaactggctggcctggtatcagcagaagcctggacaggcccctaagctgctgatctacggcgctaccacactggaaacaggcgtgcccagcagattttctggcagcggctctggcaccgactacaccctgacaatatccagcctccagcctgaggacttcgccacctactactgtcagcagagctggaacaccccttggacattcggccagggcaccaagctggaaatcaagagactcgagggacagcctaaggccaatcctaccgtgacactgttccctccaagcagcgaagaactccaggccaacaaggccacacttgtgtgcctgatctccgacttctaccctggggctgtgacagtggcttggaaggccgatggatctcctgtgaaagccggcgtggaaaccaccaagccatccaagcagagcaacaacaaatacgccgccagctcctacctgagcctgacacctgagcagtggaagtcccacagatcctacagctgccaagtgacccacgaaggcagcaccgtggaaaagacagtggcccctacagagtgcagcggatcccaggtggtggataccaccaaggccgtgattaccctccagcctccttgggtgtccgtgttccaagaggaaaccgtgacactgcactgcgaggtgctgcatctgcctggctctagcagcacccagtggtttctgaatggcaccgccacacagaccagcacacccagctacagaatcaccagcgccagcgtgaacgacagcggcgagtacagatgccagagaggactgagcggcagaagcgaccccattcagctggaaatccacagaggctggctgctgctccaggtgtccagcagagtgtttacagagggcgagcccctggctctgagatgtcacgcctggaaggacaagctggtgtacaacgtgctgtactaccggaacggcaaagccttcaagttcttccactggaacagcaacctgaccatcctcaagaccaacatcagccacaacggcacctaccactgtagcggcatgggcaagcacagatacacaagcgccggcatcagcgtgaccgtgaaagagctgtttcccgctcctgtgctgaacgcctctgtgacaagtccactgctggaaggcaaccttgtgaccctgagctgcgagacaaagctgctgctgcaaagacctggcctccagctgtacttcagcttctacatgggcagcaagaccctgcggggcagaaataccagctccgagtaccagatcctgaccgccagaagagaggacagcggcctgtattggtgcgaagccgccaccgaggatggcaatgtgctgaagagaagccccgagctggaactccaggtgctgggactgcaactgcctacacctgtgtggttccacgtgctgttttacctggccgtgggcatcatgtttctggtcaacaccgtcctgtgggtcaccatcagaaaagagctgaagcggaagaagaagtgggacctcgaaatcagcctggactccggccacgaaaagaaagtgatctccagcctgcaagaggaccggcacctggaagaggaactgaagtgccaagagcagaaagaggaacagctgcaagaaggcgtgcaccgcaaagaacctcaaggcgctacaagcactagtagagtgaagttcagcagaagcgccgacgcccctgcctaccagcagggacagaaccaactgtacaacgagctgaacctgggcagacgggaagagtacgacgtgctggacaagcggagaggcagggaccctgagatgggcggaaagccccagcggagaaagaacccccaggaaggactgtataacgaactccagaaagacaagatggccgaagcctacagcgagatcggcatgaagggcgagcggagaagaggcaagggccacgatggcctgtaccagggcctgagcaccgccaccaaggacacctatgacgccctgcacatgcaggccctgcctccaagaagggccaagcgatctggatctggagcaacaaacttctcactactcaaacaagcaggtgacgtggaggagaatcccgggcctatggactggatttggcgcatccttttccttgtcggcgctgctaccggcgcgcattccgggcccgaagtgcaactggttgaatccggtggcggcctggtgcaagcaggcggatctctcagacttagctgtgccgcctccggcagaaccttcacaatgggatggtttaggcaggctccagggaaagagagagagttcgtcgccgccatctctctgtctcccacactggcctactacgccgactctgtgaaaggccggttcaccatctccagagataatgccaagaacaccgtggtgctgcaaatgaactctctgaaacccgaggatacagccctgtactattgtgccgctgaccggaagtccgtgatgagcatcagacccgattactggggacagggcacacaagtcacagtgtcctctggatccggcggcggaggatctggcggaggcggatctgggggcggaggctctttcgaacaagttcagcttcaacagcctggcgctgagctggtcaaacctggcgcttctgtgaagatgagctgcaaagccagcggctacgccttcagcagctactggatcaactggatgaagcagaaacccggccagggactcgaatggatcggccaaatctatcccggcgacggcgacaccaactacaacggcaagttcaagggcagagccacactgaccgccgatacctctagcagcacagcctacatgcagctgagcagcctgaccagcgaagatagcgccgtgtacttctgtgcccggtccatcacaacagtcgtgggctgcgctatggactattggggccagggaacaagcgtgaccgtgtctagtacgcgtgcctctacaaagggaccctccgtgtttcctctggctcccagcagcaagtctacaagcggaggaacagccgctctgggctgcctggtcaaggattactttcccgagcctgtgaccgtgtcctggaatagcggagcactgacaagcggcgtgcacacctttccagccgtgctgcaaagcagcggcctgtactctctgagcagcgtggtcacagtgcctagctctagcctgggcacccagacctacatctgcaatgtgaaccacaagcctagcaacaccaaggtggacaagagagtggaacccaagagctgtggtacccaagtggtggacacaacaaaagccgtcatcaccctgcaaccaccttgggtttcagtctttcaagaagagacagttaccctgcactgtgaagtcctgcacttgcccggaagcagctccacacagtggttcctcaacggcacagctacccagacaagcaccccttcctaccggatcacatctgcctccgtgaacgattccggcgagtataggtgtcagaggggcctgtctggccgcagcgatcctatccagcttgagattcatcgtggatggttgctcctccaagtgtcctccagggtgttcaccgaaggcgaacctctggcactgaggtgccatgcttggaaagataagctcgtctacaatgtcctctactaccgcaatggcaaggcttttaagttttttcattggaactctaatctcacgatcctgaaaacgaacatctcccacaatgggacataccactgctctggcatgggaaaacatcggtacacctctgccggcatctctgtcacagtcaaagaactgttccctgcaccagtcctgaacgcttccgtgacctctccactgcttgagggaaatctggtcaccctgtcctgcgaaactaagttgctgcttcagaggcccggactccagctctacttttcattctatatgggctctaagaccctgagaggccggaacaccagcagcgaatatcagattctgacagctcggcgcgaggactccgggctctattggtgtgaagctgctacagaggacggaaacgtgctgaaacggtcccctgaactggaactgcaagtcctgggccttcagctgccaactccagtgtggtttcatgtcctgttctatctggctgtggggattatgttccttgtgaataccgtgctctgggttaccattcggaaagaactcaagcgcaagaaaaaatgggatcttgagataagcctggacagcgggcatgagaagaaagtcatcagttcccttcaagaggacagacatctcgaagaggaactcaaatgtcaagaacaaaaagaagaacaactccaagagggtgtccatcggaaagagccacagggcgctacaagctctagacgggttaagttttccagatccgcagacgcacccgcttaccaacaagggcagaaccaactctacaatgaacttaatttggggcggagggaagagtacgacgttctggacaaaaggaggggacgagatcccgagatgggcggaaagcctcagcgaaggaagaatccgcaagaggggctttataacgaactccagaaagataaaatggcagaagcctatagtgagattgggatgaagggagaaaggaggaggggtaaaggtcacgatgggttgtaccaaggattgagcacagccactaaagatacctatgatgcgctccacatgcaggccctgccgccaagacgcgccaagagaagcggatctggcgtgaagcagaccctgaatttcgacctgctgaagctggctggcgacgtggaatccaacccaggccctggccatatgaccgagtacaagcccacggtgcgcctcgccacccgcgacgacgtccccagggccgtacgcaccctcgccgccgcgttcgccgactaccccgccacgcgccacaccgtcgatccggaccgccacatcgagcgggtcaccgagctgcaagaactcttcctcacgcgcgtcgggctcgacatcggcaaggtgtgggtcgcggacgacggcgccgcggtggcggtctggaccacgccggagagcgtcgaagcgggggcggtgttcgccgagatcggcccgcgcatggccgagttgagcggttcccggctggccgcgcagcaacagatggaaggcctcctggcgccgcaccggcccaaggagcccgcgtggttcctggccaccgtcggcgtctcgcccgaccaccagggcaagggtctgggcagcgccgtcgtgctccccggagtggaggcggccgagcgcgccggggtgcccgccttcctggagacctccgcgccccgcaacctccccttctacgagcggctcggcttcaccgtcaccgccgacgtcgaggtgcccgaaggaccgcgcacctggtgcatgacccgcaagcccggtgcctga

SEQ ID NO: 6258 - DNA, 5118 bp, Artificial Sequence
  Synthetic Polynucleotide
atggccttaccagtgaccgccttgctcctgccgctggccttgctgctccacgccgccaggccggaagtgcagctggttgaatctggcggaggactggttcaggctggcggatctctgagactgtcttgtgccgccagcggcagaacctttagcatgggctggtttagacaggcccctggcaaagagagagagttcgtcgccgccatcacatactctggcggcagcccttactacgccgactctgtgaagggcagattcaccatcagccgggacaacgccaagaacaccgtgtacctccagatgaacagcctgaagcctgaggacaccgccgtgtactactgcgccgccaatccaacatacggcagcgactggaacgccgagaattggggccagggaacccaagtgacagtgtctagcctcgagggacagcctaaggccaatcctaccgtgacactgttccctccaagcagcgaagaactccaggccaacaaggccacacttgtgtgcctgatctccgacttctaccctggggctgtgacagtggcttggaaggccgatggatctcctgtgaaagccggcgtggaaaccaccaagccatccaagcagagcaacaacaaatacgccgccagctcctacctgagcctgacacctgagcagtggaagtcccacagatcctacagctgccaagtgacccacgaaggcagcaccgtggaaaagacagtggcccctacagagtgcagcggatcccaggtggtggataccaccaaggccgtgattaccctccagcctccttgggtgtccgtgttccaagaggaaaccgtgacactgcactgcgaggtgctgcatctgcctggctctagcagcacccagtggtttctgaatggcaccgccacacagaccagcacacccagctacagaatcaccagcgccagcgtgaacgacagcggcgagtacagatgccagagaggactgagcggcagaagcgaccccattcagctggaaatccacagaggctggctgctgctccaggtgtccagcagagtgtttacagagggcgagcccctggctctgagatgtcacgcctggaaggacaagctggtgtacaacgtgctgtactaccggaacggcaaagccttcaagttcttccactggaacagcaacctgaccatcctcaagaccaacatcagccacaacggcacctaccactgtagcggcatgggcaagcacagatacacaagcgccggcatcagcgtgaccgtgaaagagctgtttcccgctcctgtgctgaacgcctctgtgacaagtccactgctggaaggcaaccttgtgaccctgagctgcgagacaaagctgctgctgcaaagacctggcctccagctgtacttcagcttctacatgggcagcaagaccctgcggggcagaaataccagctccgagtaccagatcctgaccgccagaagagaggacagcggcctgtattggtgcgaagccgccaccgaggatggcaatgtgctgaagagaagccccgagctggaactccaggtgctgggactgcaactgcctacacctgtgtggttccacgtgctgttttacctggccgtgggcatcatgtttctggtcaacaccgtcctgtgggtcaccatcagaaaagagctgaagcggaagaagaagtgggacctcgaaatcagcctggactccggccacgaaaagaaagtgatctccagcctgcaagaggaccggcacctggaagaggaactgaagtgccaagagcagaaagaggaacagctgcaagaaggcgtgcaccgcaaagaacctcaaggcgctacaagcactagtagagtgaagttcagcagaagcgccgacgcccctgcctaccagcagggacagaaccaactgtacaacgagctgaacctgggcagacgggaagagtacgacgtgctggacaagcggagaggcagggaccctgagatgggcggaaagccccagcggagaaagaacccccaggaaggactgtataacgaactccagaaagacaagatggccgaagcctacagcgagatcggcatgaagggcgagcggagaagaggcaagggccacgatggcctgtaccagggcctgagcaccgccaccaaggacacctatgacgccctgcacatgcaggccctgcctccaagaagggccaagcgatctggatctggagcaacaaacttctcactactcaaacaagcaggtgacgtggaggagaatcccgggcctatggactggatttggcgcatccttttccttgtcggcgctgctaccggcgcgcattccgggcccgaagtgcaactggttgaatccggtggcggcctggtgcaagcaggcggatctctcagacttagctgtgccgcctccggcagaaccttcacaatgggatggtttaggcaggctccagggaaagagagagagttcgtcgccgccatctctctgtctcccacactggcctactacgccgactctgtgaaaggccggttcaccatctccagagataatgccaagaacaccgtggtgctgcaaatgaactctctgaaacccgaggatacagccctgtactattgtgccgctgaccggaagtccgtgatgagcatcagacccgattactggggacagggcacacaagtcacagtgtcctctacgcgtgcctctacaaagggaccctccgtgtttcctctggctcccagcagcaagtctacaagcggaggaacagccgctctgggctgcctggtcaaggattactttcccgagcctgtgaccgtgtcctggaatagcggagcactgacaagcggcgtgcacacctttccagccgtgctgcaaagcagcggcctgtactctctgagcagcgtggtcacagtgcctagctctagcctgggcacccagacctacatctgcaatgtgaaccacaagcctagcaacaccaaggtggacaagagagtggaacccaagagctgtggtacccaagtggtggacacaacaaaagccgtcatcaccctgcaaccaccttgggtttcagtctttcaagaagagacagttaccctgcactgtgaagtcctgcacttgcccggaagcagctccacacagtggttcctcaacggcacagctacccagacaagcaccccttcctaccggatcacatctgcctccgtgaacgattccggcgagtataggtgtcagaggggcctgtctggccgcagcgatcctatccagcttgagattcatcgtggatggttgctcctccaagtgtcctccagggtgttcaccgaaggcgaacctctggcactgaggtgccatgcttggaaagataagctcgtctacaatgtcctctactaccgcaatggcaaggcttttaagttttttcattggaactctaatctcacgatcctgaaaacgaacatctcccacaatgggacataccactgctctggcatgggaaaacatcggtacacctctgccggcatctctgtcacagtcaaagaactgttccctgcaccagtcctgaacgcttccgtgacctctccactgcttgagggaaatctggtcaccctgtcctgcgaaactaagttgctgcttcagaggcccggactccagctctacttttcattctatatgggctctaagaccctgagaggccggaacaccagcagcgaatatcagattctgacagctcggcgcgaggactccgggctctattggtgtgaagctgctacagaggacggaaacgtgctgaaacggtcccctgaactggaactgcaagtcctgggccttcagctgccaactccagtgtggtttcatgtcctgttctatctggctgtggggattatgttccttgtgaataccgtgctctgggttaccattcggaaagaactcaagcgcaagaaaaaatgggatcttgagataagcctggacagcgggcatgagaagaaagtcatcagttcccttcaagaggacagacatctcgaagaggaactcaaatgtcaagaacaaaaagaagaacaactccaagagggtgtccatcggaaagagccacagggcgctacaagctctagacgggttaagttttccagatccgcagacgcacccgcttaccaacaagggcagaaccaactctacaatgaacttaatttggggcggagggaagagtacgacgttctggacaaaaggaggggacgagatcccgagatgggcggaaagcctcagcgaaggaagaatccgcaagaggggctttataacgaactccagaaagataaaatggcagaagcctatagtgagattgggatgaagggagaaaggaggaggggtaaaggtcacgatgggttgtaccaaggattgagcacagccactaaagatacctatgatgcgctccacatgcaggccctgccgccaagacgcgccaagagaagcggatctggcgtgaagcagaccctgaatttcgacctgctgaagctggctggcgacgtggaatccaacccaggccctggccatatgaccgagtacaagcccacggtgcgcctcgccacccgcgacgacgtccccagggccgtacgcaccctcgccgccgcgttcgccgactaccccgccacgcgccacaccgtcgatccggaccgccacatcgagcgggtcaccgagctgcaagaactcttcctcacgcgcgtcgggctcgacatcggcaaggtgtgggtcgcggacgacggcgccgcggtggcggtctggaccacgccggagagcgtcgaagcgggggcggtgttcgccgagatcggcccgcgcatggccgagttgagcggttcccggctggccgcgcagcaacagatggaaggcctcctggcgccgcaccggcccaaggagcccgcgtggttcctggccaccgtcggcgtctcgcccgaccaccagggcaagggtctgggcagcgccgtcgtgctccccggagtggaggcggccgagcgcgccggggtgcccgccttcctggagacctccgcgccccgcaacctccccttctacgagcggctcggcttcaccgtcaccgccgacgtcgaggtgcccgaaggaccgcgcacctggtgcatgacccgcaagcccggtgcctga

SEQ ID NO: 6259 - DNA, 5142 bp, Artificial Sequence
  Synthetic Polynucleotide
atggccttaccagtgaccgccttgctcctgccgctggccttgctgctccacgccgccaggccggacatccagatgacacagagccctagcagcctgtctgccagcgtgggagacagagtgaccatcacatgcaaggccagcgaccacatcaacaactggctggcctggtatcagcagaagcctggacaggcccctaagctgctgatctacggcgctaccacactggaaacaggcgtgcccagcagattttctggcagcggctctggcaccgactacaccctgacaatatccagcctccagcctgaggacttcgccacctactactgtcagcagagctggaacaccccttggacattcggccagggcaccaagctggaaatcaagagactcgaggacctgaagaacgtgttcccacctgaggtggccgtgttcgagcctagcgaggccgagatcagccacacccagaaagccaccctcgtgtgcctggctaccggcttctaccccgaccatgtggaactgtcttggtgggtcaacggcaaagaggtgcacagcggcgtgtctaccgacccccagccactgaaagaacagcccgccctgaacgacagccggtactgcctgagcagcagactgagagtgtccgccaccttctggcagaacccccggaaccacttcagatgccaggtgcagttctacggcctgagcgagaacgacgagtggacccaggacagagccaagcccgtgacccagatcgtgtctgccgaagcctggggcagagccgattgcggatcccaggtggtggataccaccaaggccgtgattaccctccagcctccttgggtgtccgtgttccaagaggaaaccgtgacactgcactgcgaggtgctgcatctgcctggctctagcagcacccagtggtttctgaatggcaccgccacacagaccagcacacccagctacagaatcaccagcgccagcgtgaacgacagcggcgagtacagatgccagagaggactgagcggcagaagcgaccccattcagctggaaatccacagaggctggctgctgctccaggtgtccagcagagtgtttacagagggcgagcccctggctctgagatgtcacgcctggaaggacaagctggtgtacaacgtgctgtactaccggaacggcaaagccttcaagttcttccactggaacagcaacctgaccatcctcaagaccaacatcagccacaacggcacctaccactgtagcggcatgggcaagcacagatacacaagcgccggcatcagcgtgaccgtgaaagagctgtttcccgctcctgtgctgaacgcctctgtgacaagtccactgctggaaggcaaccttgtgaccctgagctgcgagacaaagctgctgctgcaaagacctggcctccagctgtacttcagcttctacatgggcagcaagaccctgcggggcagaaataccagctccgagtaccagatcctgaccgccagaagagaggacagcggcctgtattggtgcgaagccgccaccgaggatggcaatgtgctgaagagaagccccgagctggaactccaggtgctgggactgcaactgcctacacctgtgtggttccacgtgctgttttacctggccgtgggcatcatgtttctggtcaacaccgtcctgtgggtcaccatcagaaaagagctgaagcggaagaagaagtgggacctcgaaatcagcctggactccggccacgaaaagaaagtgatctccagcctgcaagaggaccggcacctggaagaggaactgaagtgccaagagcagaaagaggaacagctgcaagaaggcgtgcaccgcaaagaacctcaaggcgctacaagcactagtagagtgaagttcagcagaagcgccgacgcccctgcctaccagcagggacagaaccaactgtacaacgagctgaacctgggcagacgggaagagtacgacgtgctggacaagcggagaggcagggaccctgagatgggcggaaagccccagcggagaaagaacccccaggaaggactgtataacgaactccagaaagacaagatggccgaagcctacagcgagatcggcatgaagggcgagcggagaagaggcaagggccacgatggcctgtaccagggcctgagcaccgccaccaaggacacctatgacgccctgcacatgcaggccctgcctccaagaagggccaagcgatctggatctggagcaacaaacttctcactactcaaacaagcaggtgacgtggaggagaatcccgggcctatggactggatttggcgcatccttttccttgtcggcgctgctaccggcgcgcattccttcgaacaagttcagcttcaacagcctggcgctgagctggtcaaacctggcgcttctgtgaagatgagctgcaaagccagcggctacgccttcagcagctactggatcaactggatgaagcagaaacccggccagggactcgaatggatcggccaaatctatcccggcgacggcgacaccaactacaacggcaagttcaagggcagagccacactgaccgccgatacctctagcagcacagcctacatgcagctgagcagcctgaccagcgaagatagcgccgtgtacttctgtgcccggtccatcacaacagtcgtgggctgcgctatggactattggggccagggaacaagcgtgaccgtgtctagtacgcgtatccagaaccctgatcctgccgtgtaccagctgcgggatagcaagagcagcgacaagagcgtgtgtctgttcaccgacttcgacagccagaccaacgtgtcccagagcaaggactccgacgtgtacatcaccgataagaccgtgctggacatgcggagcatggacttcaagagcaactccgccgtggcctggtccaacaagtccgatttcgcctgcgccaacgccttcaacaacagcattatccccgaggacacattcttcccaagccccgagagcagctgcggtacccaagtggtggacacaacaaaagccgtcatcaccctgcaaccaccttgggtttcagtctttcaagaagagacagttaccctgcactgtgaagtcctgcacttgcccggaagcagctccacacagtggttcctcaacggcacagctacccagacaagcaccccttcctaccggatcacatctgcctccgtgaacgattccggcgagtataggtgtcagaggggcctgtctggccgcagcgatcctatccagcttgagattcatcgtggatggttgctcctccaagtgtcctccagggtgttcaccgaaggcgaacctctggcactgaggtgccatgcttggaaagataagctcgtctacaatgtcctctactaccgcaatggcaaggcttttaagttttttcattggaactctaatctcacgatcctgaaaacgaacatctcccacaatgggacataccactgctctggcatgggaaaacatcggtacacctctgccggcatctctgtcacagtcaaagaactgttccctgcaccagtcctgaacgcttccgtgacctctccactgcttgagggaaatctggtcaccctgtcctgcgaaactaagttgctgcttcagaggcccggactccagctctacttttcattctatatgggctctaagaccctgagaggccggaacaccagcagcgaatatcagattctgacagctcggcgcgaggactccgggctctattggtgtgaagctgctacagaggacggaaacgtgctgaaacggtcccctgaactggaactgcaagtcctgggccttcagctgccaactccagtgtggtttcatgtcctgttctatctggctgtggggattatgttccttgtgaataccgtgctctgggttaccattcggaaagaactcaagcgcaagaaaaaatgggatcttgagataagcctggacagcgggcatgagaagaaagtcatcagttcccttcaagaggacagacatctcgaagaggaactcaaatgtcaagaacaaaaagaagaacaactccaagagggtgtccatcggaaagagccacagggcgctacaagctctagacgggttaagttttccagatccgcagacgcacccgcttaccaacaagggcagaaccaactctacaatgaacttaatttggggcggagggaagagtacgacgttctggacaaaaggaggggacgagatcccgagatgggcggaaagcctcagcgaaggaagaatccgcaagaggggctttataacgaactccagaaagataaaatggcagaagcctatagtgagattgggatgaagggagaaaggaggaggggtaaaggtcacgatgggttgtaccaaggattgagcacagccactaaagatacctatgatgcgctccacatgcaggccctgccgccaagacgcgccaagagaagcggatctggcgtgaagcagaccctgaatttcgacctgctgaagctggctggcgacgtggaatccaacccaggccctggccatatgaccgagtacaagcccacggtgcgcctcgccacccgcgacgacgtccccagggccgtacgcaccctcgccgccgcgttcgccgactaccccgccacgcgccacaccgtcgatccggaccgccacatcgagcgggtcaccgagctgcaagaactcttcctcacgcgcgtcgggctcgacatcggcaaggtgtgggtcgcggacgacggcgccgcggtggcggtctggaccacgccggagagcgtcgaagcgggggcggtgttcgccgagatcggcccgcgcatggccgagttgagcggttcccggctggccgcgcagcaacagatggaaggcctcctggcgccgcaccggcccaaggagcccgcgtggttcctggccaccgtcggcgtctcgcccgaccaccagggcaagggtctgggcagcgccgtcgtgctccccggagtggaggcggccgagcgcgccggggtgcccgccttcctggagacctccgcgccccgcaacctccccttctacgagcggctcggcttcaccgtcaccgccgacgtcgaggtgcccgaaggaccgcgcacctggtgcatgacccgcaagcccggtgcctga

SEQ ID NO: 6260 - DNA, 5553 bp, Artificial Sequence
  Synthetic Polynucleotide
atggccttaccagtgaccgccttgctcctgccgctggccttgctgctccacgccgccaggccggaagtgcagctggttgaatctggcggaggactggttcaggctggcggatctctgagactgtcttgtgccgccagcggcagaacctttagcatgggctggtttagacaggcccctggcaaagagagagagttcgtcgccgccatcacatactctggcggcagcccttactacgccgactctgtgaagggcagattcaccatcagccgggacaacgccaagaacaccgtgtacctccagatgaacagcctgaagcctgaggacaccgccgtgtactactgcgccgccaatccaacatacggcagcgactggaacgccgagaattggggccagggaacccaagtgacagtgtctagcggtaccggcggaggcggatctggcggcggaggtagcggtggcggaggatctgaattcgacatccagatgacacagagccctagcagcctgtctgccagcgtgggagacagagtgaccatcacatgcaaggccagcgaccacatcaacaactggctggcctggtatcagcagaagcctggacaggcccctaagctgctgatctacggcgctaccacactggaaacaggcgtgcccagcagattttctggcagcggctctggcaccgactacaccctgacaatatccagcctccagcctgaggacttcgccacctactactgtcagcagagctggaacaccccttggacattcggccagggcaccaagctggaaatcaagagactcgaggacctgaagaacgtgttcccacctgaggtggccgtgttcgagcctagcgaggccgagatcagccacacccagaaagccaccctcgtgtgcctggctaccggcttctaccccgaccatgtggaactgtcttggtgggtcaacggcaaagaggtgcacagcggcgtgtctaccgacccccagccactgaaagaacagcccgccctgaacgacagccggtactgcctgagcagcagactgagagtgtccgccaccttctggcagaacccccggaaccacttcagatgccaggtgcagttctacggcctgagcgagaacgacgagtggacccaggacagagccaagcccgtgacccagatcgtgtctgccgaagcctggggcagagccgattgcggatcccaggtggtggataccaccaaggccgtgattaccctccagcctccttgggtgtccgtgttccaagaggaaaccgtgacactgcactgcgaggtgctgcatctgcctggctctagcagcacccagtggtttctgaatggcaccgccacacagaccagcacacccagctacagaatcaccagcgccagcgtgaacgacagcggcgagtacagatgccagagaggactgagcggcagaagcgaccccattcagctggaaatccacagaggctggctgctgctccaggtgtccagcagagtgtttacagagggcgagcccctggctctgagatgtcacgcctggaaggacaagctggtgtacaacgtgctgtactaccggaacggcaaagccttcaagttcttccactggaacagcaacctgaccatcctcaagaccaacatcagccacaacggcacctaccactgtagcggcatgggcaagcacagatacacaagcgccggcatcagcgtgaccgtgaaagagctgtttcccgctcctgtgctgaacgcctctgtgacaagtccactgctggaaggcaaccttgtgaccctgagctgcgagacaaagctgctgctgcaaagacctggcctccagctgtacttcagcttctacatgggcagcaagaccctgcggggcagaaataccagctccgagtaccagatcctgaccgccagaagagaggacagcggcctgtattggtgcgaagccgccaccgaggatggcaatgtgctgaagagaagccccgagctggaactccaggtgctgggactgcaactgcctacacctgtgtggttccacgtgctgttttacctggccgtgggcatcatgtttctggtcaacaccgtcctgtgggtcaccatcagaaaagagctgaagcggaagaagaagtgggacctcgaaatcagcctggactccggccacgaaaagaaagtgatctccagcctgcaagaggaccggcacctggaagaggaactgaagtgccaagagcagaaagaggaacagctgcaagaaggcgtgcaccgcaaagaacctcaaggcgctacaagcactagtagagtgaagttcagcagaagcgccgacgcccctgcctaccagcagggacagaaccaactgtacaacgagctgaacctgggcagacgggaagagtacgacgtgctggacaagcggagaggcagggaccctgagatgggcggaaagccccagcggagaaagaacccccaggaaggactgtataacgaactccagaaagacaagatggccgaagcctacagcgagatcggcatgaagggcgagcggagaagaggcaagggccacgatggcctgtaccagggcctgagcaccgccaccaaggacacctatgacgccctgcacatgcaggccctgcctccaagaagggccaagcgatctggatctggagcaacaaacttctcactactcaaacaagcaggtgacgtggaggagaatcccgggcctatggactggatttggcgcatccttttccttgtcggcgctgctaccggcgcgcattccttcgaacaagttcagcttcaacagcctggcgctgagctggtcaaacctggcgcttctgtgaagatgagctgcaaagccagcggctacgccttcagcagctactggatcaactggatgaagcagaaacccggccagggactcgaatggatcggccaaatctatcccggcgacggcgacaccaactacaacggcaagttcaagggcagagccacactgaccgccgatacctctagcagcacagcctacatgcagctgagcagcctgaccagcgaagatagcgccgtgtacttctgtgcccggtccatcacaacagtcgtgggctgcgctatggactattggggccagggaacaagcgtgaccgtgtctagtacgcgtatccagaaccctgatcctgccgtgtaccagctgcgggatagcaagagcagcgacaagagcgtgtgtctgttcaccgacttcgacagccagaccaacgtgtcccagagcaaggactccgacgtgtacatcaccgataagaccgtgctggacatgcggagcatggacttcaagagcaactccgccgtggcctggtccaacaagtccgatttcgcctgcgccaacgccttcaacaacagcattatccccgaggacacattcttcccaagccccgagagcagctgcggtacccaagtggtggacacaacaaaagccgtcatcaccctgcaaccaccttgggtttcagtctttcaagaagagacagttaccctgcactgtgaagtcctgcacttgcccggaagcagctccacacagtggttcctcaacggcacagctacccagacaagcaccccttcctaccggatcacatctgcctccgtgaacgattccggcgagtataggtgtcagaggggcctgtctggccgcagcgatcctatccagcttgagattcatcgtggatggttgctcctccaagtgtcctccagggtgttcaccgaaggcgaacctctggcactgaggtgccatgcttggaaagataagctcgtctacaatgtcctctactaccgcaatggcaaggcttttaagttttttcattggaactctaatctcacgatcctgaaaacgaacatctcccacaatgggacataccactgctctggcatgggaaaacatcggtacacctctgccggcatctctgtcacagtcaaagaactgttccctgcaccagtcctgaacgcttccgtgacctctccactgcttgagggaaatctggtcaccctgtcctgcgaaactaagttgctgcttcagaggcccggactccagctctacttttcattctatatgggctctaagaccctgagaggccggaacaccagcagcgaatatcagattctgacagctcggcgcgaggactccgggctctattggtgtgaagctgctacagaggacggaaacgtgctgaaacggtcccctgaactggaactgcaagtcctgggccttcagctgccaactccagtgtggtttcatgtcctgttctatctggctgtggggattatgttccttgtgaataccgtgctctgggttaccattcggaaagaactcaagcgcaagaaaaaatgggatcttgagataagcctggacagcgggcatgagaagaaagtcatcagttcccttcaagaggacagacatctcgaagaggaactcaaatgtcaagaacaaaaagaagaacaactccaagagggtgtccatcggaaagagccacagggcgctacaagctctagacgggttaagttttccagatccgcagacgcacccgcttaccaacaagggcagaaccaactctacaatgaacttaatttggggcggagggaagagtacgacgttctggacaaaaggaggggacgagatcccgagatgggcggaaagcctcagcgaaggaagaatccgcaagaggggctttataacgaactccagaaagataaaatggcagaagcctatagtgagattgggatgaagggagaaaggaggaggggtaaaggtcacgatgggttgtaccaaggattgagcacagccactaaagatacctatgatgcgctccacatgcaggccctgccgccaagacgcgccaagagaagcggatctggcgtgaagcagaccctgaatttcgacctgctgaagctggctggcgacgtggaatccaacccaggccctggccatatgaccgagtacaagcccacggtgcgcctcgccacccgcgacgacgtccccagggccgtacgcaccctcgccgccgcgttcgccgactaccccgccacgcgccacaccgtcgatccggaccgccacatcgagcgggtcaccgagctgcaagaactcttcctcacgcgcgtcgggctcgacatcggcaaggtgtgggtcgcggacgacggcgccgcggtggcggtctggaccacgccggagagcgtcgaagcgggggcggtgttcgccgagatcggcccgcgcatggccgagttgagcggttcccggctggccgcgcagcaacagatggaaggcctcctggcgccgcaccggcccaaggagcccgcgtggttcctggccaccgtcggcgtctcgcccgaccaccagggcaagggtctgggcagcgccgtcgtgctccccggagtggaggcggccgagcgcgccggggtgcccgccttcctggagacctccgcgccccgcaacctccccttctacgagcggctcggcttcaccgtcaccgccgacgtcgaggtgcccgaaggaccgcgcacctggtgcatgacccgcaagcccggtgcctga

SEQ ID NO: 6261 - DNA, 5964 bp, Artificial Sequence
  Synthetic Polynucleotide
atggccttaccagtgaccgccttgctcctgccgctggccttgctgctccacgccgccaggccggaagtgcagctggttgaatctggcggaggactggttcaggctggcggatctctgagactgtcttgtgccgccagcggcagaacctttagcatgggctggtttagacaggcccctggcaaagagagagagttcgtcgccgccatcacatactctggcggcagcccttactacgccgactctgtgaagggcagattcaccatcagccgggacaacgccaagaacaccgtgtacctccagatgaacagcctgaagcctgaggacaccgccgtgtactactgcgccgccaatccaacatacggcagcgactggaacgccgagaattggggccagggaacccaagtgacagtgtctagcggtaccggcggaggcggatctggcggcggaggtagcggtggcggaggatctgaattcgacatccagatgacacagagccctagcagcctgtctgccagcgtgggagacagagtgaccatcacatgcaaggccagcgaccacatcaacaactggctggcctggtatcagcagaagcctggacaggcccctaagctgctgatctacggcgctaccacactggaaacaggcgtgcccagcagattttctggcagcggctctggcaccgactacaccctgacaatatccagcctccagcctgaggacttcgccacctactactgtcagcagagctggaacaccccttggacattcggccagggcaccaagctggaaatcaagagactcgaggacctgaagaacgtgttcccacctgaggtggccgtgttcgagcctagcgaggccgagatcagccacacccagaaagccaccctcgtgtgcctggctaccggcttctaccccgaccatgtggaactgtcttggtgggtcaacggcaaagaggtgcacagcggcgtgtctaccgacccccagccactgaaagaacagcccgccctgaacgacagccggtactgcctgagcagcagactgagagtgtccgccaccttctggcagaacccccggaaccacttcagatgccaggtgcagttctacggcctgagcgagaacgacgagtggacccaggacagagccaagcccgtgacccagatcgtgtctgccgaagcctggggcagagccgattgcggatcccaggtggtggataccaccaaggccgtgattaccctccagcctccttgggtgtccgtgttccaagaggaaaccgtgacactgcactgcgaggtgctgcatctgcctggctctagcagcacccagtggtttctgaatggcaccgccacacagaccagcacacccagctacagaatcaccagcgccagcgtgaacgacagcggcgagtacagatgccagagaggactgagcggcagaagcgaccccattcagctggaaatccacagaggctggctgctgctccaggtgtccagcagagtgtttacagagggcgagcccctggctctgagatgtcacgcctggaaggacaagctggtgtacaacgtgctgtactaccggaacggcaaagccttcaagttcttccactggaacagcaacctgaccatcctcaagaccaacatcagccacaacggcacctaccactgtagcggcatgggcaagcacagatacacaagcgccggcatcagcgtgaccgtgaaagagctgtttcccgctcctgtgctgaacgcctctgtgacaagtccactgctggaaggcaaccttgtgaccctgagctgcgagacaaagctgctgctgcaaagacctggcctccagctgtacttcagcttctacatgggcagcaagaccctgcggggcagaaataccagctccgagtaccagatcctgaccgccagaagagaggacagcggcctgtattggtgcgaagccgccaccgaggatggcaatgtgctgaagagaagccccgagctggaactccaggtgctgggactgcaactgcctacacctgtgtggttccacgtgctgttttacctggccgtgggcatcatgtttctggtcaacaccgtcctgtgggtcaccatcagaaaagagctgaagcggaagaagaagtgggacctcgaaatcagcctggactccggccacgaaaagaaagtgatctccagcctgcaagaggaccggcacctggaagaggaactgaagtgccaagagcagaaagaggaacagctgcaagaaggcgtgcaccgcaaagaacctcaaggcgctacaagcactagtagagtgaagttcagcagaagcgccgacgcccctgcctaccagcagggacagaaccaactgtacaacgagctgaacctgggcagacgggaagagtacgacgtgctggacaagcggagaggcagggaccctgagatgggcggaaagccccagcggagaaagaacccccaggaaggactgtataacgaactccagaaagacaagatggccgaagcctacagcgagatcggcatgaagggcgagcggagaagaggcaagggccacgatggcctgtaccagggcctgagcaccgccaccaaggacacctatgacgccctgcacatgcaggccctgcctccaagaagggccaagcgatctggatctggagcaacaaacttctcactactcaaacaagcaggtgacgtggaggagaatcccgggcctatggactggatttggcgcatccttttccttgtcggcgctgctaccggcgcgcattccgggcccgaagtgcaactggttgaatccggtggcggcctggtgcaagcaggcggatctctcagacttagctgtgccgcctccggcagaaccttcacaatgggatggtttaggcaggctccagggaaagagagagagttcgtcgccgccatctctctgtctcccacactggcctactacgccgactctgtgaaaggccggttcaccatctccagagataatgccaagaacaccgtggtgctgcaaatgaactctctgaaacccgaggatacagccctgtactattgtgccgctgaccggaagtccgtgatgagcatcagacccgattactggggacagggcacacaagtcacagtgtcctctggatccggcggcggaggatctggcggaggcggatctgggggcggaggctctttcgaacaagttcagcttcaacagcctggcgctgagctggtcaaacctggcgcttctgtgaagatgagctgcaaagccagcggctacgccttcagcagctactggatcaactggatgaagcagaaacccggccagggactcgaatggatcggccaaatctatcccggcgacggcgacaccaactacaacggcaagttcaagggcagagccacactgaccgccgatacctctagcagcacagcctacatgcagctgagcagcctgaccagcgaagatagcgccgtgtacttctgtgcccggtccatcacaacagtcgtgggctgcgctatggactattggggccagggaacaagcgtgaccgtgtctagtacgcgtatccagaaccctgatcctgccgtgtaccagctgcgggatagcaagagcagcgacaagagcgtgtgtctgttcaccgacttcgacagccagaccaacgtgtcccagagcaaggactccgacgtgtacatcaccgataagaccgtgctggacatgcggagcatggacttcaagagcaactccgccgtggcctggtccaacaagtccgatttcgcctgcgccaacgccttcaacaacagcattatccccgaggacacattcttcccaagccccgagagcagctgcggtacccaagtggtggacacaacaaaagccgtcatcaccctgcaaccaccttgggtttcagtctttcaagaagagacagttaccctgcactgtgaagtcctgcacttgcccggaagcagctccacacagtggttcctcaacggcacagctacccagacaagcaccccttcctaccggatcacatctgcctccgtgaacgattccggcgagtataggtgtcagaggggcctgtctggccgcagcgatcctatccagcttgagattcatcgtggatggttgctcctccaagtgtcctccagggtgttcaccgaaggcgaacctctggcactgaggtgccatgcttggaaagataagctcgtctacaatgtcctctactaccgcaatggcaaggcttttaagttttttcattggaactctaatctcacgatcctgaaaacgaacatctcccacaatgggacataccactgctctggcatgggaaaacatcggtacacctctgccggcatctctgtcacagtcaaagaactgttccctgcaccagtcctgaacgcttccgtgacctctccactgcttgagggaaatctggtcaccctgtcctgcgaaactaagttgctgcttcagaggcccggactccagctctacttttcattctatatgggctctaagaccctgagaggccggaacaccagcagcgaatatcagattctgacagctcggcgcgaggactccgggctctattggtgtgaagctgctacagaggacggaaacgtgctgaaacggtcccctgaactggaactgcaagtcctgggccttcagctgccaactccagtgtggtttcatgtcctgttctatctggctgtggggattatgttccttgtgaataccgtgctctgggttaccattcggaaagaactcaagcgcaagaaaaaatgggatcttgagataagcctggacagcgggcatgagaagaaagtcatcagttcccttcaagaggacagacatctcgaagaggaactcaaatgtcaagaacaaaaagaagaacaactccaagagggtgtccatcggaaagagccacagggcgctacaagctctagacgggttaagttttccagatccgcagacgcacccgcttaccaacaagggcagaaccaactctacaatgaacttaatttggggcggagggaagagtacgacgttctggacaaaaggaggggacgagatcccgagatgggcggaaagcctcagcgaaggaagaatccgcaagaggggctttataacgaactccagaaagataaaatggcagaagcctatagtgagattgggatgaagggagaaaggaggaggggtaaaggtcacgatgggttgtaccaaggattgagcacagccactaaagatacctatgatgcgctccacatgcaggccctgccgccaagacgcgccaagagaagcggatctggcgtgaagcagaccctgaatttcgacctgctgaagctggctggcgacgtggaatccaacccaggccctggccatatgaccgagtacaagcccacggtgcgcctcgccacccgcgacgacgtccccagggccgtacgcaccctcgccgccgcgttcgccgactaccccgccacgcgccacaccgtcgatccggaccgccacatcgagcgggtcaccgagctgcaagaactcttcctcacgcgcgtcgggctcgacatcggcaaggtgtgggtcgcggacgacggcgccgcggtggcggtctggaccacgccggagagcgtcgaagcgggggcggtgttcgccgagatcggcccgcgcatggccgagttgagcggttcccggctggccgcgcagcaacagatggaaggcctcctggcgccgcaccggcccaaggagcccgcgtggttcctggccaccgtcggcgtctcgcccgaccaccagggcaagggtctgggcagcgccgtcgtgctccccggagtggaggcggccgagcgcgccggggtgcccgccttcctggagacctccgcgccccgcaacctccccttctacgagcggctcggcttcaccgtcaccgccgacgtcgaggtgcccgaaggaccgcgcacctggtgcatgacccgcaagcccggtgcctga

SEQ ID NO: 6262 - DNA, 5163 bp, Artificial Sequence
  Synthetic Polynucleotide
atggccttaccagtgaccgccttgctcctgccgctggccttgctgctccacgccgccaggccggaagtgcagctggttgaatctggcggaggactggttcaggctggcggatctctgagactgtcttgtgccgccagcggcagaacctttagcatgggctggtttagacaggcccctggcaaagagagagagttcgtcgccgccatcacatactctggcggcagcccttactacgccgactctgtgaagggcagattcaccatcagccgggacaacgccaagaacaccgtgtacctccagatgaacagcctgaagcctgaggacaccgccgtgtactactgcgccgccaatccaacatacggcagcgactggaacgccgagaattggggccagggaacccaagtgacagtgtctagcctcgaggacctgaagaacgtgttcccacctgaggtggccgtgttcgagcctagcgaggccgagatcagccacacccagaaagccaccctcgtgtgcctggctaccggcttctaccccgaccatgtggaactgtcttggtgggtcaacggcaaagaggtgcacagcggcgtgtctaccgacccccagccactgaaagaacagcccgccctgaacgacagccggtactgcctgagcagcagactgagagtgtccgccaccttctggcagaacccccggaaccacttcagatgccaggtgcagttctacggcctgagcgagaacgacgagtggacccaggacagagccaagcccgtgacccagatcgtgtctgccgaagcctggggcagagccgattgcggatcccaggtggtggataccaccaaggccgtgattaccctccagcctccttgggtgtccgtgttccaagaggaaaccgtgacactgcactgcgaggtgctgcatctgcctggctctagcagcacccagtggtttctgaatggcaccgccacacagaccagcacacccagctacagaatcaccagcgccagcgtgaacgacagcggcgagtacagatgccagagaggactgagcggcagaagcgaccccattcagctggaaatccacagaggctggctgctgctccaggtgtccagcagagtgtttacagagggcgagcccctggctctgagatgtcacgcctggaaggacaagctggtgtacaacgtgctgtactaccggaacggcaaagccttcaagttcttccactggaacagcaacctgaccatcctcaagaccaacatcagccacaacggcacctaccactgtagcggcatgggcaagcacagatacacaagcgccggcatcagcgtgaccgtgaaagagctgtttcccgctcctgtgctgaacgcctctgtgacaagtccactgctggaaggcaaccttgtgaccctgagctgcgagacaaagctgctgctgcaaagacctggcctccagctgtacttcagcttctacatgggcagcaagaccctgcggggcagaaataccagctccgagtaccagatcctgaccgccagaagagaggacagcggcctgtattggtgcgaagccgccaccgaggatggcaatgtgctgaagagaagccccgagctggaactccaggtgctgggactgcaactgcctacacctgtgtggttccacgtgctgttttacctggccgtgggcatcatgtttctggtcaacaccgtcctgtgggtcaccatcagaaaagagctgaagcggaagaagaagtgggacctcgaaatcagcctggactccggccacgaaaagaaagtgatctccagcctgcaagaggaccggcacctggaagaggaactgaagtgccaagagcagaaagaggaacagctgcaagaaggcgtgcaccgcaaagaacctcaaggcgctacaagcactagtagagtgaagttcagcagaagcgccgacgcccctgcctaccagcagggacagaaccaactgtacaacgagctgaacctgggcagacgggaagagtacgacgtgctggacaagcggagaggcagggaccctgagatgggcggaaagccccagcggagaaagaacccccaggaaggactgtataacgaactccagaaagacaagatggccgaagcctacagcgagatcggcatgaagggcgagcggagaagaggcaagggccacgatggcctgtaccagggcctgagcaccgccaccaaggacacctatgacgccctgcacatgcaggccctgcctccaagaagggccaagcgatctggatctggagcaacaaacttctcactactcaaacaagcaggtgacgtggaggagaatcccgggcctatggactggatttggcgcatccttttccttgtcggcgctgctaccggcgcgcattccgggcccgaagtgcaactggttgaatccggtggcggcctggtgcaagcaggcggatctctcagacttagctgtgccgcctccggcagaaccttcacaatgggatggtttaggcaggctccagggaaagagagagagttcgtcgccgccatctctctgtctcccacactggcctactacgccgactctgtgaaaggccggttcaccatctccagagataatgccaagaacaccgtggtgctgcaaatgaactctctgaaacccgaggatacagccctgtactattgtgccgctgaccggaagtccgtgatgagcatcagacccgattactggggacagggcacacaagtcacagtgtcctctacgcgtatccagaaccctgatcctgccgtgtaccagctgcgggatagcaagagcagcgacaagagcgtgtgtctgttcaccgacttcgacagccagaccaacgtgtcccagagcaaggactccgacgtgtacatcaccgataagaccgtgctggacatgcggagcatggacttcaagagcaactccgccgtggcctggtccaacaagtccgatttcgcctgcgccaacgccttcaacaacagcattatccccgaggacacattcttcccaagccccgagagcagctgcggtacccaagtggtggacacaacaaaagccgtcatcaccctgcaaccaccttgggtttcagtctttcaagaagagacagttaccctgcactgtgaagtcctgcacttgcccggaagcagctccacacagtggttcctcaacggcacagctacccagacaagcaccccttcctaccggatcacatctgcctccgtgaacgattccggcgagtataggtgtcagaggggcctgtctggccgcagcgatcctatccagcttgagattcatcgtggatggttgctcctccaagtgtcctccagggtgttcaccgaaggcgaacctctggcactgaggtgccatgcttggaaagataagctcgtctacaatgtcctctactaccgcaatggcaaggcttttaagttttttcattggaactctaatctcacgatcctgaaaacgaacatctcccacaatgggacataccactgctctggcatgggaaaacatcggtacacctctgccggcatctctgtcacagtcaaagaactgttccctgcaccagtcctgaacgcttccgtgacctctccactgcttgagggaaatctggtcaccctgtcctgcgaaactaagttgctgcttcagaggcccggactccagctctacttttcattctatatgggctctaagaccctgagaggccggaacaccagcagcgaatatcagattctgacagctcggcgcgaggactccgggctctattggtgtgaagctgctacagaggacggaaacgtgctgaaacggtcccctgaactggaactgcaagtcctgggccttcagctgccaactccagtgtggtttcatgtcctgttctatctggctgtggggattatgttccttgtgaataccgtgctctgggttaccattcggaaagaactcaagcgcaagaaaaaatgggatcttgagataagcctggacagcgggcatgagaagaaagtcatcagttcccttcaagaggacagacatctcgaagaggaactcaaatgtcaagaacaaaaagaagaacaactccaagagggtgtccatcggaaagagccacagggcgctacaagctctagacgggttaagttttccagatccgcagacgcacccgcttaccaacaagggcagaaccaactctacaatgaacttaatttggggcggagggaagagtacgacgttctggacaaaaggaggggacgagatcccgagatgggcggaaagcctcagcgaaggaagaatccgcaagaggggctttataacgaactccagaaagataaaatggcagaagcctatagtgagattgggatgaagggagaaaggaggaggggtaaaggtcacgatgggttgtaccaaggattgagcacagccactaaagatacctatgatgcgctccacatgcaggccctgccgccaagacgcgccaagagaagcggatctggcgtgaagcagaccctgaatttcgacctgctgaagctggctggcgacgtggaatccaacccaggccctggccatatgaccgagtacaagcccacggtgcgcctcgccacccgcgacgacgtccccagggccgtacgcaccctcgccgccgcgttcgccgactaccccgccacgcgccacaccgtcgatccggaccgccacatcgagcgggtcaccgagctgcaagaactcttcctcacgcgcgtcgggctcgacatcggcaaggtgtgggtcgcggacgacggcgccgcggtggcggtctggaccacgccggagagcgtcgaagcgggggcggtgttcgccgagatcggcccgcgcatggccgagttgagcggttcccggctggccgcgcagcaacagatggaaggcctcctggcgccgcaccggcccaaggagcccgcgtggttcctggccaccgtcggcgtctcgcccgaccaccagggcaagggtctgggcagcgccgtcgtgctccccggagtggaggcggccgagcgcgccggggtgcccgccttcctggagacctccgcgccccgcaacctccccttctacgagcggctcggcttcaccgtcaccgccgacgtcgaggtgcccgaaggaccgcgcacctggtgcatgacccgcaagcccggtgcctga

SEQ ID NO: 6263 - DNA, 2616 bp, Artificial Sequence
  Synthetic Polynucleotide
atggccttaccagtgaccgccttgctcctgccgctggccttgctgctccacgccgccaggccggcatgcgaagtgcagctgcttgaaagtggcggcggactgattcagcctggcggatctctgagactgagctgtgccgccagcggcttcaccttttctagccacgccatgacctgggtccgacaggcacctggaaaagggcttgaatgggtgtccgccatcagcggctctggcgattacacacactacgccgacagcgtgaagggcagattcaccatcagcagagacaacagcaagaacaccgtgtacctccagatgaacagcctgagagccgaggacagcgccgtgtattattgcgccaaggatgaggatggcggcagcctgcttggacacagaggacaaggcaccctggtcaccgtttcttccggtaccggcggaggcggatctggcggcggaggtagcggtggcggaggatctgaattcggatctctcgagcaggtggtggataccaccaaggccgtgattaccctccagcctccttgggtgtccgtgttccaagaggaaaccgtgacactgcactgcgaggtgctgcatctgcctggctctagcagcacccagtggtttctgaatggcaccgccacacagaccagcacacccagctacagaatcaccagcgccagcgtgaacgacagcggcgagtacagatgccagagaggactgagcggcagaagcgaccccattcagctggaaatccacagaggctggctgctgctccaggtgtccagcagagtgtttacagagggcgagcccctggctctgagatgtcacgcctggaaggacaagctggtgtacaacgtgctgtactaccggaacggcaaagccttcaagttcttccactggaacagcaacctgaccatcctcaagaccaacatcagccacaacggcacctaccactgtagcggcatgggcaagcacagatacacaagcgccggcatcagcgtgaccgtgaaagagctgtttcccgctcctgtgctgaacgcctctgtgacaagtccactgctggaaggcaaccttgtgaccctgagctgcgagacaaagctgctgctgcaaagacctggcctccagctgtacttcagcttctacatgggcagcaagaccctgcggggcagaaataccagctccgagtaccagatcctgaccgccagaagagaggacagcggcctgtattggtgcgaagccgccaccgaggatggcaatgtgctgaagagaagccccgagctggaactccaggtgctgggactgcaactgcctacacctgtgtggttccacgtgctgttttacctggccgtgggcatcatgtttctggtcaacaccgtcctgtgggtcaccatcagaaaagagctgaagcggaagaagaagtgggacctcgaaatcagcctggactccggccacgaaaagaaagtgatctccagcctgcaagaggaccggcacctggaagaggaactgaagtgccaagagcagaaagaggaacagctgcaagaaggcgtgcaccgcaaagaacctcaaggcgctacaagcactagtagagtgaagttcagcagaagcgccgacgcccctgcctaccagcagggacagaaccaactgtacaacgagctgaacctgggcagacgggaagagtacgacgtgctggacaagcggagaggcagggaccctgagatgggcggaaagccccagcggagaaagaacccccaggaaggactgtataacgaactccagaaagacaagatggccgaagcctacagcgagatcggcatgaagggcgagcggagaagaggcaagggccacgatggcctgtaccagggcctgagcaccgccaccaaggacacctatgacgccctgcacatgcaggccctgcctccaagaagggccaagcgatctggatctggagcaacaaacttctcactactcaaacaagcaggtgacgtggaggagaatcccgggcctactagaggccatatgaccgagtacaagcccacggtgcgcctcgccacccgcgacgacgtccccagggccgtacgcaccctcgccgccgcgttcgccgactaccccgccacgcgccacaccgtcgatccggaccgccacatcgagcgggtcaccgagctgcaagaactcttcctcacgcgcgtcgggctcgacatcggcaaggtgtgggtcgcggacgacggcgccgcggtggcggtctggaccacgccggagagcgtcgaagcgggggcggtgttcgccgagatcggcccgcgcatggccgagttgagcggttcccggctggccgcgcagcaacagatggaaggcctcctggcgccgcaccggcccaaggagcccgcgtggttcctggccaccgtcggcgtctcgcccgaccaccagggcaagggtctgggcagcgccgtcgtgctccccggagtggaggcggccgagcgcgccggggtgcccgccttcctggagacctccgcgccccgcaacctccccttctacgagcggctcggcttcaccgtcaccgccgacgtcgaggtgcccgaaggaccgcgcacctggtgcatgacccgcaagcccggtgcctga

SEQ ID NO: 6264 - DNA, 2229 bp, Artificial Sequence
  Synthetic Polynucleotide
atggccttaccagtgaccgccttgctcctgccgctggccttgctgctccacgccgccaggccggacatccagatgacacagagccctagcagcctgtctgccagcgtgggagacagagtgaccatcacatgcaaggccagcgaccacatcaacaactggctggcctggtatcagcagaagcctggacaggcccctaagctgctgatctacggcgctaccacactggaaacaggcgtgcccagcagattttctggcagcggctctggcaccgactacaccctgacaatatccagcctccagcctgaggacttcgccacctactactgtcagcagagctggaacaccccttggacattcggccagggcaccaagctggaaatcaagagaggcggaggcggaagtggaggcggaggatctggcggcggaggctctcaagttcagcttcaacagcctggcgctgagctggtcaaacctggcgcttctgtgaagatgagctgcaaagccagcggctacgccttcagcagctactggatcaactggatgaagcagaaacccggccagggactcgaatggatcggccaaatctatcccggcgacggcgacaccaactacaacggcaagttcaagggcagagccacactgaccgccgatacctctagcagcacagcctacatgcagctgagcagcctgaccagcgaagatagcgccgtgtacttctgtgcccggtccatcacaacagtcgtgggctgcgctatggactattggggccagggaacaagcgtgaccgtgtctagtacgcgtcaggtggtggataccaccaaggccgtgattaccctccagcctccttgggtgtccgtgttccaagaggaaaccgtgacactgcactgcgaggtgctgcatctgcctggctctagcagcacccagtggtttctgaatggcaccgccacacagaccagcacacccagctacagaatcaccagcgccagcgtgaacgacagcggcgagtacagatgccagagaggactgagcggcagaagcgaccccattcagctggaaatccacagaggctggctgctgctccaggtgtccagcagagtgtttacagagggcgagcccctggctctgagatgtcacgcctggaaggacaagctggtgtacaacgtgctgtactaccggaacggcaaagccttcaagttcttccactggaacagcaacctgaccatcctcaagaccaacatcagccacaacggcacctaccactgtagcggcatgggcaagcacagatacacaagcgccggcatcagcgtgaccgtgaaagagctgtttcccgctcctgtgctgaacgcctctgtgacaagtccactgctggaaggcaaccttgtgaccctgagctgcgagacaaagctgctgctgcaaagacctggcctccagctgtacttcagcttctacatgggcagcaagaccctgcggggcagaaataccagctccgagtaccagatcctgaccgccagaagagaggacagcggcctgtattggtgcgaagccgccaccgaggatggcaatgtgctgaagagaagccccgagctggaactccaggtgctgggactgcaactgcctacacctgtgtggttccacgtgctgttttacctggccgtgggcatcatgtttctggtcaacaccgtcctgtgggtcaccatcagaaaagagctgaagcggaagaagaagtgggacctcgaaatcagcctggactccggccacgaaaagaaagtgatctccagcctgcaagaggaccggcacctggaagaggaactgaagtgccaagagcagaaagaggaacagctgcaagaaggcgtgcaccgcaaagaacctcaaggcgctacaagcactagtagagtgaagttcagcagaagcgccgacgcccctgcctaccagcagggacagaaccaactgtacaacgagctgaacctgggcagacgggaagagtacgacgtgctggacaagcggagaggcagggaccctgagatgggcggaaagccccagcggagaaagaacccccaggaaggactgtataacgaactccagaaagacaagatggccgaagcctacagcgagatcggcatgaagggcgagcggagaagaggcaagggccacgatggcctgtaccagggcctgagcaccgccaccaaggacacctatgacgccctgcacatgcaggccctgcctccaaga

SEQ ID NO: 6265 - DNA, 2229 bp, Artificial Sequence
  Synthetic Polynucleotide
atggccttaccagtgaccgccttgctcctgccgctggccttgctgctccacgccgccaggccggagatcgtgctgacacagagccctgccaccctgtctctgagccctggcgaaagagccaccctgagctgtagagccagccagagcgtgtccagctacctggcctggtatcagcagaagcccggccaggctccccggctgctgatctacgatgccagcaatagagccaccggcatccccgccagattttccggctctggcagcggcaccgacttcaccctgaccatcagctccctggaacccgaggacttcgccgtgtactactgccagcagcggagcaactggcccatcacattcggccagggcacccggctggaaatcaaaggcggaggcggaagtggaggcggaggatctggcggcggaggctctgaagtgcagctggtggaatcaggcggcggactggtgcagcctggcagaagcctgagactgagctgtgccgccagcggcttcaccttcaacgactacgccatgcactgggtgcgccaggcccctggaaaaggactggaatgggtgtccacaatcagctggaacagcggcagcatcggctacgccgatagcgtgaagggccggttcaccatcagccgggacaacgccaagaagtccctgtacctccagatgaacagcctgcgggccgaggacacagccctgtactattgcgccaaggacatccagtacggcaactactactacggcatggacgtgtggggccagggaaccaccgtgaccgtgtcatctacgcgtcaggtggtggataccaccaaggccgtgattaccctccagcctccttgggtgtccgtgttccaagaggaaaccgtgacactgcactgcgaggtgctgcatctgcctggctctagcagcacccagtggtttctgaatggcaccgccacacagaccagcacacccagctacagaatcaccagcgccagcgtgaacgacagcggcgagtacagatgccagagaggactgagcggcagaagcgaccccattcagctggaaatccacagaggctggctgctgctccaggtgtccagcagagtgtttacagagggcgagcccctggctctgagatgtcacgcctggaaggacaagctggtgtacaacgtgctgtactaccggaacggcaaagccttcaagttcttccactggaacagcaacctgaccatcctcaagaccaacatcagccacaacggcacctaccactgtagcggcatgggcaagcacagatacacaagcgccggcatcagcgtgaccgtgaaagagctgtttcccgctcctgtgctgaacgcctctgtgacaagtccactgctggaaggcaaccttgtgaccctgagctgcgagacaaagctgctgctgcaaagacctggcctccagctgtacttcagcttctacatgggcagcaagaccctgcggggcagaaataccagctccgagtaccagatcctgaccgccagaagagaggacagcggcctgtattggtgcgaagccgccaccgaggatggcaatgtgctgaagagaagccccgagctggaactccaggtgctgggactgcaactgcctacacctgtgtggttccacgtgctgttttacctggccgtgggcatcatgtttctggtcaacaccgtcctgtgggtcaccatcagaaaagagctgaagcggaagaagaagtgggacctcgaaatcagcctggactccggccacgaaaagaaagtgatctccagcctgcaagaggaccggcacctggaagaggaactgaagtgccaagagcagaaagaggaacagctgcaagaaggcgtgcaccgcaaagaacctcaaggcgctacaagcactagtagagtgaagttcagcagaagcgccgacgcccctgcctaccagcagggacagaaccaactgtacaacgagctgaacctgggcagacgggaagagtacgacgtgctggacaagcggagaggcagggaccctgagatgggcggaaagccccagcggagaaagaacccccaggaaggactgtataacgaactccagaaagacaagatggccgaagcctacagcgagatcggcatgaagggcgagcggagaagaggcaagggccacgatggcctgtaccagggcctgagcaccgccaccaaggacacctatgacgccctgcacatgcaggccctgcctccaaga

SEQ ID NO: 6266 - DNA, 1851 bp, Artificial Sequence
  Synthetic Polynucleotide
atggccttaccagtgaccgccttgctcctgccgctggccttgctgctccacgccgccaggccggaagtgcagctggttgaatctggcggaggactggttcaggctggcggatctctgagactgtcttgtgccgccagcggcagaacctttagcatgggctggtttagacaggcccctggcaaagagagagagttcgtcgccgccatcacatactctggcggcagcccttactacgccgactctgtgaagggcagattcaccatcagccgggacaacgccaagaacaccgtgtacctccagatgaacagcctgaagcctgaggacaccgccgtgtactactgcgccgccaatccaacatacggcagcgactggaacgccgagaattggggccagggaacccaagtgacagtgtctagcacgcgtcaggtggtggataccaccaaggccgtgattaccctccagcctccttgggtgtccgtgttccaagaggaaaccgtgacactgcactgcgaggtgctgcatctgcctggctctagcagcacccagtggtttctgaatggcaccgccacacagaccagcacacccagctacagaatcaccagcgccagcgtgaacgacagcggcgagtacagatgccagagaggactgagcggcagaagcgaccccattcagctggaaatccacagaggctggctgctgctccaggtgtccagcagagtgtttacagagggcgagcccctggctctgagatgtcacgcctggaaggacaagctggtgtacaacgtgctgtactaccggaacggcaaagccttcaagttcttccactggaacagcaacctgaccatcctcaagaccaacatcagccacaacggcacctaccactgtagcggcatgggcaagcacagatacacaagcgccggcatcagcgtgaccgtgaaagagctgtttcccgctcctgtgctgaacgcctctgtgacaagtccactgctggaaggcaaccttgtgaccctgagctgcgagacaaagctgctgctgcaaagacctggcctccagctgtacttcagcttctacatgggcagcaagaccctgcggggcagaaataccagctccgagtaccagatcctgaccgccagaagagaggacagcggcctgtattggtgcgaagccgccaccgaggatggcaatgtgctgaagagaagccccgagctggaactccaggtgctgggactgcaactgcctacacctgtgtggttccacgtgctgttttacctggccgtgggcatcatgtttctggtcaacaccgtcctgtgggtcaccatcagaaaagagctgaagcggaagaagaagtgggacctcgaaatcagcctggactccggccacgaaaagaaagtgatctccagcctgcaagaggaccggcacctggaagaggaactgaagtgccaagagcagaaagaggaacagctgcaagaaggcgtgcaccgcaaagaacctcaaggcgctacaagcactagtagagtgaagttcagcagaagcgccgacgcccctgcctaccagcagggacagaaccaactgtacaacgagctgaacctgggcagacgggaagagtacgacgtgctggacaagcggagaggcagggaccctgagatgggcggaaagccccagcggagaaagaacccccaggaaggactgtataacgaactccagaaagacaagatggccgaagcctacagcgagatcggcatgaagggcgagcggagaagaggcaagggccacgatggcctgtaccagggcctgagcaccgccaccaaggacacctatgacgccctgcacatgcaggccctgcctccaaga

SEQ ID NO: 6267 - DNA, 1851 bp, Artificial Sequence
  Synthetic Polynucleotide
atggccttaccagtgaccgccttgctcctgccgctggccttgctgctccacgccgccaggccgcagctccagttgcaagagagcggccctggcttggtaaaaccttccgagacccttagcctcacatgcacggttagtgggggcagcatttcctcaggtgattactattggggatggattcggcaacccccgggtaaaggattggagtggattggtcatatttattatagtggagcgacgtactacaacccaagtctcaaatccagggttacaatatccgtcgatacgagcaggaaccaattcagcttgaaactttctagtgtcaccgcagcagacacagccgtctattactgtacgcgggatgactccagtaattggcggtcccgagggcaagggacactggtcacggtctcctcaacgcgtcaggtggtggataccaccaaggccgtgattaccctccagcctccttgggtgtccgtgttccaagaggaaaccgtgacactgcactgcgaggtgctgcatctgcctggctctagcagcacccagtggtttctgaatggcaccgccacacagaccagcacacccagctacagaatcaccagcgccagcgtgaacgacagcggcgagtacagatgccagagaggactgagcggcagaagcgaccccattcagctggaaatccacagaggctggctgctgctccaggtgtccagcagagtgtttacagagggcgagcccctggctctgagatgtcacgcctggaaggacaagctggtgtacaacgtgctgtactaccggaacggcaaagccttcaagttcttccactggaacagcaacctgaccatcctcaagaccaacatcagccacaacggcacctaccactgtagcggcatgggcaagcacagatacacaagcgccggcatcagcgtgaccgtgaaagagctgtttcccgctcctgtgctgaacgcctctgtgacaagtccactgctggaaggcaaccttgtgaccctgagctgcgagacaaagctgctgctgcaaagacctggcctccagctgtacttcagcttctacatgggcagcaagaccctgcggggcagaaataccagctccgagtaccagatcctgaccgccagaagagaggacagcggcctgtattggtgcgaagccgccaccgaggatggcaatgtgctgaagagaagccccgagctggaactccaggtgctgggactgcaactgcctacacctgtgtggttccacgtgctgttttacctggccgtgggcatcatgtttctggtcaacaccgtcctgtgggtcaccatcagaaaagagctgaagcggaagaagaagtgggacctcgaaatcagcctggactccggccacgaaaagaaagtgatctccagcctgcaagaggaccggcacctggaagaggaactgaagtgccaagagcagaaagaggaacagctgcaagaaggcgtgcaccgcaaagaacctcaaggcgctacaagcactagtagagtgaagttcagcagaagcgccgacgcccctgcctaccagcagggacagaaccaactgtacaacgagctgaacctgggcagacgggaagagtacgacgtgctggacaagcggagaggcagggaccctgagatgggcggaaagccccagcggagaaagaacccccaggaaggactgtataacgaactccagaaagacaagatggccgaagcctacagcgagatcggcatgaagggcgagcggagaagaggcaagggccacgatggcctgtaccagggcctgagcaccgccaccaaggacacctatgacgccctgcacatgcaggccctgcctccaaga

SEQ ID NO: 6268 - DNA, 1851 bp, Artificial Sequence
  Synthetic Polynucleotide
atggccttaccagtgaccgccttgctcctgccgctggccttgctgctccacgccgccaggccgcagctccagctgcaagagtctggacctggcctggtcaagcctagcgagacactgagcctgacctgtaccgtgtccggcgatagcatcagcagcggcgattactactggggctggatcagacagcctcctggcaaaggactggaatggatcggccacatctactacagcggcgtgacctactacaaccccagcctgaagtccagagtgaccatcagcgtggacaccagccggaaccagttctccctgaagctgtctagcgtgacagccgccgataccgccgtgtactactgcaccagagaggacagcagcaactggcggagtagaggccagggaacactggtcacagttagctctacgcgtcaggtggtggataccaccaaggccgtgattaccctccagcctccttgggtgtccgtgttccaagaggaaaccgtgacactgcactgcgaggtgctgcatctgcctggctctagcagcacccagtggtttctgaatggcaccgccacacagaccagcacacccagctacagaatcaccagcgccagcgtgaacgacagcggcgagtacagatgccagagaggactgagcggcagaagcgaccccattcagctggaaatccacagaggctggctgctgctccaggtgtccagcagagtgtttacagagggcgagcccctggctctgagatgtcacgcctggaaggacaagctggtgtacaacgtgctgtactaccggaacggcaaagccttcaagttcttccactggaacagcaacctgaccatcctcaagaccaacatcagccacaacggcacctaccactgtagcggcatgggcaagcacagatacacaagcgccggcatcagcgtgaccgtgaaagagctgtttcccgctcctgtgctgaacgcctctgtgacaagtccactgctggaaggcaaccttgtgaccctgagctgcgagacaaagctgctgctgcaaagacctggcctccagctgtacttcagcttctacatgggcagcaagaccctgcggggcagaaataccagctccgagtaccagatcctgaccgccagaagagaggacagcggcctgtattggtgcgaagccgccaccgaggatggcaatgtgctgaagagaagccccgagctggaactccaggtgctgggactgcaactgcctacacctgtgtggttccacgtgctgttttacctggccgtgggcatcatgtttctggtcaacaccgtcctgtgggtcaccatcagaaaagagctgaagcggaagaagaagtgggacctcgaaatcagcctggactccggccacgaaaagaaagtgatctccagcctgcaagaggaccggcacctggaagaggaactgaagtgccaagagcagaaagaggaacagctgcaagaaggcgtgcaccgcaaagaacctcaaggcgctacaagcactagtagagtgaagttcagcagaagcgccgacgcccctgcctaccagcagggacagaaccaactgtacaacgagctgaacctgggcagacgggaagagtacgacgtgctggacaagcggagaggcagggaccctgagatgggcggaaagccccagcggagaaagaacccccaggaaggactgtataacgaactccagaaagacaagatggccgaagcctacagcgagatcggcatgaagggcgagcggagaagaggcaagggccacgatggcctgtaccagggcctgagcaccgccaccaaggacacctatgacgccctgcacatgcaggccctgcctccaaga

SEQ ID NO: 6269 - DNA, 1857 bp, Artificial Sequence
  Synthetic Polynucleotide
atggccttaccagtgaccgccttgctcctgccgctggccttgctgctccacgccgccaggccggaagttcagctgcaagagtctggcggaggactggttcaacctggcggaagcctgagactgtcttgtgccgcctctggcagaaccttcagcagcctgttcatgggctggttcagacaggcccctggcaaagagagagaactggtcgccgccatcagccggtacagcctgtacacctactacgccgacagcgtgaagggcagattcaccatcagcgccgacaacgccaagaacgccgtgtacctccagatgaacagcctgaagccagaggacacagccgtgtactactgcgccagcaaacttgagtacaccagcaacgactacgacagctggggccagggaacccaagtgacagtctcttctacgcgtcaggtggtggataccaccaaggccgtgattaccctccagcctccttgggtgtccgtgttccaagaggaaaccgtgacactgcactgcgaggtgctgcatctgcctggctctagcagcacccagtggtttctgaatggcaccgccacacagaccagcacacccagctacagaatcaccagcgccagcgtgaacgacagcggcgagtacagatgccagagaggactgagcggcagaagcgaccccattcagctggaaatccacagaggctggctgctgctccaggtgtccagcagagtgtttacagagggcgagcccctggctctgagatgtcacgcctggaaggacaagctggtgtacaacgtgctgtactaccggaacggcaaagccttcaagttcttccactggaacagcaacctgaccatcctcaagaccaacatcagccacaacggcacctaccactgtagcggcatgggcaagcacagatacacaagcgccggcatcagcgtgaccgtgaaagagctgtttcccgctcctgtgctgaacgcctctgtgacaagtccactgctggaaggcaaccttgtgaccctgagctgcgagacaaagctgctgctgcaaagacctggcctccagctgtacttcagcttctacatgggcagcaagaccctgcggggcagaaataccagctccgagtaccagatcctgaccgccagaagagaggacagcggcctgtattggtgcgaagccgccaccgaggatggcaatgtgctgaagagaagccccgagctggaactccaggtgctgggactgcaactgcctacacctgtgtggttccacgtgctgttttacctggccgtgggcatcatgtttctggtcaacaccgtcctgtgggtcaccatcagaaaagagctgaagcggaagaagaagtgggacctcgaaatcagcctggactccggccacgaaaagaaagtgatctccagcctgcaagaggaccggcacctggaagaggaactgaagtgccaagagcagaaagaggaacagctgcaagaaggcgtgcaccgcaaagaacctcaaggcgctacaagcactagtagagtgaagttcagcagaagcgccgacgcccctgcctaccagcagggacagaaccaactgtacaacgagctgaacctgggcagacgggaagagtacgacgtgctggacaagcggagaggcagggaccctgagatgggcggaaagccccagcggagaaagaacccccaggaaggactgtataacgaactccagaaagacaagatggccgaagcctacagcgagatcggcatgaagggcgagcggagaagaggcaagggccacgatggcctgtaccagggcctgagcaccgccaccaaggacacctatgacgccctgcacatgcaggccctgcctccaaga

SEQ ID NO: 6270 - DNA, 1881 bp, Artificial Sequence
  Synthetic Polynucleotide
atggccttaccagtgaccgccttgctcctgccgctggccttgctgctccacgccgccaggccggaagtgcagctggttgaatctggcggaggactggttcagcctggcggatctctgagactgtcttgtgccgcctctggcttcgccagcgactactatatcatcggctggttcagacaggcccctggcaaagagagagagggcgtcagctgtatcagcagcagatacgccaacaccaactacgccgacagcgtgaagggcagattcaccatcagccgggacaacgccaagaacaccgtgtacctccagatgaacagcctgaagcctgaggacaccgccgtgtactactgtgccgccgacaccagaagatacacctgtcctgacattgccaccatgcaccggaacttcgattcttggggccagggcacactggtcaccgtttcttctacgcgtcaggtggtggataccaccaaggccgtgattaccctccagcctccttgggtgtccgtgttccaagaggaaaccgtgacactgcactgcgaggtgctgcatctgcctggctctagcagcacccagtggtttctgaatggcaccgccacacagaccagcacacccagctacagaatcaccagcgccagcgtgaacgacagcggcgagtacagatgccagagaggactgagcggcagaagcgaccccattcagctggaaatccacagaggctggctgctgctccaggtgtccagcagagtgtttacagagggcgagcccctggctctgagatgtcacgcctggaaggacaagctggtgtacaacgtgctgtactaccggaacggcaaagccttcaagttcttccactggaacagcaacctgaccatcctcaagaccaacatcagccacaacggcacctaccactgtagcggcatgggcaagcacagatacacaagcgccggcatcagcgtgaccgtgaaagagctgtttcccgctcctgtgctgaacgcctctgtgacaagtccactgctggaaggcaaccttgtgaccctgagctgcgagacaaagctgctgctgcaaagacctggcctccagctgtacttcagcttctacatgggcagcaagaccctgcggggcagaaataccagctccgagtaccagatcctgaccgccagaagagaggacagcggcctgtattggtgcgaagccgccaccgaggatggcaatgtgctgaagagaagccccgagctggaactccaggtgctgggactgcaactgcctacacctgtgtggttccacgtgctgttttacctggccgtgggcatcatgtttctggtcaacaccgtcctgtgggtcaccatcagaaaagagctgaagcggaagaagaagtgggacctcgaaatcagcctggactccggccacgaaaagaaagtgatctccagcctgcaagaggaccggcacctggaagaggaactgaagtgccaagagcagaaagaggaacagctgcaagaaggcgtgcaccgcaaagaacctcaaggcgctacaagcactagtagagtgaagttcagcagaagcgccgacgcccctgcctaccagcagggacagaaccaactgtacaacgagctgaacctgggcagacgggaagagtacgacgtgctggacaagcggagaggcagggaccctgagatgggcggaaagccccagcggagaaagaacccccaggaaggactgtataacgaactccagaaagacaagatggccgaagcctacagcgagatcggcatgaagggcgagcggagaagaggcaagggccacgatggcctgtaccagggcctgagcaccgccaccaaggacacctatgacgccctgcacatgcaggccctgcctccaaga

SEQ ID NO: 6271 - DNA, 1869 bp, Artificial Sequence
  Synthetic Polynucleotide
atggccttaccagtgaccgccttgctcctgccgctggccttgctgctccacgccgccaggccggaagtgcaactggtggaatctggaggctctctggtgcagccagggggaagcctgagactgtcttgtgccgcttccggcttcaccttcgacgactacgccatgagctgggtgcgccaggtgccaggcaaaggcctggaatgggtgtccagcatcaactggagcggcacccacaccgattacgccgactccgtgaaaggcagattcacaatcagcagaaacaacgccaacaataccctgtacctgcagatgaactccctgaagtctgaggatacagcagtgtattattgcgccaagaactggcgggacgccggcaccacttggtttgagaaaagcggctctgccggacagggaacccaagtgacagtgtcctccacgcgtcaggtggtggataccaccaaggccgtgattaccctccagcctccttgggtgtccgtgttccaagaggaaaccgtgacactgcactgcgaggtgctgcatctgcctggctctagcagcacccagtggtttctgaatggcaccgccacacagaccagcacacccagctacagaatcaccagcgccagcgtgaacgacagcggcgagtacagatgccagagaggactgagcggcagaagcgaccccattcagctggaaatccacagaggctggctgctgctccaggtgtccagcagagtgtttacagagggcgagcccctggctctgagatgtcacgcctggaaggacaagctggtgtacaacgtgctgtactaccggaacggcaaagccttcaagttcttccactggaacagcaacctgaccatcctcaagaccaacatcagccacaacggcacctaccactgtagcggcatgggcaagcacagatacacaagcgccggcatcagcgtgaccgtgaaagagctgtttcccgctcctgtgctgaacgcctctgtgacaagtccactgctggaaggcaaccttgtgaccctgagctgcgagacaaagctgctgctgcaaagacctggcctccagctgtacttcagcttctacatgggcagcaagaccctgcggggcagaaataccagctccgagtaccagatcctgaccgccagaagagaggacagcggcctgtattggtgcgaagccgccaccgaggatggcaatgtgctgaagagaagccccgagctggaactccaggtgctgggactgcaactgcctacacctgtgtggttccacgtgctgttttacctggccgtgggcatcatgtttctggtcaacaccgtcctgtgggtcaccatcagaaaagagctgaagcggaagaagaagtgggacctcgaaatcagcctggactccggccacgaaaagaaagtgatctccagcctgcaagaggaccggcacctggaagaggaactgaagtgccaagagcagaaagaggaacagctgcaagaaggcgtgcaccgcaaagaacctcaaggcgctacaagcactagtagagtgaagttcagcagaagcgccgacgcccctgcctaccagcagggacagaaccaactgtacaacgagctgaacctgggcagacgggaagagtacgacgtgctggacaagcggagaggcagggaccctgagatgggcggaaagccccagcggagaaagaacccccaggaaggactgtataacgaactccagaaagacaagatggccgaagcctacagcgagatcggcatgaagggcgagcggagaagaggcaagggccacgatggcctgtaccagggcctgagcaccgccaccaaggacacctatgacgccctgcacatgcaggccctgcctccaaga

SEQ ID NO: 6272 - DNA, 1854 bp, Artificial Sequence
  Synthetic Polynucleotide
atggccttaccagtgaccgccttgctcctgccgctggccttgctgctccacgccgccaggccggaggtgcagctggttgaatctggcggaggactggttcagcctggcggatctctgagactgtcttgtgccgccagcggcttcaacatcaaggatacctgtatcggctgggttcgcagagcccctggcaaagaggaagaactggtcgccaaaatctgcaagtacagcggccacaccagatacgccgacagcgtgaagggcagattcaccatcagcgccgacaccagcaagaacaccgcctacctccagatgaacagcctgagagccgaggacaccgccgtgtactattgtgccgctgtgtccgtcagagatgggcactacaattactggggccagggcaccaccgtgaccgtttcttcaacgcgtcaggtggtggataccaccaaggccgtgattaccctccagcctccttgggtgtccgtgttccaagaggaaaccgtgacactgcactgcgaggtgctgcatctgcctggctctagcagcacccagtggtttctgaatggcaccgccacacagaccagcacacccagctacagaatcaccagcgccagcgtgaacgacagcggcgagtacagatgccagagaggactgagcggcagaagcgaccccattcagctggaaatccacagaggctggctgctgctccaggtgtccagcagagtgtttacagagggcgagcccctggctctgagatgtcacgcctggaaggacaagctggtgtacaacgtgctgtactaccggaacggcaaagccttcaagttcttccactggaacagcaacctgaccatcctcaagaccaacatcagccacaacggcacctaccactgtagcggcatgggcaagcacagatacacaagcgccggcatcagcgtgaccgtgaaagagctgtttcccgctcctgtgctgaacgcctctgtgacaagtccactgctggaaggcaaccttgtgaccctgagctgcgagacaaagctgctgctgcaaagacctggcctccagctgtacttcagcttctacatgggcagcaagaccctgcggggcagaaataccagctccgagtaccagatcctgaccgccagaagagaggacagcggcctgtattggtgcgaagccgccaccgaggatggcaatgtgctgaagagaagccccgagctggaactccaggtgctgggactgcaactgcctacacctgtgtggttccacgtgctgttttacctggccgtgggcatcatgtttctggtcaacaccgtcctgtgggtcaccatcagaaaagagctgaagcggaagaagaagtgggacctcgaaatcagcctggactccggccacgaaaagaaagtgatctccagcctgcaagaggaccggcacctggaagaggaactgaagtgccaagagcagaaagaggaacagctgcaagaaggcgtgcaccgcaaagaacctcaaggcgctacaagcactagtagagtgaagttcagcagaagcgccgacgcccctgcctaccagcagggacagaaccaactgtacaacgagctgaacctgggcagacgggaagagtacgacgtgctggacaagcggagaggcagggaccctgagatgggcggaaagccccagcggagaaagaacccccaggaaggactgtataacgaactccagaaagacaagatggccgaagcctacagcgagatcggcatgaagggcgagcggagaagaggcaagggccacgatggcctgtaccagggcctgagcaccgccaccaaggacacctatgacgccctgcacatgcaggccctgcctccaaga

SEQ ID NO: 6273 - DNA, 1869 bp, Artificial Sequence
  Synthetic Polynucleotide
atggccttaccagtgaccgccttgctcctgccgctggccttgctgctccacgccgccaggccgggctctgacctgggcatcaagctgctgttcgccgctgccaagggccaggacgacgaagtgcggattctgctggctgctggggccgacgtgaacgccaaggatttcgagggctacacccccctgcacgtggccgcctatgatggacacctggaaatcgtggaagtgctgctgaaggctggcgctgatgtgaatgccaaagacagccagggccggacccctctgcatgaagccgcctacagcggccatctggaaattgtggaagtgctgctgaaagccggggcagacgtgaacgctcaggacgacgctggcgagacaccagccgatctggctgcagcttggggccacgaagatatcgccgaggtgctgcagaagacgcgtcaggtggtggataccaccaaggccgtgattaccctccagcctccttgggtgtccgtgttccaagaggaaaccgtgacactgcactgcgaggtgctgcatctgcctggctctagcagcacccagtggtttctgaatggcaccgccacacagaccagcacacccagctacagaatcaccagcgccagcgtgaacgacagcggcgagtacagatgccagagaggactgagcggcagaagcgaccccattcagctggaaatccacagaggctggctgctgctccaggtgtccagcagagtgtttacagagggcgagcccctggctctgagatgtcacgcctggaaggacaagctggtgtacaacgtgctgtactaccggaacggcaaagccttcaagttcttccactggaacagcaacctgaccatcctcaagaccaacatcagccacaacggcacctaccactgtagcggcatgggcaagcacagatacacaagcgccggcatcagcgtgaccgtgaaagagctgtttcccgctcctgtgctgaacgcctctgtgacaagtccactgctggaaggcaaccttgtgaccctgagctgcgagacaaagctgctgctgcaaagacctggcctccagctgtacttcagcttctacatgggcagcaagaccctgcggggcagaaataccagctccgagtaccagatcctgaccgccagaagagaggacagcggcctgtattggtgcgaagccgccaccgaggatggcaatgtgctgaagagaagccccgagctggaactccaggtgctgggactgcaactgcctacacctgtgtggttccacgtgctgttttacctggccgtgggcatcatgtttctggtcaacaccgtcctgtgggtcaccatcagaaaagagctgaagcggaagaagaagtgggacctcgaaatcagcctggactccggccacgaaaagaaagtgatctccagcctgcaagaggaccggcacctggaagaggaactgaagtgccaagagcagaaagaggaacagctgcaagaaggcgtgcaccgcaaagaacctcaaggcgctacaagcactagtagagtgaagttcagcagaagcgccgacgcccctgcctaccagcagggacagaaccaactgtacaacgagctgaacctgggcagacgggaagagtacgacgtgctggacaagcggagaggcagggaccctgagatgggcggaaagccccagcggagaaagaacccccaggaaggactgtataacgaactccagaaagacaagatggccgaagcctacagcgagatcggcatgaagggcgagcggagaagaggcaagggccacgatggcctgtaccagggcctgagcaccgccaccaaggacacctatgacgccctgcacatgcaggccctgcctccaaga

SEQ ID NO: 6274 - DNA, 1671 bp, Artificial Sequence
  Synthetic Polynucleotide
atggccttaccagtgaccgccttgctcctgccgctggccttgctgctccacgccgccaggccggtggacaacaagttcaacaaagagcggtacagcgcctactacgagatttggcaactgcccaacctgaacgtgcggcagaaggccgccttcatcggatctctgcaggacgaccctagccagagcgccaatctgctggccgaggccaagaagctgaacgacgcccaggcccctaaaacgcgtcaggtggtggataccaccaaggccgtgattaccctccagcctccttgggtgtccgtgttccaagaggaaaccgtgacactgcactgcgaggtgctgcatctgcctggctctagcagcacccagtggtttctgaatggcaccgccacacagaccagcacacccagctacagaatcaccagcgccagcgtgaacgacagcggcgagtacagatgccagagaggactgagcggcagaagcgaccccattcagctggaaatccacagaggctggctgctgctccaggtgtccagcagagtgtttacagagggcgagcccctggctctgagatgtcacgcctggaaggacaagctggtgtacaacgtgctgtactaccggaacggcaaagccttcaagttcttccactggaacagcaacctgaccatcctcaagaccaacatcagccacaacggcacctaccactgtagcggcatgggcaagcacagatacacaagcgccggcatcagcgtgaccgtgaaagagctgtttcccgctcctgtgctgaacgcctctgtgacaagtccactgctggaaggcaaccttgtgaccctgagctgcgagacaaagctgctgctgcaaagacctggcctccagctgtacttcagcttctacatgggcagcaagaccctgcggggcagaaataccagctccgagtaccagatcctgaccgccagaagagaggacagcggcctgtattggtgcgaagccgccaccgaggatggcaatgtgctgaagagaagccccgagctggaactccaggtgctgggactgcaactgcctacacctgtgtggttccacgtgctgttttacctggccgtgggcatcatgtttctggtcaacaccgtcctgtgggtcaccatcagaaaagagctgaagcggaagaagaagtgggacctcgaaatcagcctggactccggccacgaaaagaaagtgatctccagcctgcaagaggaccggcacctggaagaggaactgaagtgccaagagcagaaagaggaacagctgcaagaaggcgtgcaccgcaaagaacctcaaggcgctacaagcactagtagagtgaagttcagcagaagcgccgacgcccctgcctaccagcagggacagaaccaactgtacaacgagctgaacctgggcagacgggaagagtacgacgtgctggacaagcggagaggcagggaccctgagatgggcggaaagccccagcggagaaagaacccccaggaaggactgtataacgaactccagaaagacaagatggccgaagcctacagcgagatcggcatgaagggcgagcggagaagaggcaagggccacgatggcctgtaccagggcctgagcaccgccaccaaggacacctatgacgccctgcacatgcaggccctgcctccaaga

SEQ ID NO: 6275 - DNA, 1764 bp, Artificial Sequence
  Synthetic Polynucleotide
atggccttaccagtgaccgccttgctcctgccgctggccttgctgctccacgccgccaggccgctgccagccccgaagaatttggtcgtttcccgtgtcactgaggactctgcacgtctgagctggaccgcaccggacgcggcgttcgacagctttgcaatcggctactgggagtgggatgatgacggcgaggccattgtgctgaccgttccgggtagcgagcgcagctacgatctgaccggtctgaagccgggtacggaatatccggtgtatattgcgggcgtgaagggtggccagtggagcttcccgctgagcgcgatctttaccaccacgcgtcaggtggtggataccaccaaggccgtgattaccctccagcctccttgggtgtccgtgttccaagaggaaaccgtgacactgcactgcgaggtgctgcatctgcctggctctagcagcacccagtggtttctgaatggcaccgccacacagaccagcacacccagctacagaatcaccagcgccagcgtgaacgacagcggcgagtacagatgccagagaggactgagcggcagaagcgaccccattcagctggaaatccacagaggctggctgctgctccaggtgtccagcagagtgtttacagagggcgagcccctggctctgagatgtcacgcctggaaggacaagctggtgtacaacgtgctgtactaccggaacggcaaagccttcaagttcttccactggaacagcaacctgaccatcctcaagaccaacatcagccacaacggcacctaccactgtagcggcatgggcaagcacagatacacaagcgccggcatcagcgtgaccgtgaaagagctgtttcccgctcctgtgctgaacgcctctgtgacaagtccactgctggaaggcaaccttgtgaccctgagctgcgagacaaagctgctgctgcaaagacctggcctccagctgtacttcagcttctacatgggcagcaagaccctgcggggcagaaataccagctccgagtaccagatcctgaccgccagaagagaggacagcggcctgtattggtgcgaagccgccaccgaggatggcaatgtgctgaagagaagccccgagctggaactccaggtgctgggactgcaactgcctacacctgtgtggttccacgtgctgttttacctggccgtgggcatcatgtttctggtcaacaccgtcctgtgggtcaccatcagaaaagagctgaagcggaagaagaagtgggacctcgaaatcagcctggactccggccacgaaaagaaagtgatctccagcctgcaagaggaccggcacctggaagaggaactgaagtgccaagagcagaaagaggaacagctgcaagaaggcgtgcaccgcaaagaacctcaaggcgctacaagcactagtagagtgaagttcagcagaagcgccgacgcccctgcctaccagcagggacagaaccaactgtacaacgagctgaacctgggcagacgggaagagtacgacgtgctggacaagcggagaggcagggaccctgagatgggcggaaagccccagcggagaaagaacccccaggaaggactgtataacgaactccagaaagacaagatggccgaagcctacagcgagatcggcatgaagggcgagcggagaagaggcaagggccacgatggcctgtaccagggcctgagcaccgccaccaaggacacctatgacgccctgcacatgcaggccctgcctccaaga

SEQ ID NO: 6276 - DNA, 1767 bp, Artificial Sequence
  Synthetic Polynucleotide
atggccttaccagtgaccgccttgctcctgccgctggccttgctgctccacgccgccaggccgatgctgcccgctcctaagaatctggtggtgtccagaatcaccgaggacagcgccagactgtcttggacagctcctgatgccgccttcgacagcttccccatccggtacatcgagacactgatctggggcgaagccatctggctggatgtgcctggaagcgagagaagctacgacctgaccggactgaagcctggcacagagtatgccgtggtcatcaccggcgtgaaaggcggcagattctctagccctctggtggcctctttcaccaccacgcgtcaggtggtggataccaccaaggccgtgattaccctccagcctccttgggtgtccgtgttccaagaggaaaccgtgacactgcactgcgaggtgctgcatctgcctggctctagcagcacccagtggtttctgaatggcaccgccacacagaccagcacacccagctacagaatcaccagcgccagcgtgaacgacagcggcgagtacagatgccagagaggactgagcggcagaagcgaccccattcagctggaaatccacagaggctggctgctgctccaggtgtccagcagagtgtttacagagggcgagcccctggctctgagatgtcacgcctggaaggacaagctggtgtacaacgtgctgtactaccggaacggcaaagccttcaagttcttccactggaacagcaacctgaccatcctcaagaccaacatcagccacaacggcacctaccactgtagcggcatgggcaagcacagatacacaagcgccggcatcagcgtgaccgtgaaagagctgtttcccgctcctgtgctgaacgcctctgtgacaagtccactgctggaaggcaaccttgtgaccctgagctgcgagacaaagctgctgctgcaaagacctggcctccagctgtacttcagcttctacatgggcagcaagaccctgcggggcagaaataccagctccgagtaccagatcctgaccgccagaagagaggacagcggcctgtattggtgcgaagccgccaccgaggatggcaatgtgctgaagagaagccccgagctggaactccaggtgctgggactgcaactgcctacacctgtgtggttccacgtgctgttttacctggccgtgggcatcatgtttctggtcaacaccgtcctgtgggtcaccatcagaaaagagctgaagcggaagaagaagtgggacctcgaaatcagcctggactccggccacgaaaagaaagtgatctccagcctgcaagaggaccggcacctggaagaggaactgaagtgccaagagcagaaagaggaacagctgcaagaaggcgtgcaccgcaaagaacctcaaggcgctacaagcactagtagagtgaagttcagcagaagcgccgacgcccctgcctaccagcagggacagaaccaactgtacaacgagctgaacctgggcagacgggaagagtacgacgtgctggacaagcggagaggcagggaccctgagatgggcggaaagccccagcggagaaagaacccccaggaaggactgtataacgaactccagaaagacaagatggccgaagcctacagcgagatcggcatgaagggcgagcggagaagaggcaagggccacgatggcctgtaccagggcctgagcaccgccaccaaggacacctatgacgccctgcacatgcaggccctgcctccaaga

SEQ ID NO: 6277 - DNA, 2418 bp, Artificial Sequence
  Synthetic Polynucleotide
atggccttaccagtgaccgccttgctcctgccgctggccttgctgctccacgccgccaggccgatggccttaccagtgaccgccttgctcctgccgctggccttgctgctccacgccgccaggccgctgttcaatcaagaggtgcagatccctctgaccgagagctactgtggcccctgtcctaagaactggatctgctacaagaacaactgctaccagttcttcgacgagagcaagaattggtacgagagccaggccagctgcatgagccagaatgccagcctgctgaaggtgtacagcaaagaggaccaggacctgctgaaactggtcaagagctaccactggatgggccttgtgcacatccccaccaatggctcttggcagtgggaggacggcagcattctgagccctaacctgctgaccatcatcgagatgcagaagggcgactgcgccctgtacgccagcagctttaagggctacatcgagaattgcagcaccccgaacacctacatctgtatgcagagaaccgttggcggaggcggaagtggaggcggaggatctggcggcggaggctctgacctctttaatcaagaagtccagattccactcaccgaatcctactgcggaccttgtccaaaaaattggatttgttataagaacaactgttatcaattctttgatgagtctaaaaattggtatgagtcccaggcttcctgcatgtctcagaacgcttctctgctgaaagtctactctaaagaagatcaggatctcctgaagctcgtcaagtcttatcattggatggggctcgtccacattcctaccaacggaagctggcaatgggaagatggctccatcctgtctccaaatctgctcacgattattgaaatgcagaaaggggattgtgctctctacgccagctccttcaagggatatattgagaactgtagcacgcccaatacttatatctgtatgcaacggaccgtgacgcgtcaggtggtggataccaccaaggccgtgattaccctccagcctccttgggtgtccgtgttccaagaggaaaccgtgacactgcactgcgaggtgctgcatctgcctggctctagcagcacccagtggtttctgaatggcaccgccacacagaccagcacacccagctacagaatcaccagcgccagcgtgaacgacagcggcgagtacagatgccagagaggactgagcggcagaagcgaccccattcagctggaaatccacagaggctggctgctgctccaggtgtccagcagagtgtttacagagggcgagcccctggctctgagatgtcacgcctggaaggacaagctggtgtacaacgtgctgtactaccggaacggcaaagccttcaagttcttccactggaacagcaacctgaccatcctcaagaccaacatcagccacaacggcacctaccactgtagcggcatgggcaagcacagatacacaagcgccggcatcagcgtgaccgtgaaagagctgtttcccgctcctgtgctgaacgcctctgtgacaagtccactgctggaaggcaaccttgtgaccctgagctgcgagacaaagctgctgctgcaaagacctggcctccagctgtacttcagcttctacatgggcagcaagaccctgcggggcagaaataccagctccgagtaccagatcctgaccgccagaagagaggacagcggcctgtattggtgcgaagccgccaccgaggatggcaatgtgctgaagagaagccccgagctggaactccaggtgctgggactgcaactgcctacacctgtgtggttccacgtgctgttttacctggccgtgggcatcatgtttctggtcaacaccgtcctgtgggtcaccatcagaaaagagctgaagcggaagaagaagtgggacctcgaaatcagcctggactccggccacgaaaagaaagtgatctccagcctgcaagaggaccggcacctggaagaggaactgaagtgccaagagcagaaagaggaacagctgcaagaaggcgtgcaccgcaaagaacctcaaggcgctacaagcactagtagagtgaagttcagcagaagcgccgacgcccctgcctaccagcagggacagaaccaactgtacaacgagctgaacctgggcagacgggaagagtacgacgtgctggacaagcggagaggcagggaccctgagatgggcggaaagccccagcggagaaagaacccccaggaaggactgtataacgaactccagaaagacaagatggccgaagcctacagcgagatcggcatgaagggcgagcggagaagaggcaagggccacgatggcctgtaccagggcctgagcaccgccaccaaggacacctatgacgccctgcacatgcaggccctgcctccaaga

SEQ ID NO: 6278 - DNA, 2058 bp, Artificial Sequence
  Synthetic Polynucleotide
atggccttaccagtgaccgccttgctcctgccgctggccttgctgctccacgccgccaggccgatggagctgactgatttgctcctggcggccatgcttcttgcagtggcaagactaactctgtccagccccgtagctcctgcctgtgaccccagactcctaaataaactgctgcgtgactcccacctccttcacagccgactgagtcagtgtcccgacgtggaccctttgtctatccctgttctgctgcctgctgtggactttagcctgggagaatggaaaacccagacggaacagagcaaggcacaggacattctaggggcagtgtcccttctactggagggagtgatggcagcacgaggacagttggaaccctcctgcctctcatccctcctgggacagctttctgggcaggttcgcctcctcttgggggccctgcagggcctcctaggaacccagcttcctctacagggcaggaccacagctcacaaggaccccaatgccctcttcttgagcttgcaacaactgcttcggggaaaggtgcgcttcctgcttctggtagaaggtcccaccctctgtgtcagacggaccctgccaaccacagctgtcccaagcagtacttctacgcgtcaggtggtggataccaccaaggccgtgattaccctccagcctccttgggtgtccgtgttccaagaggaaaccgtgacactgcactgcgaggtgctgcatctgcctggctctagcagcacccagtggtttctgaatggcaccgccacacagaccagcacacccagctacagaatcaccagcgccagcgtgaacgacagcggcgagtacagatgccagagaggactgagcggcagaagcgaccccattcagctggaaatccacagaggctggctgctgctccaggtgtccagcagagtgtttacagagggcgagcccctggctctgagatgtcacgcctggaaggacaagctggtgtacaacgtgctgtactaccggaacggcaaagccttcaagttcttccactggaacagcaacctgaccatcctcaagaccaacatcagccacaacggcacctaccactgtagcggcatgggcaagcacagatacacaagcgccggcatcagcgtgaccgtgaaagagctgtttcccgctcctgtgctgaacgcctctgtgacaagtccactgctggaaggcaaccttgtgaccctgagctgcgagacaaagctgctgctgcaaagacctggcctccagctgtacttcagcttctacatgggcagcaagaccctgcggggcagaaataccagctccgagtaccagatcctgaccgccagaagagaggacagcggcctgtattggtgcgaagccgccaccgaggatggcaatgtgctgaagagaagccccgagctggaactccaggtgctgggactgcaactgcctacacctgtgtggttccacgtgctgttttacctggccgtgggcatcatgtttctggtcaacaccgtcctgtgggtcaccatcagaaaagagctgaagcggaagaagaagtgggacctcgaaatcagcctggactccggccacgaaaagaaagtgatctccagcctgcaagaggaccggcacctggaagaggaactgaagtgccaagagcagaaagaggaacagctgcaagaaggcgtgcaccgcaaagaacctcaaggcgctacaagcactagtagagtgaagttcagcagaagcgccgacgcccctgcctaccagcagggacagaaccaactgtacaacgagctgaacctgggcagacgggaagagtacgacgtgctggacaagcggagaggcagggaccctgagatgggcggaaagccccagcggagaaagaacccccaggaaggactgtataacgaactccagaaagacaagatggccgaagcctacagcgagatcggcatgaagggcgagcggagaagaggcaagggccacgatggcctgtaccagggcctgagcaccgccaccaaggacacctatgacgccctgcacatgcaggccctgcctccaaga

SEQ ID NO: 6279 - DNA, 1656 bp, Artificial Sequence
  Synthetic Polynucleotide
atggccttaccagtgaccgccttgctcctgccgctggccttgctgctccacgccgccaggccgatggaccccgacctggaaatcagagccgccttcctgcggcagagaaacacagccctgagaacagaggtggccgagctggaacaagaggtgcagcggctggaaaacgaggtgtcccagtacgagacaagatacggccctctcggaggcggaaaaacgcgtacgcgtcaggtggtggataccaccaaggccgtgattaccctccagcctccttgggtgtccgtgttccaagaggaaaccgtgacactgcactgcgaggtgctgcatctgcctggctctagcagcacccagtggtttctgaatggcaccgccacacagaccagcacacccagctacagaatcaccagcgccagcgtgaacgacagcggcgagtacagatgccagagaggactgagcggcagaagcgaccccattcagctggaaatccacagaggctggctgctgctccaggtgtccagcagagtgtttacagagggcgagcccctggctctgagatgtcacgcctggaaggacaagctggtgtacaacgtgctgtactaccggaacggcaaagccttcaagttcttccactggaacagcaacctgaccatcctcaagaccaacatcagccacaacggcacctaccactgtagcggcatgggcaagcacagatacacaagcgccggcatcagcgtgaccgtgaaagagctgtttcccgctcctgtgctgaacgcctctgtgacaagtccactgctggaaggcaaccttgtgaccctgagctgcgagacaaagctgctgctgcaaagacctggcctccagctgtacttcagcttctacatgggcagcaagaccctgcggggcagaaataccagctccgagtaccagatcctgaccgccagaagagaggacagcggcctgtattggtgcgaagccgccaccgaggatggcaatgtgctgaagagaagccccgagctggaactccaggtgctgggactgcaactgcctacacctgtgtggttccacgtgctgttttacctggccgtgggcatcatgtttctggtcaacaccgtcctgtgggtcaccatcagaaaagagctgaagcggaagaagaagtgggacctcgaaatcagcctggactccggccacgaaaagaaagtgatctccagcctgcaagaggaccggcacctggaagaggaactgaagtgccaagagcagaaagaggaacagctgcaagaaggcgtgcaccgcaaagaacctcaaggcgctacaagcactagtagagtgaagttcagcagaagcgccgacgcccctgcctaccagcagggacagaaccaactgtacaacgagctgaacctgggcagacgggaagagtacgacgtgctggacaagcggagaggcagggaccctgagatgggcggaaagccccagcggagaaagaacccccaggaaggactgtataacgaactccagaaagacaagatggccgaagcctacagcgagatcggcatgaagggcgagcggagaagaggcaagggccacgatggcctgtaccagggcctgagcaccgccaccaaggacacctatgacgccctgcacatgcaggccctgcctccaaga

SEQ ID NO: 6280 - DNA, 1581 bp, Artificial Sequence
  Synthetic Polynucleotide
atggccttaccagtgaccgccttgctcctgccgctggccttgctgctccacgccgccaggccggaagttgctgccctcgagaaggaggtagcagctttggaaaaagaagtcgcagcccttgagaaagaagttgcggctctggagaagacgcgtcaggtggtggataccaccaaggccgtgattaccctccagcctccttgggtgtccgtgttccaagaggaaaccgtgacactgcactgcgaggtgctgcatctgcctggctctagcagcacccagtggtttctgaatggcaccgccacacagaccagcacacccagctacagaatcaccagcgccagcgtgaacgacagcggcgagtacagatgccagagaggactgagcggcagaagcgaccccattcagctggaaatccacagaggctggctgctgctccaggtgtccagcagagtgtttacagagggcgagcccctggctctgagatgtcacgcctggaaggacaagctggtgtacaacgtgctgtactaccggaacggcaaagccttcaagttcttccactggaacagcaacctgaccatcctcaagaccaacatcagccacaacggcacctaccactgtagcggcatgggcaagcacagatacacaagcgccggcatcagcgtgaccgtgaaagagctgtttcccgctcctgtgctgaacgcctctgtgacaagtccactgctggaaggcaaccttgtgaccctgagctgcgagacaaagctgctgctgcaaagacctggcctccagctgtacttcagcttctacatgggcagcaagaccctgcggggcagaaataccagctccgagtaccagatcctgaccgccagaagagaggacagcggcctgtattggtgcgaagccgccaccgaggatggcaatgtgctgaagagaagccccgagctggaactccaggtgctgggactgcaactgcctacacctgtgtggttccacgtgctgttttacctggccgtgggcatcatgtttctggtcaacaccgtcctgtgggtcaccatcagaaaagagctgaagcggaagaagaagtgggacctcgaaatcagcctggactccggccacgaaaagaaagtgatctccagcctgcaagaggaccggcacctggaagaggaactgaagtgccaagagcagaaagaggaacagctgcaagaaggcgtgcaccgcaaagaacctcaaggcgctacaagcactagtagagtgaagttcagcagaagcgccgacgcccctgcctaccagcagggacagaaccaactgtacaacgagctgaacctgggcagacgggaagagtacgacgtgctggacaagcggagaggcagggaccctgagatgggcggaaagccccagcggagaaagaacccccaggaaggactgtataacgaactccagaaagacaagatggccgaagcctacagcgagatcggcatgaagggcgagcggagaagaggcaagggccacgatggcctgtaccagggcctgagcaccgccaccaaggacacctatgacgccctgcacatgcaggccctgcctccaaga

SEQ ID NO: 6281 - DNA, 2355 bp, Artificial Sequence
  Synthetic Polynucleotide
atggccttaccagtgaccgccttgctcctgccgctggccttgctgctccacgccgccaggccgctgttcaatcaagaggtgcagatccctctgaccgagagctactgtggcccctgtcctaagaactggatctgctacaagaacaactgctaccagttcttcgacgagagcaagaattggtacgagagccaggccagctgcatgagccagaatgccagcctgctgaaggtgtacagcaaagaggaccaggacctgctgaaactggtcaagagcgcccactggatgggccttgtgcacatccccaccaatggctcttggcagtgggaggacggcagcattctgagccctaacctgctgaccatcatcgagatgcagaagggcgactgcgccctgtacgccagcagctttaagggcttcatcgagaattgcagcaccccgaacacctacatctgtatgcagagaaccgttggcggaggcggaagtggaggcggaggatctggcggcggaggctctgacctctttaatcaagaagtccagattccactcaccgaatcctactgcggaccttgtccaaaaaattggatttgttataagaacaactgttatcaattctttgatgagtctaaaaattggtatgagtcccaggcttcctgcatgtctcagaacgcttctctgctgaaagtctactctaaagaagatcaggatctcctgaagctcgtcaagtctgcccattggatggggctcgtccacattcctaccaacggaagctggcaatgggaagatggctccatcctgtctccaaatctgctcacgattattgaaatgcagaaaggggattgtgctctctacgccagctccttcaagggatttattgagaactgtagcacgcccaatacttatatctgtatgcaacggaccgtgacgcgtcaggtggtggataccaccaaggccgtgattaccctccagcctccttgggtgtccgtgttccaagaggaaaccgtgacactgcactgcgaggtgctgcatctgcctggctctagcagcacccagtggtttctgaatggcaccgccacacagaccagcacacccagctacagaatcaccagcgccagcgtgaacgacagcggcgagtacagatgccagagaggactgagcggcagaagcgaccccattcagctggaaatccacagaggctggctgctgctccaggtgtccagcagagtgtttacagagggcgagcccctggctctgagatgtcacgcctggaaggacaagctggtgtacaacgtgctgtactaccggaacggcaaagccttcaagttcttccactggaacagcaacctgaccatcctcaagaccaacatcagccacaacggcacctaccactgtagcggcatgggcaagcacagatacacaagcgccggcatcagcgtgaccgtgaaagagctgtttcccgctcctgtgctgaacgcctctgtgacaagtccactgctggaaggcaaccttgtgaccctgagctgcgagacaaagctgctgctgcaaagacctggcctccagctgtacttcagcttctacatgggcagcaagaccctgcggggcagaaataccagctccgagtaccagatcctgaccgccagaagagaggacagcggcctgtattggtgcgaagccgccaccgaggatggcaatgtgctgaagagaagccccgagctggaactccaggtgctgggactgcaactgcctacacctgtgtggttccacgtgctgttttacctggccgtgggcatcatgtttctggtcaacaccgtcctgtgggtcaccatcagaaaagagctgaagcggaagaagaagtgggacctcgaaatcagcctggactccggccacgaaaagaaagtgatctccagcctgcaagaggaccggcacctggaagaggaactgaagtgccaagagcagaaagaggaacagctgcaagaaggcgtgcaccgcaaagaacctcaaggcgctacaagcactagtagagtgaagttcagcagaagcgccgacgcccctgcctaccagcagggacagaaccaactgtacaacgagctgaacctgggcagacgggaagagtacgacgtgctggacaagcggagaggcagggaccctgagatgggcggaaagccccagcggagaaagaacccccaggaaggactgtataacgaactccagaaagacaagatggccgaagcctacagcgagatcggcatgaagggcgagcggagaagaggcaagggccacgatggcctgtaccagggcctgagcaccgccaccaaggacacctatgacgccctgcacatgcaggccctgcctccaaga

SEQ ID NO: 6282 - DNA, 2355 bp, Artificial Sequence
  Synthetic Polynucleotide
atggccttaccagtgaccgccttgctcctgccgctggccttgctgctccacgccgccaggccgctgttcaatcaagaggtgcagatccctctgaccgagagctactgtggcccctgtcctaagaactggatctgctacaagaacaactgctaccagttcttcgacgagagcaagaattggtacgagagccaggccagctgcatgagccagaatgccagcctgctgaaggtgtacagcaaagaggaccaggacctgctgaaactggtcaagagcgcccactggatgggccttgtgcacatccccaccaatggctcttggcagtgggaggacggcagcattctgagccctaacctgctgaccatcatcgagatgcagaagggcgactgcgccctgtacgccagcagctttaagggctacatcgagaattgcagcaccccgaacacctacatctgtatgcagagaaccgtttctggcggaggcggctctggaggaggcggaagtggcggcggaggcgacctctttaatcaagaagtccagattccactcaccgaatcctactgcggaccttgtccaaaaaattggatttgttataagaacaactgttatcaattctttgatgagtctaaaaattggtatgagtcccaggcttcctgcatgtctcagaacgcttctctgctgaaagtctactctaaagaagatcaggatctcctgaagctcgtcaagtctgcccattggatggggctcgtccacattcctaccaacggaagctggcaatgggaagatggctccatcctgtctccaaatctgctcacgattattgaaatgcagaaaggggattgtgctctctacgccagctccttcaagggatatattgagaactgtagcacgcccaatacttatatctgtatgcaacggaccgtgacgcgtcaggtggtggataccaccaaggccgtgattaccctccagcctccttgggtgtccgtgttccaagaggaaaccgtgacactgcactgcgaggtgctgcatctgcctggctctagcagcacccagtggtttctgaatggcaccgccacacagaccagcacacccagctacagaatcaccagcgccagcgtgaacgacagcggcgagtacagatgccagagaggactgagcggcagaagcgaccccattcagctggaaatccacagaggctggctgctgctccaggtgtccagcagagtgtttacagagggcgagcccctggctctgagatgtcacgcctggaaggacaagctggtgtacaacgtgctgtactaccggaacggcaaagccttcaagttcttccactggaacagcaacctgaccatcctcaagaccaacatcagccacaacggcacctaccactgtagcggcatgggcaagcacagatacacaagcgccggcatcagcgtgaccgtgaaagagctgtttcccgctcctgtgctgaacgcctctgtgacaagtccactgctggaaggcaaccttgtgaccctgagctgcgagacaaagctgctgctgcaaagacctggcctccagctgtacttcagcttctacatgggcagcaagaccctgcggggcagaaataccagctccgagtaccagatcctgaccgccagaagagaggacagcggcctgtattggtgcgaagccgccaccgaggatggcaatgtgctgaagagaagccccgagctggaactccaggtgctgggactgcaactgcctacacctgtgtggttccacgtgctgttttacctggccgtgggcatcatgtttctggtcaacaccgtcctgtgggtcaccatcagaaaagagctgaagcggaagaagaagtgggacctcgaaatcagcctggactccggccacgaaaagaaagtgatctccagcctgcaagaggaccggcacctggaagaggaactgaagtgccaagagcagaaagaggaacagctgcaagaaggcgtgcaccgcaaagaacctcaaggcgctacaagcactagtagagtgaagttcagcagaagcgccgacgcccctgcctaccagcagggacagaaccaactgtacaacgagctgaacctgggcagacgggaagagtacgacgtgctggacaagcggagaggcagggaccctgagatgggcggaaagccccagcggagaaagaacccccaggaaggactgtataacgaactccagaaagacaagatggccgaagcctacagcgagatcggcatgaagggcgagcggagaagaggcaagggccacgatggcctgtaccagggcctgagcaccgccaccaaggacacctatgacgccctgcacatgcaggccctgcctccaaga

SEQ ID NO: 6283 - protein, 1013 aa, Artificial Sequence; identical to SEQ ID NO: 4020
  Synthetic Polypeptide

SEQ ID NO: 6284 - protein, 1067 aa, Artificial Sequence; identical to SEQ ID NO: 4021
  Synthetic Polypeptide

SEQ ID NO: 6285 - protein, 1218 aa, Artificial Sequence; identical to SEQ ID NO: 4022
  Synthetic Polypeptide

SEQ ID NO: 6286 - protein, 1271 aa, Artificial Sequence; identical to SEQ ID NO: 4023
  Synthetic Polypeptide

SEQ ID NO: 6287 - protein, 1226 aa, Artificial Sequence; identical to SEQ ID NO: 4024
  Synthetic Polypeptide

SEQ ID NO: 6288 - protein, 1363 aa, Artificial Sequence; identical to SEQ ID NO: 4025
  Synthetic Polypeptide

SEQ ID NO: 6289 - protein, 1500 aa, Artificial Sequence; identical to SEQ ID NO: 4026
  Synthetic Polypeptide

SEQ ID NO: 6290 - protein, 1233 aa, Artificial Sequence; identical to SEQ ID NO: 4027
  Synthetic Polypeptide

SEQ ID NO: 6291 - protein, 1241 aa, Artificial Sequence; identical to SEQ ID NO: 4028
  Synthetic Polypeptide

SEQ ID NO: 6292 - protein, 1378 aa, Artificial Sequence; identical to SEQ ID NO: 4029
  Synthetic Polypeptide

SEQ ID NO: 6293 - protein, 1515 aa, Artificial Sequence; identical to SEQ ID NO: 4030
  Synthetic Polypeptide

SEQ ID NO: 6294 - protein, 1248 aa, Artificial Sequence; identical to SEQ ID NO: 4031
  Synthetic Polypeptide

SEQ ID NO: 6295 - protein, 633 aa, Artificial Sequence; identical to SEQ ID NO: 4032
  Synthetic Polypeptide

SEQ ID NO: 6296 - protein, 505 aa, Artificial Sequence; identical to SEQ ID NO: 5254
  Synthetic Polypeptide

SEQ ID NO: 6297 - protein, 505 aa, Artificial Sequence; identical to SEQ ID NO: 5161
  Synthetic Polypeptide

SEQ ID NO: 6298 - protein, 379 aa, Artificial Sequence; identical to SEQ ID NO: 5347
  Synthetic Polypeptide

SEQ ID NO: 6299 - protein, 379 aa, Artificial Sequence; identical to SEQ ID NO: 5348
  Synthetic Polypeptide

SEQ ID NO: 6300 - protein, 379 aa, Artificial Sequence; identical to SEQ ID NO: 5349
  Synthetic Polypeptide

SEQ ID NO: 6301 - protein, 381 aa, Artificial Sequence; identical to SEQ ID NO: 5366
  Synthetic Polypeptide

SEQ ID NO: 6302 - protein, 389 aa, Artificial Sequence; identical to SEQ ID NO: 5369
  Synthetic Polypeptide

SEQ ID NO: 6303 - protein, 385 aa, Artificial Sequence; identical to SEQ ID NO: 5370
  Synthetic Polypeptide

SEQ ID NO: 6304 - protein, 380 aa, Artificial Sequence; identical to SEQ ID NO: 5356
  Synthetic Polypeptide

SEQ ID NO: 6305 - protein, 385 aa, Artificial Sequence; identical to SEQ ID NO: 5410
  Synthetic Polypeptide

SEQ ID NO: 6306 - protein, 319 aa, Artificial Sequence; identical to SEQ ID NO: 5412
  Synthetic Polypeptide

SEQ ID NO: 6307 - protein, 350 aa, Artificial Sequence; identical to SEQ ID NO: 5415
  Synthetic Polypeptide

SEQ ID NO: 6308 - protein, 351 aa, Artificial Sequence; identical to SEQ ID NO: 5421
  Synthetic Polypeptide

SEQ ID NO: 6309 - protein, 568 aa, Artificial Sequence; identical to SEQ ID NO: 5424
  Synthetic Polypeptide

SEQ ID NO: 6310 - protein, 448 aa, Artificial Sequence; identical to SEQ ID NO: 5425
  Synthetic Polypeptide

SEQ ID NO: 6311 - protein, 314 aa, Artificial Sequence; identical to SEQ ID NO: 5426
  Synthetic Polypeptide

SEQ ID NO: 6312 - protein, 289 aa, Artificial Sequence; identical to SEQ ID NO: 5427
  Synthetic Polypeptide

SEQ ID NO: 6313 - protein, 547 aa, Artificial Sequence; identical to SEQ ID NO: 5428
  Synthetic Polypeptide

SEQ ID NO: 6314 - protein, 547 aa, Artificial Sequence; identical to SEQ ID NO: 5429
  Synthetic Polypeptide

SEQ ID NO: 6315 - protein, 1007 aa, Artificial Sequence
  Synthetic Polypeptide
MALPVTALLLPLALLLHAARPDIQMTQSPSSLSASVGDRVTITCKASDHINNWLAWYQQKPGQAPKLLIYGATTLETGVPSRFSGSGSGTDYTLTISSLQPEDFATYYCQQSWNTPWTFGQGTKLEIKRLEGMRTEDLPKAVVFLEPQWYRVLEKDSVTLKCQGAYSPEDNSTQWFHNESLISSQASSYFIDAATVDDSGEYRCQTNLSTLSDPVQLEVHIGWLLLQAPRWVFKEEDPIHLRCHSWKNTALHKVTYLQNGKGRKYFHHNSDFYIPKATLKDSGSYFCRGLVGSKNVSSETVNITITQGLAVSTISSFFPPGYQVSFCLVMVLLFAVDTGLYFSVKTNIRSSTRDWKDHKFKWRKDPQDKRAKRSGSGATNFSLLKQAGDVEENPGPTSMDWIWRILFLVGAATGAHSFEQVQLQQPGAELVKPGASVKMSCKASGYAFSSYWINWMKQKPGQGLEWIGQIYPGDGDTNYNGKFKGRATLTADTSSSTAYMQLSSLTSEDSAVYFCARSITTVVGCAMDYWGQGTSVTVSSTRLQDPCSNCPAGTFCDNNRNQICSPCPPNSFSSAGGQRTCDICRQCKGVFRTRKECSSTSNAECDCTPGFHCLGAGCSMCEQDCKQGQELTKKGCKDCCFGTFNDQKRGICRPWTNCSLDGKSVLVNGTKERDVVCGPSPADLSPGASSVTPPAPAREPGHSPQIISFFLALTSTALLFLLFFLTLRFSVVKRGRKKLLYIFKQPFMRPVQTTQEEDGCSCRFPEEEEGGCELRAKRSGSGVKQTLNFDLLKLAGDVESNPGPSRGHMTEYKPTVRLATRDDVPRAVRTLAAAFADYPATRHTVDPDRHIERVTELQELFLTRVGLDIGKVWVADDGAAVAVWTTPESVEAGAVFAEIGPRMAELSGSRLAAQQQMEGLLAPHRPKEPAWFLATVGVSPDHQGKGLGSAVVLPGVEAAERAGVPAFLETSAPRNLPFYERLGFTVTADVEVPEGPRTWCMTRKPGA

SEQ ID NO: 6316 - protein, 1061 aa, Artificial Sequence
  Synthetic Polypeptide
MALPVTALLLPLALLLHAARPACEVQLLESGGGLIQPGGSLRLSCAASGFTFSSHAMTWVRQAPGKGLEWVSAISGSGDYTHYADSVKGRFTISRDNSKNTVYLQMNSLRAEDSAVYYCAKDEDGGSLLGHRGQGTLVTVSSGTGGGGSGGGGSGGGGSEFGSLEGMRTEDLPKAVVFLEPQWYRVLEKDSVTLKCQGAYSPEDNSTQWFHNESLISSQASSYFIDAATVDDSGEYRCQTNLSTLSDPVQLEVHIGWLLLQAPRWVFKEEDPIHLRCHSWKNTALHKVTYLQNGKGRKYFHHNSDFYIPKATLKDSGSYFCRGLVGSKNVSSETVNITITQGLAVSTISSFFPPGYQVSFCLVMVLLFAVDTGLYFSVKTNIRSSTRDWKDHKFKWRKDPQDKRAKRSGSGATNFSLLKQAGDVEENPGPTSATMDWIWRILFLVGAATGAHSGPEVQLVESGGGLVQAGGSLRLSCAASGRTFSMGWFRQAPGKEREFVAAITYSGGSPYYADSVKGRFTISRDNAKNTVYLQMNSLKPEDTAVYYCAANPTYGSDWNAENWGQGTQVTVSSGSGGGGSGGGGSGGGGSFEGSTRLQDPCSNCPAGTFCDNNRNQICSPCPPNSFSSAGGQRTCDICRQCKGVFRTRKECSSTSNAECDCTPGFHCLGAGCSMCEQDCKQGQELTKKGCKDCCFGTFNDQKRGICRPWTNCSLDGKSVLVNGTKERDVVCGPSPADLSPGASSVTPPAPAREPGHSPQIISFFLALTSTALLFLLFFLTLRFSVVKRGRKKLLYIFKQPFMRPVQTTQEEDGCSCRFPEEEEGGCELRAKRSGSGVKQTLNFDLLKLAGDVESNPGPSRGHMTEYKPTVRLATRDDVPRAVRTLAAAFADYPATRHTVDPDRHIERVTELQELFLTRVGLDIGKVWVADDGAAVAVWTTPESVEAGAVFAEIGPRMAELSGSRLAAQQQMEGLLAPHRPKEPAWFLATVGVSPDHQGKGLGSAVVLPGVEAAERAGVPAFLETSAPRNLPFYERLGFTVTADVEVPEGPRTWCMTRKPGA

SEQ ID NO: 6317 - protein, 1212 aa, Artificial Sequence
  Synthetic Polypeptide
MALPVTALLLPLALLLHAARPDIQMTQSPSSLSASVGDRVTITCKASDHINNWLAWYQQKPGQAPKLLIYGATTLETGVPSRFSGSGSGTDYTLTISSLQPEDFATYYCQQSWNTPWTFGQGTKLEIKRLEGQPKANPTVTLFPPSSEELQANKATLVCLISDFYPGAVTVAWKADGSPVKAGVETTKPSKQSNNKYAASSYLSLTPEQWKSHRSYSCQVTHEGSTVEKTVAPTECSGSGMRTEDLPKAVVFLEPQWYRVLEKDSVTLKCQGAYSPEDNSTQWFHNESLISSQASSYFIDAATVDDSGEYRCQTNLSTLSDPVQLEVHIGWLLLQAPRWVFKEEDPIHLRCHSWKNTALHKVTYLQNGKGRKYFHHNSDFYIPKATLKDSGSYFCRGLVGSKNVSSETVNITITQGLAVSTISSFFPPGYQVSFCLVMVLLFAVDTGLYFSVKTNIRSSTRDWKDHKFKWRKDPQDKRAKRSGSGATNFSLLKQAGDVEENPGPTSMDWIWRILFLVGAATGAHSFEQVQLQQPGAELVKPGASVKMSCKASGYAFSSYWINWMKQKPGQGLEWIGQIYPGDGDTNYNGKFKGRATLTADTSSSTAYMQLSSLTSEDSAVYFCARSITTVVGCAMDYWGQGTSVTVSSTRASTKGPSVFPLAPSSKSTSGGTAALGCLVKDYFPEPVTVSWNSGALTSGVHTFPAVLQSSGLYSLSSVVTVPSSSLGTQTYICNVNHKPSNTKVDKRVEPKSCGTLQDPCSNCPAGTFCDNNRNQICSPCPPNSFSSAGGQRTCDICRQCKGVFRTRKECSSTSNAECDCTPGFHCLGAGCSMCEQDCKQGQELTKKGCKDCCFGTFNDQKRGICRPWTNCSLDGKSVLVNGTKERDVVCGPSPADLSPGASSVTPPAPAREPGHSPQIISFFLALTSTALLFLLFFLTLRFSVVKRGRKKLLYIFKQPFMRPVQTTQEEDGCSCRFPEEEEGGCELRAKRSGSGVKQTLNFDLLKLAGDVESNPGPSRGGIHTMATYEVLCEVARKLGTDDREVVLFLLNVFIPQPTLAQLIGALRALKEEGRLTFPLLAECLFRAGRRDLLRDLLHLDPRFLERHLAGTMSYFSPYQLTVLHVDGELCARDIRSLIFLSKDTIGSRSTPQTFLHWVYCMENLDLLGPTDVDALMSMLRSLSRVDLQRQVQTLMGLHLSGPSHSQHYRHTP

SEQ ID NO: 6318 - protein, 1265 aa, Artificial Sequence
  Synthetic Polypeptide
MALPVTALLLPLALLLHAARPDIQMTQSPSSLSASVGDRVTITCKASDHINNWLAWYQQKPGQAPKLLIYGATTLETGVPSRFSGSGSGTDYTLTISSLQPEDFATYYCQQSWNTPWTFGQGTKLEIKRLEGQPKANPTVTLFPPSSEELQANKATLVCLISDFYPGAVTVAWKADGSPVKAGVETTKPSKQSNNKYAASSYLSLTPEQWKSHRSYSCQVTHEGSTVEKTVAPTECSGSGMRTEDLPKAVVFLEPQWYRVLEKDSVTLKCQGAYSPEDNSTQWFHNESLISSQASSYFIDAATVDDSGEYRCQTNLSTLSDPVQLEVHIGWLLLQAPRWVFKEEDPIHLRCHSWKNTALHKVTYLQNGKGRKYFHHNSDFYIPKATLKDSGSYFCRGLVGSKNVSSETVNITITQGLAVSTISSFFPPGYQVSFCLVMVLLFAVDTGLYFSVKTNIRSSTRDWKDHKFKWRKDPQDKRAKRSGSGATNFSLLKQAGDVEENPGPTSMDWIWRILFLVGAATGAHSFEQVQLQQPGAELVKPGASVKMSCKASGYAFSSYWINWMKQKPGQGLEWIGQIYPGDGDTNYNGKFKGRATLTADTSSSTAYMQLSSLTSEDSAVYFCARSITTVVGCAMDYWGQGTSVTVSSTRASTKGPSVFPLAPSSKSTSGGTAALGCLVKDYFPEPVTVSWNSGALTSGVHTFPAVLQSSGLYSLSSVVTVPSSSLGTQTYICNVNHKPSNTKVDKRVEPKSCGTLQDPCSNCPAGTFCDNNRNQICSPCPPNSFSSAGGQRTCDICRQCKGVFRTRKECSSTSNAECDCTPGFHCLGAGCSMCEQDCKQGQELTKKGCKDCCFGTFNDQKRGICRPWTNCSLDGKSVLVNGTKERDVVCGPSPADLSPGASSVTPPAPAREPGHSPQIISFFLALTSTALLFLLFFLTLRFSVVKRGRKKLLYIFKQPFMRPVQTTQEEDGCSCRFPEEEEGGCELRAKRSGSGVKQTLNFDLLKLAGDVESNPGPSRGGIHTMSDSKEVPSLPFLRHLLEELDSHEDSLLLFLCHDAAPGCTTVTQALCSLSQQRKLTLAALVEMLYVLQRMDLLKSRFGLSKEGAEQLLGTSFLTRYRKLMVCVGEELDSSELRALRLFACNLNPSLSTALSESSRFVELVLALENVGLVSPSSVSVLADMLRTLRRLDLCQQLVEYEQQEQARYRYCYAASPSLPVRTLRRGHGASEHEQLCMPVQESSDSPELLRTPVQESSSDSPEQTT

SEQ ID NO: 6319 - protein, 1220 aa, Artificial Sequence
  Synthetic Polypeptide
MALPVTALLLPLALLLHAARPDIQMTQSPSSLSASVGDRVTITCKASDHINNWLAWYQQKPGQAPKLLIYGATTLETGVPSRFSGSGSGTDYTLTISSLQPEDFATYYCQQSWNTPWTFGQGTKLEIKRLEGQPKANPTVTLFPPSSEELQANKATLVCLISDFYPGAVTVAWKADGSPVKAGVETTKPSKQSNNKYAASSYLSLTPEQWKSHRSYSCQVTHEGSTVEKTVAPTECSGSGMRTEDLPKAVVFLEPQWYRVLEKDSVTLKCQGAYSPEDNSTQWFHNESLISSQASSYFIDAATVDDSGEYRCQTNLSTLSDPVQLEVHIGWLLLQAPRWVFKEEDPIHLRCHSWKNTALHKVTYLQNGKGRKYFHHNSDFYIPKATLKDSGSYFCRGLVGSKNVSSETVNITITQGLAVSTISSFFPPGYQVSFCLVMVLLFAVDTGLYFSVKTNIRSSTRDWKDHKFKWRKDPQDKRAKRSGSGATNFSLLKQAGDVEENPGPTSMDWIWRILFLVGAATGAHSFEQVQLQQPGAELVKPGASVKMSCKASGYAFSSYWINWMKQKPGQGLEWIGQIYPGDGDTNYNGKFKGRATLTADTSSSTAYMQLSSLTSEDSAVYFCARSITTVVGCAMDYWGQGTSVTVSSTRASTKGPSVFPLAPSSKSTSGGTAALGCLVKDYFPEPVTVSWNSGALTSGVHTFPAVLQSSGLYSLSSVVTVPSSSLGTQTYICNVNHKPSNTKVDKRVEPKSCGTLQDPCSNCPAGTFCDNNRNQICSPCPPNSFSSAGGQRTCDICRQCKGVFRTRKECSSTSNAECDCTPGFHCLGAGCSMCEQDCKQGQELTKKGCKDCCFGTFNDQKRGICRPWTNCSLDGKSVLVNGTKERDVVCGPSPADLSPGASSVTPPAPAREPGHSPQIISFFLALTSTALLFLLFFLTLRFSVVKRGRKKLLYIFKQPFMRPVQTTQEEDGCSCRFPEEEEGGCELRAKRSGSGVKQTLNFDLLKLAGDVESNPGPSRGHMTEYKPTVRLATRDDVPRAVRTLAAAFADYPATRHTVDPDRHIERVTELQELFLTRVGLDIGKVWVADDGAAVAVWTTPESVEAGAVFAEIGPRMAELSGSRLAAQQQMEGLLAPHRPKEPAWFLATVGVSPDHQGKGLGSAVVLPGVEAAERAGVPAFLETSAPRNLPFYERLGFTVTADVEVPEGPRTWCMTRKPGA

SEQ ID NO: 6320 - protein, 1357 aa, Artificial Sequence
  Synthetic Polypeptide
MALPVTALLLPLALLLHAARPEVQLVESGGGLVQAGGSLRLSCAASGRTFSMGWFRQAPGKEREFVAAITYSGGSPYYADSVKGRFTISRDNAKNTVYLQMNSLKPEDTAVYYCAANPTYGSDWNAENWGQGTQVTVSSGTGGGGSGGGGSGGGGSEFDIQMTQSPSSLSASVGDRVTITCKASDHINNWLAWYQQKPGQAPKLLIYGATTLETGVPSRFSGSGSGTDYTLTISSLQPEDFATYYCQQSWNTPWTFGQGTKLEIKRLEGQPKANPTVTLFPPSSEELQANKATLVCLISDFYPGAVTVAWKADGSPVKAGVETTKPSKQSNNKYAASSYLSLTPEQWKSHRSYSCQVTHEGSTVEKTVAPTECSGSGMRTEDLPKAVVFLEPQWYRVLEKDSVTLKCQGAYSPEDNSTQWFHNESLISSQASSYFIDAATVDDSGEYRCQTNLSTLSDPVQLEVHIGWLLLQAPRWVFKEEDPIHLRCHSWKNTALHKVTYLQNGKGRKYFHHNSDFYIPKATLKDSGSYFCRGLVGSKNVSSETVNITITQGLAVSTISSFFPPGYQVSFCLVMVLLFAVDTGLYFSVKTNIRSSTRDWKDHKFKWRKDPQDKRAKRSGSGATNFSLLKQAGDVEENPGPTSMDWIWRILFLVGAATGAHSFEQVQLQQPGAELVKPGASVKMSCKASGYAFSSYWINWMKQKPGQGLEWIGQIYPGDGDTNYNGKFKGRATLTADTSSSTAYMQLSSLTSEDSAVYFCARSITTVVGCAMDYWGQGTSVTVSSTRASTKGPSVFPLAPSSKSTSGGTAALGCLVKDYFPEPVTVSWNSGALTSGVHTFPAVLQSSGLYSLSSVVTVPSSSLGTQTYICNVNHKPSNTKVDKRVEPKSCGTLQDPCSNCPAGTFCDNNRNQICSPCPPNSFSSAGGQRTCDICRQCKGVFRTRKECSSTSNAECDCTPGFHCLGAGCSMCEQDCKQGQELTKKGCKDCCFGTFNDQKRGICRPWTNCSLDGKSVLVNGTKERDVVCGPSPADLSPGASSVTPPAPAREPGHSPQIISFFLALTSTALLFLLFFLTLRFSVVKRGRKKLLYIFKQPFMRPVQTTQEEDGCSCRFPEEEEGGCELRAKRSGSGVKQTLNFDLLKLAGDVESNPGPSRGHMTEYKPTVRLATRDDVPRAVRTLAAAFADYPATRHTVDPDRHIERVTELQELFLTRVGLDIGKVWVADDGAAVAVWTTPESVEAGAVFAEIGPRMAELSGSRLAAQQQMEGLLAPHRPKEPAWFLATVGVSPDHQGKGLGSAVVLPGVEAAERAGVPAFLETSAPRNLPFYERLGFTVTADVEVPEGPRTWCMTRKPGA

SEQ ID NO: 6321 - protein, 1494 aa, Artificial Sequence
  Synthetic Polypeptide
MALPVTALLLPLALLLHAARPEVQLVESGGGLVQAGGSLRLSCAASGRTFSMGWFRQAPGKEREFVAAITYSGGSPYYADSVKGRFTISRDNAKNTVYLQMNSLKPEDTAVYYCAANPTYGSDWNAENWGQGTQVTVSSGTGGGGSGGGGSGGGGSEFDIQMTQSPSSLSASVGDRVTITCKASDHINNWLAWYQQKPGQAPKLLIYGATTLETGVPSRFSGSGSGTDYTLTISSLQPEDFATYYCQQSWNTPWTFGQGTKLEIKRLEGQPKANPTVTLFPPSSEELQANKATLVCLISDFYPGAVTVAWKADGSPVKAGVETTKPSKQSNNKYAASSYLSLTPEQWKSHRSYSCQVTHEGSTVEKTVAPTECSGSGMRTEDLPKAVVFLEPQWYRVLEKDSVTLKCQGAYSPEDNSTQWFHNESLISSQASSYFIDAATVDDSGEYRCQTNLSTLSDPVQLEVHIGWLLLQAPRWVFKEEDPIHLRCHSWKNTALHKVTYLQNGKGRKYFHHNSDFYIPKATLKDSGSYFCRGLVGSKNVSSETVNITITQGLAVSTISSFFPPGYQVSFCLVMVLLFAVDTGLYFSVKTNIRSSTRDWKDHKFKWRKDPQDKRAKRSGSGATNFSLLKQAGDVEENPGPTSMDWIWRILFLVGAATGAHSGPEVQLVESGGGLVQAGGSLRLSCAASGRTFTMGWFRQAPGKEREFVAAISLSPTLAYYADSVKGRFTISRDNAKNTVVLQMNSLKPEDTALYYCAADRKSVMSIRPDYWGQGTQVTVSSGSGGGGSGGGGSGGGGSFEQVQLQQPGAELVKPGASVKMSCKASGYAFSSYWINWMKQKPGQGLEWIGQIYPGDGDTNYNGKFKGRATLTADTSSSTAYMQLSSLTSEDSAVYFCARSITTVVGCAMDYWGQGTSVTVSSTRASTKGPSVFPLAPSSKSTSGGTAALGCLVKDYFPEPVTVSWNSGALTSGVHTFPAVLQSSGLYSLSSVVTVPSSSLGTQTYICNVNHKPSNTKVDKRVEPKSCGTLQDPCSNCPAGTFCDNNRNQICSPCPPNSFSSAGGQRTCDICRQCKGVFRTRKECSSTSNAECDCTPGFHCLGAGCSMCEQDCKQGQELTKKGCKDCCFGTFNDQKRGICRPWTNCSLDGKSVLVNGTKERDVVCGPSPADLSPGASSVTPPAPAREPGHSPQIISFFLALTSTALLFLLFFLTLRFSVVKRGRKKLLYIFKQPFMRPVQTTQEEDGCSCRFPEEEEGGCELRAKRSGSGVKQTLNFDLLKLAGDVESNPGPSRGHMTEYKPTVRLATRDDVPRAVRTLAAAFADYPATRHTVDPDRHIERVTELQELFLTRVGLDIGKVWVADDGAAVAVWTTPESVEAGAVFAEIGPRMAELSGSRLAAQQQMEGLLAPHRPKEPAWFLATVGVSPDHQGKGLGSAVVLPGVEAAERAGVPAFLETSAPRNLPFYERLGFTVTADVEVPEGPRTWCMTRKPGA

SEQ ID NO: 6322 - protein, 1227 aa, Artificial Sequence
  Synthetic Polypeptide
MALPVTALLLPLALLLHAARPEVQLVESGGGLVQAGGSLRLSCAASGRTFSMGWFRQAPGKEREFVAAITYSGGSPYYADSVKGRFTISRDNAKNTVYLQMNSLKPEDTAVYYCAANPTYGSDWNAENWGQGTQVTVSSLEGQPKANPTVTLFPPSSEELQANKATLVCLISDFYPGAVTVAWKADGSPVKAGVETTKPSKQSNNKYAASSYLSLTPEQWKSHRSYSCQVTHEGSTVEKTVAPTECSGSGMRTEDLPKAVVFLEPQWYRVLEKDSVTLKCQGAYSPEDNSTQWFHNESLISSQASSYFIDAATVDDSGEYRCQTNLSTLSDPVQLEVHIGWLLLQAPRWVFKEEDPIHLRCHSWKNTALHKVTYLQNGKGRKYFHHNSDFYIPKATLKDSGSYFCRGLVGSKNVSSETVNITITQGLAVSTISSFFPPGYQVSFCLVMVLLFAVDTGLYFSVKTNIRSSTRDWKDHKFKWRKDPQDKRAKRSGSGATNFSLLKQAGDVEENPGPTSMDWIWRILFLVGAATGAHSGPEVQLVESGGGLVQAGGSLRLSCAASGRTFTMGWFRQAPGKEREFVAAISLSPTLAYYADSVKGRFTISRDNAKNTVVLQMNSLKPEDTALYYCAADRKSVMSIRPDYWGQGTQVTVSSTRASTKGPSVFPLAPSSKSTSGGTAALGCLVKDYFPEPVTVSWNSGALTSGVHTFPAVLQSSGLYSLSSVVTVPSSSLGTQTYICNVNHKPSNTKVDKRVEPKSCGTLQDPCSNCPAGTFCDNNRNQICSPCPPNSFSSAGGQRTCDICRQCKGVFRTRKECSSTSNAECDCTPGFHCLGAGCSMCEQDCKQGQELTKKGCKDCCFGTFNDQKRGICRPWTNCSLDGKSVLVNGTKERDVVCGPSPADLSPGASSVTPPAPAREPGHSPQIISFFLALTSTALLFLLFFLTLRFSVVKRGRKKLLYIFKQPFMRPVQTTQEEDGCSCRFPEEEEGGCELRAKRSGSGVKQTLNFDLLKLAGDVESNPGPSRGHMTEYKPTVRLATRDDVPRAVRTLAAAFADYPATRHTVDPDRHIERVTELQELFLTRVGLDIGKVWVADDGAAVAVWTTPESVEAGAVFAEIGPRMAELSGSRLAAQQQMEGLLAPHRPKEPAWFLATVGVSPDHQGKGLGSAVVLPGVEAAERAGVPAFLETSAPRNLPFYERLGFTVTADVEVPEGPRTWCMTRKPGA

SEQ ID NO: 6323 - protein, 1235 aa, Artificial Sequence
  Synthetic Polypeptide
MALPVTALLLPLALLLHAARPDIQMTQSPSSLSASVGDRVTITCKASDHINNWLAWYQQKPGQAPKLLIYGATTLETGVPSRFSGSGSGTDYTLTISSLQPEDFATYYCQQSWNTPWTFGQGTKLEIKRLEDLKNVFPPEVAVFEPSEAEISHTQKATLVCLATGFYPDHVELSWWVNGKEVHSGVSTDPQPLKEQPALNDSRYCLSSRLRVSATFWQNPRNHFRCQVQFYGLSENDEWTQDRAKPVTQIVSAEAWGRADCGSGMRTEDLPKAVVFLEPQWYRVLEKDSVTLKCQGAYSPEDNSTQWFHNESLISSQASSYFIDAATVDDSGEYRCQTNLSTLSDPVQLEVHIGWLLLQAPRWVFKEEDPIHLRCHSWKNTALHKVTYLQNGKGRKYFHHNSDFYIPKATLKDSGSYFCRGLVGSKNVSSETVNITITQGLAVSTISSFFPPGYQVSFCLVMVLLFAVDTGLYFSVKTNIRSSTRDWKDHKFKWRKDPQDKRAKRSGSGATNFSLLKQAGDVEENPGPTSMDWIWRILFLVGAATGAHSFEQVQLQQPGAELVKPGASVKMSCKASGYAFSSYWINWMKQKPGQGLEWIGQIYPGDGDTNYNGKFKGRATLTADTSSSTAYMQLSSLTSEDSAVYFCARSITTVVGCAMDYWGQGTSVTVSSTRIQNPDPAVYQLRDSKSSDKSVCLFTDFDSQTNVSQSKDSDVYITDKTVLDMRSMDFKSNSAVAWSNKSDFACANAFNNSIIPEDTFFPSPESSCGTLQDPCSNCPAGTFCDNNRNQICSPCPPNSFSSAGGQRTCDICRQCKGVFRTRKECSSTSNAECDCTPGFHCLGAGCSMCEQDCKQGQELTKKGCKDCCFGTFNDQKRGICRPWTNCSLDGKSVLVNGTKERDVVCGPSPADLSPGASSVTPPAPAREPGHSPQIISFFLALTSTALLFLLFFLTLRFSVVKRGRKKLLYIFKQPFMRPVQTTQEEDGCSCRFPEEEEGGCELRAKRSGSGVKQTLNFDLLKLAGDVESNPGPSRGHMTEYKPTVRLATRDDVPRAVRTLAAAFADYPATRHTVDPDRHIERVTELQELFLTRVGLDIGKVWVADDGAAVAVWTTPESVEAGAVFAEIGPRMAELSGSRLAAQQQMEGLLAPHRPKEPAWFLATVGVSPDHQGKGLGSAVVLPGVEAAERAGVPAFLETSAPRNLPFYERLGFTVTADVEVPEGPRTWCMTRKPGA

SEQ ID NO: 6324 - protein, 1372 aa, Artificial Sequence
  Synthetic Polypeptide
MALPVTALLLPLALLLHAARPEVQLVESGGGLVQAGGSLRLSCAASGRTFSMGWFRQAPGKEREFVAAITYSGGSPYYADSVKGRFTISRDNAKNTVYLQMNSLKPEDTAVYYCAANPTYGSDWNAENWGQGTQVTVSSGTGGGGSGGGGSGGGGSEFDIQMTQSPSSLSASVGDRVTITCKASDHINNWLAWYQQKPGQAPKLLIYGATTLETGVPSRFSGSGSGTDYTLTISSLQPEDFATYYCQQSWNTPWTFGQGTKLEIKRLEDLKNVFPPEVAVFEPSEAEISHTQKATLVCLATGFYPDHVELSWWVNGKEVHSGVSTDPQPLKEQPALNDSRYCLSSRLRVSATFWQNPRNHFRCQVQFYGLSENDEWTQDRAKPVTQIVSAEAWGRADCGSGMRTEDLPKAVVFLEPQWYRVLEKDSVTLKCQGAYSPEDNSTQWFHNESLISSQASSYFIDAATVDDSGEYRCQTNLSTLSDPVQLEVHIGWLLLQAPRWVFKEEDPIHLRCHSWKNTALHKVTYLQNGKGRKYFHHNSDFYIPKATLKDSGSYFCRGLVGSKNVSSETVNITITQGLAVSTISSFFPPGYQVSFCLVMVLLFAVDTGLYFSVKTNIRSSTRDWKDHKFKWRKDPQDKRAKRSGSGATNFSLLKQAGDVEENPGPTSMDWIWRILFLVGAATGAHSFEQVQLQQPGAELVKPGASVKMSCKASGYAFSSYWINWMKQKPGQGLEWIGQIYPGDGDTNYNGKFKGRATLTADTSSSTAYMQLSSLTSEDSAVYFCARSITTVVGCAMDYWGQGTSVTVSSTRIQNPDPAVYQLRDSKSSDKSVCLFTDFDSQTNVSQSKDSDVYITDKTVLDMRSMDFKSNSAVAWSNKSDFACANAFNNSIIPEDTFFPSPESSCGTLQDPCSNCPAGTFCDNNRNQICSPCPPNSFSSAGGQRTCDICRQCKGVFRTRKECSSTSNAECDCTPGFHCLGAGCSMCEQDCKQGQELTKKGCKDCCFGTFNDQKRGICRPWTNCSLDGKSVLVNGTKERDVVCGPSPADLSPGASSVTPPAPAREPGHSPQIISFFLALTSTALLFLLFFLTLRFSVVKRGRKKLLYIFKQPFMRPVQTTQEEDGCSCRFPEEEEGGCELRAKRSGSGVKQTLNFDLLKLAGDVESNPGPSRGHMTEYKPTVRLATRDDVPRAVRTLAAAFADYPATRHTVDPDRHIERVTELQELFLTRVGLDIGKVWVADDGAAVAVWTTPESVEAGAVFAEIGPRMAELSGSRLAAQQQMEGLLAPHRPKEPAWFLATVGVSPDHQGKGLGSAVVLPGVEAAERAGVPAFLETSAPRNLPFYERLGFTVTADVEVPEGPRTWCMTRKPGA

SEQ ID NO: 6325 - protein, 1509 aa, Artificial Sequence
  Synthetic Polypeptide
MALPVTALLLPLALLLHAARPEVQLVESGGGLVQAGGSLRLSCAASGRTFSMGWFRQAPGKEREFVAAITYSGGSPYYADSVKGRFTISRDNAKNTVYLQMNSLKPEDTAVYYCAANPTYGSDWNAENWGQGTQVTVSSGTGGGGSGGGGSGGGGSEFDIQMTQSPSSLSASVGDRVTITCKASDHINNWLAWYQQKPGQAPKLLIYGATTLETGVPSRFSGSGSGTDYTLTISSLQPEDFATYYCQQSWNTPWTFGQGTKLEIKRLEDLKNVFPPEVAVFEPSEAEISHTQKATLVCLATGFYPDHVELSWWVNGKEVHSGVSTDPQPLKEQPALNDSRYCLSSRLRVSATFWQNPRNHFRCQVQFYGLSENDEWTQDRAKPVTQIVSAEAWGRADCGSGMRTEDLPKAVVFLEPQWYRVLEKDSVTLKCQGAYSPEDNSTQWFHNESLISSQASSYFIDAATVDDSGEYRCQTNLSTLSDPVQLEVHIGWLLLQAPRWVFKEEDPIHLRCHSWKNTALHKVTYLQNGKGRKYFHHNSDFYIPKATLKDSGSYFCRGLVGSKNVSSETVNITITQGLAVSTISSFFPPGYQVSFCLVMVLLFAVDTGLYFSVKTNIRSSTRDWKDHKFKWRKDPQDKRAKRSGSGATNFSLLKQAGDVEENPGPTSMDWIWRILFLVGAATGAHSGPEVQLVESGGGLVQAGGSLRLSCAASGRTFTMGWFRQAPGKEREFVAAISLSPTLAYYADSVKGRFTISRDNAKNTVVLQMNSLKPEDTALYYCAADRKSVMSIRPDYWGQGTQVTVSSGSGGGGSGGGGSGGGGSFEQVQLQQPGAELVKPGASVKMSCKASGYAFSSYWINWMKQKPGQGLEWIGQIYPGDGDTNYNGKFKGRATLTADTSSSTAYMQLSSLTSEDSAVYFCARSITTVVGCAMDYWGQGTSVTVSSTRIQNPDPAVYQLRDSKSSDKSVCLFTDFDSQTNVSQSKDSDVYITDKTVLDMRSMDFKSNSAVAWSNKSDFACANAFNNSIIPEDTFFPSPESSCGTLQDPCSNCPAGTFCDNNRNQICSPCPPNSFSSAGGQRTCDICRQCKGVFRTRKECSSTSNAECDCTPGFHCLGAGCSMCEQDCKQGQELTKKGCKDCCFGTFNDQKRGICRPWTNCSLDGKSVLVNGTKERDVVCGPSPADLSPGASSVTPPAPAREPGHSPQIISFFLALTSTALLFLLFFLTLRFSVVKRGRKKLLYIFKQPFMRPVQTTQEEDGCSCRFPEEEEGGCELRAKRSGSGVKQTLNFDLLKLAGDVESNPGPSRGHMTEYKPTVRLATRDDVPRAVRTLAAAFADYPATRHTVDPDRHIERVTELQELFLTRVGLDIGKVWVADDGAAVAVWTTPESVEAGAVFAEIGPRMAELSGSRLAAQQQMEGLLAPHRPKEPAWFLATVGVSPDHQGKGLGSAVVLPGVEAAERAGVPAFLETSAPRNLPFYERLGFTVTADVEVPEGPRTWCMTRKPGA

SEQ ID NO: 6326 - protein, 1242 aa, Artificial Sequence
  Synthetic Polypeptide
MALPVTALLLPLALLLHAARPEVQLVESGGGLVQAGGSLRLSCAASGRTFSMGWFRQAPGKEREFVAAITYSGGSPYYADSVKGRFTISRDNAKNTVYLQMNSLKPEDTAVYYCAANPTYGSDWNAENWGQGTQVTVSSLEDLKNVFPPEVAVFEPSEAEISHTQKATLVCLATGFYPDHVELSWWVNGKEVHSGVSTDPQPLKEQPALNDSRYCLSSRLRVSATFWQNPRNHFRCQVQFYGLSENDEWTQDRAKPVTQIVSAEAWGRADCGSGMRTEDLPKAVVFLEPQWYRVLEKDSVTLKCQGAYSPEDNSTQWFHNESLISSQASSYFIDAATVDDSGEYRCQTNLSTLSDPVQLEVHIGWLLLQAPRWVFKEEDPIHLRCHSWKNTALHKVTYLQNGKGRKYFHHNSDFYIPKATLKDSGSYFCRGLVGSKNVSSETVNITITQGLAVSTISSFFPPGYQVSFCLVMVLLFAVDTGLYFSVKTNIRSSTRDWKDHKFKWRKDPQDKRAKRSGSGATNFSLLKQAGDVEENPGPTSMDWIWRILFLVGAATGAHSGPEVQLVESGGGLVQAGGSLRLSCAASGRTFTMGWFRQAPGKEREFVAAISLSPTLAYYADSVKGRFTISRDNAKNTVVLQMNSLKPEDTALYYCAADRKSVMSIRPDYWGQGTQVTVSSTRIQNPDPAVYQLRDSKSSDKSVCLFTDFDSQTNVSQSKDSDVYITDKTVLDMRSMDFKSNSAVAWSNKSDFACANAFNNSIIPEDTFFPSPESSCGTLQDPCSNCPAGTFCDNNRNQICSPCPPNSFSSAGGQRTCDICRQCKGVFRTRKECSSTSNAECDCTPGFHCLGAGCSMCEQDCKQGQELTKKGCKDCCFGTFNDQKRGICRPWTNCSLDGKSVLVNGTKERDVVCGPSPADLSPGASSVTPPAPAREPGHSPQIISFFLALTSTALLFLLFFLTLRFSVVKRGRKKLLYIFKQPFMRPVQTTQEEDGCSCRFPEEEEGGCELRAKRSGSGVKQTLNFDLLKLAGDVESNPGPSRGHMTEYKPTVRLATRDDVPRAVRTLAAAFADYPATRHTVDPDRHIERVTELQELFLTRVGLDIGKVWVADDGAAVAVWTTPESVEAGAVFAEIGPRMAELSGSRLAAQQQMEGLLAPHRPKEPAWFLATVGVSPDHQGKGLGSAVVLPGVEAAERAGVPAFLETSAPRNLPFYERLGFTVTADVEVPEGPRTWCMTRKPGA

SEQ ID NO: 6327 - protein, 633 aa, Artificial Sequence; identical to SEQ ID NO: 4032
  Synthetic Polypeptide

SEQ ID NO: 6328 - protein, 499 aa, Artificial Sequence
  Synthetic Polypeptide
MALPVTALLLPLALLLHAARPDIQMTQSPSSLSASVGDRVTITCKASDHINNWLAWYQQKPGQAPKLLIYGATTLETGVPSRFSGSGSGTDYTLTISSLQPEDFATYYCQQSWNTPWTFGQGTKLEIKRGGGGSGGGGSGGGGSQVQLQQPGAELVKPGASVKMSCKASGYAFSSYWINWMKQKPGQGLEWIGQIYPGDGDTNYNGKFKGRATLTADTSSSTAYMQLSSLTSEDSAVYFCARSITTVVGCAMDYWGQGTSVTVSSTRLQDPCSNCPAGTFCDNNRNQICSPCPPNSFSSAGGQRTCDICRQCKGVFRTRKECSSTSNAECDCTPGFHCLGAGCSMCEQDCKQGQELTKKGCKDCCFGTFNDQKRGICRPWTNCSLDGKSVLVNGTKERDVVCGPSPADLSPGASSVTPPAPAREPGHSPQIISFFLALTSTALLFLLFFLTLRFSVVKRGRKKLLYIFKQPFMRPVQTTQEEDGCSCRFPEEEEGGCEL

SEQ ID NO: 6329 - protein, 499 aa, Artificial Sequence
  Synthetic Polypeptide
MALPVTALLLPLALLLHAARPEIVLTQSPATLSLSPGERATLSCRASQSVSSYLAWYQQKPGQAPRLLIYDASNRATGIPARFSGSGSGTDFTLTISSLEPEDFAVYYCQQRSNWPITFGQGTRLEIKGGGGSGGGGSGGGGSEVQLVESGGGLVQPGRSLRLSCAASGFTFNDYAMHWVRQAPGKGLEWVSTISWNSGSIGYADSVKGRFTISRDNAKKSLYLQMNSLRAEDTALYYCAKDIQYGNYYYGMDVWGQGTTVTVSSTRLQDPCSNCPAGTFCDNNRNQICSPCPPNSFSSAGGQRTCDICRQCKGVFRTRKECSSTSNAECDCTPGFHCLGAGCSMCEQDCKQGQELTKKGCKDCCFGTFNDQKRGICRPWTNCSLDGKSVLVNGTKERDVVCGPSPADLSPGASSVTPPAPAREPGHSPQIISFFLALTSTALLFLLFFLTLRFSVVKRGRKKLLYIFKQPFMRPVQTTQEEDGCSCRFPEEEEGGCEL

SEQ ID NO: 6330 - protein, 373 aa, Artificial Sequence
  Synthetic Polypeptide
MALPVTALLLPLALLLHAARPEVQLVESGGGLVQAGGSLRLSCAASGRTFSMGWFRQAPGKEREFVAAITYSGGSPYYADSVKGRFTISRDNAKNTVYLQMNSLKPEDTAVYYCAANPTYGSDWNAENWGQGTQVTVSSTRLQDPCSNCPAGTFCDNNRNQICSPCPPNSFSSAGGQRTCDICRQCKGVFRTRKECSSTSNAECDCTPGFHCLGAGCSMCEQDCKQGQELTKKGCKDCCFGTFNDQKRGICRPWTNCSLDGKSVLVNGTKERDVVCGPSPADLSPGASSVTPPAPAREPGHSPQIISFFLALTSTALLFLLFFLTLRFSVVKRGRKKLLYIFKQPFMRPVQTTQEEDGCSCRFPEEEEGGCEL

SEQ ID NO: 6331 - protein, 373 aa, Artificial Sequence
  Synthetic Polypeptide
MALPVTALLLPLALLLHAARPQLQLQESGPGLVKPSETLSLTCTVSGGSISSGDYYWGWIRQPPGKGLEWIGHIYYSGATYYNPSLKSRVTISVDTSRNQFSLKLSSVTAADTAVYYCTRDDSSNWRSRGQGTLVTVSSTRLQDPCSNCPAGTFCDNNRNQICSPCPPNSFSSAGGQRTCDICRQCKGVFRTRKECSSTSNAECDCTPGFHCLGAGCSMCEQDCKQGQELTKKGCKDCCFGTFNDQKRGICRPWTNCSLDGKSVLVNGTKERDVVCGPSPADLSPGASSVTPPAPAREPGHSPQIISFFLALTSTALLFLLFFLTLRFSVVKRGRKKLLYIFKQPFMRPVQTTQEEDGCSCRFPEEEEGGCEL

SEQ ID NO: 6332 - protein, 373 aa, Artificial Sequence
  Synthetic Polypeptide
MALPVTALLLPLALLLHAARPQLQLQESGPGLVKPSETLSLTCTVSGDSISSGDYYWGWIRQPPGKGLEWIGHIYYSGVTYYNPSLKSRVTISVDTSRNQFSLKLSSVTAADTAVYYCTREDSSNWRSRGQGTLVTVSSTRLQDPCSNCPAGTFCDNNRNQICSPCPPNSFSSAGGQRTCDICRQCKGVFRTRKECSSTSNAECDCTPGFHCLGAGCSMCEQDCKQGQELTKKGCKDCCFGTFNDQKRGICRPWTNCSLDGKSVLVNGTKERDVVCGPSPADLSPGASSVTPPAPAREPGHSPQIISFFLALTSTALLFLLFFLTLRFSVVKRGRKKLLYIFKQPFMRPVQTTQEEDGCSCRFPEEEEGGCEL

SEQ ID NO: 6333 - protein, 375 aa, Artificial Sequence
  Synthetic Polypeptide
MALPVTALLLPLALLLHAARPEVQLQESGGGLVQPGGSLRLSCAASGRTFSSLFMGWFRQAPGKERELVAAISRYSLYTYYADSVKGRFTISADNAKNAVYLQMNSLKPEDTAVYYCASKLEYTSNDYDSWGQGTQVTVSSTRLQDPCSNCPAGTFCDNNRNQICSPCPPNSFSSAGGQRTCDICRQCKGVFRTRKECSSTSNAECDCTPGFHCLGAGCSMCEQDCKQGQELTKKGCKDCCFGTFNDQKRGICRPWTNCSLDGKSVLVNGTKERDVVCGPSPADLSPGASSVTPPAPAREPGHSPQIISFFLALTSTALLFLLFFLTLRFSVVKRGRKKLLYIFKQPFMRPVQTTQEEDGCSCRFPEEEEGGCEL

SEQ ID NO: 6334 - protein, 383 aa, Artificial Sequence
  Synthetic Polypeptide
MALPVTALLLPLALLLHAARPEVQLVESGGGLVQPGGSLRLSCAASGFASDYYIIGWFRQAPGKEREGVSCISSRYANTNYADSVKGRFTISRDNAKNTVYLQMNSLKPEDTAVYYCAADTRRYTCPDIATMHRNFDSWGQGTLVTVSSTRLQDPCSNCPAGTFCDNNRNQICSPCPPNSFSSAGGQRTCDICRQCKGVFRTRKECSSTSNAECDCTPGFHCLGAGCSMCEQDCKQGQELTKKGCKDCCFGTFNDQKRGICRPWTNCSLDGKSVLVNGTKERDVVCGPSPADLSPGASSVTPPAPAREPGHSPQIISFFLALTSTALLFLLFFLTLRFSVVKRGRKKLLYIFKQPFMRPVQTTQEEDGCSCRFPEEEEGGCEL

SEQ ID NO: 6335 - protein, 379 aa, Artificial Sequence
  Synthetic Polypeptide
MALPVTALLLPLALLLHAARPEVQLVESGGSLVQPGGSLRLSCAASGFTFDDYAMSWVRQVPGKGLEWVSSINWSGTHTDYADSVKGRFTISRNNANNTLYLQMNSLKSEDTAVYYCAKNWRDAGTTWFEKSGSAGQGTQVTVSSTRLQDPCSNCPAGTFCDNNRNQICSPCPPNSFSSAGGQRTCDICRQCKGVFRTRKECSSTSNAECDCTPGFHCLGAGCSMCEQDCKQGQELTKKGCKDCCFGTFNDQKRGICRPWTNCSLDGKSVLVNGTKERDVVCGPSPADLSPGASSVTPPAPAREPGHSPQIISFFLALTSTALLFLLFFLTLRFSVVKRGRKKLLYIFKQPFMRPVQTTQEEDGCSCRFPEEEEGGCEL

SEQ ID NO: 6336 - protein, 374 aa, Artificial Sequence
  Synthetic Polypeptide
MALPVTALLLPLALLLHAARPEVQLVESGGGLVQPGGSLRLSCAASGFNIKDTCIGWVRRAPGKEEELVAKICKYSGHTRYADSVKGRFTISADTSKNTAYLQMNSLRAEDTAVYYCAAVSVRDGHYNYWGQGTTVTVSSTRLQDPCSNCPAGTFCDNNRNQICSPCPPNSFSSAGGQRTCDICRQCKGVFRTRKECSSTSNAECDCTPGFHCLGAGCSMCEQDCKQGQELTKKGCKDCCFGTFNDQKRGICRPWTNCSLDGKSVLVNGTKERDVVCGPSPADLSPGASSVTPPAPAREPGHSPQIISFFLALTSTALLFLLFFLTLRFSVVKRGRKKLLYIFKQPFMRPVQTTQEEDGCSCRFPEEEEGGCEL

SEQ ID NO: 6337 - protein, 379 aa, Artificial Sequence
  Synthetic Polypeptide
MALPVTALLLPLALLLHAARPGSDLGIKLLFAAAKGQDDEVRILLAAGADVNAKDFEGYTPLHVAAYDGHLEIVEVLLKAGADVNAKDSQGRTPLHEAAYSGHLEIVEVLLKAGADVNAQDDAGETPADLAAAWGHEDIAEVLQKTRLQDPCSNCPAGTFCDNNRNQICSPCPPNSFSSAGGQRTCDICRQCKGVFRTRKECSSTSNAECDCTPGFHCLGAGCSMCEQDCKQGQELTKKGCKDCCFGTFNDQKRGICRPWTNCSLDGKSVLVNGTKERDVVCGPSPADLSPGASSVTPPAPAREPGHSPQIISFFLALTSTALLFLLFFLTLRFSVVKRGRKKLLYIFKQPFMRPVQTTQEEDGCSCRFPEEEEGGCEL

SEQ ID NO: 6338 - protein, 313 aa, Artificial Sequence
  Synthetic Polypeptide
MALPVTALLLPLALLLHAARPVDNKFNKERYSAYYEIWQLPNLNVRQKAAFIGSLQDDPSQSANLLAEAKKLNDAQAPKTRLQDPCSNCPAGTFCDNNRNQICSPCPPNSFSSAGGQRTCDICRQCKGVFRTRKECSSTSNAECDCTPGFHCLGAGCSMCEQDCKQGQELTKKGCKDCCFGTFNDQKRGICRPWTNCSLDGKSVLVNGTKERDVVCGPSPADLSPGASSVTPPAPAREPGHSPQIISFFLALTSTALLFLLFFLTLRFSVVKRGRKKLLYIFKQPFMRPVQTTQEEDGCSCRFPEEEEGGCEL

SEQ ID NO: 6339 - protein, 344 aa, Artificial Sequence
  Synthetic Polypeptide
MALPVTALLLPLALLLHAARPLPAPKNLVVSRVTEDSARLSWTAPDAAFDSFAIGYWEWDDDGEAIVLTVPGSERSYDLTGLKPGTEYPVYIAGVKGGQWSFPLSAIFTTTRLQDPCSNCPAGTFCDNNRNQICSPCPPNSFSSAGGQRTCDICRQCKGVFRTRKECSSTSNAECDCTPGFHCLGAGCSMCEQDCKQGQELTKKGCKDCCFGTFNDQKRGICRPWTNCSLDGKSVLVNGTKERDVVCGPSPADLSPGASSVTPPAPAREPGHSPQIISFFLALTSTALLFLLFFLTLRFSVVKRGRKKLLYIFKQPFMRPVQTTQEEDGCSCRFPEEEEGGCEL

SEQ ID NO: 6340 - protein, 345 aa, Artificial Sequence
  Synthetic Polypeptide
MALPVTALLLPLALLLHAARPMLPAPKNLVVSRITEDSARLSWTAPDAAFDSFPIRYIETLIWGEAIWLDVPGSERSYDLTGLKPGTEYAVVITGVKGGRFSSPLVASFTTTRLQDPCSNCPAGTFCDNNRNQICSPCPPNSFSSAGGQRTCDICRQCKGVFRTRKECSSTSNAECDCTPGFHCLGAGCSMCEQDCKQGQELTKKGCKDCCFGTFNDQKRGICRPWTNCSLDGKSVLVNGTKERDVVCGPSPADLSPGASSVTPPAPAREPGHSPQIISFFLALTSTALLFLLFFLTLRFSVVKRGRKKLLYIFKQPFMRPVQTTQEEDGCSCRFPEEEEGGCEL

SEQ ID NO: 6341 - protein, 562 aa, Artificial Sequence
  Synthetic Polypeptide
MALPVTALLLPLALLLHAARPMALPVTALLLPLALLLHAARPLFNQEVQIPLTESYCGPCPKNWICYKNNCYQFFDESKNWYESQASCMSQNASLLKVYSKEDQDLLKLVKSYHWMGLVHIPTNGSWQWEDGSILSPNLLTIIEMQKGDCALYASSFKGYIENCSTPNTYICMQRTVGGGGSGGGGSGGGGSDLFNQEVQIPLTESYCGPCPKNWICYKNNCYQFFDESKNWYESQASCMSQNASLLKVYSKEDQDLLKLVKSYHWMGLVHIPTNGSWQWEDGSILSPNLLTIIEMQKGDCALYASSFKGYIENCSTPNTYICMQRTVTRLQDPCSNCPAGTFCDNNRNQICSPCPPNSFSSAGGQRTCDICRQCKGVFRTRKECSSTSNAECDCTPGFHCLGAGCSMCEQDCKQGQELTKKGCKDCCFGTFNDQKRGICRPWTNCSLDGKSVLVNGTKERDVVCGPSPADLSPGASSVTPPAPAREPGHSPQIISFFLALTSTALLFLLFFLTLRFSVVKRGRKKLLYIFKQPFMRPVQTTQEEDGCSCRFPEEEEGGCEL

SEQ ID NO: 6342 - protein, 442 aa, Artificial Sequence
  Synthetic Polypeptide
MALPVTALLLPLALLLHAARPMELTDLLLAAMLLAVARLTLSSPVAPACDPRLLNKLLRDSHLLHSRLSQCPDVDPLSIPVLLPAVDFSLGEWKTQTEQSKAQDILGAVSLLLEGVMAARGQLEPSCLSSLLGQLSGQVRLLLGALQGLLGTQLPLQGRTTAHKDPNALFLSLQQLLRGKVRFLLLVEGPTLCVRRTLPTTAVPSSTSTRLQDPCSNCPAGTFCDNNRNQICSPCPPNSFSSAGGQRTCDICRQCKGVFRTRKECSSTSNAECDCTPGFHCLGAGCSMCEQDCKQGQELTKKGCKDCCFGTFNDQKRGICRPWTNCSLDGKSVLVNGTKERDVVCGPSPADLSPGASSVTPPAPAREPGHSPQIISFFLALTSTALLFLLFFLTLRFSVVKRGRKKLLYIFKQPFMRPVQTTQEEDGCSCRFPEEEEGGCEL

SEQ ID NO: 6343 - protein, 308 aa, Artificial Sequence
  Synthetic Polypeptide
MALPVTALLLPLALLLHAARPMDPDLEIRAAFLRQRNTALRTEVAELEQEVQRLENEVSQYETRYGPLGGGKTRTRLQDPCSNCPAGTFCDNNRNQICSPCPPNSFSSAGGQRTCDICRQCKGVFRTRKECSSTSNAECDCTPGFHCLGAGCSMCEQDCKQGQELTKKGCKDCCFGTFNDQKRGICRPWTNCSLDGKSVLVNGTKERDVVCGPSPADLSPGASSVTPPAPAREPGHSPQIISFFLALTSTALLFLLFFLTLRFSVVKRGRKKLLYIFKQPFMRPVQTTQEEDGCSCRFPEEEEGGCEL

SEQ ID NO: 6344 - protein, 283 aa, Artificial Sequence
  Synthetic Polypeptide
MALPVTALLLPLALLLHAARPEVAALEKEVAALEKEVAALEKEVAALEKTRLQDPCSNCPAGTFCDNNRNQICSPCPPNSFSSAGGQRTCDICRQCKGVFRTRKECSSTSNAECDCTPGFHCLGAGCSMCEQDCKQGQELTKKGCKDCCFGTFNDQKRGICRPWTNCSLDGKSVLVNGTKERDVVCGPSPADLSPGASSVTPPAPAREPGHSPQIISFFLALTSTALLFLLFFLTLRFSVVKRGRKKLLYIFKQPFMRPVQTTQEEDGCSCRFPEEEEGGCEL

SEQ ID NO: 6345 - protein, 541 aa, Artificial Sequence
  Synthetic Polypeptide
MALPVTALLLPLALLLHAARPLFNQEVQIPLTESYCGPCPKNWICYKNNCYQFFDESKNWYESQASCMSQNASLLKVYSKEDQDLLKLVKSAHWMGLVHIPTNGSWQWEDGSILSPNLLTIIEMQKGDCALYASSFKGFIENCSTPNTYICMQRTVGGGGSGGGGSGGGGSDLFNQEVQIPLTESYCGPCPKNWICYKNNCYQFFDESKNWYESQASCMSQNASLLKVYSKEDQDLLKLVKSAHWMGLVHIPTNGSWQWEDGSILSPNLLTIIEMQKGDCALYASSFKGFIENCSTPNTYICMQRTVTRLQDPCSNCPAGTFCDNNRNQICSPCPPNSFSSAGGQRTCDICRQCKGVFRTRKECSSTSNAECDCTPGFHCLGAGCSMCEQDCKQGQELTKKGCKDCCFGTFNDQKRGICRPWTNCSLDGKSVLVNGTKERDVVCGPSPADLSPGASSVTPPAPAREPGHSPQIISFFLALTSTALLFLLFFLTLRFSVVKRGRKKLLYIFKQPFMRPVQTTQEEDGCSCRFPEEEEGGCEL

SEQ ID NO: 6346 - protein, 541 aa, Artificial Sequence
  Synthetic Polypeptide
MALPVTALLLPLALLLHAARPLFNQEVQIPLTESYCGPCPKNWICYKNNCYQFFDESKNWYESQASCMSQNASLLKVYSKEDQDLLKLVKSAHWMGLVHIPTNGSWQWEDGSILSPNLLTIIEMQKGDCALYASSFKGYIENCSTPNTYICMQRTVSGGGGSGGGGSGGGGDLFNQEVQIPLTESYCGPCPKNWICYKNNCYQFFDESKNWYESQASCMSQNASLLKVYSKEDQDLLKLVKSAHWMGLVHIPTNGSWQWEDGSILSPNLLTIIEMQKGDCALYASSFKGYIENCSTPNTYICMQRTVTRLQDPCSNCPAGTFCDNNRNQICSPCPPNSFSSAGGQRTCDICRQCKGVFRTRKECSSTSNAECDCTPGFHCLGAGCSMCEQDCKQGQELTKKGCKDCCFGTFNDQKRGICRPWTNCSLDGKSVLVNGTKERDVVCGPSPADLSPGASSVTPPAPAREPGHSPQIISFFLALTSTALLFLLFFLTLRFSVVKRGRKKLLYIFKQPFMRPVQTTQEEDGCSCRFPEEEEGGCEL

SEQ ID NO: 6347 - protein, 1001 aa, Artificial Sequence
  Synthetic Polypeptide
MALPVTALLLPLALLLHAARPDIQMTQSPSSLSASVGDRVTITCKASDHINNWLAWYQQKPGQAPKLLIYGATTLETGVPSRFSGSGSGTDYTLTISSLQPEDFATYYCQQSWNTPWTFGQGTKLEIKRLELQDPCSNCPAGTFCDNNRNQICSPCPPNSFSSAGGQRTCDICRQCKGVFRTRKECSSTSNAECDCTPGFHCLGAGCSMCEQDCKQGQELTKKGCKDCCFGTFNDQKRGICRPWTNCSLDGKSVLVNGTKERDVVCGPSPADLSPGASSVTPPAPAREPGHSPQIISFFLALTSTALLFLLFFLTLRFSVVKRGRKKLLYIFKQPFMRPVQTTQEEDGCSCRFPEEEEGGCELRAKRSGSGATNFSLLKQAGDVEENPGPTSMDWIWRILFLVGAATGAHSFEQVQLQQPGAELVKPGASVKMSCKASGYAFSSYWINWMKQKPGQGLEWIGQIYPGDGDTNYNGKFKGRATLTADTSSSTAYMQLSSLTSEDSAVYFCARSITTVVGCAMDYWGQGTSVTVSSTRLQDPCSNCPAGTFCDNNRNQICSPCPPNSFSSAGGQRTCDICRQCKGVFRTRKECSSTSNAECDCTPGFHCLGAGCSMCEQDCKQGQELTKKGCKDCCFGTFNDQKRGICRPWTNCSLDGKSVLVNGTKERDVVCGPSPADLSPGASSVTPPAPAREPGHSPQIISFFLALTSTALLFLLFFLTLRFSVVKRGRKKLLYIFKQPFMRPVQTTQEEDGCSCRFPEEEEGGCELRAKRSGSGVKQTLNFDLLKLAGDVESNPGPSRGHMTEYKPTVRLATRDDVPRAVRTLAAAFADYPATRHTVDPDRHIERVTELQELFLTRVGLDIGKVWVADDGAAVAVWTTPESVEAGAVFAEIGPRMAELSGSRLAAQQQMEGLLAPHRPKEPAWFLATVGVSPDHQGKGLGSAVVLPGVEAAERAGVPAFLETSAPRNLPFYERLGFTVTADVEVPEGPRTWCMTRKPGA

SEQ ID NO: 6348 - protein, 1055 aa, Artificial Sequence
  Synthetic Polypeptide
MALPVTALLLPLALLLHAARPACEVQLLESGGGLIQPGGSLRLSCAASGFTFSSHAMTWVRQAPGKGLEWVSAISGSGDYTHYADSVKGRFTISRDNSKNTVYLQMNSLRAEDSAVYYCAKDEDGGSLLGHRGQGTLVTVSSGTGGGGSGGGGSGGGGSEFGSLELQDPCSNCPAGTFCDNNRNQICSPCPPNSFSSAGGQRTCDICRQCKGVFRTRKECSSTSNAECDCTPGFHCLGAGCSMCEQDCKQGQELTKKGCKDCCFGTFNDQKRGICRPWTNCSLDGKSVLVNGTKERDVVCGPSPADLSPGASSVTPPAPAREPGHSPQIISFFLALTSTALLFLLFFLTLRFSVVKRGRKKLLYIFKQPFMRPVQTTQEEDGCSCRFPEEEEGGCELRAKRSGSGATNFSLLKQAGDVEENPGPTSATMDWIWRILFLVGAATGAHSGPEVQLVESGGGLVQAGGSLRLSCAASGRTFSMGWFRQAPGKEREFVAAITYSGGSPYYADSVKGRFTISRDNAKNTVYLQMNSLKPEDTAVYYCAANPTYGSDWNAENWGQGTQVTVSSGSGGGGSGGGGSGGGGSFEGSTRLQDPCSNCPAGTFCDNNRNQICSPCPPNSFSSAGGQRTCDICRQCKGVFRTRKECSSTSNAECDCTPGFHCLGAGCSMCEQDCKQGQELTKKGCKDCCFGTFNDQKRGICRPWTNCSLDGKSVLVNGTKERDVVCGPSPADLSPGASSVTPPAPAREPGHSPQIISFFLALTSTALLFLLFFLTLRFSVVKRGRKKLLYIFKQPFMRPVQTTQEEDGCSCRFPEEEEGGCELRAKRSGSGVKQTLNFDLLKLAGDVESNPGPSRGHMTEYKPTVRLATRDDVPRAVRTLAAAFADYPATRHTVDPDRHIERVTELQELFLTRVGLDIGKVWVADDGAAVAVWTTPESVEAGAVFAEIGPRMAELSGSRLAAQQQMEGLLAPHRPKEPAWFLATVGVSPDHQGKGLGSAVVLPGVEAAERAGVPAFLETSAPRNLPFYERLGFTVTADVEVPEGPRTWCMTRKPGA

SEQ ID NO: 6349 - protein, 1206 aa, Artificial Sequence
  Synthetic Polypeptide
MALPVTALLLPLALLLHAARPDIQMTQSPSSLSASVGDRVTITCKASDHINNWLAWYQQKPGQAPKLLIYGATTLETGVPSRFSGSGSGTDYTLTISSLQPEDFATYYCQQSWNTPWTFGQGTKLEIKRLEGQPKANPTVTLFPPSSEELQANKATLVCLISDFYPGAVTVAWKADGSPVKAGVETTKPSKQSNNKYAASSYLSLTPEQWKSHRSYSCQVTHEGSTVEKTVAPTECSGSLQDPCSNCPAGTFCDNNRNQICSPCPPNSFSSAGGQRTCDICRQCKGVFRTRKECSSTSNAECDCTPGFHCLGAGCSMCEQDCKQGQELTKKGCKDCCFGTFNDQKRGICRPWTNCSLDGKSVLVNGTKERDVVCGPSPADLSPGASSVTPPAPAREPGHSPQIISFFLALTSTALLFLLFFLTLRFSVVKRGRKKLLYIFKQPFMRPVQTTQEEDGCSCRFPEEEEGGCELRAKRSGSGATNFSLLKQAGDVEENPGPTSMDWIWRILFLVGAATGAHSFEQVQLQQPGAELVKPGASVKMSCKASGYAFSSYWINWMKQKPGQGLEWIGQIYPGDGDTNYNGKFKGRATLTADTSSSTAYMQLSSLTSEDSAVYFCARSITTVVGCAMDYWGQGTSVTVSSTRASTKGPSVFPLAPSSKSTSGGTAALGCLVKDYFPEPVTVSWNSGALTSGVHTFPAVLQSSGLYSLSSVVTVPSSSLGTQTYICNVNHKPSNTKVDKRVEPKSCGTLQDPCSNCPAGTFCDNNRNQICSPCPPNSFSSAGGQRTCDICRQCKGVFRTRKECSSTSNAECDCTPGFHCLGAGCSMCEQDCKQGQELTKKGCKDCCFGTFNDQKRGICRPWTNCSLDGKSVLVNGTKERDVVCGPSPADLSPGASSVTPPAPAREPGHSPQIISFFLALTSTALLFLLFFLTLRFSVVKRGRKKLLYIFKQPFMRPVQTTQEEDGCSCRFPEEEEGGCELRAKRSGSGVKQTLNFDLLKLAGDVESNPGPSRGGIHTMATYEVLCEVARKLGTDDREVVLFLLNVFIPQPTLAQLIGALRALKEEGRLTFPLLAECLFRAGRRDLLRDLLHLDPRFLERHLAGTMSYFSPYQLTVLHVDGELCARDIRSLIFLSKDTIGSRSTPQTFLHWVYCMENLDLLGPTDVDALMSMLRSLSRVDLQRQVQTLMGLHLSGPSHSQHYRHTP

SEQ ID NO: 6350 - protein, 1259 aa, Artificial Sequence
  Synthetic Polypeptide
MALPVTALLLPLALLLHAARPDIQMTQSPSSLSASVGDRVTITCKASDHINNWLAWYQQKPGQAPKLLIYGATTLETGVPSRFSGSGSGTDYTLTISSLQPEDFATYYCQQSWNTPWTFGQGTKLEIKRLEGQPKANPTVTLFPPSSEELQANKATLVCLISDFYPGAVTVAWKADGSPVKAGVETTKPSKQSNNKYAASSYLSLTPEQWKSHRSYSCQVTHEGSTVEKTVAPTECSGSLQDPCSNCPAGTFCDNNRNQICSPCPPNSFSSAGGQRTCDICRQCKGVFRTRKECSSTSNAECDCTPGFHCLGAGCSMCEQDCKQGQELTKKGCKDCCFGTFNDQKRGICRPWTNCSLDGKSVLVNGTKERDVVCGPSPADLSPGASSVTPPAPAREPGHSPQIISFFLALTSTALLFLLFFLTLRFSVVKRGRKKLLYIFKQPFMRPVQTTQEEDGCSCRFPEEEEGGCELRAKRSGSGATNFSLLKQAGDVEENPGPTSMDWIWRILFLVGAATGAHSFEQVQLQQPGAELVKPGASVKMSCKASGYAFSSYWINWMKQKPGQGLEWIGQIYPGDGDTNYNGKFKGRATLTADTSSSTAYMQLSSLTSEDSAVYFCARSITTVVGCAMDYWGQGTSVTVSSTRASTKGPSVFPLAPSSKSTSGGTAALGCLVKDYFPEPVTVSWNSGALTSGVHTFPAVLQSSGLYSLSSVVTVPSSSLGTQTYICNVNHKPSNTKVDKRVEPKSCGTLQDPCSNCPAGTFCDNNRNQICSPCPPNSFSSAGGQRTCDICRQCKGVFRTRKECSSTSNAECDCTPGFHCLGAGCSMCEQDCKQGQELTKKGCKDCCFGTFNDQKRGICRPWTNCSLDGKSVLVNGTKERDVVCGPSPADLSPGASSVTPPAPAREPGHSPQIISFFLALTSTALLFLLFFLTLRFSVVKRGRKKLLYIFKQPFMRPVQTTQEEDGCSCRFPEEEEGGCELRAKRSGSGVKQTLNFDLLKLAGDVESNPGPSRGGIHTMSDSKEVPSLPFLRHLLEELDSHEDSLLLFLCHDAAPGCTTVTQALCSLSQQRKLTLAALVEMLYVLQRMDLLKSRFGLSKEGAEQLLGTSFLTRYRKLMVCVGEELDSSELRALRLFACNLNPSLSTALSESSRFVELVLALENVGLVSPSSVSVLADMLRTLRRLDLCQQLVEYEQQEQARYRYCYAASPSLPVRTLRRGHGASEHEQLCMPVQESSDSPELLRTPVQESSSDSPEQTT

SEQ ID NO: 6351 - protein, 1214 aa, Artificial Sequence
  Synthetic Polypeptide
MALPVTALLLPLALLLHAARPDIQMTQSPSSLSASVGDRVTITCKASDHINNWLAWYQQKPGQAPKLLIYGATTLETGVPSRFSGSGSGTDYTLTISSLQPEDFATYYCQQSWNTPWTFGQGTKLEIKRLEGQPKANPTVTLFPPSSEELQANKATLVCLISDFYPGAVTVAWKADGSPVKAGVETTKPSKQSNNKYAASSYLSLTPEQWKSHRSYSCQVTHEGSTVEKTVAPTECSGSLQDPCSNCPAGTFCDNNRNQICSPCPPNSFSSAGGQRTCDICRQCKGVFRTRKECSSTSNAECDCTPGFHCLGAGCSMCEQDCKQGQELTKKGCKDCCFGTFNDQKRGICRPWTNCSLDGKSVLVNGTKERDVVCGPSPADLSPGASSVTPPAPAREPGHSPQIISFFLALTSTALLFLLFFLTLRFSVVKRGRKKLLYIFKQPFMRPVQTTQEEDGCSCRFPEEEEGGCELRAKRSGSGATNFSLLKQAGDVEENPGPTSMDWIWRILFLVGAATGAHSFEQVQLQQPGAELVKPGASVKMSCKASGYAFSSYWINWMKQKPGQGLEWIGQIYPGDGDTNYNGKFKGRATLTADTSSSTAYMQLSSLTSEDSAVYFCARSITTVVGCAMDYWGQGTSVTVSSTRASTKGPSVFPLAPSSKSTSGGTAALGCLVKDYFPEPVTVSWNSGALTSGVHTFPAVLQSSGLYSLSSVVTVPSSSLGTQTYICNVNHKPSNTKVDKRVEPKSCGTLQDPCSNCPAGTFCDNNRNQICSPCPPNSFSSAGGQRTCDICRQCKGVFRTRKECSSTSNAECDCTPGFHCLGAGCSMCEQDCKQGQELTKKGCKDCCFGTFNDQKRGICRPWTNCSLDGKSVLVNGTKERDVVCGPSPADLSPGASSVTPPAPAREPGHSPQIISFFLALTSTALLFLLFFLTLRFSVVKRGRKKLLYIFKQPFMRPVQTTQEEDGCSCRFPEEEEGGCELRAKRSGSGVKQTLNFDLLKLAGDVESNPGPSRGHMTEYKPTVRLATRDDVPRAVRTLAAAFADYPATRHTVDPDRHIERVTELQELFLTRVGLDIGKVWVADDGAAVAVWTTPESVEAGAVFAEIGPRMAELSGSRLAAQQQMEGLLAPHRPKEPAWFLATVGVSPDHQGKGLGSAVVLPGVEAAERAGVPAFLETSAPRNLPFYERLGFTVTADVEVPEGPRTWCMTRKPGA

SEQ ID NO: 6352 - protein, 1351 aa, Artificial Sequence
  Synthetic Polypeptide
MALPVTALLLPLALLLHAARPEVQLVESGGGLVQAGGSLRLSCAASGRTFSMGWFRQAPGKEREFVAAITYSGGSPYYADSVKGRFTISRDNAKNTVYLQMNSLKPEDTAVYYCAANPTYGSDWNAENWGQGTQVTVSSGTGGGGSGGGGSGGGGSEFDIQMTQSPSSLSASVGDRVTITCKASDHINNWLAWYQQKPGQAPKLLIYGATTLETGVPSRFSGSGSGTDYTLTISSLQPEDFATYYCQQSWNTPWTFGQGTKLEIKRLEGQPKANPTVTLFPPSSEELQANKATLVCLISDFYPGAVTVAWKADGSPVKAGVETTKPSKQSNNKYAASSYLSLTPEQWKSHRSYSCQVTHEGSTVEKTVAPTECSGSLQDPCSNCPAGTFCDNNRNQICSPCPPNSFSSAGGQRTCDICRQCKGVFRTRKECSSTSNAECDCTPGFHCLGAGCSMCEQDCKQGQELTKKGCKDCCFGTFNDQKRGICRPWTNCSLDGKSVLVNGTKERDVVCGPSPADLSPGASSVTPPAPAREPGHSPQIISFFLALTSTALLFLLFFLTLRFSVVKRGRKKLLYIFKQPFMRPVQTTQEEDGCSCRFPEEEEGGCELRAKRSGSGATNFSLLKQAGDVEENPGPTSMDWIWRILFLVGAATGAHSFEQVQLQQPGAELVKPGASVKMSCKASGYAFSSYWINWMKQKPGQGLEWIGQIYPGDGDTNYNGKFKGRATLTADTSSSTAYMQLSSLTSEDSAVYFCARSITTVVGCAMDYWGQGTSVTVSSTRASTKGPSVFPLAPSSKSTSGGTAALGCLVKDYFPEPVTVSWNSGALTSGVHTFPAVLQSSGLYSLSSVVTVPSSSLGTQTYICNVNHKPSNTKVDKRVEPKSCGTLQDPCSNCPAGTFCDNNRNQICSPCPPNSFSSAGGQRTCDICRQCKGVFRTRKECSSTSNAECDCTPGFHCLGAGCSMCEQDCKQGQELTKKGCKDCCFGTFNDQKRGICRPWTNCSLDGKSVLVNGTKERDVVCGPSPADLSPGASSVTPPAPAREPGHSPQIISFFLALTSTALLFLLFFLTLRFSVVKRGRKKLLYIFKQPFMRPVQTTQEEDGCSCRFPEEEEGGCELRAKRSGSGVKQTLNFDLLKLAGDVESNPGPSRGHMTEYKPTVRLATRDDVPRAVRTLAAAFADYPATRHTVDPDRHIERVTELQELFLTRVGLDIGKVWVADDGAAVAVWTTPESVEAGAVFAEIGPRMAELSGSRLAAQQQMEGLLAPHRPKEPAWFLATVGVSPDHQGKGLGSAVVLPGVEAAERAGVPAFLETSAPRNLPFYERLGFTVTADVEVPEGPRTWCMTRKPGA

SEQ ID NO: 6353 - protein, 1488 aa, Artificial Sequence
  Synthetic Polypeptide
MALPVTALLLPLALLLHAARPEVQLVESGGGLVQAGGSLRLSCAASGRTFSMGWFRQAPGKEREFVAAITYSGGSPYYADSVKGRFTISRDNAKNTVYLQMNSLKPEDTAVYYCAANPTYGSDWNAENWGQGTQVTVSSGTGGGGSGGGGSGGGGSEFDIQMTQSPSSLSASVGDRVTITCKASDHINNWLAWYQQKPGQAPKLLIYGATTLETGVPSRFSGSGSGTDYTLTISSLQPEDFATYYCQQSWNTPWTFGQGTKLEIKRLEGQPKANPTVTLFPPSSEELQANKATLVCLISDFYPGAVTVAWKADGSPVKAGVETTKPSKQSNNKYAASSYLSLTPEQWKSHRSYSCQVTHEGSTVEKTVAPTECSGSLQDPCSNCPAGTFCDNNRNQICSPCPPNSFSSAGGQRTCDICRQCKGVFRTRKECSSTSNAECDCTPGFHCLGAGCSMCEQDCKQGQELTKKGCKDCCFGTFNDQKRGICRPWTNCSLDGKSVLVNGTKERDVVCGPSPADLSPGASSVTPPAPAREPGHSPQIISFFLALTSTALLFLLFFLTLRFSVVKRGRKKLLYIFKQPFMRPVQTTQEEDGCSCRFPEEEEGGCELRAKRSGSGATNFSLLKQAGDVEENPGPTSMDWIWRILFLVGAATGAHSGPEVQLVESGGGLVQAGGSLRLSCAASGRTFTMGWFRQAPGKEREFVAAISLSPTLAYYADSVKGRFTISRDNAKNTVVLQMNSLKPEDTALYYCAADRKSVMSIRPDYWGQGTQVTVSSGSGGGGSGGGGSGGGGSFEQVQLQQPGAELVKPGASVKMSCKASGYAFSSYWINWMKQKPGQGLEWIGQIYPGDGDTNYNGKFKGRATLTADTSSSTAYMQLSSLTSEDSAVYFCARSITTVVGCAMDYWGQGTSVTVSSTRASTKGPSVFPLAPSSKSTSGGTAALGCLVKDYFPEPVTVSWNSGALTSGVHTFPAVLQSSGLYSLSSVVTVPSSSLGTQTYICNVNHKPSNTKVDKRVEPKSCGTLQDPCSNCPAGTFCDNNRNQICSPCPPNSFSSAGGQRTCDICRQCKGVFRTRKECSSTSNAECDCTPGFHCLGAGCSMCEQDCKQGQELTKKGCKDCCFGTFNDQKRGICRPWTNCSLDGKSVLVNGTKERDVVCGPSPADLSPGASSVTPPAPAREPGHSPQIISFFLALTSTALLFLLFFLTLRFSVVKRGRKKLLYIFKQPFMRPVQTTQEEDGCSCRFPEEEEGGCELRAKRSGSGVKQTLNFDLLKLAGDVESNPGPSRGHMTEYKPTVRLATRDDVPRAVRTLAAAFADYPATRHTVDPDRHIERVTELQELFLTRVGLDIGKVWVADDGAAVAVWTTPESVEAGAVFAEIGPRMAELSGSRLAAQQQMEGLLAPHRPKEPAWFLATVGVSPDHQGKGLGSAVVLPGVEAAERAGVPAFLETSAPRNLPFYERLGFTVTADVEVPEGPRTWCMTRKPGA

SEQ ID NO: 6354 - protein, 1221 aa, Artificial Sequence
  Synthetic Polypeptide
MALPVTALLLPLALLLHAARPEVQLVESGGGLVQAGGSLRLSCAASGRTFSMGWFRQAPGKEREFVAAITYSGGSPYYADSVKGRFTISRDNAKNTVYLQMNSLKPEDTAVYYCAANPTYGSDWNAENWGQGTQVTVSSLEGQPKANPTVTLFPPSSEELQANKATLVCLISDFYPGAVTVAWKADGSPVKAGVETTKPSKQSNNKYAASSYLSLTPEQWKSHRSYSCQVTHEGSTVEKTVAPTECSGSLQDPCSNCPAGTFCDNNRNQICSPCPPNSFSSAGGQRTCDICRQCKGVFRTRKECSSTSNAECDCTPGFHCLGAGCSMCEQDCKQGQELTKKGCKDCCFGTFNDQKRGICRPWTNCSLDGKSVLVNGTKERDVVCGPSPADLSPGASSVTPPAPAREPGHSPQIISFFLALTSTALLFLLFFLTLRFSVVKRGRKKLLYIFKQPFMRPVQTTQEEDGCSCRFPEEEEGGCELRAKRSGSGATNFSLLKQAGDVEENPGPTSMDWIWRILFLVGAATGAHSGPEVQLVESGGGLVQAGGSLRLSCAASGRTFTMGWFRQAPGKEREFVAAISLSPTLAYYADSVKGRFTISRDNAKNTVVLQMNSLKPEDTALYYCAADRKSVMSIRPDYWGQGTQVTVSSTRASTKGPSVFPLAPSSKSTSGGTAALGCLVKDYFPEPVTVSWNSGALTSGVHTFPAVLQSSGLYSLSSVVTVPSSSLGTQTYICNVNHKPSNTKVDKRVEPKSCGTLQDPCSNCPAGTFCDNNRNQICSPCPPNSFSSAGGQRTCDICRQCKGVFRTRKECSSTSNAECDCTPGFHCLGAGCSMCEQDCKQGQELTKKGCKDCCFGTFNDQKRGICRPWTNCSLDGKSVLVNGTKERDVVCGPSPADLSPGASSVTPPAPAREPGHSPQIISFFLALTSTALLFLLFFLTLRFSVVKRGRKKLLYIFKQPFMRPVQTTQEEDGCSCRFPEEEEGGCELRAKRSGSGVKQTLNFDLLKLAGDVESNPGPSRGHMTEYKPTVRLATRDDVPRAVRTLAAAFADYPATRHTVDPDRHIERVTELQELFLTRVGLDIGKVWVADDGAAVAVWTTPESVEAGAVFAEIGPRMAELSGSRLAAQQQMEGLLAPHRPKEPAWFLATVGVSPDHQGKGLGSAVVLPGVEAAERAGVPAFLETSAPRNLPFYERLGFTVTADVEVPEGPRTWCMTRKPGA

SEQ ID NO: 6355 - protein, 1229 aa, Artificial Sequence
  Synthetic Polypeptide
MALPVTALLLPLALLLHAARPDIQMTQSPSSLSASVGDRVTITCKASDHINNWLAWYQQKPGQAPKLLIYGATTLETGVPSRFSGSGSGTDYTLTISSLQPEDFATYYCQQSWNTPWTFGQGTKLEIKRLEDLKNVFPPEVAVFEPSEAEISHTQKATLVCLATGFYPDHVELSWWVNGKEVHSGVSTDPQPLKEQPALNDSRYCLSSRLRVSATFWQNPRNHFRCQVQFYGLSENDEWTQDRAKPVTQIVSAEAWGRADCGSLQDPCSNCPAGTFCDNNRNQICSPCPPNSFSSAGGQRTCDICRQCKGVFRTRKECSSTSNAECDCTPGFHCLGAGCSMCEQDCKQGQELTKKGCKDCCFGTFNDQKRGICRPWTNCSLDGKSVLVNGTKERDVVCGPSPADLSPGASSVTPPAPAREPGHSPQIISFFLALTSTALLFLLFFLTLRFSVVKRGRKKLLYIFKQPFMRPVQTTQEEDGCSCRFPEEEEGGCELRAKRSGSGATNFSLLKQAGDVEENPGPTSMDWIWRILFLVGAATGAHSFEQVQLQQPGAELVKPGASVKMSCKASGYAFSSYWINWMKQKPGQGLEWIGQIYPGDGDTNYNGKFKGRATLTADTSSSTAYMQLSSLTSEDSAVYFCARSITTVVGCAMDYWGQGTSVTVSSTRIQNPDPAVYQLRDSKSSDKSVCLFTDFDSQTNVSQSKDSDVYITDKTVLDMRSMDFKSNSAVAWSNKSDFACANAFNNSIIPEDTFFPSPESSCGTLQDPCSNCPAGTFCDNNRNQICSPCPPNSFSSAGGQRTCDICRQCKGVFRTRKECSSTSNAECDCTPGFHCLGAGCSMCEQDCKQGQELTKKGCKDCCFGTFNDQKRGICRPWTNCSLDGKSVLVNGTKERDVVCGPSPADLSPGASSVTPPAPAREPGHSPQIISFFLALTSTALLFLLFFLTLRFSVVKRGRKKLLYIFKQPFMRPVQTTQEEDGCSCRFPEEEEGGCELRAKRSGSGVKQTLNFDLLKLAGDVESNPGPSRGHMTEYKPTVRLATRDDVPRAVRTLAAAFADYPATRHTVDPDRHIERVTELQELFLTRVGLDIGKVWVADDGAAVAVWTTPESVEAGAVFAEIGPRMAELSGSRLAAQQQMEGLLAPHRPKEPAWFLATVGVSPDHQGKGLGSAVVLPGVEAAERAGVPAFLETSAPRNLPFYERLGFTVTADVEVPEGPRTWCMTRKPGA

SEQ ID NO: 6356 - protein, 1366 aa, Artificial Sequence
  Synthetic Polypeptide
MALPVTALLLPLALLLHAARPEVQLVESGGGLVQAGGSLRLSCAASGRTFSMGWFRQAPGKEREFVAAITYSGGSPYYADSVKGRFTISRDNAKNTVYLQMNSLKPEDTAVYYCAANPTYGSDWNAENWGQGTQVTVSSGTGGGGSGGGGSGGGGSEFDIQMTQSPSSLSASVGDRVTITCKASDHINNWLAWYQQKPGQAPKLLIYGATTLETGVPSRFSGSGSGTDYTLTISSLQPEDFATYYCQQSWNTPWTFGQGTKLEIKRLEDLKNVFPPEVAVFEPSEAEISHTQKATLVCLATGFYPDHVELSWWVNGKEVHSGVSTDPQPLKEQPALNDSRYCLSSRLRVSATFWQNPRNHFRCQVQFYGLSENDEWTQDRAKPVTQIVSAEAWGRADCGSLQDPCSNCPAGTFCDNNRNQICSPCPPNSFSSAGGQRTCDICRQCKGVFRTRKECSSTSNAECDCTPGFHCLGAGCSMCEQDCKQGQELTKKGCKDCCFGTFNDQKRGICRPWTNCSLDGKSVLVNGTKERDVVCGPSPADLSPGASSVTPPAPAREPGHSPQIISFFLALTSTALLFLLFFLTLRFSVVKRGRKKLLYIFKQPFMRPVQTTQEEDGCSCRFPEEEEGGCELRAKRSGSGATNFSLLKQAGDVEENPGPTSMDWIWRILFLVGAATGAHSFEQVQLQQPGAELVKPGASVKMSCKASGYAFSSYWINWMKQKPGQGLEWIGQIYPGDGDTNYNGKFKGRATLTADTSSSTAYMQLSSLTSEDSAVYFCARSITTVVGCAMDYWGQGTSVTVSSTRIQNPDPAVYQLRDSKSSDKSVCLFTDFDSQTNVSQSKDSDVYITDKTVLDMRSMDFKSNSAVAWSNKSDFACANAFNNSIIPEDTFFPSPESSCGTLQDPCSNCPAGTFCDNNRNQICSPCPPNSFSSAGGQRTCDICRQCKGVFRTRKECSSTSNAECDCTPGFHCLGAGCSMCEQDCKQGQELTKKGCKDCCFGTFNDQKRGICRPWTNCSLDGKSVLVNGTKERDVVCGPSPADLSPGASSVTPPAPAREPGHSPQIISFFLALTSTALLFLLFFLTLRFSVVKRGRKKLLYIFKQPFMRPVQTTQEEDGCSCRFPEEEEGGCELRAKRSGSGVKQTLNFDLLKLAGDVESNPGPSRGHMTEYKPTVRLATRDDVPRAVRTLAAAFADYPATRHTVDPDRHIERVTELQELFLTRVGLDIGKVWVADDGAAVAVWTTPESVEAGAVFAEIGPRMAELSGSRLAAQQQMEGLLAPHRPKEPAWFLATVGVSPDHQGKGLGSAVVLPGVEAAERAGVPAFLETSAPRNLPFYERLGFTVTADVEVPEGPRTWCMTRKPGA

SEQ ID NO: 6357 - protein, 1503 aa, Artificial Sequence
  Synthetic Polypeptide
MALPVTALLLPLALLLHAARPEVQLVESGGGLVQAGGSLRLSCAASGRTFSMGWFRQAPGKEREFVAAITYSGGSPYYADSVKGRFTISRDNAKNTVYLQMNSLKPEDTAVYYCAANPTYGSDWNAENWGQGTQVTVSSGTGGGGSGGGGSGGGGSEFDIQMTQSPSSLSASVGDRVTITCKASDHINNWLAWYQQKPGQAPKLLIYGATTLETGVPSRFSGSGSGTDYTLTISSLQPEDFATYYCQQSWNTPWTFGQGTKLEIKRLEDLKNVFPPEVAVFEPSEAEISHTQKATLVCLATGFYPDHVELSWWVNGKEVHSGVSTDPQPLKEQPALNDSRYCLSSRLRVSATFWQNPRNHFRCQVQFYGLSENDEWTQDRAKPVTQIVSAEAWGRADCGSLQDPCSNCPAGTFCDNNRNQICSPCPPNSFSSAGGQRTCDICRQCKGVFRTRKECSSTSNAECDCTPGFHCLGAGCSMCEQDCKQGQELTKKGCKDCCFGTFNDQKRGICRPWTNCSLDGKSVLVNGTKERDVVCGPSPADLSPGASSVTPPAPAREPGHSPQIISFFLALTSTALLFLLFFLTLRFSVVKRGRKKLLYIFKQPFMRPVQTTQEEDGCSCRFPEEEEGGCELRAKRSGSGATNFSLLKQAGDVEENPGPTSMDWIWRILFLVGAATGAHSGPEVQLVESGGGLVQAGGSLRLSCAASGRTFTMGWFRQAPGKEREFVAAISLSPTLAYYADSVKGRFTISRDNAKNTVVLQMNSLKPEDTALYYCAADRKSVMSIRPDYWGQGTQVTVSSGSGGGGSGGGGSGGGGSFEQVQLQQPGAELVKPGASVKMSCKASGYAFSSYWINWMKQKPGQGLEWIGQIYPGDGDTNYNGKFKGRATLTADTSSSTAYMQLSSLTSEDSAVYFCARSITTVVGCAMDYWGQGTSVTVSSTRIQNPDPAVYQLRDSKSSDKSVCLFTDFDSQTNVSQSKDSDVYITDKTVLDMRSMDFKSNSAVAWSNKSDFACANAFNNSIIPEDTFFPSPESSCGTLQDPCSNCPAGTFCDNNRNQICSPCPPNSFSSAGGQRTCDICRQCKGVFRTRKECSSTSNAECDCTPGFHCLGAGCSMCEQDCKQGQELTKKGCKDCCFGTFNDQKRGICRPWTNCSLDGKSVLVNGTKERDVVCGPSPADLSPGASSVTPPAPAREPGHSPQIISFFLALTSTALLFLLFFLTLRFSVVKRGRKKLLYIFKQPFMRPVQTTQEEDGCSCRFPEEEEGGCELRAKRSGSGVKQTLNFDLLKLAGDVESNPGPSRGHMTEYKPTVRLATRDDVPRAVRTLAAAFADYPATRHTVDPDRHIERVTELQELFLTRVGLDIGKVWVADDGAAVAVWTTPESVEAGAVFAEIGPRMAELSGSRLAAQQQMEGLLAPHRPKEPAWFLATVGVSPDHQGKGLGSAVVLPGVEAAERAGVPAFLETSAPRNLPFYERLGFTVTADVEVPEGPRTWCMTRKPGA

SEQ ID NO: 6358 - protein, 1236 aa, Artificial Sequence
  Synthetic Polypeptide
MALPVTALLLPLALLLHAARPEVQLVESGGGLVQAGGSLRLSCAASGRTFSMGWFRQAPGKEREFVAAITYSGGSPYYADSVKGRFTISRDNAKNTVYLQMNSLKPEDTAVYYCAANPTYGSDWNAENWGQGTQVTVSSLEDLKNVFPPEVAVFEPSEAEISHTQKATLVCLATGFYPDHVELSWWVNGKEVHSGVSTDPQPLKEQPALNDSRYCLSSRLRVSATFWQNPRNHFRCQVQFYGLSENDEWTQDRAKPVTQIVSAEAWGRADCGSLQDPCSNCPAGTFCDNNRNQICSPCPPNSFSSAGGQRTCDICRQCKGVFRTRKECSSTSNAECDCTPGFHCLGAGCSMCEQDCKQGQELTKKGCKDCCFGTFNDQKRGICRPWTNCSLDGKSVLVNGTKERDVVCGPSPADLSPGASSVTPPAPAREPGHSPQIISFFLALTSTALLFLLFFLTLRFSVVKRGRKKLLYIFKQPFMRPVQTTQEEDGCSCRFPEEEEGGCELRAKRSGSGATNFSLLKQAGDVEENPGPTSMDWIWRILFLVGAATGAHSGPEVQLVESGGGLVQAGGSLRLSCAASGRTFTMGWFRQAPGKEREFVAAISLSPTLAYYADSVKGRFTISRDNAKNTVVLQMNSLKPEDTALYYCAADRKSVMSIRPDYWGQGTQVTVSSTRIQNPDPAVYQLRDSKSSDKSVCLFTDFDSQTNVSQSKDSDVYITDKTVLDMRSMDFKSNSAVAWSNKSDFACANAFNNSIIPEDTFFPSPESSCGTLQDPCSNCPAGTFCDNNRNQICSPCPPNSFSSAGGQRTCDICRQCKGVFRTRKECSSTSNAECDCTPGFHCLGAGCSMCEQDCKQGQELTKKGCKDCCFGTFNDQKRGICRPWTNCSLDGKSVLVNGTKERDVVCGPSPADLSPGASSVTPPAPAREPGHSPQIISFFLALTSTALLFLLFFLTLRFSVVKRGRKKLLYIFKQPFMRPVQTTQEEDGCSCRFPEEEEGGCELRAKRSGSGVKQTLNFDLLKLAGDVESNPGPSRGHMTEYKPTVRLATRDDVPRAVRTLAAAFADYPATRHTVDPDRHIERVTELQELFLTRVGLDIGKVWVADDGAAVAVWTTPESVEAGAVFAEIGPRMAELSGSRLAAQQQMEGLLAPHRPKEPAWFLATVGVSPDHQGKGLGSAVVLPGVEAAERAGVPAFLETSAPRNLPFYERLGFTVTADVEVPEGPRTWCMTRKPGA

SEQ ID NO: 6359 - protein, 627 aa, Artificial Sequence
  Synthetic Polypeptide
MALPVTALLLPLALLLHAARPACEVQLLESGGGLIQPGGSLRLSCAASGFTFSSHAMTWVRQAPGKGLEWVSAISGSGDYTHYADSVKGRFTISRDNSKNTVYLQMNSLRAEDSAVYYCAKDEDGGSLLGHRGQGTLVTVSSGTGGGGSGGGGSGGGGSEFGSLELQDPCSNCPAGTFCDNNRNQICSPCPPNSFSSAGGQRTCDICRQCKGVFRTRKECSSTSNAECDCTPGFHCLGAGCSMCEQDCKQGQELTKKGCKDCCFGTFNDQKRGICRPWTNCSLDGKSVLVNGTKERDVVCGPSPADLSPGASSVTPPAPAREPGHSPQIISFFLALTSTALLFLLFFLTLRFSVVKRGRKKLLYIFKQPFMRPVQTTQEEDGCSCRFPEEEEGGCELRAKRSGSGATNFSLLKQAGDVEENPGPTRGHMTEYKPTVRLATRDDVPRAVRTLAAAFADYPATRHTVDPDRHIERVTELQELFLTRVGLDIGKVWVADDGAAVAVWTTPESVEAGAVFAEIGPRMAELSGSRLAAQQQMEGLLAPHRPKEPAWFLATVGVSPDHQGKGLGSAVVLPGVEAAERAGVPAFLETSAPRNLPFYERLGFTVTADVEVPEGPRTWCMTRKPGA

SEQ ID NO: 6360 - protein, 499 aa, Artificial Sequence; identical to SEQ ID NO: 6328
  Synthetic Polypeptide

SEQ ID NO: 6361 - protein, 499 aa, Artificial Sequence; identical to SEQ ID NO: 6329
  Synthetic Polypeptide

SEQ ID NO: 6362 - protein, 373 aa, Artificial Sequence; identical to SEQ ID NO: 6330
  Synthetic Polypeptide

SEQ ID NO: 6363 - protein, 373 aa, Artificial Sequence; identical to SEQ ID NO: 6331
  Synthetic Polypeptide

SEQ ID NO: 6364 - protein, 373 aa, Artificial Sequence; identical to SEQ ID NO: 6332
  Synthetic Polypeptide

SEQ ID NO: 6365 - protein, 375 aa, Artificial Sequence; identical to SEQ ID NO: 6333
  Synthetic Polypeptide

SEQ ID NO: 6366 - protein, 383 aa, Artificial Sequence; identical to SEQ ID NO: 6334
  Synthetic Polypeptide

SEQ ID NO: 6367 - protein, 379 aa, Artificial Sequence; identical to SEQ ID NO: 6335
  Synthetic Polypeptide

SEQ ID NO: 6368 - protein, 374 aa, Artificial Sequence; identical to SEQ ID NO: 6336
  Synthetic Polypeptide

SEQ ID NO: 6369 - protein, 379 aa, Artificial Sequence; identical to SEQ ID NO: 6337
  Synthetic Polypeptide

SEQ ID NO: 6370 - protein, 313 aa, Artificial Sequence; identical to SEQ ID NO: 6338
  Synthetic Polypeptide

SEQ ID NO: 6371 - protein, 344 aa, Artificial Sequence; identical to SEQ ID NO: 6339
  Synthetic Polypeptide

SEQ ID NO: 6372 - protein, 345 aa, Artificial Sequence; identical to SEQ ID NO: 6340
  Synthetic Polypeptide

SEQ ID NO: 6373 - protein, 562 aa, Artificial Sequence; identical to SEQ ID NO: 6341
  Synthetic Polypeptide

SEQ ID NO: 6374 - protein, 442 aa, Artificial Sequence; identical to SEQ ID NO: 6342
  Synthetic Polypeptide

SEQ ID NO: 6375 - protein, 308 aa, Artificial Sequence; identical to SEQ ID NO: 6343
  Synthetic Polypeptide

SEQ ID NO: 6376 - protein, 283 aa, Artificial Sequence; identical to SEQ ID NO: 6344
  Synthetic Polypeptide

SEQ ID NO: 6377 - protein, 541 aa, Artificial Sequence; identical to SEQ ID NO: 6345
  Synthetic Polypeptide

SEQ ID NO: 6378 - protein, 541 aa, Artificial Sequence; identical to SEQ ID NO: 6346
  Synthetic Polypeptide

SEQ ID NO: 6379 - protein, 977 aa, Artificial Sequence
  Synthetic Polypeptide
MALPVTALLLPLALLLHAARPDIQMTQSPSSLSASVGDRVTITCKASDHINNWLAWYQQKPGQAPKLLIYGATTLETGVPSRFSGSGSGTDYTLTISSLQPEDFATYYCQQSWNTPWTFGQGTKLEIKRLEGMRTEDLPKAVVFLEPQWYRVLEKDSVTLKCQGAYSPEDNSTQWFHNESLISSQASSYFIDAATVDDSGEYRCQTNLSTLSDPVQLEVHIGWLLLQAPRWVFKEEDPIHLRCHSWKNTALHKVTYLQNGKGRKYFHHNSDFYIPKATLKDSGSYFCRGLVGSKNVSSETVNITITQGLAVSTISSFFPPGYQVSFCLVMVLLFAVDTGLYFSVKTNIRSSTRDWKDHKFKWRKDPQDKRAKRSGSGATNFSLLKQAGDVEENPGPTSMDWIWRILFLVGAATGAHSFEQVQLQQPGAELVKPGASVKMSCKASGYAFSSYWINWMKQKPGQGLEWIGQIYPGDGDTNYNGKFKGRATLTADTSSSTAYMQLSSLTSEDSAVYFCARSITTVVGCAMDYWGQGTSVTVSSTRNKILVKQSPMLVAYDNAVNLSCKYSYNLFSREFRASLHKGLDSAVEVCVVYGNYSQQLQVYSKTGFNCDGKLGNESVTFYLQNLYVNQTDIYFCKIEVMYPPPYLDNEKSNGTIIHVKGKHLCPSPLFPGPSKPFWVLVVVGGVLACYSLLVTVAFIIFWVRSKRSRLLHSDYMNMTPRRPGPTRKHYQPYAPPRDFAAYRSRAKRSGSGVKQTLNFDLLKLAGDVESNPGPSRGHMTEYKPTVRLATRDDVPRAVRTLAAAFADYPATRHTVDPDRHIERVTELQELFLTRVGLDIGKVWVADDGAAVAVWTTPESVEAGAVFAEIGPRMAELSGSRLAAQQQMEGLLAPHRPKEPAWFLATVGVSPDHQGKGLGSAVVLPGVEAAERAGVPAFLETSAPRNLPFYERLGFTVTADVEVPEGPRTWCMTRKPGA

SEQ ID NO: 6380 - protein, 1031 aa, Artificial Sequence
  Synthetic Polypeptide
MALPVTALLLPLALLLHAARPACEVQLLESGGGLIQPGGSLRLSCAASGFTFSSHAMTWVRQAPGKGLEWVSAISGSGDYTHYADSVKGRFTISRDNSKNTVYLQMNSLRAEDSAVYYCAKDEDGGSLLGHRGQGTLVTVSSGTGGGGSGGGGSGGGGSEFGSLEGMRTEDLPKAVVFLEPQWYRVLEKDSVTLKCQGAYSPEDNSTQWFHNESLISSQASSYFIDAATVDDSGEYRCQTNLSTLSDPVQLEVHIGWLLLQAPRWVFKEEDPIHLRCHSWKNTALHKVTYLQNGKGRKYFHHNSDFYIPKATLKDSGSYFCRGLVGSKNVSSETVNITITQGLAVSTISSFFPPGYQVSFCLVMVLLFAVDTGLYFSVKTNIRSSTRDWKDHKFKWRKDPQDKRAKRSGSGATNFSLLKQAGDVEENPGPTSATMDWIWRILFLVGAATGAHSGPEVQLVESGGGLVQAGGSLRLSCAASGRTFSMGWFRQAPGKEREFVAAITYSGGSPYYADSVKGRFTISRDNAKNTVYLQMNSLKPEDTAVYYCAANPTYGSDWNAENWGQGTQVTVSSGSGGGGSGGGGSGGGGSFEGSTRNKILVKQSPMLVAYDNAVNLSCKYSYNLFSREFRASLHKGLDSAVEVCVVYGNYSQQLQVYSKTGFNCDGKLGNESVTFYLQNLYVNQTDIYFCKIEVMYPPPYLDNEKSNGTIIHVKGKHLCPSPLFPGPSKPFWVLVVVGGVLACYSLLVTVAFIIFWVRSKRSRLLHSDYMNMTPRRPGPTRKHYQPYAPPRDFAAYRSRAKRSGSGVKQTLNFDLLKLAGDVESNPGPSRGHMTEYKPTVRLATRDDVPRAVRTLAAAFADYPATRHTVDPDRHIERVTELQELFLTRVGLDIGKVWVADDGAAVAVWTTPESVEAGAVFAEIGPRMAELSGSRLAAQQQMEGLLAPHRPKEPAWFLATVGVSPDHQGKGLGSAVVLPGVEAAERAGVPAFLETSAPRNLPFYERLGFTVTADVEVPEGPRTWCMTRKPGA

SEQ ID NO: 6381 - protein, 1182 aa, Artificial Sequence
  Synthetic Polypeptide
MALPVTALLLPLALLLHAARPDIQMTQSPSSLSASVGDRVTITCKASDHINNWLAWYQQKPGQAPKLLIYGATTLETGVPSRFSGSGSGTDYTLTISSLQPEDFATYYCQQSWNTPWTFGQGTKLEIKRLEGQPKANPTVTLFPPSSEELQANKATLVCLISDFYPGAVTVAWKADGSPVKAGVETTKPSKQSNNKYAASSYLSLTPEQWKSHRSYSCQVTHEGSTVEKTVAPTECSGSGMRTEDLPKAVVFLEPQWYRVLEKDSVTLKCQGAYSPEDNSTQWFHNESLISSQASSYFIDAATVDDSGEYRCQTNLSTLSDPVQLEVHIGWLLLQAPRWVFKEEDPIHLRCHSWKNTALHKVTYLQNGKGRKYFHHNSDFYIPKATLKDSGSYFCRGLVGSKNVSSETVNITITQGLAVSTISSFFPPGYQVSFCLVMVLLFAVDTGLYFSVKTNIRSSTRDWKDHKFKWRKDPQDKRAKRSGSGATNFSLLKQAGDVEENPGPTSMDWIWRILFLVGAATGAHSFEQVQLQQPGAELVKPGASVKMSCKASGYAFSSYWINWMKQKPGQGLEWIGQIYPGDGDTNYNGKFKGRATLTADTSSSTAYMQLSSLTSEDSAVYFCARSITTVVGCAMDYWGQGTSVTVSSTRASTKGPSVFPLAPSSKSTSGGTAALGCLVKDYFPEPVTVSWNSGALTSGVHTFPAVLQSSGLYSLSSVVTVPSSSLGTQTYICNVNHKPSNTKVDKRVEPKSCGTNKILVKQSPMLVAYDNAVNLSCKYSYNLFSREFRASLHKGLDSAVEVCVVYGNYSQQLQVYSKTGFNCDGKLGNESVTFYLQNLYVNQTDIYFCKIEVMYPPPYLDNEKSNGTIIHVKGKHLCPSPLFPGPSKPFWVLVVVGGVLACYSLLVTVAFIIFWVRSKRSRLLHSDYMNMTPRRPGPTRKHYQPYAPPRDFAAYRSRAKRSGSGVKQTLNFDLLKLAGDVESNPGPSRGGIHTMATYEVLCEVARKLGTDDREVVLFLLNVFIPQPTLAQLIGALRALKEEGRLTFPLLAECLFRAGRRDLLRDLLHLDPRFLERHLAGTMSYFSPYQLTVLHVDGELCARDIRSLIFLSKDTIGSRSTPQTFLHWVYCMENLDLLGPTDVDALMSMLRSLSRVDLQRQVQTLMGLHLSGPSHSQHYRHTP

SEQ ID NO: 6382 - protein, 1235 aa, Artificial Sequence
  Synthetic Polypeptide
MALPVTALLLPLALLLHAARPDIQMTQSPSSLSASVGDRVTITCKASDHINNWLAWYQQKPGQAPKLLIYGATTLETGVPSRFSGSGSGTDYTLTISSLQPEDFATYYCQQSWNTPWTFGQGTKLEIKRLEGQPKANPTVTLFPPSSEELQANKATLVCLISDFYPGAVTVAWKADGSPVKAGVETTKPSKQSNNKYAASSYLSLTPEQWKSHRSYSCQVTHEGSTVEKTVAPTECSGSGMRTEDLPKAVVFLEPQWYRVLEKDSVTLKCQGAYSPEDNSTQWFHNESLISSQASSYFIDAATVDDSGEYRCQTNLSTLSDPVQLEVHIGWLLLQAPRWVFKEEDPIHLRCHSWKNTALHKVTYLQNGKGRKYFHHNSDFYIPKATLKDSGSYFCRGLVGSKNVSSETVNITITQGLAVSTISSFFPPGYQVSFCLVMVLLFAVDTGLYFSVKTNIRSSTRDWKDHKFKWRKDPQDKRAKRSGSGATNFSLLKQAGDVEENPGPTSMDWIWRILFLVGAATGAHSFEQVQLQQPGAELVKPGASVKMSCKASGYAFSSYWINWMKQKPGQGLEWIGQIYPGDGDTNYNGKFKGRATLTADTSSSTAYMQLSSLTSEDSAVYFCARSITTVVGCAMDYWGQGTSVTVSSTRASTKGPSVFPLAPSSKSTSGGTAALGCLVKDYFPEPVTVSWNSGALTSGVHTFPAVLQSSGLYSLSSVVTVPSSSLGTQTYICNVNHKPSNTKVDKRVEPKSCGTNKILVKQSPMLVAYDNAVNLSCKYSYNLFSREFRASLHKGLDSAVEVCVVYGNYSQQLQVYSKTGFNCDGKLGNESVTFYLQNLYVNQTDIYFCKIEVMYPPPYLDNEKSNGTIIHVKGKHLCPSPLFPGPSKPFWVLVVVGGVLACYSLLVTVAFIIFWVRSKRSRLLHSDYMNMTPRRPGPTRKHYQPYAPPRDFAAYRSRAKRSGSGVKQTLNFDLLKLAGDVESNPGPSRGGIHTMSDSKEVPSLPFLRHLLEELDSHEDSLLLFLCHDAAPGCTTVTQALCSLSQQRKLTLAALVEMLYVLQRMDLLKSRFGLSKEGAEQLLGTSFLTRYRKLMVCVGEELDSSELRALRLFACNLNPSLSTALSESSRFVELVLALENVGLVSPSSVSVLADMLRTLRRLDLCQQLVEYEQQEQARYRYCYAASPSLPVRTLRRGHGASEHEQLCMPVQESSDSPELLRTPVQESSSDSPEQTT

SEQ ID NO: 6383 - protein, 1190 aa, Artificial Sequence
  Synthetic Polypeptide
MALPVTALLLPLALLLHAARPDIQMTQSPSSLSASVGDRVTITCKASDHINNWLAWYQQKPGQAPKLLIYGATTLETGVPSRFSGSGSGTDYTLTISSLQPEDFATYYCQQSWNTPWTFGQGTKLEIKRLEGQPKANPTVTLFPPSSEELQANKATLVCLISDFYPGAVTVAWKADGSPVKAGVETTKPSKQSNNKYAASSYLSLTPEQWKSHRSYSCQVTHEGSTVEKTVAPTECSGSGMRTEDLPKAVVFLEPQWYRVLEKDSVTLKCQGAYSPEDNSTQWFHNESLISSQASSYFIDAATVDDSGEYRCQTNLSTLSDPVQLEVHIGWLLLQAPRWVFKEEDPIHLRCHSWKNTALHKVTYLQNGKGRKYFHHNSDFYIPKATLKDSGSYFCRGLVGSKNVSSETVNITITQGLAVSTISSFFPPGYQVSFCLVMVLLFAVDTGLYFSVKTNIRSSTRDWKDHKFKWRKDPQDKRAKRSGSGATNFSLLKQAGDVEENPGPTSMDWIWRILFLVGAATGAHSFEQVQLQQPGAELVKPGASVKMSCKASGYAFSSYWINWMKQKPGQGLEWIGQIYPGDGDTNYNGKFKGRATLTADTSSSTAYMQLSSLTSEDSAVYFCARSITTVVGCAMDYWGQGTSVTVSSTRASTKGPSVFPLAPSSKSTSGGTAALGCLVKDYFPEPVTVSWNSGALTSGVHTFPAVLQSSGLYSLSSVVTVPSSSLGTQTYICNVNHKPSNTKVDKRVEPKSCGTNKILVKQSPMLVAYDNAVNLSCKYSYNLFSREFRASLHKGLDSAVEVCVVYGNYSQQLQVYSKTGFNCDGKLGNESVTFYLQNLYVNQTDIYFCKIEVMYPPPYLDNEKSNGTIIHVKGKHLCPSPLFPGPSKPFWVLVVVGGVLACYSLLVTVAFIIFWVRSKRSRLLHSDYMNMTPRRPGPTRKHYQPYAPPRDFAAYRSRAKRSGSGVKQTLNFDLLKLAGDVESNPGPSRGHMTEYKPTVRLATRDDVPRAVRTLAAAFADYPATRHTVDPDRHIERVTELQELFLTRVGLDIGKVWVADDGAAVAVWTTPESVEAGAVFAEIGPRMAELSGSRLAAQQQMEGLLAPHRPKEPAWFLATVGVSPDHQGKGLGSAVVLPGVEAAERAGVPAFLETSAPRNLPFYERLGFTVTADVEVPEGPRTWCMTRKPGA

SEQ ID NO: 6384 - protein, 1327 aa, Artificial Sequence
  Synthetic Polypeptide
MALPVTALLLPLALLLHAARPEVQLVESGGGLVQAGGSLRLSCAASGRTFSMGWFRQAPGKEREFVAAITYSGGSPYYADSVKGRFTISRDNAKNTVYLQMNSLKPEDTAVYYCAANPTYGSDWNAENWGQGTQVTVSSGTGGGGSGGGGSGGGGSEFDIQMTQSPSSLSASVGDRVTITCKASDHINNWLAWYQQKPGQAPKLLIYGATTLETGVPSRFSGSGSGTDYTLTISSLQPEDFATYYCQQSWNTPWTFGQGTKLEIKRLEGQPKANPTVTLFPPSSEELQANKATLVCLISDFYPGAVTVAWKADGSPVKAGVETTKPSKQSNNKYAASSYLSLTPEQWKSHRSYSCQVTHEGSTVEKTVAPTECSGSGMRTEDLPKAVVFLEPQWYRVLEKDSVTLKCQGAYSPEDNSTQWFHNESLISSQASSYFIDAATVDDSGEYRCQTNLSTLSDPVQLEVHIGWLLLQAPRWVFKEEDPIHLRCHSWKNTALHKVTYLQNGKGRKYFHHNSDFYIPKATLKDSGSYFCRGLVGSKNVSSETVNITITQGLAVSTISSFFPPGYQVSFCLVMVLLFAVDTGLYFSVKTNIRSSTRDWKDHKFKWRKDPQDKRAKRSGSGATNFSLLKQAGDVEENPGPTSMDWIWRILFLVGAATGAHSFEQVQLQQPGAELVKPGASVKMSCKASGYAFSSYWINWMKQKPGQGLEWIGQIYPGDGDTNYNGKFKGRATLTADTSSSTAYMQLSSLTSEDSAVYFCARSITTVVGCAMDYWGQGTSVTVSSTRASTKGPSVFPLAPSSKSTSGGTAALGCLVKDYFPEPVTVSWNSGALTSGVHTFPAVLQSSGLYSLSSVVTVPSSSLGTQTYICNVNHKPSNTKVDKRVEPKSCGTNKILVKQSPMLVAYDNAVNLSCKYSYNLFSREFRASLHKGLDSAVEVCVVYGNYSQQLQVYSKTGFNCDGKLGNESVTFYLQNLYVNQTDIYFCKIEVMYPPPYLDNEKSNGTIIHVKGKHLCPSPLFPGPSKPFWVLVVVGGVLACYSLLVTVAFIIFWVRSKRSRLLHSDYMNMTPRRPGPTRKHYQPYAPPRDFAAYRSRAKRSGSGVKQTLNFDLLKLAGDVESNPGPSRGHMTEYKPTVRLATRDDVPRAVRTLAAAFADYPATRHTVDPDRHIERVTELQELFLTRVGLDIGKVWVADDGAAVAVWTTPESVEAGAVFAEIGPRMAELSGSRLAAQQQMEGLLAPHRPKEPAWFLATVGVSPDHQGKGLGSAVVLPGVEAAERAGVPAFLETSAPRNLPFYERLGFTVTADVEVPEGPRTWCMTRKPGA

SEQ ID NO: 6385 - protein, 1464 aa, Artificial Sequence
  Synthetic Polypeptide
MALPVTALLLPLALLLHAARPEVQLVESGGGLVQAGGSLRLSCAASGRTFSMGWFRQAPGKEREFVAAITYSGGSPYYADSVKGRFTISRDNAKNTVYLQMNSLKPEDTAVYYCAANPTYGSDWNAENWGQGTQVTVSSGTGGGGSGGGGSGGGGSEFDIQMTQSPSSLSASVGDRVTITCKASDHINNWLAWYQQKPGQAPKLLIYGATTLETGVPSRFSGSGSGTDYTLTISSLQPEDFATYYCQQSWNTPWTFGQGTKLEIKRLEGQPKANPTVTLFPPSSEELQANKATLVCLISDFYPGAVTVAWKADGSPVKAGVETTKPSKQSNNKYAASSYLSLTPEQWKSHRSYSCQVTHEGSTVEKTVAPTECSGSGMRTEDLPKAVVFLEPQWYRVLEKDSVTLKCQGAYSPEDNSTQWFHNESLISSQASSYFIDAATVDDSGEYRCQTNLSTLSDPVQLEVHIGWLLLQAPRWVFKEEDPIHLRCHSWKNTALHKVTYLQNGKGRKYFHHNSDFYIPKATLKDSGSYFCRGLVGSKNVSSETVNITITQGLAVSTISSFFPPGYQVSFCLVMVLLFAVDTGLYFSVKTNIRSSTRDWKDHKFKWRKDPQDKRAKRSGSGATNFSLLKQAGDVEENPGPTSMDWIWRILFLVGAATGAHSGPEVQLVESGGGLVQAGGSLRLSCAASGRTFTMGWFRQAPGKEREFVAAISLSPTLAYYADSVKGRFTISRDNAKNTVVLQMNSLKPEDTALYYCAADRKSVMSIRPDYWGQGTQVTVSSGSGGGGSGGGGSGGGGSFEQVQLQQPGAELVKPGASVKMSCKASGYAFSSYWINWMKQKPGQGLEWIGQIYPGDGDTNYNGKFKGRATLTADTSSSTAYMQLSSLTSEDSAVYFCARSITTVVGCAMDYWGQGTSVTVSSTRASTKGPSVFPLAPSSKSTSGGTAALGCLVKDYFPEPVTVSWNSGALTSGVHTFPAVLQSSGLYSLSSVVTVPSSSLGTQTYICNVNHKPSNTKVDKRVEPKSCGTNKILVKQSPMLVAYDNAVNLSCKYSYNLFSREFRASLHKGLDSAVEVCVVYGNYSQQLQVYSKTGFNCDGKLGNESVTFYLQNLYVNQTDIYFCKIEVMYPPPYLDNEKSNGTIIHVKGKHLCPSPLFPGPSKPFWVLVVVGGVLACYSLLVTVAFIIFWVRSKRSRLLHSDYMNMTPRRPGPTRKHYQPYAPPRDFAAYRSRAKRSGSGVKQTLNFDLLKLAGDVESNPGPSRGHMTEYKPTVRLATRDDVPRAVRTLAAAFADYPATRHTVDPDRHIERVTELQELFLTRVGLDIGKVWVADDGAAVAVWTTPESVEAGAVFAEIGPRMAELSGSRLAAQQQMEGLLAPHRPKEPAWFLATVGVSPDHQGKGLGSAVVLPGVEAAERAGVPAFLETSAPRNLPFYERLGFTVTADVEVPEGPRTWCMTRKPGA

SEQ ID NO: 6386 - protein, 1197 aa, Artificial Sequence
  Synthetic Polypeptide
MALPVTALLLPLALLLHAARPEVQLVESGGGLVQAGGSLRLSCAASGRTFSMGWFRQAPGKEREFVAAITYSGGSPYYADSVKGRFTISRDNAKNTVYLQMNSLKPEDTAVYYCAANPTYGSDWNAENWGQGTQVTVSSLEGQPKANPTVTLFPPSSEELQANKATLVCLISDFYPGAVTVAWKADGSPVKAGVETTKPSKQSNNKYAASSYLSLTPEQWKSHRSYSCQVTHEGSTVEKTVAPTECSGSGMRTEDLPKAVVFLEPQWYRVLEKDSVTLKCQGAYSPEDNSTQWFHNESLISSQASSYFIDAATVDDSGEYRCQTNLSTLSDPVQLEVHIGWLLLQAPRWVFKEEDPIHLRCHSWKNTALHKVTYLQNGKGRKYFHHNSDFYIPKATLKDSGSYFCRGLVGSKNVSSETVNITITQGLAVSTISSFFPPGYQVSFCLVMVLLFAVDTGLYFSVKTNIRSSTRDWKDHKFKWRKDPQDKRAKRSGSGATNFSLLKQAGDVEENPGPTSMDWIWRILFLVGAATGAHSGPEVQLVESGGGLVQAGGSLRLSCAASGRTFTMGWFRQAPGKEREFVAAISLSPTLAYYADSVKGRFTISRDNAKNTVVLQMNSLKPEDTALYYCAADRKSVMSIRPDYWGQGTQVTVSSTRASTKGPSVFPLAPSSKSTSGGTAALGCLVKDYFPEPVTVSWNSGALTSGVHTFPAVLQSSGLYSLSSVVTVPSSSLGTQTYICNVNHKPSNTKVDKRVEPKSCGTNKILVKQSPMLVAYDNAVNLSCKYSYNLFSREFRASLHKGLDSAVEVCVVYGNYSQQLQVYSKTGFNCDGKLGNESVTFYLQNLYVNQTDIYFCKIEVMYPPPYLDNEKSNGTIIHVKGKHLCPSPLFPGPSKPFWVLVVVGGVLACYSLLVTVAFIIFWVRSKRSRLLHSDYMNMTPRRPGPTRKHYQPYAPPRDFAAYRSRAKRSGSGVKQTLNFDLLKLAGDVESNPGPSRGHMTEYKPTVRLATRDDVPRAVRTLAAAFADYPATRHTVDPDRHIERVTELQELFLTRVGLDIGKVWVADDGAAVAVWTTPESVEAGAVFAEIGPRMAELSGSRLAAQQQMEGLLAPHRPKEPAWFLATVGVSPDHQGKGLGSAVVLPGVEAAERAGVPAFLETSAPRNLPFYERLGFTVTADVEVPEGPRTWCMTRKPGA

SEQ ID NO: 6387 - protein, 1205 aa, Artificial Sequence
  Synthetic Polypeptide
MALPVTALLLPLALLLHAARPDIQMTQSPSSLSASVGDRVTITCKASDHINNWLAWYQQKPGQAPKLLIYGATTLETGVPSRFSGSGSGTDYTLTISSLQPEDFATYYCQQSWNTPWTFGQGTKLEIKRLEDLKNVFPPEVAVFEPSEAEISHTQKATLVCLATGFYPDHVELSWWVNGKEVHSGVSTDPQPLKEQPALNDSRYCLSSRLRVSATFWQNPRNHFRCQVQFYGLSENDEWTQDRAKPVTQIVSAEAWGRADCGSGMRTEDLPKAVVFLEPQWYRVLEKDSVTLKCQGAYSPEDNSTQWFHNESLISSQASSYFIDAATVDDSGEYRCQTNLSTLSDPVQLEVHIGWLLLQAPRWVFKEEDPIHLRCHSWKNTALHKVTYLQNGKGRKYFHHNSDFYIPKATLKDSGSYFCRGLVGSKNVSSETVNITITQGLAVSTISSFFPPGYQVSFCLVMVLLFAVDTGLYFSVKTNIRSSTRDWKDHKFKWRKDPQDKRAKRSGSGATNFSLLKQAGDVEENPGPTSMDWIWRILFLVGAATGAHSFEQVQLQQPGAELVKPGASVKMSCKASGYAFSSYWINWMKQKPGQGLEWIGQIYPGDGDTNYNGKFKGRATLTADTSSSTAYMQLSSLTSEDSAVYFCARSITTVVGCAMDYWGQGTSVTVSSTRIQNPDPAVYQLRDSKSSDKSVCLFTDFDSQTNVSQSKDSDVYITDKTVLDMRSMDFKSNSAVAWSNKSDFACANAFNNSIIPEDTFFPSPESSCGTNKILVKQSPMLVAYDNAVNLSCKYSYNLFSREFRASLHKGLDSAVEVCVVYGNYSQQLQVYSKTGFNCDGKLGNESVTFYLQNLYVNQTDIYFCKIEVMYPPPYLDNEKSNGTIIHVKGKHLCPSPLFPGPSKPFWVLVVVGGVLACYSLLVTVAFIIFWVRSKRSRLLHSDYMNMTPRRPGPTRKHYQPYAPPRDFAAYRSRAKRSGSGVKQTLNFDLLKLAGDVESNPGPSRGHMTEYKPTVRLATRDDVPRAVRTLAAAFADYPATRHTVDPDRHIERVTELQELFLTRVGLDIGKVWVADDGAAVAVWTTPESVEAGAVFAEIGPRMAELSGSRLAAQQQMEGLLAPHRPKEPAWFLATVGVSPDHQGKGLGSAVVLPGVEAAERAGVPAFLETSAPRNLPFYERLGFTVTADVEVPEGPRTWCMTRKPGA

SEQ ID NO: 6388 - protein, 1342 aa, Artificial Sequence
  Synthetic Polypeptide
MALPVTALLLPLALLLHAARPEVQLVESGGGLVQAGGSLRLSCAASGRTFSMGWFRQAPGKEREFVAAITYSGGSPYYADSVKGRFTISRDNAKNTVYLQMNSLKPEDTAVYYCAANPTYGSDWNAENWGQGTQVTVSSGTGGGGSGGGGSGGGGSEFDIQMTQSPSSLSASVGDRVTITCKASDHINNWLAWYQQKPGQAPKLLIYGATTLETGVPSRFSGSGSGTDYTLTISSLQPEDFATYYCQQSWNTPWTFGQGTKLEIKRLEDLKNVFPPEVAVFEPSEAEISHTQKATLVCLATGFYPDHVELSWWVNGKEVHSGVSTDPQPLKEQPALNDSRYCLSSRLRVSATFWQNPRNHFRCQVQFYGLSENDEWTQDRAKPVTQIVSAEAWGRADCGSGMRTEDLPKAVVFLEPQWYRVLEKDSVTLKCQGAYSPEDNSTQWFHNESLISSQASSYFIDAATVDDSGEYRCQTNLSTLSDPVQLEVHIGWLLLQAPRWVFKEEDPIHLRCHSWKNTALHKVTYLQNGKGRKYFHHNSDFYIPKATLKDSGSYFCRGLVGSKNVSSETVNITITQGLAVSTISSFFPPGYQVSFCLVMVLLFAVDTGLYFSVKTNIRSSTRDWKDHKFKWRKDPQDKRAKRSGSGATNFSLLKQAGDVEENPGPTSMDWIWRILFLVGAATGAHSFEQVQLQQPGAELVKPGASVKMSCKASGYAFSSYWINWMKQKPGQGLEWIGQIYPGDGDTNYNGKFKGRATLTADTSSSTAYMQLSSLTSEDSAVYFCARSITTVVGCAMDYWGQGTSVTVSSTRIQNPDPAVYQLRDSKSSDKSVCLFTDFDSQTNVSQSKDSDVYITDKTVLDMRSMDFKSNSAVAWSNKSDFACANAFNNSIIPEDTFFPSPESSCGTNKILVKQSPMLVAYDNAVNLSCKYSYNLFSREFRASLHKGLDSAVEVCVVYGNYSQQLQVYSKTGFNCDGKLGNESVTFYLQNLYVNQTDIYFCKIEVMYPPPYLDNEKSNGTIIHVKGKHLCPSPLFPGPSKPFWVLVVVGGVLACYSLLVTVAFIIFWVRSKRSRLLHSDYMNMTPRRPGPTRKHYQPYAPPRDFAAYRSRAKRSGSGVKQTLNFDLLKLAGDVESNPGPSRGHMTEYKPTVRLATRDDVPRAVRTLAAAFADYPATRHTVDPDRHIERVTELQELFLTRVGLDIGKVWVADDGAAVAVWTTPESVEAGAVFAEIGPRMAELSGSRLAAQQQMEGLLAPHRPKEPAWFLATVGVSPDHQGKGLGSAVVLPGVEAAERAGVPAFLETSAPRNLPFYERLGFTVTADVEVPEGPRTWCMTRKPGA

SEQ ID NO: 6389 - protein, 1479 aa, Artificial Sequence
  Synthetic Polypeptide
MALPVTALLLPLALLLHAARPEVQLVESGGGLVQAGGSLRLSCAASGRTFSMGWFRQAPGKEREFVAAITYSGGSPYYADSVKGRFTISRDNAKNTVYLQMNSLKPEDTAVYYCAANPTYGSDWNAENWGQGTQVTVSSGTGGGGSGGGGSGGGGSEFDIQMTQSPSSLSASVGDRVTITCKASDHINNWLAWYQQKPGQAPKLLIYGATTLETGVPSRFSGSGSGTDYTLTISSLQPEDFATYYCQQSWNTPWTFGQGTKLEIKRLEDLKNVFPPEVAVFEPSEAEISHTQKATLVCLATGFYPDHVELSWWVNGKEVHSGVSTDPQPLKEQPALNDSRYCLSSRLRVSATFWQNPRNHFRCQVQFYGLSENDEWTQDRAKPVTQIVSAEAWGRADCGSGMRTEDLPKAVVFLEPQWYRVLEKDSVTLKCQGAYSPEDNSTQWFHNESLISSQASSYFIDAATVDDSGEYRCQTNLSTLSDPVQLEVHIGWLLLQAPRWVFKEEDPIHLRCHSWKNTALHKVTYLQNGKGRKYFHHNSDFYIPKATLKDSGSYFCRGLVGSKNVSSETVNITITQGLAVSTISSFFPPGYQVSFCLVMVLLFAVDTGLYFSVKTNIRSSTRDWKDHKFKWRKDPQDKRAKRSGSGATNFSLLKQAGDVEENPGPTSMDWIWRILFLVGAATGAHSGPEVQLVESGGGLVQAGGSLRLSCAASGRTFTMGWFRQAPGKEREFVAAISLSPTLAYYADSVKGRFTISRDNAKNTVVLQMNSLKPEDTALYYCAADRKSVMSIRPDYWGQGTQVTVSSGSGGGGSGGGGSGGGGSFEQVQLQQPGAELVKPGASVKMSCKASGYAFSSYWINWMKQKPGQGLEWIGQIYPGDGDTNYNGKFKGRATLTADTSSSTAYMQLSSLTSEDSAVYFCARSITTVVGCAMDYWGQGTSVTVSSTRIQNPDPAVYQLRDSKSSDKSVCLFTDFDSQTNVSQSKDSDVYITDKTVLDMRSMDFKSNSAVAWSNKSDFACANAFNNSIIPEDTFFPSPESSCGTNKILVKQSPMLVAYDNAVNLSCKYSYNLFSREFRASLHKGLDSAVEVCVVYGNYSQQLQVYSKTGFNCDGKLGNESVTFYLQNLYVNQTDIYFCKIEVMYPPPYLDNEKSNGTIIHVKGKHLCPSPLFPGPSKPFWVLVVVGGVLACYSLLVTVAFIIFWVRSKRSRLLHSDYMNMTPRRPGPTRKHYQPYAPPRDFAAYRSRAKRSGSGVKQTLNFDLLKLAGDVESNPGPSRGHMTEYKPTVRLATRDDVPRAVRTLAAAFADYPATRHTVDPDRHIERVTELQELFLTRVGLDIGKVWVADDGAAVAVWTTPESVEAGAVFAEIGPRMAELSGSRLAAQQQMEGLLAPHRPKEPAWFLATVGVSPDHQGKGLGSAVVLPGVEAAERAGVPAFLETSAPRNLPFYERLGFTVTADVEVPEGPRTWCMTRKPGA

SEQ ID NO: 6390 - protein, 1212 aa, Artificial Sequence
  Synthetic Polypeptide
MALPVTALLLPLALLLHAARPEVQLVESGGGLVQAGGSLRLSCAASGRTFSMGWFRQAPGKEREFVAAITYSGGSPYYADSVKGRFTISRDNAKNTVYLQMNSLKPEDTAVYYCAANPTYGSDWNAENWGQGTQVTVSSLEDLKNVFPPEVAVFEPSEAEISHTQKATLVCLATGFYPDHVELSWWVNGKEVHSGVSTDPQPLKEQPALNDSRYCLSSRLRVSATFWQNPRNHFRCQVQFYGLSENDEWTQDRAKPVTQIVSAEAWGRADCGSGMRTEDLPKAVVFLEPQWYRVLEKDSVTLKCQGAYSPEDNSTQWFHNESLISSQASSYFIDAATVDDSGEYRCQTNLSTLSDPVQLEVHIGWLLLQAPRWVFKEEDPIHLRCHSWKNTALHKVTYLQNGKGRKYFHHNSDFYIPKATLKDSGSYFCRGLVGSKNVSSETVNITITQGLAVSTISSFFPPGYQVSFCLVMVLLFAVDTGLYFSVKTNIRSSTRDWKDHKFKWRKDPQDKRAKRSGSGATNFSLLKQAGDVEENPGPTSMDWIWRILFLVGAATGAHSGPEVQLVESGGGLVQAGGSLRLSCAASGRTFTMGWFRQAPGKEREFVAAISLSPTLAYYADSVKGRFTISRDNAKNTVVLQMNSLKPEDTALYYCAADRKSVMSIRPDYWGQGTQVTVSSTRIQNPDPAVYQLRDSKSSDKSVCLFTDFDSQTNVSQSKDSDVYITDKTVLDMRSMDFKSNSAVAWSNKSDFACANAFNNSIIPEDTFFPSPESSCGTNKILVKQSPMLVAYDNAVNLSCKYSYNLFSREFRASLHKGLDSAVEVCVVYGNYSQQLQVYSKTGFNCDGKLGNESVTFYLQNLYVNQTDIYFCKIEVMYPPPYLDNEKSNGTIIHVKGKHLCPSPLFPGPSKPFWVLVVVGGVLACYSLLVTVAFIIFWVRSKRSRLLHSDYMNMTPRRPGPTRKHYQPYAPPRDFAAYRSRAKRSGSGVKQTLNFDLLKLAGDVESNPGPSRGHMTEYKPTVRLATRDDVPRAVRTLAAAFADYPATRHTVDPDRHIERVTELQELFLTRVGLDIGKVWVADDGAAVAVWTTPESVEAGAVFAEIGPRMAELSGSRLAAQQQMEGLLAPHRPKEPAWFLATVGVSPDHQGKGLGSAVVLPGVEAAERAGVPAFLETSAPRNLPFYERLGFTVTADVEVPEGPRTWCMTRKPGA

SEQ ID NO: 6391 - protein, 633 aa, Artificial Sequence; identical to SEQ ID NO: 4032
  Synthetic Polypeptide

SEQ ID NO: 6392 - protein, 469 aa, Artificial Sequence
  Synthetic Polypeptide
MALPVTALLLPLALLLHAARPDIQMTQSPSSLSASVGDRVTITCKASDHINNWLAWYQQKPGQAPKLLIYGATTLETGVPSRFSGSGSGTDYTLTISSLQPEDFATYYCQQSWNTPWTFGQGTKLEIKRGGGGSGGGGSGGGGSQVQLQQPGAELVKPGASVKMSCKASGYAFSSYWINWMKQKPGQGLEWIGQIYPGDGDTNYNGKFKGRATLTADTSSSTAYMQLSSLTSEDSAVYFCARSITTVVGCAMDYWGQGTSVTVSSTRNKILVKQSPMLVAYDNAVNLSCKYSYNLFSREFRASLHKGLDSAVEVCVVYGNYSQQLQVYSKTGFNCDGKLGNESVTFYLQNLYVNQTDIYFCKIEVMYPPPYLDNEKSNGTIIHVKGKHLCPSPLFPGPSKPFWVLVVVGGVLACYSLLVTVAFIIFWVRSKRSRLLHSDYMNMTPRRPGPTRKHYQPYAPPRDFAAYRS

SEQ ID NO: 6393 - protein, 469 aa, Artificial Sequence
  Synthetic Polypeptide
MALPVTALLLPLALLLHAARPEIVLTQSPATLSLSPGERATLSCRASQSVSSYLAWYQQKPGQAPRLLIYDASNRATGIPARFSGSGSGTDFTLTISSLEPEDFAVYYCQQRSNWPITFGQGTRLEIKGGGGSGGGGSGGGGSEVQLVESGGGLVQPGRSLRLSCAASGFTFNDYAMHWVRQAPGKGLEWVSTISWNSGSIGYADSVKGRFTISRDNAKKSLYLQMNSLRAEDTALYYCAKDIQYGNYYYGMDVWGQGTTVTVSSTRNKILVKQSPMLVAYDNAVNLSCKYSYNLFSREFRASLHKGLDSAVEVCVVYGNYSQQLQVYSKTGFNCDGKLGNESVTFYLQNLYVNQTDIYFCKIEVMYPPPYLDNEKSNGTIIHVKGKHLCPSPLFPGPSKPFWVLVVVGGVLACYSLLVTVAFIIFWVRSKRSRLLHSDYMNMTPRRPGPTRKHYQPYAPPRDFAAYRS

SEQ ID NO: 6394 - protein, 343 aa, Artificial Sequence
  Synthetic Polypeptide
MALPVTALLLPLALLLHAARPEVQLVESGGGLVQAGGSLRLSCAASGRTFSMGWFRQAPGKEREFVAAITYSGGSPYYADSVKGRFTISRDNAKNTVYLQMNSLKPEDTAVYYCAANPTYGSDWNAENWGQGTQVTVSSTRNKILVKQSPMLVAYDNAVNLSCKYSYNLFSREFRASLHKGLDSAVEVCVVYGNYSQQLQVYSKTGFNCDGKLGNESVTFYLQNLYVNQTDIYFCKIEVMYPPPYLDNEKSNGTIIHVKGKHLCPSPLFPGPSKPFWVLVVVGGVLACYSLLVTVAFIIFWVRSKRSRLLHSDYMNMTPRRPGPTRKHYQPYAPPRDFAAYRS

SEQ ID NO: 6395 - protein, 343 aa, Artificial Sequence
  Synthetic Polypeptide
MALPVTALLLPLALLLHAARPQLQLQESGPGLVKPSETLSLTCTVSGGSISSGDYYWGWIRQPPGKGLEWIGHIYYSGATYYNPSLKSRVTISVDTSRNQFSLKLSSVTAADTAVYYCTRDDSSNWRSRGQGTLVTVSSTRNKILVKQSPMLVAYDNAVNLSCKYSYNLFSREFRASLHKGLDSAVEVCVVYGNYSQQLQVYSKTGFNCDGKLGNESVTFYLQNLYVNQTDIYFCKIEVMYPPPYLDNEKSNGTIIHVKGKHLCPSPLFPGPSKPFWVLVVVGGVLACYSLLVTVAFIIFWVRSKRSRLLHSDYMNMTPRRPGPTRKHYQPYAPPRDFAAYRS

SEQ ID NO: 6396 - protein, 343 aa, Artificial Sequence
  Synthetic Polypeptide
MALPVTALLLPLALLLHAARPQLQLQESGPGLVKPSETLSLTCTVSGDSISSGDYYWGWIRQPPGKGLEWIGHIYYSGVTYYNPSLKSRVTISVDTSRNQFSLKLSSVTAADTAVYYCTREDSSNWRSRGQGTLVTVSSTRNKILVKQSPMLVAYDNAVNLSCKYSYNLFSREFRASLHKGLDSAVEVCVVYGNYSQQLQVYSKTGFNCDGKLGNESVTFYLQNLYVNQTDIYFCKIEVMYPPPYLDNEKSNGTIIHVKGKHLCPSPLFPGPSKPFWVLVVVGGVLACYSLLVTVAFIIFWVRSKRSRLLHSDYMNMTPRRPGPTRKHYQPYAPPRDFAAYRS

SEQ ID NO: 6397 - protein, 345 aa, Artificial Sequence
  Synthetic Polypeptide
MALPVTALLLPLALLLHAARPEVQLQESGGGLVQPGGSLRLSCAASGRTFSSLFMGWFRQAPGKERELVAAISRYSLYTYYADSVKGRFTISADNAKNAVYLQMNSLKPEDTAVYYCASKLEYTSNDYDSWGQGTQVTVSSTRNKILVKQSPMLVAYDNAVNLSCKYSYNLFSREFRASLHKGLDSAVEVCVVYGNYSQQLQVYSKTGFNCDGKLGNESVTFYLQNLYVNQTDIYFCKIEVMYPPPYLDNEKSNGTIIHVKGKHLCPSPLFPGPSKPFWVLVVVGGVLACYSLLVTVAFIIFWVRSKRSRLLHSDYMNMTPRRPGPTRKHYQPYAPPRDFAAYRS

SEQ ID NO: 6398 - protein, 353 aa, Artificial Sequence
  Synthetic Polypeptide
MALPVTALLLPLALLLHAARPEVQLVESGGGLVQPGGSLRLSCAASGFASDYYIIGWFRQAPGKEREGVSCISSRYANTNYADSVKGRFTISRDNAKNTVYLQMNSLKPEDTAVYYCAADTRRYTCPDIATMHRNFDSWGQGTLVTVSSTRNKILVKQSPMLVAYDNAVNLSCKYSYNLFSREFRASLHKGLDSAVEVCVVYGNYSQQLQVYSKTGFNCDGKLGNESVTFYLQNLYVNQTDIYFCKIEVMYPPPYLDNEKSNGTIIHVKGKHLCPSPLFPGPSKPFWVLVVVGGVLACYSLLVTVAFIIFWVRSKRSRLLHSDYMNMTPRRPGPTRKHYQPYAPPRDFAAYRS

SEQ ID NO: 6399 - protein, 349 aa, Artificial Sequence
  Synthetic Polypeptide
MALPVTALLLPLALLLHAARPEVQLVESGGSLVQPGGSLRLSCAASGFTFDDYAMSWVRQVPGKGLEWVSSINWSGTHTDYADSVKGRFTISRNNANNTLYLQMNSLKSEDTAVYYCAKNWRDAGTTWFEKSGSAGQGTQVTVSSTRNKILVKQSPMLVAYDNAVNLSCKYSYNLFSREFRASLHKGLDSAVEVCVVYGNYSQQLQVYSKTGFNCDGKLGNESVTFYLQNLYVNQTDIYFCKIEVMYPPPYLDNEKSNGTIIHVKGKHLCPSPLFPGPSKPFWVLVVVGGVLACYSLLVTVAFIIFWVRSKRSRLLHSDYMNMTPRRPGPTRKHYQPYAPPRDFAAYRS

SEQ ID NO: 6400 - protein, 344 aa, Artificial Sequence
  Synthetic Polypeptide
MALPVTALLLPLALLLHAARPEVQLVESGGGLVQPGGSLRLSCAASGFNIKDTCIGWVRRAPGKEEELVAKICKYSGHTRYADSVKGRFTISADTSKNTAYLQMNSLRAEDTAVYYCAAVSVRDGHYNYWGQGTTVTVSSTRNKILVKQSPMLVAYDNAVNLSCKYSYNLFSREFRASLHKGLDSAVEVCVVYGNYSQQLQVYSKTGFNCDGKLGNESVTFYLQNLYVNQTDIYFCKIEVMYPPPYLDNEKSNGTIIHVKGKHLCPSPLFPGPSKPFWVLVVVGGVLACYSLLVTVAFIIFWVRSKRSRLLHSDYMNMTPRRPGPTRKHYQPYAPPRDFAAYRS

SEQ ID NO: 6401 - protein, 349 aa, Artificial Sequence
  Synthetic Polypeptide
MALPVTALLLPLALLLHAARPGSDLGIKLLFAAAKGQDDEVRILLAAGADVNAKDFEGYTPLHVAAYDGHLEIVEVLLKAGADVNAKDSQGRTPLHEAAYSGHLEIVEVLLKAGADVNAQDDAGETPADLAAAWGHEDIAEVLQKTRNKILVKQSPMLVAYDNAVNLSCKYSYNLFSREFRASLHKGLDSAVEVCVVYGNYSQQLQVYSKTGFNCDGKLGNESVTFYLQNLYVNQTDIYFCKIEVMYPPPYLDNEKSNGTIIHVKGKHLCPSPLFPGPSKPFWVLVVVGGVLACYSLLVTVAFIIFWVRSKRSRLLHSDYMNMTPRRPGPTRKHYQPYAPPRDFAAYRS

SEQ ID NO: 6402 - protein, 283 aa, Artificial Sequence
  Synthetic Polypeptide
MALPVTALLLPLALLLHAARPVDNKFNKERYSAYYEIWQLPNLNVRQKAAFIGSLQDDPSQSANLLAEAKKLNDAQAPKTRNKILVKQSPMLVAYDNAVNLSCKYSYNLFSREFRASLHKGLDSAVEVCVVYGNYSQQLQVYSKTGFNCDGKLGNESVTFYLQNLYVNQTDIYFCKIEVMYPPPYLDNEKSNGTIIHVKGKHLCPSPLFPGPSKPFWVLVVVGGVLACYSLLVTVAFIIFWVRSKRSRLLHSDYMNMTPRRPGPTRKHYQPYAPPRDFAAYRS

SEQ ID NO: 6403 - protein, 314 aa, Artificial Sequence
  Synthetic Polypeptide
MALPVTALLLPLALLLHAARPLPAPKNLVVSRVTEDSARLSWTAPDAAFDSFAIGYWEWDDDGEAIVLTVPGSERSYDLTGLKPGTEYPVYIAGVKGGQWSFPLSAIFTTTRNKILVKQSPMLVAYDNAVNLSCKYSYNLFSREFRASLHKGLDSAVEVCVVYGNYSQQLQVYSKTGFNCDGKLGNESVTFYLQNLYVNQTDIYFCKIEVMYPPPYLDNEKSNGTIIHVKGKHLCPSPLFPGPSKPFWVLVVVGGVLACYSLLVTVAFIIFWVRSKRSRLLHSDYMNMTPRRPGPTRKHYQPYAPPRDFAAYRS

SEQ ID NO: 6404 - protein, 315 aa, Artificial Sequence
  Synthetic Polypeptide
MALPVTALLLPLALLLHAARPMLPAPKNLVVSRITEDSARLSWTAPDAAFDSFPIRYIETLIWGEAIWLDVPGSERSYDLTGLKPGTEYAVVITGVKGGRFSSPLVASFTTTRNKILVKQSPMLVAYDNAVNLSCKYSYNLFSREFRASLHKGLDSAVEVCVVYGNYSQQLQVYSKTGFNCDGKLGNESVTFYLQNLYVNQTDIYFCKIEVMYPPPYLDNEKSNGTIIHVKGKHLCPSPLFPGPSKPFWVLVVVGGVLACYSLLVTVAFIIFWVRSKRSRLLHSDYMNMTPRRPGPTRKHYQPYAPPRDFAAYRS

SEQ ID NO: 6405 - protein, 532 aa, Artificial Sequence
  Synthetic Polypeptide
MALPVTALLLPLALLLHAARPMALPVTALLLPLALLLHAARPLFNQEVQIPLTESYCGPCPKNWICYKNNCYQFFDESKNWYESQASCMSQNASLLKVYSKEDQDLLKLVKSYHWMGLVHIPTNGSWQWEDGSILSPNLLTIIEMQKGDCALYASSFKGYIENCSTPNTYICMQRTVGGGGSGGGGSGGGGSDLFNQEVQIPLTESYCGPCPKNWICYKNNCYQFFDESKNWYESQASCMSQNASLLKVYSKEDQDLLKLVKSYHWMGLVHIPTNGSWQWEDGSILSPNLLTIIEMQKGDCALYASSFKGYIENCSTPNTYICMQRTVTRNKILVKQSPMLVAYDNAVNLSCKYSYNLFSREFRASLHKGLDSAVEVCVVYGNYSQQLQVYSKTGFNCDGKLGNESVTFYLQNLYVNQTDIYFCKIEVMYPPPYLDNEKSNGTIIHVKGKHLCPSPLFPGPSKPFWVLVVVGGVLACYSLLVTVAFIIFWVRSKRSRLLHSDYMNMTPRRPGPTRKHYQPYAPPRDFAAYRS

SEQ ID NO: 6406 - protein, 412 aa, Artificial Sequence
  Synthetic Polypeptide
MALPVTALLLPLALLLHAARPMELTDLLLAAMLLAVARLTLSSPVAPACDPRLLNKLLRDSHLLHSRLSQCPDVDPLSIPVLLPAVDFSLGEWKTQTEQSKAQDILGAVSLLLEGVMAARGQLEPSCLSSLLGQLSGQVRLLLGALQGLLGTQLPLQGRTTAHKDPNALFLSLQQLLRGKVRFLLLVEGPTLCVRRTLPTTAVPSSTSTRNKILVKQSPMLVAYDNAVNLSCKYSYNLFSREFRASLHKGLDSAVEVCVVYGNYSQQLQVYSKTGFNCDGKLGNESVTFYLQNLYVNQTDIYFCKIEVMYPPPYLDNEKSNGTIIHVKGKHLCPSPLFPGPSKPFWVLVVVGGVLACYSLLVTVAFIIFWVRSKRSRLLHSDYMNMTPRRPGPTRKHYQPYAPPRDFAAYRS

SEQ ID NO: 6407 - protein, 278 aa, Artificial Sequence
  Synthetic Polypeptide
MALPVTALLLPLALLLHAARPMDPDLEIRAAFLRQRNTALRTEVAELEQEVQRLENEVSQYETRYGPLGGGKTRTRNKILVKQSPMLVAYDNAVNLSCKYSYNLFSREFRASLHKGLDSAVEVCVVYGNYSQQLQVYSKTGFNCDGKLGNESVTFYLQNLYVNQTDIYFCKIEVMYPPPYLDNEKSNGTIIHVKGKHLCPSPLFPGPSKPFWVLVVVGGVLACYSLLVTVAFIIFWVRSKRSRLLHSDYMNMTPRRPGPTRKHYQPYAPPRDFAAYRS

SEQ ID NO: 6408 - protein, 253 aa, Artificial Sequence
  Synthetic Polypeptide
MALPVTALLLPLALLLHAARPEVAALEKEVAALEKEVAALEKEVAALEKTRNKILVKQSPMLVAYDNAVNLSCKYSYNLFSREFRASLHKGLDSAVEVCVVYGNYSQQLQVYSKTGFNCDGKLGNESVTFYLQNLYVNQTDIYFCKIEVMYPPPYLDNEKSNGTIIHVKGKHLCPSPLFPGPSKPFWVLVVVGGVLACYSLLVTVAFIIFWVRSKRSRLLHSDYMNMTPRRPGPTRKHYQPYAPPRDFAAYRS

SEQ ID NO: 6409 - protein, 511 aa, Artificial Sequence
  Synthetic Polypeptide
MALPVTALLLPLALLLHAARPLFNQEVQIPLTESYCGPCPKNWICYKNNCYQFFDESKNWYESQASCMSQNASLLKVYSKEDQDLLKLVKSAHWMGLVHIPTNGSWQWEDGSILSPNLLTIIEMQKGDCALYASSFKGFIENCSTPNTYICMQRTVGGGGSGGGGSGGGGSDLFNQEVQIPLTESYCGPCPKNWICYKNNCYQFFDESKNWYESQASCMSQNASLLKVYSKEDQDLLKLVKSAHWMGLVHIPTNGSWQWEDGSILSPNLLTIIEMQKGDCALYASSFKGFIENCSTPNTYICMQRTVTRNKILVKQSPMLVAYDNAVNLSCKYSYNLFSREFRASLHKGLDSAVEVCVVYGNYSQQLQVYSKTGFNCDGKLGNESVTFYLQNLYVNQTDIYFCKIEVMYPPPYLDNEKSNGTIIHVKGKHLCPSPLFPGPSKPFWVLVVVGGVLACYSLLVTVAFIIFWVRSKRSRLLHSDYMNMTPRRPGPTRKHYQPYAPPRDFAAYRS

SEQ ID NO: 6410 - protein, 511 aa, Artificial Sequence
  Synthetic Polypeptide
MALPVTALLLPLALLLHAARPLFNQEVQIPLTESYCGPCPKNWICYKNNCYQFFDESKNWYESQASCMSQNASLLKVYSKEDQDLLKLVKSAHWMGLVHIPTNGSWQWEDGSILSPNLLTIIEMQKGDCALYASSFKGYIENCSTPNTYICMQRTVSGGGGSGGGGSGGGGDLFNQEVQIPLTESYCGPCPKNWICYKNNCYQFFDESKNWYESQASCMSQNASLLKVYSKEDQDLLKLVKSAHWMGLVHIPTNGSWQWEDGSILSPNLLTIIEMQKGDCALYASSFKGYIENCSTPNTYICMQRTVTRNKILVKQSPMLVAYDNAVNLSCKYSYNLFSREFRASLHKGLDSAVEVCVVYGNYSQQLQVYSKTGFNCDGKLGNESVTFYLQNLYVNQTDIYFCKIEVMYPPPYLDNEKSNGTIIHVKGKHLCPSPLFPGPSKPFWVLVVVGGVLACYSLLVTVAFIIFWVRSKRSRLLHSDYMNMTPRRPGPTRKHYQPYAPPRDFAAYRS

SEQ ID NO: 6411 - protein, 941 aa, Artificial Sequence
  Synthetic Polypeptide
MALPVTALLLPLALLLHAARPDIQMTQSPSSLSASVGDRVTITCKASDHINNWLAWYQQKPGQAPKLLIYGATTLETGVPSRFSGSGSGTDYTLTISSLQPEDFATYYCQQSWNTPWTFGQGTKLEIKRLENKILVKQSPMLVAYDNAVNLSCKYSYNLFSREFRASLHKGLDSAVEVCVVYGNYSQQLQVYSKTGFNCDGKLGNESVTFYLQNLYVNQTDIYFCKIEVMYPPPYLDNEKSNGTIIHVKGKHLCPSPLFPGPSKPFWVLVVVGGVLACYSLLVTVAFIIFWVRSKRSRLLHSDYMNMTPRRPGPTRKHYQPYAPPRDFAAYRSRAKRSGSGATNFSLLKQAGDVEENPGPTSMDWIWRILFLVGAATGAHSFEQVQLQQPGAELVKPGASVKMSCKASGYAFSSYWINWMKQKPGQGLEWIGQIYPGDGDTNYNGKFKGRATLTADTSSSTAYMQLSSLTSEDSAVYFCARSITTVVGCAMDYWGQGTSVTVSSTRNKILVKQSPMLVAYDNAVNLSCKYSYNLFSREFRASLHKGLDSAVEVCVVYGNYSQQLQVYSKTGFNCDGKLGNESVTFYLQNLYVNQTDIYFCKIEVMYPPPYLDNEKSNGTIIHVKGKHLCPSPLFPGPSKPFWVLVVVGGVLACYSLLVTVAFIIFWVRSKRSRLLHSDYMNMTPRRPGPTRKHYQPYAPPRDFAAYRSRAKRSGSGVKQTLNFDLLKLAGDVESNPGPSRGHMTEYKPTVRLATRDDVPRAVRTLAAAFADYPATRHTVDPDRHIERVTELQELFLTRVGLDIGKVWVADDGAAVAVWTTPESVEAGAVFAEIGPRMAELSGSRLAAQQQMEGLLAPHRPKEPAWFLATVGVSPDHQGKGLGSAVVLPGVEAAERAGVPAFLETSAPRNLPFYERLGFTVTADVEVPEGPRTWCMTRKPGA

SEQ ID NO: 6412 - protein, 995 aa, Artificial Sequence
  Synthetic Polypeptide
MALPVTALLLPLALLLHAARPACEVQLLESGGGLIQPGGSLRLSCAASGFTFSSHAMTWVRQAPGKGLEWVSAISGSGDYTHYADSVKGRFTISRDNSKNTVYLQMNSLRAEDSAVYYCAKDEDGGSLLGHRGQGTLVTVSSGTGGGGSGGGGSGGGGSEFGSLENKILVKQSPMLVAYDNAVNLSCKYSYNLFSREFRASLHKGLDSAVEVCVVYGNYSQQLQVYSKTGFNCDGKLGNESVTFYLQNLYVNQTDIYFCKIEVMYPPPYLDNEKSNGTIIHVKGKHLCPSPLFPGPSKPFWVLVVVGGVLACYSLLVTVAFIIFWVRSKRSRLLHSDYMNMTPRRPGPTRKHYQPYAPPRDFAAYRSRAKRSGSGATNFSLLKQAGDVEENPGPTSATMDWIWRILFLVGAATGAHSGPEVQLVESGGGLVQAGGSLRLSCAASGRTFSMGWFRQAPGKEREFVAAITYSGGSPYYADSVKGRFTISRDNAKNTVYLQMNSLKPEDTAVYYCAANPTYGSDWNAENWGQGTQVTVSSGSGGGGSGGGGSGGGGSFEGSTRNKILVKQSPMLVAYDNAVNLSCKYSYNLFSREFRASLHKGLDSAVEVCVVYGNYSQQLQVYSKTGFNCDGKLGNESVTFYLQNLYVNQTDIYFCKIEVMYPPPYLDNEKSNGTIIHVKGKHLCPSPLFPGPSKPFWVLVVVGGVLACYSLLVTVAFIIFWVRSKRSRLLHSDYMNMTPRRPGPTRKHYQPYAPPRDFAAYRSRAKRSGSGVKQTLNFDLLKLAGDVESNPGPSRGHMTEYKPTVRLATRDDVPRAVRTLAAAFADYPATRHTVDPDRHIERVTELQELFLTRVGLDIGKVWVADDGAAVAVWTTPESVEAGAVFAEIGPRMAELSGSRLAAQQQMEGLLAPHRPKEPAWFLATVGVSPDHQGKGLGSAVVLPGVEAAERAGVPAFLETSAPRNLPFYERLGFTVTADVEVPEGPRTWCMTRKPGA

SEQ ID NO: 6413 - protein, 1146 aa, Artificial Sequence
  Synthetic Polypeptide
MALPVTALLLPLALLLHAARPDIQMTQSPSSLSASVGDRVTITCKASDHINNWLAWYQQKPGQAPKLLIYGATTLETGVPSRFSGSGSGTDYTLTISSLQPEDFATYYCQQSWNTPWTFGQGTKLEIKRLEGQPKANPTVTLFPPSSEELQANKATLVCLISDFYPGAVTVAWKADGSPVKAGVETTKPSKQSNNKYAASSYLSLTPEQWKSHRSYSCQVTHEGSTVEKTVAPTECSGSNKILVKQSPMLVAYDNAVNLSCKYSYNLFSREFRASLHKGLDSAVEVCVVYGNYSQQLQVYSKTGFNCDGKLGNESVTFYLQNLYVNQTDIYFCKIEVMYPPPYLDNEKSNGTIIHVKGKHLCPSPLFPGPSKPFWVLVVVGGVLACYSLLVTVAFIIFWVRSKRSRLLHSDYMNMTPRRPGPTRKHYQPYAPPRDFAAYRSRAKRSGSGATNFSLLKQAGDVEENPGPTSMDWIWRILFLVGAATGAHSFEQVQLQQPGAELVKPGASVKMSCKASGYAFSSYWINWMKQKPGQGLEWIGQIYPGDGDTNYNGKFKGRATLTADTSSSTAYMQLSSLTSEDSAVYFCARSITTVVGCAMDYWGQGTSVTVSSTRASTKGPSVFPLAPSSKSTSGGTAALGCLVKDYFPEPVTVSWNSGALTSGVHTFPAVLQSSGLYSLSSVVTVPSSSLGTQTYICNVNHKPSNTKVDKRVEPKSCGTNKILVKQSPMLVAYDNAVNLSCKYSYNLFSREFRASLHKGLDSAVEVCVVYGNYSQQLQVYSKTGFNCDGKLGNESVTFYLQNLYVNQTDIYFCKIEVMYPPPYLDNEKSNGTIIHVKGKHLCPSPLFPGPSKPFWVLVVVGGVLACYSLLVTVAFIIFWVRSKRSRLLHSDYMNMTPRRPGPTRKHYQPYAPPRDFAAYRSRAKRSGSGVKQTLNFDLLKLAGDVESNPGPSRGGIHTMATYEVLCEVARKLGTDDREVVLFLLNVFIPQPTLAQLIGALRALKEEGRLTFPLLAECLFRAGRRDLLRDLLHLDPRFLERHLAGTMSYFSPYQLTVLHVDGELCARDIRSLIFLSKDTIGSRSTPQTFLHWVYCMENLDLLGPTDVDALMSMLRSLSRVDLQRQVQTLMGLHLSGPSHSQHYRHTP

SEQ ID NO: 6414 - protein, 1199 aa, Artificial Sequence
  Synthetic Polypeptide
MALPVTALLLPLALLLHAARPDIQMTQSPSSLSASVGDRVTITCKASDHINNWLAWYQQKPGQAPKLLIYGATTLETGVPSRFSGSGSGTDYTLTISSLQPEDFATYYCQQSWNTPWTFGQGTKLEIKRLEGQPKANPTVTLFPPSSEELQANKATLVCLISDFYPGAVTVAWKADGSPVKAGVETTKPSKQSNNKYAASSYLSLTPEQWKSHRSYSCQVTHEGSTVEKTVAPTECSGSNKILVKQSPMLVAYDNAVNLSCKYSYNLFSREFRASLHKGLDSAVEVCVVYGNYSQQLQVYSKTGFNCDGKLGNESVTFYLQNLYVNQTDIYFCKIEVMYPPPYLDNEKSNGTIIHVKGKHLCPSPLFPGPSKPFWVLVVVGGVLACYSLLVTVAFIIFWVRSKRSRLLHSDYMNMTPRRPGPTRKHYQPYAPPRDFAAYRSRAKRSGSGATNFSLLKQAGDVEENPGPTSMDWIWRILFLVGAATGAHSFEQVQLQQPGAELVKPGASVKMSCKASGYAFSSYWINWMKQKPGQGLEWIGQIYPGDGDTNYNGKFKGRATLTADTSSSTAYMQLSSLTSEDSAVYFCARSITTVVGCAMDYWGQGTSVTVSSTRASTKGPSVFPLAPSSKSTSGGTAALGCLVKDYFPEPVTVSWNSGALTSGVHTFPAVLQSSGLYSLSSVVTVPSSSLGTQTYICNVNHKPSNTKVDKRVEPKSCGTNKILVKQSPMLVAYDNAVNLSCKYSYNLFSREFRASLHKGLDSAVEVCVVYGNYSQQLQVYSKTGFNCDGKLGNESVTFYLQNLYVNQTDIYFCKIEVMYPPPYLDNEKSNGTIIHVKGKHLCPSPLFPGPSKPFWVLVVVGGVLACYSLLVTVAFIIFWVRSKRSRLLHSDYMNMTPRRPGPTRKHYQPYAPPRDFAAYRSRAKRSGSGVKQTLNFDLLKLAGDVESNPGPSRGGIHTMSDSKEVPSLPFLRHLLEELDSHEDSLLLFLCHDAAPGCTTVTQALCSLSQQRKLTLAALVEMLYVLQRMDLLKSRFGLSKEGAEQLLGTSFLTRYRKLMVCVGEELDSSELRALRLFACNLNPSLSTALSESSRFVELVLALENVGLVSPSSVSVLADMLRTLRRLDLCQQLVEYEQQEQARYRYCYAASPSLPVRTLRRGHGASEHEQLCMPVQESSDSPELLRTPVQESSSDSPEQTT

SEQ ID NO: 6415 - protein, 1154 aa, Artificial Sequence
  Synthetic Polypeptide
MALPVTALLLPLALLLHAARPDIQMTQSPSSLSASVGDRVTITCKASDHINNWLAWYQQKPGQAPKLLIYGATTLETGVPSRFSGSGSGTDYTLTISSLQPEDFATYYCQQSWNTPWTFGQGTKLEIKRLEGQPKANPTVTLFPPSSEELQANKATLVCLISDFYPGAVTVAWKADGSPVKAGVETTKPSKQSNNKYAASSYLSLTPEQWKSHRSYSCQVTHEGSTVEKTVAPTECSGSNKILVKQSPMLVAYDNAVNLSCKYSYNLFSREFRASLHKGLDSAVEVCVVYGNYSQQLQVYSKTGFNCDGKLGNESVTFYLQNLYVNQTDIYFCKIEVMYPPPYLDNEKSNGTIIHVKGKHLCPSPLFPGPSKPFWVLVVVGGVLACYSLLVTVAFIIFWVRSKRSRLLHSDYMNMTPRRPGPTRKHYQPYAPPRDFAAYRSRAKRSGSGATNFSLLKQAGDVEENPGPTSMDWIWRILFLVGAATGAHSFEQVQLQQPGAELVKPGASVKMSCKASGYAFSSYWINWMKQKPGQGLEWIGQIYPGDGDTNYNGKFKGRATLTADTSSSTAYMQLSSLTSEDSAVYFCARSITTVVGCAMDYWGQGTSVTVSSTRASTKGPSVFPLAPSSKSTSGGTAALGCLVKDYFPEPVTVSWNSGALTSGVHTFPAVLQSSGLYSLSSVVTVPSSSLGTQTYICNVNHKPSNTKVDKRVEPKSCGTNKILVKQSPMLVAYDNAVNLSCKYSYNLFSREFRASLHKGLDSAVEVCVVYGNYSQQLQVYSKTGFNCDGKLGNESVTFYLQNLYVNQTDIYFCKIEVMYPPPYLDNEKSNGTIIHVKGKHLCPSPLFPGPSKPFWVLVVVGGVLACYSLLVTVAFIIFWVRSKRSRLLHSDYMNMTPRRPGPTRKHYQPYAPPRDFAAYRSRAKRSGSGVKQTLNFDLLKLAGDVESNPGPSRGHMTEYKPTVRLATRDDVPRAVRTLAAAFADYPATRHTVDPDRHIERVTELQELFLTRVGLDIGKVWVADDGAAVAVWTTPESVEAGAVFAEIGPRMAELSGSRLAAQQQMEGLLAPHRPKEPAWFLATVGVSPDHQGKGLGSAVVLPGVEAAERAGVPAFLETSAPRNLPFYERLGFTVTADVEVPEGPRTWCMTRKPGA

SEQ ID NO: 6416 - protein, 1291 aa, Artificial Sequence
  Synthetic Polypeptide
MALPVTALLLPLALLLHAARPEVQLVESGGGLVQAGGSLRLSCAASGRTFSMGWFRQAPGKEREFVAAITYSGGSPYYADSVKGRFTISRDNAKNTVYLQMNSLKPEDTAVYYCAANPTYGSDWNAENWGQGTQVTVSSGTGGGGSGGGGSGGGGSEFDIQMTQSPSSLSASVGDRVTITCKASDHINNWLAWYQQKPGQAPKLLIYGATTLETGVPSRFSGSGSGTDYTLTISSLQPEDFATYYCQQSWNTPWTFGQGTKLEIKRLEGQPKANPTVTLFPPSSEELQANKATLVCLISDFYPGAVTVAWKADGSPVKAGVETTKPSKQSNNKYAASSYLSLTPEQWKSHRSYSCQVTHEGSTVEKTVAPTECSGSNKILVKQSPMLVAYDNAVNLSCKYSYNLFSREFRASLHKGLDSAVEVCVVYGNYSQQLQVYSKTGFNCDGKLGNESVTFYLQNLYVNQTDIYFCKIEVMYPPPYLDNEKSNGTIIHVKGKHLCPSPLFPGPSKPFWVLVVVGGVLACYSLLVTVAFIIFWVRSKRSRLLHSDYMNMTPRRPGPTRKHYQPYAPPRDFAAYRSRAKRSGSGATNFSLLKQAGDVEENPGPTSMDWIWRILFLVGAATGAHSFEQVQLQQPGAELVKPGASVKMSCKASGYAFSSYWINWMKQKPGQGLEWIGQIYPGDGDTNYNGKFKGRATLTADTSSSTAYMQLSSLTSEDSAVYFCARSITTVVGCAMDYWGQGTSVTVSSTRASTKGPSVFPLAPSSKSTSGGTAALGCLVKDYFPEPVTVSWNSGALTSGVHTFPAVLQSSGLYSLSSVVTVPSSSLGTQTYICNVNHKPSNTKVDKRVEPKSCGTNKILVKQSPMLVAYDNAVNLSCKYSYNLFSREFRASLHKGLDSAVEVCVVYGNYSQQLQVYSKTGFNCDGKLGNESVTFYLQNLYVNQTDIYFCKIEVMYPPPYLDNEKSNGTIIHVKGKHLCPSPLFPGPSKPFWVLVVVGGVLACYSLLVTVAFIIFWVRSKRSRLLHSDYMNMTPRRPGPTRKHYQPYAPPRDFAAYRSRAKRSGSGVKQTLNFDLLKLAGDVESNPGPSRGHMTEYKPTVRLATRDDVPRAVRTLAAAFADYPATRHTVDPDRHIERVTELQELFLTRVGLDIGKVWVADDGAAVAVWTTPESVEAGAVFAEIGPRMAELSGSRLAAQQQMEGLLAPHRPKEPAWFLATVGVSPDHQGKGLGSAVVLPGVEAAERAGVPAFLETSAPRNLPFYERLGFTVTADVEVPEGPRTWCMTRKPGA

SEQ ID NO: 6417 - protein, 1428 aa, Artificial Sequence
  Synthetic Polypeptide
MALPVTALLLPLALLLHAARPEVQLVESGGGLVQAGGSLRLSCAASGRTFSMGWFRQAPGKEREFVAAITYSGGSPYYADSVKGRFTISRDNAKNTVYLQMNSLKPEDTAVYYCAANPTYGSDWNAENWGQGTQVTVSSGTGGGGSGGGGSGGGGSEFDIQMTQSPSSLSASVGDRVTITCKASDHINNWLAWYQQKPGQAPKLLIYGATTLETGVPSRFSGSGSGTDYTLTISSLQPEDFATYYCQQSWNTPWTFGQGTKLEIKRLEGQPKANPTVTLFPPSSEELQANKATLVCLISDFYPGAVTVAWKADGSPVKAGVETTKPSKQSNNKYAASSYLSLTPEQWKSHRSYSCQVTHEGSTVEKTVAPTECSGSNKILVKQSPMLVAYDNAVNLSCKYSYNLFSREFRASLHKGLDSAVEVCVVYGNYSQQLQVYSKTGFNCDGKLGNESVTFYLQNLYVNQTDIYFCKIEVMYPPPYLDNEKSNGTIIHVKGKHLCPSPLFPGPSKPFWVLVVVGGVLACYSLLVTVAFIIFWVRSKRSRLLHSDYMNMTPRRPGPTRKHYQPYAPPRDFAAYRSRAKRSGSGATNFSLLKQAGDVEENPGPTSMDWIWRILFLVGAATGAHSGPEVQLVESGGGLVQAGGSLRLSCAASGRTFTMGWFRQAPGKEREFVAAISLSPTLAYYADSVKGRFTISRDNAKNTVVLQMNSLKPEDTALYYCAADRKSVMSIRPDYWGQGTQVTVSSGSGGGGSGGGGSGGGGSFEQVQLQQPGAELVKPGASVKMSCKASGYAFSSYWINWMKQKPGQGLEWIGQIYPGDGDTNYNGKFKGRATLTADTSSSTAYMQLSSLTSEDSAVYFCARSITTVVGCAMDYWGQGTSVTVSSTRASTKGPSVFPLAPSSKSTSGGTAALGCLVKDYFPEPVTVSWNSGALTSGVHTFPAVLQSSGLYSLSSVVTVPSSSLGTQTYICNVNHKPSNTKVDKRVEPKSCGTNKILVKQSPMLVAYDNAVNLSCKYSYNLFSREFRASLHKGLDSAVEVCVVYGNYSQQLQVYSKTGFNCDGKLGNESVTFYLQNLYVNQTDIYFCKIEVMYPPPYLDNEKSNGTIIHVKGKHLCPSPLFPGPSKPFWVLVVVGGVLACYSLLVTVAFIIFWVRSKRSRLLHSDYMNMTPRRPGPTRKHYQPYAPPRDFAAYRSRAKRSGSGVKQTLNFDLLKLAGDVESNPGPSRGHMTEYKPTVRLATRDDVPRAVRTLAAAFADYPATRHTVDPDRHIERVTELQELFLTRVGLDIGKVWVADDGAAVAVWTTPESVEAGAVFAEIGPRMAELSGSRLAAQQQMEGLLAPHRPKEPAWFLATVGVSPDHQGKGLGSAVVLPGVEAAERAGVPAFLETSAPRNLPFYERLGFTVTADVEVPEGPRTWCMTRKPGA

SEQ ID NO: 6418 - protein, 1161 aa, Artificial Sequence
  Synthetic Polypeptide
MALPVTALLLPLALLLHAARPEVQLVESGGGLVQAGGSLRLSCAASGRTFSMGWFRQAPGKEREFVAAITYSGGSPYYADSVKGRFTISRDNAKNTVYLQMNSLKPEDTAVYYCAANPTYGSDWNAENWGQGTQVTVSSLEGQPKANPTVTLFPPSSEELQANKATLVCLISDFYPGAVTVAWKADGSPVKAGVETTKPSKQSNNKYAASSYLSLTPEQWKSHRSYSCQVTHEGSTVEKTVAPTECSGSNKILVKQSPMLVAYDNAVNLSCKYSYNLFSREFRASLHKGLDSAVEVCVVYGNYSQQLQVYSKTGFNCDGKLGNESVTFYLQNLYVNQTDIYFCKIEVMYPPPYLDNEKSNGTIIHVKGKHLCPSPLFPGPSKPFWVLVVVGGVLACYSLLVTVAFIIFWVRSKRSRLLHSDYMNMTPRRPGPTRKHYQPYAPPRDFAAYRSRAKRSGSGATNFSLLKQAGDVEENPGPTSMDWIWRILFLVGAATGAHSGPEVQLVESGGGLVQAGGSLRLSCAASGRTFTMGWFRQAPGKEREFVAAISLSPTLAYYADSVKGRFTISRDNAKNTVVLQMNSLKPEDTALYYCAADRKSVMSIRPDYWGQGTQVTVSSTRASTKGPSVFPLAPSSKSTSGGTAALGCLVKDYFPEPVTVSWNSGALTSGVHTFPAVLQSSGLYSLSSVVTVPSSSLGTQTYICNVNHKPSNTKVDKRVEPKSCGTNKILVKQSPMLVAYDNAVNLSCKYSYNLFSREFRASLHKGLDSAVEVCVVYGNYSQQLQVYSKTGFNCDGKLGNESVTFYLQNLYVNQTDIYFCKIEVMYPPPYLDNEKSNGTIIHVKGKHLCPSPLFPGPSKPFWVLVVVGGVLACYSLLVTVAFIIFWVRSKRSRLLHSDYMNMTPRRPGPTRKHYQPYAPPRDFAAYRSRAKRSGSGVKQTLNFDLLKLAGDVESNPGPSRGHMTEYKPTVRLATRDDVPRAVRTLAAAFADYPATRHTVDPDRHIERVTELQELFLTRVGLDIGKVWVADDGAAVAVWTTPESVEAGAVFAEIGPRMAELSGSRLAAQQQMEGLLAPHRPKEPAWFLATVGVSPDHQGKGLGSAVVLPGVEAAERAGVPAFLETSAPRNLPFYERLGFTVTADVEVPEGPRTWCMTRKPGA

SEQ ID NO: 6419 - protein, 1169 aa, Artificial Sequence
  Synthetic Polypeptide
MALPVTALLLPLALLLHAARPDIQMTQSPSSLSASVGDRVTITCKASDHINNWLAWYQQKPGQAPKLLIYGATTLETGVPSRFSGSGSGTDYTLTISSLQPEDFATYYCQQSWNTPWTFGQGTKLEIKRLEDLKNVFPPEVAVFEPSEAEISHTQKATLVCLATGFYPDHVELSWWVNGKEVHSGVSTDPQPLKEQPALNDSRYCLSSRLRVSATFWQNPRNHFRCQVQFYGLSENDEWTQDRAKPVTQIVSAEAWGRADCGSNKILVKQSPMLVAYDNAVNLSCKYSYNLFSREFRASLHKGLDSAVEVCVVYGNYSQQLQVYSKTGFNCDGKLGNESVTFYLQNLYVNQTDIYFCKIEVMYPPPYLDNEKSNGTIIHVKGKHLCPSPLFPGPSKPFWVLVVVGGVLACYSLLVTVAFIIFWVRSKRSRLLHSDYMNMTPRRPGPTRKHYQPYAPPRDFAAYRSRAKRSGSGATNFSLLKQAGDVEENPGPTSMDWIWRILFLVGAATGAHSFEQVQLQQPGAELVKPGASVKMSCKASGYAFSSYWINWMKQKPGQGLEWIGQIYPGDGDTNYNGKFKGRATLTADTSSSTAYMQLSSLTSEDSAVYFCARSITTVVGCAMDYWGQGTSVTVSSTRIQNPDPAVYQLRDSKSSDKSVCLFTDFDSQTNVSQSKDSDVYITDKTVLDMRSMDFKSNSAVAWSNKSDFACANAFNNSIIPEDTFFPSPESSCGTNKILVKQSPMLVAYDNAVNLSCKYSYNLFSREFRASLHKGLDSAVEVCVVYGNYSQQLQVYSKTGFNCDGKLGNESVTFYLQNLYVNQTDIYFCKIEVMYPPPYLDNEKSNGTIIHVKGKHLCPSPLFPGPSKPFWVLVVVGGVLACYSLLVTVAFIIFWVRSKRSRLLHSDYMNMTPRRPGPTRKHYQPYAPPRDFAAYRSRAKRSGSGVKQTLNFDLLKLAGDVESNPGPSRGHMTEYKPTVRLATRDDVPRAVRTLAAAFADYPATRHTVDPDRHIERVTELQELFLTRVGLDIGKVWVADDGAAVAVWTTPESVEAGAVFAEIGPRMAELSGSRLAAQQQMEGLLAPHRPKEPAWFLATVGVSPDHQGKGLGSAVVLPGVEAAERAGVPAFLETSAPRNLPFYERLGFTVTADVEVPEGPRTWCMTRKPGA

SEQ ID NO: 6420 - protein, 1306 aa, Artificial Sequence
  Synthetic Polypeptide
MALPVTALLLPLALLLHAARPEVQLVESGGGLVQAGGSLRLSCAASGRTFSMGWFRQAPGKEREFVAAITYSGGSPYYADSVKGRFTISRDNAKNTVYLQMNSLKPEDTAVYYCAANPTYGSDWNAENWGQGTQVTVSSGTGGGGSGGGGSGGGGSEFDIQMTQSPSSLSASVGDRVTITCKASDHINNWLAWYQQKPGQAPKLLIYGATTLETGVPSRFSGSGSGTDYTLTISSLQPEDFATYYCQQSWNTPWTFGQGTKLEIKRLEDLKNVFPPEVAVFEPSEAEISHTQKATLVCLATGFYPDHVELSWWVNGKEVHSGVSTDPQPLKEQPALNDSRYCLSSRLRVSATFWQNPRNHFRCQVQFYGLSENDEWTQDRAKPVTQIVSAEAWGRADCGSNKILVKQSPMLVAYDNAVNLSCKYSYNLFSREFRASLHKGLDSAVEVCVVYGNYSQQLQVYSKTGFNCDGKLGNESVTFYLQNLYVNQTDIYFCKIEVMYPPPYLDNEKSNGTIIHVKGKHLCPSPLFPGPSKPFWVLVVVGGVLACYSLLVTVAFIIFWVRSKRSRLLHSDYMNMTPRRPGPTRKHYQPYAPPRDFAAYRSRAKRSGSGATNFSLLKQAGDVEENPGPTSMDWIWRILFLVGAATGAHSFEQVQLQQPGAELVKPGASVKMSCKASGYAFSSYWINWMKQKPGQGLEWIGQIYPGDGDTNYNGKFKGRATLTADTSSSTAYMQLSSLTSEDSAVYFCARSITTVVGCAMDYWGQGTSVTVSSTRIQNPDPAVYQLRDSKSSDKSVCLFTDFDSQTNVSQSKDSDVYITDKTVLDMRSMDFKSNSAVAWSNKSDFACANAFNNSIIPEDTFFPSPESSCGTNKILVKQSPMLVAYDNAVNLSCKYSYNLFSREFRASLHKGLDSAVEVCVVYGNYSQQLQVYSKTGFNCDGKLGNESVTFYLQNLYVNQTDIYFCKIEVMYPPPYLDNEKSNGTIIHVKGKHLCPSPLFPGPSKPFWVLVVVGGVLACYSLLVTVAFIIFWVRSKRSRLLHSDYMNMTPRRPGPTRKHYQPYAPPRDFAAYRSRAKRSGSGVKQTLNFDLLKLAGDVESNPGPSRGHMTEYKPTVRLATRDDVPRAVRTLAAAFADYPATRHTVDPDRHIERVTELQELFLTRVGLDIGKVWVADDGAAVAVWTTPESVEAGAVFAEIGPRMAELSGSRLAAQQQMEGLLAPHRPKEPAWFLATVGVSPDHQGKGLGSAVVLPGVEAAERAGVPAFLETSAPRNLPFYERLGFTVTADVEVPEGPRTWCMTRKPGA

SEQ ID NO: 6421 - protein, 1443 aa, Artificial Sequence
  Synthetic Polypeptide
MALPVTALLLPLALLLHAARPEVQLVESGGGLVQAGGSLRLSCAASGRTFSMGWFRQAPGKEREFVAAITYSGGSPYYADSVKGRFTISRDNAKNTVYLQMNSLKPEDTAVYYCAANPTYGSDWNAENWGQGTQVTVSSGTGGGGSGGGGSGGGGSEFDIQMTQSPSSLSASVGDRVTITCKASDHINNWLAWYQQKPGQAPKLLIYGATTLETGVPSRFSGSGSGTDYTLTISSLQPEDFATYYCQQSWNTPWTFGQGTKLEIKRLEDLKNVFPPEVAVFEPSEAEISHTQKATLVCLATGFYPDHVELSWWVNGKEVHSGVSTDPQPLKEQPALNDSRYCLSSRLRVSATFWQNPRNHFRCQVQFYGLSENDEWTQDRAKPVTQIVSAEAWGRADCGSNKILVKQSPMLVAYDNAVNLSCKYSYNLFSREFRASLHKGLDSAVEVCVVYGNYSQQLQVYSKTGFNCDGKLGNESVTFYLQNLYVNQTDIYFCKIEVMYPPPYLDNEKSNGTIIHVKGKHLCPSPLFPGPSKPFWVLVVVGGVLACYSLLVTVAFIIFWVRSKRSRLLHSDYMNMTPRRPGPTRKHYQPYAPPRDFAAYRSRAKRSGSGATNFSLLKQAGDVEENPGPTSMDWIWRILFLVGAATGAHSGPEVQLVESGGGLVQAGGSLRLSCAASGRTFTMGWFRQAPGKEREFVAAISLSPTLAYYADSVKGRFTISRDNAKNTVVLQMNSLKPEDTALYYCAADRKSVMSIRPDYWGQGTQVTVSSGSGGGGSGGGGSGGGGSFEQVQLQQPGAELVKPGASVKMSCKASGYAFSSYWINWMKQKPGQGLEWIGQIYPGDGDTNYNGKFKGRATLTADTSSSTAYMQLSSLTSEDSAVYFCARSITTVVGCAMDYWGQGTSVTVSSTRIQNPDPAVYQLRDSKSSDKSVCLFTDFDSQTNVSQSKDSDVYITDKTVLDMRSMDFKSNSAVAWSNKSDFACANAFNNSIIPEDTFFPSPESSCGTNKILVKQSPMLVAYDNAVNLSCKYSYNLFSREFRASLHKGLDSAVEVCVVYGNYSQQLQVYSKTGFNCDGKLGNESVTFYLQNLYVNQTDIYFCKIEVMYPPPYLDNEKSNGTIIHVKGKHLCPSPLFPGPSKPFWVLVVVGGVLACYSLLVTVAFIIFWVRSKRSRLLHSDYMNMTPRRPGPTRKHYQPYAPPRDFAAYRSRAKRSGSGVKQTLNFDLLKLAGDVESNPGPSRGHMTEYKPTVRLATRDDVPRAVRTLAAAFADYPATRHTVDPDRHIERVTELQELFLTRVGLDIGKVWVADDGAAVAVWTTPESVEAGAVFAEIGPRMAELSGSRLAAQQQMEGLLAPHRPKEPAWFLATVGVSPDHQGKGLGSAVVLPGVEAAERAGVPAFLETSAPRNLPFYERLGFTVTADVEVPEGPRTWCMTRKPGA

SEQ ID NO: 6422 - protein, 1176 aa, Artificial Sequence
  Synthetic Polypeptide
MALPVTALLLPLALLLHAARPEVQLVESGGGLVQAGGSLRLSCAASGRTFSMGWFRQAPGKEREFVAAITYSGGSPYYADSVKGRFTISRDNAKNTVYLQMNSLKPEDTAVYYCAANPTYGSDWNAENWGQGTQVTVSSLEDLKNVFPPEVAVFEPSEAEISHTQKATLVCLATGFYPDHVELSWWVNGKEVHSGVSTDPQPLKEQPALNDSRYCLSSRLRVSATFWQNPRNHFRCQVQFYGLSENDEWTQDRAKPVTQIVSAEAWGRADCGSNKILVKQSPMLVAYDNAVNLSCKYSYNLFSREFRASLHKGLDSAVEVCVVYGNYSQQLQVYSKTGFNCDGKLGNESVTFYLQNLYVNQTDIYFCKIEVMYPPPYLDNEKSNGTIIHVKGKHLCPSPLFPGPSKPFWVLVVVGGVLACYSLLVTVAFIIFWVRSKRSRLLHSDYMNMTPRRPGPTRKHYQPYAPPRDFAAYRSRAKRSGSGATNFSLLKQAGDVEENPGPTSMDWIWRILFLVGAATGAHSGPEVQLVESGGGLVQAGGSLRLSCAASGRTFTMGWFRQAPGKEREFVAAISLSPTLAYYADSVKGRFTISRDNAKNTVVLQMNSLKPEDTALYYCAADRKSVMSIRPDYWGQGTQVTVSSTRIQNPDPAVYQLRDSKSSDKSVCLFTDFDSQTNVSQSKDSDVYITDKTVLDMRSMDFKSNSAVAWSNKSDFACANAFNNSIIPEDTFFPSPESSCGTNKILVKQSPMLVAYDNAVNLSCKYSYNLFSREFRASLHKGLDSAVEVCVVYGNYSQQLQVYSKTGFNCDGKLGNESVTFYLQNLYVNQTDIYFCKIEVMYPPPYLDNEKSNGTIIHVKGKHLCPSPLFPGPSKPFWVLVVVGGVLACYSLLVTVAFIIFWVRSKRSRLLHSDYMNMTPRRPGPTRKHYQPYAPPRDFAAYRSRAKRSGSGVKQTLNFDLLKLAGDVESNPGPSRGHMTEYKPTVRLATRDDVPRAVRTLAAAFADYPATRHTVDPDRHIERVTELQELFLTRVGLDIGKVWVADDGAAVAVWTTPESVEAGAVFAEIGPRMAELSGSRLAAQQQMEGLLAPHRPKEPAWFLATVGVSPDHQGKGLGSAVVLPGVEAAERAGVPAFLETSAPRNLPFYERLGFTVTADVEVPEGPRTWCMTRKPGA

SEQ ID NO: 6423 - protein, 597 aa, Artificial Sequence
  Synthetic Polypeptide
MALPVTALLLPLALLLHAARPACEVQLLESGGGLIQPGGSLRLSCAASGFTFSSHAMTWVRQAPGKGLEWVSAISGSGDYTHYADSVKGRFTISRDNSKNTVYLQMNSLRAEDSAVYYCAKDEDGGSLLGHRGQGTLVTVSSGTGGGGSGGGGSGGGGSEFGSLENKILVKQSPMLVAYDNAVNLSCKYSYNLFSREFRASLHKGLDSAVEVCVVYGNYSQQLQVYSKTGFNCDGKLGNESVTFYLQNLYVNQTDIYFCKIEVMYPPPYLDNEKSNGTIIHVKGKHLCPSPLFPGPSKPFWVLVVVGGVLACYSLLVTVAFIIFWVRSKRSRLLHSDYMNMTPRRPGPTRKHYQPYAPPRDFAAYRSRAKRSGSGATNFSLLKQAGDVEENPGPTRGHMTEYKPTVRLATRDDVPRAVRTLAAAFADYPATRHTVDPDRHIERVTELQELFLTRVGLDIGKVWVADDGAAVAVWTTPESVEAGAVFAEIGPRMAELSGSRLAAQQQMEGLLAPHRPKEPAWFLATVGVSPDHQGKGLGSAVVLPGVEAAERAGVPAFLETSAPRNLPFYERLGFTVTADVEVPEGPRTWCMTRKPGA

SEQ ID NO: 6424 - protein, 469 aa, Artificial Sequence; identical to SEQ ID NO: 6392
  Synthetic Polypeptide

SEQ ID NO: 6425 - protein, 469 aa, Artificial Sequence; identical to SEQ ID NO: 6393
  Synthetic Polypeptide

SEQ ID NO: 6426 - protein, 343 aa, Artificial Sequence; identical to SEQ ID NO: 6394
  Synthetic Polypeptide

SEQ ID NO: 6427 - protein, 343 aa, Artificial Sequence; identical to SEQ ID NO: 6395
  Synthetic Polypeptide

SEQ ID NO: 6428 - protein, 343 aa, Artificial Sequence; identical to SEQ ID NO: 6396
  Synthetic Polypeptide

SEQ ID NO: 6429 - protein, 345 aa, Artificial Sequence; identical to SEQ ID NO: 6397
  Synthetic Polypeptide

SEQ ID NO: 6430 - protein, 353 aa, Artificial Sequence; identical to SEQ ID NO: 6398
  Synthetic Polypeptide

SEQ ID NO: 6431 - protein, 349 aa, Artificial Sequence; identical to SEQ ID NO: 6399
  Synthetic Polypeptide

SEQ ID NO: 6432 - protein, 344 aa, Artificial Sequence; identical to SEQ ID NO: 6400
  Synthetic Polypeptide

SEQ ID NO: 6433 - protein, 349 aa, Artificial Sequence; identical to SEQ ID NO: 6401
  Synthetic Polypeptide

SEQ ID NO: 6434 - protein, 283 aa, Artificial Sequence; identical to SEQ ID NO: 6402
  Synthetic Polypeptide

SEQ ID NO: 6435 - protein, 314 aa, Artificial Sequence; identical to SEQ ID NO: 6403
  Synthetic Polypeptide

SEQ ID NO: 6436 - protein, 315 aa, Artificial Sequence; identical to SEQ ID NO: 6404
  Synthetic Polypeptide

SEQ ID NO: 6437 - protein, 532 aa, Artificial Sequence; identical to SEQ ID NO: 6405
  Synthetic Polypeptide

SEQ ID NO: 6438 - protein, 412 aa, Artificial Sequence; identical to SEQ ID NO: 6406
  Synthetic Polypeptide

SEQ ID NO: 6439 - protein, 278 aa, Artificial Sequence; identical to SEQ ID NO: 6407
  Synthetic Polypeptide

SEQ ID NO: 6440 - protein, 253 aa, Artificial Sequence; identical to SEQ ID NO: 6408
  Synthetic Polypeptide

SEQ ID NO: 6441 - protein, 511 aa, Artificial Sequence; identical to SEQ ID NO: 6409
  Synthetic Polypeptide

SEQ ID NO: 6442 - protein, 511 aa, Artificial Sequence; identical to SEQ ID NO: 6410
  Synthetic Polypeptide

SEQ ID NO: 6443 - protein, 1024 aa, Artificial Sequence
  Synthetic Polypeptide
MALPVTALLLPLALLLHAARPDIQMTQSPSSLSASVGDRVTITCKASDHINNWLAWYQQKPGQAPKLLIYGATTLETGVPSRFSGSGSGTDYTLTISSLQPEDFATYYCQQSWNTPWTFGQGTKLEIKRLEGMRTEDLPKAVVFLEPQWYRVLEKDSVTLKCQGAYSPEDNSTQWFHNESLISSQASSYFIDAATVDDSGEYRCQTNLSTLSDPVQLEVHIGWLLLQAPRWVFKEEDPIHLRCHSWKNTALHKVTYLQNGKGRKYFHHNSDFYIPKATLKDSGSYFCRGLVGSKNVSSETVNITITQGLAVSTISSFFPPGYQVSFCLVMVLLFAVDTGLYFSVKTNIRSSTRDWKDHKFKWRKDPQDKRAKRSGSGATNFSLLKQAGDVEENPGPTSMDWIWRILFLVGAATGAHSFEQVQLQQPGAELVKPGASVKMSCKASGYAFSSYWINWMKQKPGQGLEWIGQIYPGDGDTNYNGKFKGRATLTADTSSSTAYMQLSSLTSEDSAVYFCARSITTVVGCAMDYWGQGTSVTVSSTRLHCVGDTYPSNDRCCHECRPGNGMVSRCSRSQNTVCRPCGPGFYNDVVSSKPCKPCTWCNLRSGSERKQLCTATQDTVCRCRAGTQPLDSYKPGVDCAPCPPGHFSPGDNQACKPWTNCTLAGKHTLQPASNSSDAICEDRDPPATQPQETQGPPARPITVQPTEAWPRTSQGPSTRPVEVPGGRAVAAILGLGLVLGLLGPLAILLALYLLRRDQRLPPDAHKPPGGGSFRTPIQEEQADAHSTLAKIRAKRSGSGVKQTLNFDLLKLAGDVESNPGPSRGHMTEYKPTVRLATRDDVPRAVRTLAAAFADYPATRHTVDPDRHIERVTELQELFLTRVGLDIGKVWVADDGAAVAVWTTPESVEAGAVFAEIGPRMAELSGSRLAAQQQMEGLLAPHRPKEPAWFLATVGVSPDHQGKGLGSAVVLPGVEAAERAGVPAFLETSAPRNLPFYERLGFTVTADVEVPEGPRTWCMTRKPGA

SEQ ID NO: 6444 - protein, 1078 aa, Artificial Sequence
  Synthetic Polypeptide
MALPVTALLLPLALLLHAARPACEVQLLESGGGLIQPGGSLRLSCAASGFTFSSHAMTWVRQAPGKGLEWVSAISGSGDYTHYADSVKGRFTISRDNSKNTVYLQMNSLRAEDSAVYYCAKDEDGGSLLGHRGQGTLVTVSSGTGGGGSGGGGSGGGGSEFGSLEGMRTEDLPKAVVFLEPQWYRVLEKDSVTLKCQGAYSPEDNSTQWFHNESLISSQASSYFIDAATVDDSGEYRCQTNLSTLSDPVQLEVHIGWLLLQAPRWVFKEEDPIHLRCHSWKNTALHKVTYLQNGKGRKYFHHNSDFYIPKATLKDSGSYFCRGLVGSKNVSSETVNITITQGLAVSTISSFFPPGYQVSFCLVMVLLFAVDTGLYFSVKTNIRSSTRDWKDHKFKWRKDPQDKRAKRSGSGATNFSLLKQAGDVEENPGPTSATMDWIWRILFLVGAATGAHSGPEVQLVESGGGLVQAGGSLRLSCAASGRTFSMGWFRQAPGKEREFVAAITYSGGSPYYADSVKGRFTISRDNAKNTVYLQMNSLKPEDTAVYYCAANPTYGSDWNAENWGQGTQVTVSSGSGGGGSGGGGSGGGGSFEGSTRLHCVGDTYPSNDRCCHECRPGNGMVSRCSRSQNTVCRPCGPGFYNDVVSSKPCKPCTWCNLRSGSERKQLCTATQDTVCRCRAGTQPLDSYKPGVDCAPCPPGHFSPGDNQACKPWTNCTLAGKHTLQPASNSSDAICEDRDPPATQPQETQGPPARPITVQPTEAWPRTSQGPSTRPVEVPGGRAVAAILGLGLVLGLLGPLAILLALYLLRRDQRLPPDAHKPPGGGSFRTPIQEEQADAHSTLAKIRAKRSGSGVKQTLNFDLLKLAGDVESNPGPSRGHMTEYKPTVRLATRDDVPRAVRTLAAAFADYPATRHTVDPDRHIERVTELQELFLTRVGLDIGKVWVADDGAAVAVWTTPESVEAGAVFAEIGPRMAELSGSRLAAQQQMEGLLAPHRPKEPAWFLATVGVSPDHQGKGLGSAVVLPGVEAAERAGVPAFLETSAPRNLPFYERLGFTVTADVEVPEGPRTWCMTRKPGA

SEQ ID NO: 6445 - protein, 1229 aa, Artificial Sequence
  Synthetic Polypeptide
MALPVTALLLPLALLLHAARPDIQMTQSPSSLSASVGDRVTITCKASDHINNWLAWYQQKPGQAPKLLIYGATTLETGVPSRFSGSGSGTDYTLTISSLQPEDFATYYCQQSWNTPWTFGQGTKLEIKRLEGQPKANPTVTLFPPSSEELQANKATLVCLISDFYPGAVTVAWKADGSPVKAGVETTKPSKQSNNKYAASSYLSLTPEQWKSHRSYSCQVTHEGSTVEKTVAPTECSGSGMRTEDLPKAVVFLEPQWYRVLEKDSVTLKCQGAYSPEDNSTQWFHNESLISSQASSYFIDAATVDDSGEYRCQTNLSTLSDPVQLEVHIGWLLLQAPRWVFKEEDPIHLRCHSWKNTALHKVTYLQNGKGRKYFHHNSDFYIPKATLKDSGSYFCRGLVGSKNVSSETVNITITQGLAVSTISSFFPPGYQVSFCLVMVLLFAVDTGLYFSVKTNIRSSTRDWKDHKFKWRKDPQDKRAKRSGSGATNFSLLKQAGDVEENPGPTSMDWIWRILFLVGAATGAHSFEQVQLQQPGAELVKPGASVKMSCKASGYAFSSYWINWMKQKPGQGLEWIGQIYPGDGDTNYNGKFKGRATLTADTSSSTAYMQLSSLTSEDSAVYFCARSITTVVGCAMDYWGQGTSVTVSSTRASTKGPSVFPLAPSSKSTSGGTAALGCLVKDYFPEPVTVSWNSGALTSGVHTFPAVLQSSGLYSLSSVVTVPSSSLGTQTYICNVNHKPSNTKVDKRVEPKSCGTLHCVGDTYPSNDRCCHECRPGNGMVSRCSRSQNTVCRPCGPGFYNDVVSSKPCKPCTWCNLRSGSERKQLCTATQDTVCRCRAGTQPLDSYKPGVDCAPCPPGHFSPGDNQACKPWTNCTLAGKHTLQPASNSSDAICEDRDPPATQPQETQGPPARPITVQPTEAWPRTSQGPSTRPVEVPGGRAVAAILGLGLVLGLLGPLAILLALYLLRRDQRLPPDAHKPPGGGSFRTPIQEEQADAHSTLAKIRAKRSGSGVKQTLNFDLLKLAGDVESNPGPSRGGIHTMATYEVLCEVARKLGTDDREVVLFLLNVFIPQPTLAQLIGALRALKEEGRLTFPLLAECLFRAGRRDLLRDLLHLDPRFLERHLAGTMSYFSPYQLTVLHVDGELCARDIRSLIFLSKDTIGSRSTPQTFLHWVYCMENLDLLGPTDVDALMSMLRSLSRVDLQRQVQTLMGLHLSGPSHSQHYRHTP

SEQ ID NO: 6446 - protein, 1282 aa, Artificial Sequence
  Synthetic Polypeptide
MALPVTALLLPLALLLHAARPDIQMTQSPSSLSASVGDRVTITCKASDHINNWLAWYQQKPGQAPKLLIYGATTLETGVPSRFSGSGSGTDYTLTISSLQPEDFATYYCQQSWNTPWTFGQGTKLEIKRLEGQPKANPTVTLFPPSSEELQANKATLVCLISDFYPGAVTVAWKADGSPVKAGVETTKPSKQSNNKYAASSYLSLTPEQWKSHRSYSCQVTHEGSTVEKTVAPTECSGSGMRTEDLPKAVVFLEPQWYRVLEKDSVTLKCQGAYSPEDNSTQWFHNESLISSQASSYFIDAATVDDSGEYRCQTNLSTLSDPVQLEVHIGWLLLQAPRWVFKEEDPIHLRCHSWKNTALHKVTYLQNGKGRKYFHHNSDFYIPKATLKDSGSYFCRGLVGSKNVSSETVNITITQGLAVSTISSFFPPGYQVSFCLVMVLLFAVDTGLYFSVKTNIRSSTRDWKDHKFKWRKDPQDKRAKRSGSGATNFSLLKQAGDVEENPGPTSMDWIWRILFLVGAATGAHSFEQVQLQQPGAELVKPGASVKMSCKASGYAFSSYWINWMKQKPGQGLEWIGQIYPGDGDTNYNGKFKGRATLTADTSSSTAYMQLSSLTSEDSAVYFCARSITTVVGCAMDYWGQGTSVTVSSTRASTKGPSVFPLAPSSKSTSGGTAALGCLVKDYFPEPVTVSWNSGALTSGVHTFPAVLQSSGLYSLSSVVTVPSSSLGTQTYICNVNHKPSNTKVDKRVEPKSCGTLHCVGDTYPSNDRCCHECRPGNGMVSRCSRSQNTVCRPCGPGFYNDVVSSKPCKPCTWCNLRSGSERKQLCTATQDTVCRCRAGTQPLDSYKPGVDCAPCPPGHFSPGDNQACKPWTNCTLAGKHTLQPASNSSDAICEDRDPPATQPQETQGPPARPITVQPTEAWPRTSQGPSTRPVEVPGGRAVAAILGLGLVLGLLGPLAILLALYLLRRDQRLPPDAHKPPGGGSFRTPIQEEQADAHSTLAKIRAKRSGSGVKQTLNFDLLKLAGDVESNPGPSRGGIHTMSDSKEVPSLPFLRHLLEELDSHEDSLLLFLCHDAAPGCTTVTQALCSLSQQRKLTLAALVEMLYVLQRMDLLKSRFGLSKEGAEQLLGTSFLTRYRKLMVCVGEELDSSELRALRLFACNLNPSLSTALSESSRFVELVLALENVGLVSPSSVSVLADMLRTLRRLDLCQQLVEYEQQEQARYRYCYAASPSLPVRTLRRGHGASEHEQLCMPVQESSDSPELLRTPVQESSSDSPEQTT

SEQ ID NO: 6447 - protein, 1237 aa, Artificial Sequence
  Synthetic Polypeptide
MALPVTALLLPLALLLHAARPDIQMTQSPSSLSASVGDRVTITCKASDHINNWLAWYQQKPGQAPKLLIYGATTLETGVPSRFSGSGSGTDYTLTISSLQPEDFATYYCQQSWNTPWTFGQGTKLEIKRLEGQPKANPTVTLFPPSSEELQANKATLVCLISDFYPGAVTVAWKADGSPVKAGVETTKPSKQSNNKYAASSYLSLTPEQWKSHRSYSCQVTHEGSTVEKTVAPTECSGSGMRTEDLPKAVVFLEPQWYRVLEKDSVTLKCQGAYSPEDNSTQWFHNESLISSQASSYFIDAATVDDSGEYRCQTNLSTLSDPVQLEVHIGWLLLQAPRWVFKEEDPIHLRCHSWKNTALHKVTYLQNGKGRKYFHHNSDFYIPKATLKDSGSYFCRGLVGSKNVSSETVNITITQGLAVSTISSFFPPGYQVSFCLVMVLLFAVDTGLYFSVKTNIRSSTRDWKDHKFKWRKDPQDKRAKRSGSGATNFSLLKQAGDVEENPGPTSMDWIWRILFLVGAATGAHSFEQVQLQQPGAELVKPGASVKMSCKASGYAFSSYWINWMKQKPGQGLEWIGQIYPGDGDTNYNGKFKGRATLTADTSSSTAYMQLSSLTSEDSAVYFCARSITTVVGCAMDYWGQGTSVTVSSTRASTKGPSVFPLAPSSKSTSGGTAALGCLVKDYFPEPVTVSWNSGALTSGVHTFPAVLQSSGLYSLSSVVTVPSSSLGTQTYICNVNHKPSNTKVDKRVEPKSCGTLHCVGDTYPSNDRCCHECRPGNGMVSRCSRSQNTVCRPCGPGFYNDVVSSKPCKPCTWCNLRSGSERKQLCTATQDTVCRCRAGTQPLDSYKPGVDCAPCPPGHFSPGDNQACKPWTNCTLAGKHTLQPASNSSDAICEDRDPPATQPQETQGPPARPITVQPTEAWPRTSQGPSTRPVEVPGGRAVAAILGLGLVLGLLGPLAILLALYLLRRDQRLPPDAHKPPGGGSFRTPIQEEQADAHSTLAKIRAKRSGSGVKQTLNFDLLKLAGDVESNPGPSRGHMTEYKPTVRLATRDDVPRAVRTLAAAFADYPATRHTVDPDRHIERVTELQELFLTRVGLDIGKVWVADDGAAVAVWTTPESVEAGAVFAEIGPRMAELSGSRLAAQQQMEGLLAPHRPKEPAWFLATVGVSPDHQGKGLGSAVVLPGVEAAERAGVPAFLETSAPRNLPFYERLGFTVTADVEVPEGPRTWCMTRKPGA

SEQ ID NO: 6448 - protein, 1374 aa, Artificial Sequence
  Synthetic Polypeptide
MALPVTALLLPLALLLHAARPEVQLVESGGGLVQAGGSLRLSCAASGRTFSMGWFRQAPGKEREFVAAITYSGGSPYYADSVKGRFTISRDNAKNTVYLQMNSLKPEDTAVYYCAANPTYGSDWNAENWGQGTQVTVSSGTGGGGSGGGGSGGGGSEFDIQMTQSPSSLSASVGDRVTITCKASDHINNWLAWYQQKPGQAPKLLIYGATTLETGVPSRFSGSGSGTDYTLTISSLQPEDFATYYCQQSWNTPWTFGQGTKLEIKRLEGQPKANPTVTLFPPSSEELQANKATLVCLISDFYPGAVTVAWKADGSPVKAGVETTKPSKQSNNKYAASSYLSLTPEQWKSHRSYSCQVTHEGSTVEKTVAPTECSGSGMRTEDLPKAVVFLEPQWYRVLEKDSVTLKCQGAYSPEDNSTQWFHNESLISSQASSYFIDAATVDDSGEYRCQTNLSTLSDPVQLEVHIGWLLLQAPRWVFKEEDPIHLRCHSWKNTALHKVTYLQNGKGRKYFHHNSDFYIPKATLKDSGSYFCRGLVGSKNVSSETVNITITQGLAVSTISSFFPPGYQVSFCLVMVLLFAVDTGLYFSVKTNIRSSTRDWKDHKFKWRKDPQDKRAKRSGSGATNFSLLKQAGDVEENPGPTSMDWIWRILFLVGAATGAHSFEQVQLQQPGAELVKPGASVKMSCKASGYAFSSYWINWMKQKPGQGLEWIGQIYPGDGDTNYNGKFKGRATLTADTSSSTAYMQLSSLTSEDSAVYFCARSITTVVGCAMDYWGQGTSVTVSSTRASTKGPSVFPLAPSSKSTSGGTAALGCLVKDYFPEPVTVSWNSGALTSGVHTFPAVLQSSGLYSLSSVVTVPSSSLGTQTYICNVNHKPSNTKVDKRVEPKSCGTLHCVGDTYPSNDRCCHECRPGNGMVSRCSRSQNTVCRPCGPGFYNDVVSSKPCKPCTWCNLRSGSERKQLCTATQDTVCRCRAGTQPLDSYKPGVDCAPCPPGHFSPGDNQACKPWTNCTLAGKHTLQPASNSSDAICEDRDPPATQPQETQGPPARPITVQPTEAWPRTSQGPSTRPVEVPGGRAVAAILGLGLVLGLLGPLAILLALYLLRRDQRLPPDAHKPPGGGSFRTPIQEEQADAHSTLAKIRAKRSGSGVKQTLNFDLLKLAGDVESNPGPSRGHMTEYKPTVRLATRDDVPRAVRTLAAAFADYPATRHTVDPDRHIERVTELQELFLTRVGLDIGKVWVADDGAAVAVWTTPESVEAGAVFAEIGPRMAELSGSRLAAQQQMEGLLAPHRPKEPAWFLATVGVSPDHQGKGLGSAVVLPGVEAAERAGVPAFLETSAPRNLPFYERLGFTVTADVEVPEGPRTWCMTRKPGA

SEQ ID NO: 6449 - protein, 1511 aa, Artificial Sequence
  Synthetic Polypeptide
MALPVTALLLPLALLLHAARPEVQLVESGGGLVQAGGSLRLSCAASGRTFSMGWFRQAPGKEREFVAAITYSGGSPYYADSVKGRFTISRDNAKNTVYLQMNSLKPEDTAVYYCAANPTYGSDWNAENWGQGTQVTVSSGTGGGGSGGGGSGGGGSEFDIQMTQSPSSLSASVGDRVTITCKASDHINNWLAWYQQKPGQAPKLLIYGATTLETGVPSRFSGSGSGTDYTLTISSLQPEDFATYYCQQSWNTPWTFGQGTKLEIKRLEGQPKANPTVTLFPPSSEELQANKATLVCLISDFYPGAVTVAWKADGSPVKAGVETTKPSKQSNNKYAASSYLSLTPEQWKSHRSYSCQVTHEGSTVEKTVAPTECSGSGMRTEDLPKAVVFLEPQWYRVLEKDSVTLKCQGAYSPEDNSTQWFHNESLISSQASSYFIDAATVDDSGEYRCQTNLSTLSDPVQLEVHIGWLLLQAPRWVFKEEDPIHLRCHSWKNTALHKVTYLQNGKGRKYFHHNSDFYIPKATLKDSGSYFCRGLVGSKNVSSETVNITITQGLAVSTISSFFPPGYQVSFCLVMVLLFAVDTGLYFSVKTNIRSSTRDWKDHKFKWRKDPQDKRAKRSGSGATNFSLLKQAGDVEENPGPTSMDWIWRILFLVGAATGAHSGPEVQLVESGGGLVQAGGSLRLSCAASGRTFTMGWFRQAPGKEREFVAAISLSPTLAYYADSVKGRFTISRDNAKNTVVLQMNSLKPEDTALYYCAADRKSVMSIRPDYWGQGTQVTVSSGSGGGGSGGGGSGGGGSFEQVQLQQPGAELVKPGASVKMSCKASGYAFSSYWINWMKQKPGQGLEWIGQIYPGDGDTNYNGKFKGRATLTADTSSSTAYMQLSSLTSEDSAVYFCARSITTVVGCAMDYWGQGTSVTVSSTRASTKGPSVFPLAPSSKSTSGGTAALGCLVKDYFPEPVTVSWNSGALTSGVHTFPAVLQSSGLYSLSSVVTVPSSSLGTQTYICNVNHKPSNTKVDKRVEPKSCGTLHCVGDTYPSNDRCCHECRPGNGMVSRCSRSQNTVCRPCGPGFYNDVVSSKPCKPCTWCNLRSGSERKQLCTATQDTVCRCRAGTQPLDSYKPGVDCAPCPPGHFSPGDNQACKPWTNCTLAGKHTLQPASNSSDAICEDRDPPATQPQETQGPPARPITVQPTEAWPRTSQGPSTRPVEVPGGRAVAAILGLGLVLGLLGPLAILLALYLLRRDQRLPPDAHKPPGGGSFRTPIQEEQADAHSTLAKIRAKRSGSGVKQTLNFDLLKLAGDVESNPGPSRGHMTEYKPTVRLATRDDVPRAVRTLAAAFADYPATRHTVDPDRHIERVTELQELFLTRVGLDIGKVWVADDGAAVAVWTTPESVEAGAVFAEIGPRMAELSGSRLAAQQQMEGLLAPHRPKEPAWFLATVGVSPDHQGKGLGSAVVLPGVEAAERAGVPAFLETSAPRNLPFYERLGFTVTADVEVPEGPRTWCMTRKPGA

SEQ ID NO: 6450 - protein, 1244 aa, Artificial Sequence
  Synthetic Polypeptide
MALPVTALLLPLALLLHAARPEVQLVESGGGLVQAGGSLRLSCAASGRTFSMGWFRQAPGKEREFVAAITYSGGSPYYADSVKGRFTISRDNAKNTVYLQMNSLKPEDTAVYYCAANPTYGSDWNAENWGQGTQVTVSSLEGQPKANPTVTLFPPSSEELQANKATLVCLISDFYPGAVTVAWKADGSPVKAGVETTKPSKQSNNKYAASSYLSLTPEQWKSHRSYSCQVTHEGSTVEKTVAPTECSGSGMRTEDLPKAVVFLEPQWYRVLEKDSVTLKCQGAYSPEDNSTQWFHNESLISSQASSYFIDAATVDDSGEYRCQTNLSTLSDPVQLEVHIGWLLLQAPRWVFKEEDPIHLRCHSWKNTALHKVTYLQNGKGRKYFHHNSDFYIPKATLKDSGSYFCRGLVGSKNVSSETVNITITQGLAVSTISSFFPPGYQVSFCLVMVLLFAVDTGLYFSVKTNIRSSTRDWKDHKFKWRKDPQDKRAKRSGSGATNFSLLKQAGDVEENPGPTSMDWIWRILFLVGAATGAHSGPEVQLVESGGGLVQAGGSLRLSCAASGRTFTMGWFRQAPGKEREFVAAISLSPTLAYYADSVKGRFTISRDNAKNTVVLQMNSLKPEDTALYYCAADRKSVMSIRPDYWGQGTQVTVSSTRASTKGPSVFPLAPSSKSTSGGTAALGCLVKDYFPEPVTVSWNSGALTSGVHTFPAVLQSSGLYSLSSVVTVPSSSLGTQTYICNVNHKPSNTKVDKRVEPKSCGTLHCVGDTYPSNDRCCHECRPGNGMVSRCSRSQNTVCRPCGPGFYNDVVSSKPCKPCTWCNLRSGSERKQLCTATQDTVCRCRAGTQPLDSYKPGVDCAPCPPGHFSPGDNQACKPWTNCTLAGKHTLQPASNSSDAICEDRDPPATQPQETQGPPARPITVQPTEAWPRTSQGPSTRPVEVPGGRAVAAILGLGLVLGLLGPLAILLALYLLRRDQRLPPDAHKPPGGGSFRTPIQEEQADAHSTLAKIRAKRSGSGVKQTLNFDLLKLAGDVESNPGPSRGHMTEYKPTVRLATRDDVPRAVRTLAAAFADYPATRHTVDPDRHIERVTELQELFLTRVGLDIGKVWVADDGAAVAVWTTPESVEAGAVFAEIGPRMAELSGSRLAAQQQMEGLLAPHRPKEPAWFLATVGVSPDHQGKGLGSAVVLPGVEAAERAGVPAFLETSAPRNLPFYERLGFTVTADVEVPEGPRTWCMTRKPGA

SEQ ID NO: 6451 - protein, 1252 aa, Artificial Sequence
  Synthetic Polypeptide
MALPVTALLLPLALLLHAARPDIQMTQSPSSLSASVGDRVTITCKASDHINNWLAWYQQKPGQAPKLLIYGATTLETGVPSRFSGSGSGTDYTLTISSLQPEDFATYYCQQSWNTPWTFGQGTKLEIKRLEDLKNVFPPEVAVFEPSEAEISHTQKATLVCLATGFYPDHVELSWWVNGKEVHSGVSTDPQPLKEQPALNDSRYCLSSRLRVSATFWQNPRNHFRCQVQFYGLSENDEWTQDRAKPVTQIVSAEAWGRADCGSGMRTEDLPKAVVFLEPQWYRVLEKDSVTLKCQGAYSPEDNSTQWFHNESLISSQASSYFIDAATVDDSGEYRCQTNLSTLSDPVQLEVHIGWLLLQAPRWVFKEEDPIHLRCHSWKNTALHKVTYLQNGKGRKYFHHNSDFYIPKATLKDSGSYFCRGLVGSKNVSSETVNITITQGLAVSTISSFFPPGYQVSFCLVMVLLFAVDTGLYFSVKTNIRSSTRDWKDHKFKWRKDPQDKRAKRSGSGATNFSLLKQAGDVEENPGPTSMDWIWRILFLVGAATGAHSFEQVQLQQPGAELVKPGASVKMSCKASGYAFSSYWINWMKQKPGQGLEWIGQIYPGDGDTNYNGKFKGRATLTADTSSSTAYMQLSSLTSEDSAVYFCARSITTVVGCAMDYWGQGTSVTVSSTRIQNPDPAVYQLRDSKSSDKSVCLFTDFDSQTNVSQSKDSDVYITDKTVLDMRSMDFKSNSAVAWSNKSDFACANAFNNSIIPEDTFFPSPESSCGTLHCVGDTYPSNDRCCHECRPGNGMVSRCSRSQNTVCRPCGPGFYNDVVSSKPCKPCTWCNLRSGSERKQLCTATQDTVCRCRAGTQPLDSYKPGVDCAPCPPGHFSPGDNQACKPWTNCTLAGKHTLQPASNSSDAICEDRDPPATQPQETQGPPARPITVQPTEAWPRTSQGPSTRPVEVPGGRAVAAILGLGLVLGLLGPLAILLALYLLRRDQRLPPDAHKPPGGGSFRTPIQEEQADAHSTLAKIRAKRSGSGVKQTLNFDLLKLAGDVESNPGPSRGHMTEYKPTVRLATRDDVPRAVRTLAAAFADYPATRHTVDPDRHIERVTELQELFLTRVGLDIGKVWVADDGAAVAVWTTPESVEAGAVFAEIGPRMAELSGSRLAAQQQMEGLLAPHRPKEPAWFLATVGVSPDHQGKGLGSAVVLPGVEAAERAGVPAFLETSAPRNLPFYERLGFTVTADVEVPEGPRTWCMTRKPGA

SEQ ID NO: 6452 - protein, 1389 aa, Artificial Sequence
  Synthetic Polypeptide
MALPVTALLLPLALLLHAARPEVQLVESGGGLVQAGGSLRLSCAASGRTFSMGWFRQAPGKEREFVAAITYSGGSPYYADSVKGRFTISRDNAKNTVYLQMNSLKPEDTAVYYCAANPTYGSDWNAENWGQGTQVTVSSGTGGGGSGGGGSGGGGSEFDIQMTQSPSSLSASVGDRVTITCKASDHINNWLAWYQQKPGQAPKLLIYGATTLETGVPSRFSGSGSGTDYTLTISSLQPEDFATYYCQQSWNTPWTFGQGTKLEIKRLEDLKNVFPPEVAVFEPSEAEISHTQKATLVCLATGFYPDHVELSWWVNGKEVHSGVSTDPQPLKEQPALNDSRYCLSSRLRVSATFWQNPRNHFRCQVQFYGLSENDEWTQDRAKPVTQIVSAEAWGRADCGSGMRTEDLPKAVVFLEPQWYRVLEKDSVTLKCQGAYSPEDNSTQWFHNESLISSQASSYFIDAATVDDSGEYRCQTNLSTLSDPVQLEVHIGWLLLQAPRWVFKEEDPIHLRCHSWKNTALHKVTYLQNGKGRKYFHHNSDFYIPKATLKDSGSYFCRGLVGSKNVSSETVNITITQGLAVSTISSFFPPGYQVSFCLVMVLLFAVDTGLYFSVKTNIRSSTRDWKDHKFKWRKDPQDKRAKRSGSGATNFSLLKQAGDVEENPGPTSMDWIWRILFLVGAATGAHSFEQVQLQQPGAELVKPGASVKMSCKASGYAFSSYWINWMKQKPGQGLEWIGQIYPGDGDTNYNGKFKGRATLTADTSSSTAYMQLSSLTSEDSAVYFCARSITTVVGCAMDYWGQGTSVTVSSTRIQNPDPAVYQLRDSKSSDKSVCLFTDFDSQTNVSQSKDSDVYITDKTVLDMRSMDFKSNSAVAWSNKSDFACANAFNNSIIPEDTFFPSPESSCGTLHCVGDTYPSNDRCCHECRPGNGMVSRCSRSQNTVCRPCGPGFYNDVVSSKPCKPCTWCNLRSGSERKQLCTATQDTVCRCRAGTQPLDSYKPGVDCAPCPPGHFSPGDNQACKPWTNCTLAGKHTLQPASNSSDAICEDRDPPATQPQETQGPPARPITVQPTEAWPRTSQGPSTRPVEVPGGRAVAAILGLGLVLGLLGPLAILLALYLLRRDQRLPPDAHKPPGGGSFRTPIQEEQADAHSTLAKIRAKRSGSGVKQTLNFDLLKLAGDVESNPGPSRGHMTEYKPTVRLATRDDVPRAVRTLAAAFADYPATRHTVDPDRHIERVTELQELFLTRVGLDIGKVWVADDGAAVAVWTTPESVEAGAVFAEIGPRMAELSGSRLAAQQQMEGLLAPHRPKEPAWFLATVGVSPDHQGKGLGSAVVLPGVEAAERAGVPAFLETSAPRNLPFYERLGFTVTADVEVPEGPRTWCMTRKPGA

SEQ ID NO: 6453 - protein, 1526 aa, Artificial Sequence
  Synthetic Polypeptide
MALPVTALLLPLALLLHAARPEVQLVESGGGLVQAGGSLRLSCAASGRTFSMGWFRQAPGKEREFVAAITYSGGSPYYADSVKGRFTISRDNAKNTVYLQMNSLKPEDTAVYYCAANPTYGSDWNAENWGQGTQVTVSSGTGGGGSGGGGSGGGGSEFDIQMTQSPSSLSASVGDRVTITCKASDHINNWLAWYQQKPGQAPKLLIYGATTLETGVPSRFSGSGSGTDYTLTISSLQPEDFATYYCQQSWNTPWTFGQGTKLEIKRLEDLKNVFPPEVAVFEPSEAEISHTQKATLVCLATGFYPDHVELSWWVNGKEVHSGVSTDPQPLKEQPALNDSRYCLSSRLRVSATFWQNPRNHFRCQVQFYGLSENDEWTQDRAKPVTQIVSAEAWGRADCGSGMRTEDLPKAVVFLEPQWYRVLEKDSVTLKCQGAYSPEDNSTQWFHNESLISSQASSYFIDAATVDDSGEYRCQTNLSTLSDPVQLEVHIGWLLLQAPRWVFKEEDPIHLRCHSWKNTALHKVTYLQNGKGRKYFHHNSDFYIPKATLKDSGSYFCRGLVGSKNVSSETVNITITQGLAVSTISSFFPPGYQVSFCLVMVLLFAVDTGLYFSVKTNIRSSTRDWKDHKFKWRKDPQDKRAKRSGSGATNFSLLKQAGDVEENPGPTSMDWIWRILFLVGAATGAHSGPEVQLVESGGGLVQAGGSLRLSCAASGRTFTMGWFRQAPGKEREFVAAISLSPTLAYYADSVKGRFTISRDNAKNTVVLQMNSLKPEDTALYYCAADRKSVMSIRPDYWGQGTQVTVSSGSGGGGSGGGGSGGGGSFEQVQLQQPGAELVKPGASVKMSCKASGYAFSSYWINWMKQKPGQGLEWIGQIYPGDGDTNYNGKFKGRATLTADTSSSTAYMQLSSLTSEDSAVYFCARSITTVVGCAMDYWGQGTSVTVSSTRIQNPDPAVYQLRDSKSSDKSVCLFTDFDSQTNVSQSKDSDVYITDKTVLDMRSMDFKSNSAVAWSNKSDFACANAFNNSIIPEDTFFPSPESSCGTLHCVGDTYPSNDRCCHECRPGNGMVSRCSRSQNTVCRPCGPGFYNDVVSSKPCKPCTWCNLRSGSERKQLCTATQDTVCRCRAGTQPLDSYKPGVDCAPCPPGHFSPGDNQACKPWTNCTLAGKHTLQPASNSSDAICEDRDPPATQPQETQGPPARPITVQPTEAWPRTSQGPSTRPVEVPGGRAVAAILGLGLVLGLLGPLAILLALYLLRRDQRLPPDAHKPPGGGSFRTPIQEEQADAHSTLAKIRAKRSGSGVKQTLNFDLLKLAGDVESNPGPSRGHMTEYKPTVRLATRDDVPRAVRTLAAAFADYPATRHTVDPDRHIERVTELQELFLTRVGLDIGKVWVADDGAAVAVWTTPESVEAGAVFAEIGPRMAELSGSRLAAQQQMEGLLAPHRPKEPAWFLATVGVSPDHQGKGLGSAVVLPGVEAAERAGVPAFLETSAPRNLPFYERLGFTVTADVEVPEGPRTWCMTRKPGA

SEQ ID NO: 6454 - protein, 1259 aa, Artificial Sequence
  Synthetic Polypeptide
MALPVTALLLPLALLLHAARPEVQLVESGGGLVQAGGSLRLSCAASGRTFSMGWFRQAPGKEREFVAAITYSGGSPYYADSVKGRFTISRDNAKNTVYLQMNSLKPEDTAVYYCAANPTYGSDWNAENWGQGTQVTVSSLEDLKNVFPPEVAVFEPSEAEISHTQKATLVCLATGFYPDHVELSWWVNGKEVHSGVSTDPQPLKEQPALNDSRYCLSSRLRVSATFWQNPRNHFRCQVQFYGLSENDEWTQDRAKPVTQIVSAEAWGRADCGSGMRTEDLPKAVVFLEPQWYRVLEKDSVTLKCQGAYSPEDNSTQWFHNESLISSQASSYFIDAATVDDSGEYRCQTNLSTLSDPVQLEVHIGWLLLQAPRWVFKEEDPIHLRCHSWKNTALHKVTYLQNGKGRKYFHHNSDFYIPKATLKDSGSYFCRGLVGSKNVSSETVNITITQGLAVSTISSFFPPGYQVSFCLVMVLLFAVDTGLYFSVKTNIRSSTRDWKDHKFKWRKDPQDKRAKRSGSGATNFSLLKQAGDVEENPGPTSMDWIWRILFLVGAATGAHSGPEVQLVESGGGLVQAGGSLRLSCAASGRTFTMGWFRQAPGKEREFVAAISLSPTLAYYADSVKGRFTISRDNAKNTVVLQMNSLKPEDTALYYCAADRKSVMSIRPDYWGQGTQVTVSSTRIQNPDPAVYQLRDSKSSDKSVCLFTDFDSQTNVSQSKDSDVYITDKTVLDMRSMDFKSNSAVAWSNKSDFACANAFNNSIIPEDTFFPSPESSCGTLHCVGDTYPSNDRCCHECRPGNGMVSRCSRSQNTVCRPCGPGFYNDVVSSKPCKPCTWCNLRSGSERKQLCTATQDTVCRCRAGTQPLDSYKPGVDCAPCPPGHFSPGDNQACKPWTNCTLAGKHTLQPASNSSDAICEDRDPPATQPQETQGPPARPITVQPTEAWPRTSQGPSTRPVEVPGGRAVAAILGLGLVLGLLGPLAILLALYLLRRDQRLPPDAHKPPGGGSFRTPIQEEQADAHSTLAKIRAKRSGSGVKQTLNFDLLKLAGDVESNPGPSRGHMTEYKPTVRLATRDDVPRAVRTLAAAFADYPATRHTVDPDRHIERVTELQELFLTRVGLDIGKVWVADDGAAVAVWTTPESVEAGAVFAEIGPRMAELSGSRLAAQQQMEGLLAPHRPKEPAWFLATVGVSPDHQGKGLGSAVVLPGVEAAERAGVPAFLETSAPRNLPFYERLGFTVTADVEVPEGPRTWCMTRKPGA

SEQ ID NO: 6455 - protein, 633 aa, Artificial Sequence; identical to SEQ ID NO: 4032
  Synthetic Polypeptide

SEQ ID NO: 6456 - protein, 516 aa, Artificial Sequence
  Synthetic Polypeptide
MALPVTALLLPLALLLHAARPDIQMTQSPSSLSASVGDRVTITCKASDHINNWLAWYQQKPGQAPKLLIYGATTLETGVPSRFSGSGSGTDYTLTISSLQPEDFATYYCQQSWNTPWTFGQGTKLEIKRGGGGSGGGGSGGGGSQVQLQQPGAELVKPGASVKMSCKASGYAFSSYWINWMKQKPGQGLEWIGQIYPGDGDTNYNGKFKGRATLTADTSSSTAYMQLSSLTSEDSAVYFCARSITTVVGCAMDYWGQGTSVTVSSTRLHCVGDTYPSNDRCCHECRPGNGMVSRCSRSQNTVCRPCGPGFYNDVVSSKPCKPCTWCNLRSGSERKQLCTATQDTVCRCRAGTQPLDSYKPGVDCAPCPPGHFSPGDNQACKPWTNCTLAGKHTLQPASNSSDAICEDRDPPATQPQETQGPPARPITVQPTEAWPRTSQGPSTRPVEVPGGRAVAAILGLGLVLGLLGPLAILLALYLLRRDQRLPPDAHKPPGGGSFRTPIQEEQADAHSTLAKI

SEQ ID NO: 6457 - protein, 516 aa, Artificial Sequence
  Synthetic Polypeptide
MALPVTALLLPLALLLHAARPEIVLTQSPATLSLSPGERATLSCRASQSVSSYLAWYQQKPGQAPRLLIYDASNRATGIPARFSGSGSGTDFTLTISSLEPEDFAVYYCQQRSNWPITFGQGTRLEIKGGGGSGGGGSGGGGSEVQLVESGGGLVQPGRSLRLSCAASGFTFNDYAMHWVRQAPGKGLEWVSTISWNSGSIGYADSVKGRFTISRDNAKKSLYLQMNSLRAEDTALYYCAKDIQYGNYYYGMDVWGQGTTVTVSSTRLHCVGDTYPSNDRCCHECRPGNGMVSRCSRSQNTVCRPCGPGFYNDVVSSKPCKPCTWCNLRSGSERKQLCTATQDTVCRCRAGTQPLDSYKPGVDCAPCPPGHFSPGDNQACKPWTNCTLAGKHTLQPASNSSDAICEDRDPPATQPQETQGPPARPITVQPTEAWPRTSQGPSTRPVEVPGGRAVAAILGLGLVLGLLGPLAILLALYLLRRDQRLPPDAHKPPGGGSFRTPIQEEQADAHSTLAKI

SEQ ID NO: 6458 - protein, 390 aa, Artificial Sequence
  Synthetic Polypeptide
MALPVTALLLPLALLLHAARPEVQLVESGGGLVQAGGSLRLSCAASGRTFSMGWFRQAPGKEREFVAAITYSGGSPYYADSVKGRFTISRDNAKNTVYLQMNSLKPEDTAVYYCAANPTYGSDWNAENWGQGTQVTVSSTRLHCVGDTYPSNDRCCHECRPGNGMVSRCSRSQNTVCRPCGPGFYNDVVSSKPCKPCTWCNLRSGSERKQLCTATQDTVCRCRAGTQPLDSYKPGVDCAPCPPGHFSPGDNQACKPWTNCTLAGKHTLQPASNSSDAICEDRDPPATQPQETQGPPARPITVQPTEAWPRTSQGPSTRPVEVPGGRAVAAILGLGLVLGLLGPLAILLALYLLRRDQRLPPDAHKPPGGGSFRTPIQEEQADAHSTLAKI

SEQ ID NO: 6459 - protein, 390 aa, Artificial Sequence
  Synthetic Polypeptide
MALPVTALLLPLALLLHAARPQLQLQESGPGLVKPSETLSLTCTVSGGSISSGDYYWGWIRQPPGKGLEWIGHIYYSGATYYNPSLKSRVTISVDTSRNQFSLKLSSVTAADTAVYYCTRDDSSNWRSRGQGTLVTVSSTRLHCVGDTYPSNDRCCHECRPGNGMVSRCSRSQNTVCRPCGPGFYNDVVSSKPCKPCTWCNLRSGSERKQLCTATQDTVCRCRAGTQPLDSYKPGVDCAPCPPGHFSPGDNQACKPWTNCTLAGKHTLQPASNSSDAICEDRDPPATQPQETQGPPARPITVQPTEAWPRTSQGPSTRPVEVPGGRAVAAILGLGLVLGLLGPLAILLALYLLRRDQRLPPDAHKPPGGGSFRTPIQEEQADAHSTLAKI

SEQ ID NO: 6460 - protein, 390 aa, Artificial Sequence
  Synthetic Polypeptide
MALPVTALLLPLALLLHAARPQLQLQESGPGLVKPSETLSLTCTVSGDSISSGDYYWGWIRQPPGKGLEWIGHIYYSGVTYYNPSLKSRVTISVDTSRNQFSLKLSSVTAADTAVYYCTREDSSNWRSRGQGTLVTVSSTRLHCVGDTYPSNDRCCHECRPGNGMVSRCSRSQNTVCRPCGPGFYNDVVSSKPCKPCTWCNLRSGSERKQLCTATQDTVCRCRAGTQPLDSYKPGVDCAPCPPGHFSPGDNQACKPWTNCTLAGKHTLQPASNSSDAICEDRDPPATQPQETQGPPARPITVQPTEAWPRTSQGPSTRPVEVPGGRAVAAILGLGLVLGLLGPLAILLALYLLRRDQRLPPDAHKPPGGGSFRTPIQEEQADAHSTLAKI

SEQ ID NO: 6461 - protein, 392 aa, Artificial Sequence
  Synthetic Polypeptide
MALPVTALLLPLALLLHAARPEVQLQESGGGLVQPGGSLRLSCAASGRTFSSLFMGWFRQAPGKERELVAAISRYSLYTYYADSVKGRFTISADNAKNAVYLQMNSLKPEDTAVYYCASKLEYTSNDYDSWGQGTQVTVSSTRLHCVGDTYPSNDRCCHECRPGNGMVSRCSRSQNTVCRPCGPGFYNDVVSSKPCKPCTWCNLRSGSERKQLCTATQDTVCRCRAGTQPLDSYKPGVDCAPCPPGHFSPGDNQACKPWTNCTLAGKHTLQPASNSSDAICEDRDPPATQPQETQGPPARPITVQPTEAWPRTSQGPSTRPVEVPGGRAVAAILGLGLVLGLLGPLAILLALYLLRRDQRLPPDAHKPPGGGSFRTPIQEEQADAHSTLAKI

SEQ ID NO: 6462 - protein, 400 aa, Artificial Sequence
  Synthetic Polypeptide
MALPVTALLLPLALLLHAARPEVQLVESGGGLVQPGGSLRLSCAASGFASDYYIIGWFRQAPGKEREGVSCISSRYANTNYADSVKGRFTISRDNAKNTVYLQMNSLKPEDTAVYYCAADTRRYTCPDIATMHRNFDSWGQGTLVTVSSTRLHCVGDTYPSNDRCCHECRPGNGMVSRCSRSQNTVCRPCGPGFYNDVVSSKPCKPCTWCNLRSGSERKQLCTATQDTVCRCRAGTQPLDSYKPGVDCAPCPPGHFSPGDNQACKPWTNCTLAGKHTLQPASNSSDAICEDRDPPATQPQETQGPPARPITVQPTEAWPRTSQGPSTRPVEVPGGRAVAAILGLGLVLGLLGPLAILLALYLLRRDQRLPPDAHKPPGGGSFRTPIQEEQADAHSTLAKI

SEQ ID NO: 6463 - protein, 396 aa, Artificial Sequence
  Synthetic Polypeptide
MALPVTALLLPLALLLHAARPEVQLVESGGSLVQPGGSLRLSCAASGFTFDDYAMSWVRQVPGKGLEWVSSINWSGTHTDYADSVKGRFTISRNNANNTLYLQMNSLKSEDTAVYYCAKNWRDAGTTWFEKSGSAGQGTQVTVSSTRLHCVGDTYPSNDRCCHECRPGNGMVSRCSRSQNTVCRPCGPGFYNDVVSSKPCKPCTWCNLRSGSERKQLCTATQDTVCRCRAGTQPLDSYKPGVDCAPCPPGHFSPGDNQACKPWTNCTLAGKHTLQPASNSSDAICEDRDPPATQPQETQGPPARPITVQPTEAWPRTSQGPSTRPVEVPGGRAVAAILGLGLVLGLLGPLAILLALYLLRRDQRLPPDAHKPPGGGSFRTPIQEEQADAHSTLAKI

SEQ ID NO: 6464 - protein, 391 aa, Artificial Sequence
  Synthetic Polypeptide
MALPVTALLLPLALLLHAARPEVQLVESGGGLVQPGGSLRLSCAASGFNIKDTCIGWVRRAPGKEEELVAKICKYSGHTRYADSVKGRFTISADTSKNTAYLQMNSLRAEDTAVYYCAAVSVRDGHYNYWGQGTTVTVSSTRLHCVGDTYPSNDRCCHECRPGNGMVSRCSRSQNTVCRPCGPGFYNDVVSSKPCKPCTWCNLRSGSERKQLCTATQDTVCRCRAGTQPLDSYKPGVDCAPCPPGHFSPGDNQACKPWTNCTLAGKHTLQPASNSSDAICEDRDPPATQPQETQGPPARPITVQPTEAWPRTSQGPSTRPVEVPGGRAVAAILGLGLVLGLLGPLAILLALYLLRRDQRLPPDAHKPPGGGSFRTPIQEEQADAHSTLAKI

SEQ ID NO: 6465 - protein, 396 aa, Artificial Sequence
  Synthetic Polypeptide
MALPVTALLLPLALLLHAARPGSDLGIKLLFAAAKGQDDEVRILLAAGADVNAKDFEGYTPLHVAAYDGHLEIVEVLLKAGADVNAKDSQGRTPLHEAAYSGHLEIVEVLLKAGADVNAQDDAGETPADLAAAWGHEDIAEVLQKTRLHCVGDTYPSNDRCCHECRPGNGMVSRCSRSQNTVCRPCGPGFYNDVVSSKPCKPCTWCNLRSGSERKQLCTATQDTVCRCRAGTQPLDSYKPGVDCAPCPPGHFSPGDNQACKPWTNCTLAGKHTLQPASNSSDAICEDRDPPATQPQETQGPPARPITVQPTEAWPRTSQGPSTRPVEVPGGRAVAAILGLGLVLGLLGPLAILLALYLLRRDQRLPPDAHKPPGGGSFRTPIQEEQADAHSTLAKI

SEQ ID NO: 6466 - protein, 330 aa, Artificial Sequence
  Synthetic Polypeptide
MALPVTALLLPLALLLHAARPVDNKFNKERYSAYYEIWQLPNLNVRQKAAFIGSLQDDPSQSANLLAEAKKLNDAQAPKTRLHCVGDTYPSNDRCCHECRPGNGMVSRCSRSQNTVCRPCGPGFYNDVVSSKPCKPCTWCNLRSGSERKQLCTATQDTVCRCRAGTQPLDSYKPGVDCAPCPPGHFSPGDNQACKPWTNCTLAGKHTLQPASNSSDAICEDRDPPATQPQETQGPPARPITVQPTEAWPRTSQGPSTRPVEVPGGRAVAAILGLGLVLGLLGPLAILLALYLLRRDQRLPPDAHKPPGGGSFRTPIQEEQADAHSTLAKI

SEQ ID NO: 6467 - protein, 361 aa, Artificial Sequence
  Synthetic Polypeptide
MALPVTALLLPLALLLHAARPLPAPKNLVVSRVTEDSARLSWTAPDAAFDSFAIGYWEWDDDGEAIVLTVPGSERSYDLTGLKPGTEYPVYIAGVKGGQWSFPLSAIFTTTRLHCVGDTYPSNDRCCHECRPGNGMVSRCSRSQNTVCRPCGPGFYNDVVSSKPCKPCTWCNLRSGSERKQLCTATQDTVCRCRAGTQPLDSYKPGVDCAPCPPGHFSPGDNQACKPWTNCTLAGKHTLQPASNSSDAICEDRDPPATQPQETQGPPARPITVQPTEAWPRTSQGPSTRPVEVPGGRAVAAILGLGLVLGLLGPLAILLALYLLRRDQRLPPDAHKPPGGGSFRTPIQEEQADAHSTLAKI

SEQ ID NO: 6468 - protein, 362 aa, Artificial Sequence
  Synthetic Polypeptide
MALPVTALLLPLALLLHAARPMLPAPKNLVVSRITEDSARLSWTAPDAAFDSFPIRYIETLIWGEAIWLDVPGSERSYDLTGLKPGTEYAVVITGVKGGRFSSPLVASFTTTRLHCVGDTYPSNDRCCHECRPGNGMVSRCSRSQNTVCRPCGPGFYNDVVSSKPCKPCTWCNLRSGSERKQLCTATQDTVCRCRAGTQPLDSYKPGVDCAPCPPGHFSPGDNQACKPWTNCTLAGKHTLQPASNSSDAICEDRDPPATQPQETQGPPARPITVQPTEAWPRTSQGPSTRPVEVPGGRAVAAILGLGLVLGLLGPLAILLALYLLRRDQRLPPDAHKPPGGGSFRTPIQEEQADAHSTLAKI

SEQ ID NO: 6469 - protein, 579 aa, Artificial Sequence
  Synthetic Polypeptide
MALPVTALLLPLALLLHAARPMALPVTALLLPLALLLHAARPLFNQEVQIPLTESYCGPCPKNWICYKNNCYQFFDESKNWYESQASCMSQNASLLKVYSKEDQDLLKLVKSYHWMGLVHIPTNGSWQWEDGSILSPNLLTIIEMQKGDCALYASSFKGYIENCSTPNTYICMQRTVGGGGSGGGGSGGGGSDLFNQEVQIPLTESYCGPCPKNWICYKNNCYQFFDESKNWYESQASCMSQNASLLKVYSKEDQDLLKLVKSYHWMGLVHIPTNGSWQWEDGSILSPNLLTIIEMQKGDCALYASSFKGYIENCSTPNTYICMQRTVTRLHCVGDTYPSNDRCCHECRPGNGMVSRCSRSQNTVCRPCGPGFYNDVVSSKPCKPCTWCNLRSGSERKQLCTATQDTVCRCRAGTQPLDSYKPGVDCAPCPPGHFSPGDNQACKPWTNCTLAGKHTLQPASNSSDAICEDRDPPATQPQETQGPPARPITVQPTEAWPRTSQGPSTRPVEVPGGRAVAAILGLGLVLGLLGPLAILLALYLLRRDQRLPPDAHKPPGGGSFRTPIQEEQADAHSTLAKI

SEQ ID NO: 6470 - protein, 459 aa, Artificial Sequence
  Synthetic Polypeptide
MALPVTALLLPLALLLHAARPMELTDLLLAAMLLAVARLTLSSPVAPACDPRLLNKLLRDSHLLHSRLSQCPDVDPLSIPVLLPAVDFSLGEWKTQTEQSKAQDILGAVSLLLEGVMAARGQLEPSCLSSLLGQLSGQVRLLLGALQGLLGTQLPLQGRTTAHKDPNALFLSLQQLLRGKVRFLLLVEGPTLCVRRTLPTTAVPSSTSTRLHCVGDTYPSNDRCCHECRPGNGMVSRCSRSQNTVCRPCGPGFYNDVVSSKPCKPCTWCNLRSGSERKQLCTATQDTVCRCRAGTQPLDSYKPGVDCAPCPPGHFSPGDNQACKPWTNCTLAGKHTLQPASNSSDAICEDRDPPATQPQETQGPPARPITVQPTEAWPRTSQGPSTRPVEVPGGRAVAAILGLGLVLGLLGPLAILLALYLLRRDQRLPPDAHKPPGGGSFRTPIQEEQADAHSTLAKI

SEQ ID NO: 6471 - protein, 325 aa, Artificial Sequence
  Synthetic Polypeptide
MALPVTALLLPLALLLHAARPMDPDLEIRAAFLRQRNTALRTEVAELEQEVQRLENEVSQYETRYGPLGGGKTRTRLHCVGDTYPSNDRCCHECRPGNGMVSRCSRSQNTVCRPCGPGFYNDVVSSKPCKPCTWCNLRSGSERKQLCTATQDTVCRCRAGTQPLDSYKPGVDCAPCPPGHFSPGDNQACKPWTNCTLAGKHTLQPASNSSDAICEDRDPPATQPQETQGPPARPITVQPTEAWPRTSQGPSTRPVEVPGGRAVAAILGLGLVLGLLGPLAILLALYLLRRDQRLPPDAHKPPGGGSFRTPIQEEQADAHSTLAKI

SEQ ID NO: 6472 - protein, 300 aa, Artificial Sequence
  Synthetic Polypeptide
MALPVTALLLPLALLLHAARPEVAALEKEVAALEKEVAALEKEVAALEKTRLHCVGDTYPSNDRCCHECRPGNGMVSRCSRSQNTVCRPCGPGFYNDVVSSKPCKPCTWCNLRSGSERKQLCTATQDTVCRCRAGTQPLDSYKPGVDCAPCPPGHFSPGDNQACKPWTNCTLAGKHTLQPASNSSDAICEDRDPPATQPQETQGPPARPITVQPTEAWPRTSQGPSTRPVEVPGGRAVAAILGLGLVLGLLGPLAILLALYLLRRDQRLPPDAHKPPGGGSFRTPIQEEQADAHSTLAKI

SEQ ID NO: 6473 - protein, 558 aa, Artificial Sequence
  Synthetic Polypeptide
MALPVTALLLPLALLLHAARPLFNQEVQIPLTESYCGPCPKNWICYKNNCYQFFDESKNWYESQASCMSQNASLLKVYSKEDQDLLKLVKSAHWMGLVHIPTNGSWQWEDGSILSPNLLTIIEMQKGDCALYASSFKGFIENCSTPNTYICMQRTVGGGGSGGGGSGGGGSDLFNQEVQIPLTESYCGPCPKNWICYKNNCYQFFDESKNWYESQASCMSQNASLLKVYSKEDQDLLKLVKSAHWMGLVHIPTNGSWQWEDGSILSPNLLTIIEMQKGDCALYASSFKGFIENCSTPNTYICMQRTVTRLHCVGDTYPSNDRCCHECRPGNGMVSRCSRSQNTVCRPCGPGFYNDVVSSKPCKPCTWCNLRSGSERKQLCTATQDTVCRCRAGTQPLDSYKPGVDCAPCPPGHFSPGDNQACKPWTNCTLAGKHTLQPASNSSDAICEDRDPPATQPQETQGPPARPITVQPTEAWPRTSQGPSTRPVEVPGGRAVAAILGLGLVLGLLGPLAILLALYLLRRDQRLPPDAHKPPGGGSFRTPIQEEQADAHSTLAKI

SEQ ID NO: 6474 - protein, 558 aa, Artificial Sequence
  Synthetic Polypeptide
MALPVTALLLPLALLLHAARPLFNQEVQIPLTESYCGPCPKNWICYKNNCYQFFDESKNWYESQASCMSQNASLLKVYSKEDQDLLKLVKSAHWMGLVHIPTNGSWQWEDGSILSPNLLTIIEMQKGDCALYASSFKGYIENCSTPNTYICMQRTVSGGGGSGGGGSGGGGDLFNQEVQIPLTESYCGPCPKNWICYKNNCYQFFDESKNWYESQASCMSQNASLLKVYSKEDQDLLKLVKSAHWMGLVHIPTNGSWQWEDGSILSPNLLTIIEMQKGDCALYASSFKGYIENCSTPNTYICMQRTVTRLHCVGDTYPSNDRCCHECRPGNGMVSRCSRSQNTVCRPCGPGFYNDVVSSKPCKPCTWCNLRSGSERKQLCTATQDTVCRCRAGTQPLDSYKPGVDCAPCPPGHFSPGDNQACKPWTNCTLAGKHTLQPASNSSDAICEDRDPPATQPQETQGPPARPITVQPTEAWPRTSQGPSTRPVEVPGGRAVAAILGLGLVLGLLGPLAILLALYLLRRDQRLPPDAHKPPGGGSFRTPIQEEQADAHSTLAKI

SEQ ID NO: 6475 - protein, 1035 aa, Artificial Sequence
  Synthetic Polypeptide
MALPVTALLLPLALLLHAARPDIQMTQSPSSLSASVGDRVTITCKASDHINNWLAWYQQKPGQAPKLLIYGATTLETGVPSRFSGSGSGTDYTLTISSLQPEDFATYYCQQSWNTPWTFGQGTKLEIKRLELHCVGDTYPSNDRCCHECRPGNGMVSRCSRSQNTVCRPCGPGFYNDVVSSKPCKPCTWCNLRSGSERKQLCTATQDTVCRCRAGTQPLDSYKPGVDCAPCPPGHFSPGDNQACKPWTNCTLAGKHTLQPASNSSDAICEDRDPPATQPQETQGPPARPITVQPTEAWPRTSQGPSTRPVEVPGGRAVAAILGLGLVLGLLGPLAILLALYLLRRDQRLPPDAHKPPGGGSFRTPIQEEQADAHSTLAKIRAKRSGSGATNFSLLKQAGDVEENPGPTSMDWIWRILFLVGAATGAHSFEQVQLQQPGAELVKPGASVKMSCKASGYAFSSYWINWMKQKPGQGLEWIGQIYPGDGDTNYNGKFKGRATLTADTSSSTAYMQLSSLTSEDSAVYFCARSITTVVGCAMDYWGQGTSVTVSSTRLHCVGDTYPSNDRCCHECRPGNGMVSRCSRSQNTVCRPCGPGFYNDVVSSKPCKPCTWCNLRSGSERKQLCTATQDTVCRCRAGTQPLDSYKPGVDCAPCPPGHFSPGDNQACKPWTNCTLAGKHTLQPASNSSDAICEDRDPPATQPQETQGPPARPITVQPTEAWPRTSQGPSTRPVEVPGGRAVAAILGLGLVLGLLGPLAILLALYLLRRDQRLPPDAHKPPGGGSFRTPIQEEQADAHSTLAKIRAKRSGSGVKQTLNFDLLKLAGDVESNPGPSRGHMTEYKPTVRLATRDDVPRAVRTLAAAFADYPATRHTVDPDRHIERVTELQELFLTRVGLDIGKVWVADDGAAVAVWTTPESVEAGAVFAEIGPRMAELSGSRLAAQQQMEGLLAPHRPKEPAWFLATVGVSPDHQGKGLGSAVVLPGVEAAERAGVPAFLETSAPRNLPFYERLGFTVTADVEVPEGPRTWCMTRKPGA

SEQ ID NO: 6476 - protein, 1089 aa, Artificial Sequence
  Synthetic Polypeptide
MALPVTALLLPLALLLHAARPACEVQLLESGGGLIQPGGSLRLSCAASGFTFSSHAMTWVRQAPGKGLEWVSAISGSGDYTHYADSVKGRFTISRDNSKNTVYLQMNSLRAEDSAVYYCAKDEDGGSLLGHRGQGTLVTVSSGTGGGGSGGGGSGGGGSEFGSLELHCVGDTYPSNDRCCHECRPGNGMVSRCSRSQNTVCRPCGPGFYNDVVSSKPCKPCTWCNLRSGSERKQLCTATQDTVCRCRAGTQPLDSYKPGVDCAPCPPGHFSPGDNQACKPWTNCTLAGKHTLQPASNSSDAICEDRDPPATQPQETQGPPARPITVQPTEAWPRTSQGPSTRPVEVPGGRAVAAILGLGLVLGLLGPLAILLALYLLRRDQRLPPDAHKPPGGGSFRTPIQEEQADAHSTLAKIRAKRSGSGATNFSLLKQAGDVEENPGPTSATMDWIWRILFLVGAATGAHSGPEVQLVESGGGLVQAGGSLRLSCAASGRTFSMGWFRQAPGKEREFVAAITYSGGSPYYADSVKGRFTISRDNAKNTVYLQMNSLKPEDTAVYYCAANPTYGSDWNAENWGQGTQVTVSSGSGGGGSGGGGSGGGGSFEGSTRLHCVGDTYPSNDRCCHECRPGNGMVSRCSRSQNTVCRPCGPGFYNDVVSSKPCKPCTWCNLRSGSERKQLCTATQDTVCRCRAGTQPLDSYKPGVDCAPCPPGHFSPGDNQACKPWTNCTLAGKHTLQPASNSSDAICEDRDPPATQPQETQGPPARPITVQPTEAWPRTSQGPSTRPVEVPGGRAVAAILGLGLVLGLLGPLAILLALYLLRRDQRLPPDAHKPPGGGSFRTPIQEEQADAHSTLAKIRAKRSGSGVKQTLNFDLLKLAGDVESNPGPSRGHMTEYKPTVRLATRDDVPRAVRTLAAAFADYPATRHTVDPDRHIERVTELQELFLTRVGLDIGKVWVADDGAAVAVWTTPESVEAGAVFAEIGPRMAELSGSRLAAQQQMEGLLAPHRPKEPAWFLATVGVSPDHQGKGLGSAVVLPGVEAAERAGVPAFLETSAPRNLPFYERLGFTVTADVEVPEGPRTWCMTRKPGA

SEQ ID NO: 6477 - protein, 1240 aa, Artificial Sequence
  Synthetic Polypeptide
MALPVTALLLPLALLLHAARPDIQMTQSPSSLSASVGDRVTITCKASDHINNWLAWYQQKPGQAPKLLIYGATTLETGVPSRFSGSGSGTDYTLTISSLQPEDFATYYCQQSWNTPWTFGQGTKLEIKRLEGQPKANPTVTLFPPSSEELQANKATLVCLISDFYPGAVTVAWKADGSPVKAGVETTKPSKQSNNKYAASSYLSLTPEQWKSHRSYSCQVTHEGSTVEKTVAPTECSGSLHCVGDTYPSNDRCCHECRPGNGMVSRCSRSQNTVCRPCGPGFYNDVVSSKPCKPCTWCNLRSGSERKQLCTATQDTVCRCRAGTQPLDSYKPGVDCAPCPPGHFSPGDNQACKPWTNCTLAGKHTLQPASNSSDAICEDRDPPATQPQETQGPPARPITVQPTEAWPRTSQGPSTRPVEVPGGRAVAAILGLGLVLGLLGPLAILLALYLLRRDQRLPPDAHKPPGGGSFRTPIQEEQADAHSTLAKIRAKRSGSGATNFSLLKQAGDVEENPGPTSMDWIWRILFLVGAATGAHSFEQVQLQQPGAELVKPGASVKMSCKASGYAFSSYWINWMKQKPGQGLEWIGQIYPGDGDTNYNGKFKGRATLTADTSSSTAYMQLSSLTSEDSAVYFCARSITTVVGCAMDYWGQGTSVTVSSTRASTKGPSVFPLAPSSKSTSGGTAALGCLVKDYFPEPVTVSWNSGALTSGVHTFPAVLQSSGLYSLSSVVTVPSSSLGTQTYICNVNHKPSNTKVDKRVEPKSCGTLHCVGDTYPSNDRCCHECRPGNGMVSRCSRSQNTVCRPCGPGFYNDVVSSKPCKPCTWCNLRSGSERKQLCTATQDTVCRCRAGTQPLDSYKPGVDCAPCPPGHFSPGDNQACKPWTNCTLAGKHTLQPASNSSDAICEDRDPPATQPQETQGPPARPITVQPTEAWPRTSQGPSTRPVEVPGGRAVAAILGLGLVLGLLGPLAILLALYLLRRDQRLPPDAHKPPGGGSFRTPIQEEQADAHSTLAKIRAKRSGSGVKQTLNFDLLKLAGDVESNPGPSRGGIHTMATYEVLCEVARKLGTDDREVVLFLLNVFIPQPTLAQLIGALRALKEEGRLTFPLLAECLFRAGRRDLLRDLLHLDPRFLERHLAGTMSYFSPYQLTVLHVDGELCARDIRSLIFLSKDTIGSRSTPQTFLHWVYCMENLDLLGPTDVDALMSMLRSLSRVDLQRQVQTLMGLHLSGPSHSQHYRHTP

SEQ ID NO: 6478 - protein, 1293 aa, Artificial Sequence
  Synthetic Polypeptide
MALPVTALLLPLALLLHAARPDIQMTQSPSSLSASVGDRVTITCKASDHINNWLAWYQQKPGQAPKLLIYGATTLETGVPSRFSGSGSGTDYTLTISSLQPEDFATYYCQQSWNTPWTFGQGTKLEIKRLEGQPKANPTVTLFPPSSEELQANKATLVCLISDFYPGAVTVAWKADGSPVKAGVETTKPSKQSNNKYAASSYLSLTPEQWKSHRSYSCQVTHEGSTVEKTVAPTECSGSLHCVGDTYPSNDRCCHECRPGNGMVSRCSRSQNTVCRPCGPGFYNDVVSSKPCKPCTWCNLRSGSERKQLCTATQDTVCRCRAGTQPLDSYKPGVDCAPCPPGHFSPGDNQACKPWTNCTLAGKHTLQPASNSSDAICEDRDPPATQPQETQGPPARPITVQPTEAWPRTSQGPSTRPVEVPGGRAVAAILGLGLVLGLLGPLAILLALYLLRRDQRLPPDAHKPPGGGSFRTPIQEEQADAHSTLAKIRAKRSGSGATNFSLLKQAGDVEENPGPTSMDWIWRILFLVGAATGAHSFEQVQLQQPGAELVKPGASVKMSCKASGYAFSSYWINWMKQKPGQGLEWIGQIYPGDGDTNYNGKFKGRATLTADTSSSTAYMQLSSLTSEDSAVYFCARSITTVVGCAMDYWGQGTSVTVSSTRASTKGPSVFPLAPSSKSTSGGTAALGCLVKDYFPEPVTVSWNSGALTSGVHTFPAVLQSSGLYSLSSVVTVPSSSLGTQTYICNVNHKPSNTKVDKRVEPKSCGTLHCVGDTYPSNDRCCHECRPGNGMVSRCSRSQNTVCRPCGPGFYNDVVSSKPCKPCTWCNLRSGSERKQLCTATQDTVCRCRAGTQPLDSYKPGVDCAPCPPGHFSPGDNQACKPWTNCTLAGKHTLQPASNSSDAICEDRDPPATQPQETQGPPARPITVQPTEAWPRTSQGPSTRPVEVPGGRAVAAILGLGLVLGLLGPLAILLALYLLRRDQRLPPDAHKPPGGGSFRTPIQEEQADAHSTLAKIRAKRSGSGVKQTLNFDLLKLAGDVESNPGPSRGGIHTMSDSKEVPSLPFLRHLLEELDSHEDSLLLFLCHDAAPGCTTVTQALCSLSQQRKLTLAALVEMLYVLQRMDLLKSRFGLSKEGAEQLLGTSFLTRYRKLMVCVGEELDSSELRALRLFACNLNPSLSTALSESSRFVELVLALENVGLVSPSSVSVLADMLRTLRRLDLCQQLVEYEQQEQARYRYCYAASPSLPVRTLRRGHGASEHEQLCMPVQESSDSPELLRTPVQESSSDSPEQTT

SEQ ID NO: 6479 - protein, 1248 aa, Artificial Sequence
  Synthetic Polypeptide
MALPVTALLLPLALLLHAARPDIQMTQSPSSLSASVGDRVTITCKASDHINNWLAWYQQKPGQAPKLLIYGATTLETGVPSRFSGSGSGTDYTLTISSLQPEDFATYYCQQSWNTPWTFGQGTKLEIKRLEGQPKANPTVTLFPPSSEELQANKATLVCLISDFYPGAVTVAWKADGSPVKAGVETTKPSKQSNNKYAASSYLSLTPEQWKSHRSYSCQVTHEGSTVEKTVAPTECSGSLHCVGDTYPSNDRCCHECRPGNGMVSRCSRSQNTVCRPCGPGFYNDVVSSKPCKPCTWCNLRSGSERKQLCTATQDTVCRCRAGTQPLDSYKPGVDCAPCPPGHFSPGDNQACKPWTNCTLAGKHTLQPASNSSDAICEDRDPPATQPQETQGPPARPITVQPTEAWPRTSQGPSTRPVEVPGGRAVAAILGLGLVLGLLGPLAILLALYLLRRDQRLPPDAHKPPGGGSFRTPIQEEQADAHSTLAKIRAKRSGSGATNFSLLKQAGDVEENPGPTSMDWIWRILFLVGAATGAHSFEQVQLQQPGAELVKPGASVKMSCKASGYAFSSYWINWMKQKPGQGLEWIGQIYPGDGDTNYNGKFKGRATLTADTSSSTAYMQLSSLTSEDSAVYFCARSITTVVGCAMDYWGQGTSVTVSSTRASTKGPSVFPLAPSSKSTSGGTAALGCLVKDYFPEPVTVSWNSGALTSGVHTFPAVLQSSGLYSLSSVVTVPSSSLGTQTYICNVNHKPSNTKVDKRVEPKSCGTLHCVGDTYPSNDRCCHECRPGNGMVSRCSRSQNTVCRPCGPGFYNDVVSSKPCKPCTWCNLRSGSERKQLCTATQDTVCRCRAGTQPLDSYKPGVDCAPCPPGHFSPGDNQACKPWTNCTLAGKHTLQPASNSSDAICEDRDPPATQPQETQGPPARPITVQPTEAWPRTSQGPSTRPVEVPGGRAVAAILGLGLVLGLLGPLAILLALYLLRRDQRLPPDAHKPPGGGSFRTPIQEEQADAHSTLAKIRAKRSGSGVKQTLNFDLLKLAGDVESNPGPSRGHMTEYKPTVRLATRDDVPRAVRTLAAAFADYPATRHTVDPDRHIERVTELQELFLTRVGLDIGKVWVADDGAAVAVWTTPESVEAGAVFAEIGPRMAELSGSRLAAQQQMEGLLAPHRPKEPAWFLATVGVSPDHQGKGLGSAVVLPGVEAAERAGVPAFLETSAPRNLPFYERLGFTVTADVEVPEGPRTWCMTRKPGA

SEQ ID NO: 6480 - protein, 1385 aa, Artificial Sequence
  Synthetic Polypeptide
MALPVTALLLPLALLLHAARPEVQLVESGGGLVQAGGSLRLSCAASGRTFSMGWFRQAPGKEREFVAAITYSGGSPYYADSVKGRFTISRDNAKNTVYLQMNSLKPEDTAVYYCAANPTYGSDWNAENWGQGTQVTVSSGTGGGGSGGGGSGGGGSEFDIQMTQSPSSLSASVGDRVTITCKASDHINNWLAWYQQKPGQAPKLLIYGATTLETGVPSRFSGSGSGTDYTLTISSLQPEDFATYYCQQSWNTPWTFGQGTKLEIKRLEGQPKANPTVTLFPPSSEELQANKATLVCLISDFYPGAVTVAWKADGSPVKAGVETTKPSKQSNNKYAASSYLSLTPEQWKSHRSYSCQVTHEGSTVEKTVAPTECSGSLHCVGDTYPSNDRCCHECRPGNGMVSRCSRSQNTVCRPCGPGFYNDVVSSKPCKPCTWCNLRSGSERKQLCTATQDTVCRCRAGTQPLDSYKPGVDCAPCPPGHFSPGDNQACKPWTNCTLAGKHTLQPASNSSDAICEDRDPPATQPQETQGPPARPITVQPTEAWPRTSQGPSTRPVEVPGGRAVAAILGLGLVLGLLGPLAILLALYLLRRDQRLPPDAHKPPGGGSFRTPIQEEQADAHSTLAKIRAKRSGSGATNFSLLKQAGDVEENPGPTSMDWIWRILFLVGAATGAHSFEQVQLQQPGAELVKPGASVKMSCKASGYAFSSYWINWMKQKPGQGLEWIGQIYPGDGDTNYNGKFKGRATLTADTSSSTAYMQLSSLTSEDSAVYFCARSITTVVGCAMDYWGQGTSVTVSSTRASTKGPSVFPLAPSSKSTSGGTAALGCLVKDYFPEPVTVSWNSGALTSGVHTFPAVLQSSGLYSLSSVVTVPSSSLGTQTYICNVNHKPSNTKVDKRVEPKSCGTLHCVGDTYPSNDRCCHECRPGNGMVSRCSRSQNTVCRPCGPGFYNDVVSSKPCKPCTWCNLRSGSERKQLCTATQDTVCRCRAGTQPLDSYKPGVDCAPCPPGHFSPGDNQACKPWTNCTLAGKHTLQPASNSSDAICEDRDPPATQPQETQGPPARPITVQPTEAWPRTSQGPSTRPVEVPGGRAVAAILGLGLVLGLLGPLAILLALYLLRRDQRLPPDAHKPPGGGSFRTPIQEEQADAHSTLAKIRAKRSGSGVKQTLNFDLLKLAGDVESNPGPSRGHMTEYKPTVRLATRDDVPRAVRTLAAAFADYPATRHTVDPDRHIERVTELQELFLTRVGLDIGKVWVADDGAAVAVWTTPESVEAGAVFAEIGPRMAELSGSRLAAQQQMEGLLAPHRPKEPAWFLATVGVSPDHQGKGLGSAVVLPGVEAAERAGVPAFLETSAPRNLPFYERLGFTVTADVEVPEGPRTWCMTRKPGA

SEQ ID NO: 6481 - protein, 1522 aa, Artificial Sequence
  Synthetic Polypeptide
MALPVTALLLPLALLLHAARPEVQLVESGGGLVQAGGSLRLSCAASGRTFSMGWFRQAPGKEREFVAAITYSGGSPYYADSVKGRFTISRDNAKNTVYLQMNSLKPEDTAVYYCAANPTYGSDWNAENWGQGTQVTVSSGTGGGGSGGGGSGGGGSEFDIQMTQSPSSLSASVGDRVTITCKASDHINNWLAWYQQKPGQAPKLLIYGATTLETGVPSRFSGSGSGTDYTLTISSLQPEDFATYYCQQSWNTPWTFGQGTKLEIKRLEGQPKANPTVTLFPPSSEELQANKATLVCLISDFYPGAVTVAWKADGSPVKAGVETTKPSKQSNNKYAASSYLSLTPEQWKSHRSYSCQVTHEGSTVEKTVAPTECSGSLHCVGDTYPSNDRCCHECRPGNGMVSRCSRSQNTVCRPCGPGFYNDVVSSKPCKPCTWCNLRSGSERKQLCTATQDTVCRCRAGTQPLDSYKPGVDCAPCPPGHFSPGDNQACKPWTNCTLAGKHTLQPASNSSDAICEDRDPPATQPQETQGPPARPITVQPTEAWPRTSQGPSTRPVEVPGGRAVAAILGLGLVLGLLGPLAILLALYLLRRDQRLPPDAHKPPGGGSFRTPIQEEQADAHSTLAKIRAKRSGSGATNFSLLKQAGDVEENPGPTSMDWIWRILFLVGAATGAHSGPEVQLVESGGGLVQAGGSLRLSCAASGRTFTMGWFRQAPGKEREFVAAISLSPTLAYYADSVKGRFTISRDNAKNTVVLQMNSLKPEDTALYYCAADRKSVMSIRPDYWGQGTQVTVSSGSGGGGSGGGGSGGGGSFEQVQLQQPGAELVKPGASVKMSCKASGYAFSSYWINWMKQKPGQGLEWIGQIYPGDGDTNYNGKFKGRATLTADTSSSTAYMQLSSLTSEDSAVYFCARSITTVVGCAMDYWGQGTSVTVSSTRASTKGPSVFPLAPSSKSTSGGTAALGCLVKDYFPEPVTVSWNSGALTSGVHTFPAVLQSSGLYSLSSVVTVPSSSLGTQTYICNVNHKPSNTKVDKRVEPKSCGTLHCVGDTYPSNDRCCHECRPGNGMVSRCSRSQNTVCRPCGPGFYNDVVSSKPCKPCTWCNLRSGSERKQLCTATQDTVCRCRAGTQPLDSYKPGVDCAPCPPGHFSPGDNQACKPWTNCTLAGKHTLQPASNSSDAICEDRDPPATQPQETQGPPARPITVQPTEAWPRTSQGPSTRPVEVPGGRAVAAILGLGLVLGLLGPLAILLALYLLRRDQRLPPDAHKPPGGGSFRTPIQEEQADAHSTLAKIRAKRSGSGVKQTLNFDLLKLAGDVESNPGPSRGHMTEYKPTVRLATRDDVPRAVRTLAAAFADYPATRHTVDPDRHIERVTELQELFLTRVGLDIGKVWVADDGAAVAVWTTPESVEAGAVFAEIGPRMAELSGSRLAAQQQMEGLLAPHRPKEPAWFLATVGVSPDHQGKGLGSAVVLPGVEAAERAGVPAFLETSAPRNLPFYERLGFTVTADVEVPEGPRTWCMTRKPGA

SEQ ID NO: 6482 - protein, 1255 aa, Artificial Sequence
  Synthetic Polypeptide
MALPVTALLLPLALLLHAARPEVQLVESGGGLVQAGGSLRLSCAASGRTFSMGWFRQAPGKEREFVAAITYSGGSPYYADSVKGRFTISRDNAKNTVYLQMNSLKPEDTAVYYCAANPTYGSDWNAENWGQGTQVTVSSLEGQPKANPTVTLFPPSSEELQANKATLVCLISDFYPGAVTVAWKADGSPVKAGVETTKPSKQSNNKYAASSYLSLTPEQWKSHRSYSCQVTHEGSTVEKTVAPTECSGSLHCVGDTYPSNDRCCHECRPGNGMVSRCSRSQNTVCRPCGPGFYNDVVSSKPCKPCTWCNLRSGSERKQLCTATQDTVCRCRAGTQPLDSYKPGVDCAPCPPGHFSPGDNQACKPWTNCTLAGKHTLQPASNSSDAICEDRDPPATQPQETQGPPARPITVQPTEAWPRTSQGPSTRPVEVPGGRAVAAILGLGLVLGLLGPLAILLALYLLRRDQRLPPDAHKPPGGGSFRTPIQEEQADAHSTLAKIRAKRSGSGATNFSLLKQAGDVEENPGPTSMDWIWRILFLVGAATGAHSGPEVQLVESGGGLVQAGGSLRLSCAASGRTFTMGWFRQAPGKEREFVAAISLSPTLAYYADSVKGRFTISRDNAKNTVVLQMNSLKPEDTALYYCAADRKSVMSIRPDYWGQGTQVTVSSTRASTKGPSVFPLAPSSKSTSGGTAALGCLVKDYFPEPVTVSWNSGALTSGVHTFPAVLQSSGLYSLSSVVTVPSSSLGTQTYICNVNHKPSNTKVDKRVEPKSCGTLHCVGDTYPSNDRCCHECRPGNGMVSRCSRSQNTVCRPCGPGFYNDVVSSKPCKPCTWCNLRSGSERKQLCTATQDTVCRCRAGTQPLDSYKPGVDCAPCPPGHFSPGDNQACKPWTNCTLAGKHTLQPASNSSDAICEDRDPPATQPQETQGPPARPITVQPTEAWPRTSQGPSTRPVEVPGGRAVAAILGLGLVLGLLGPLAILLALYLLRRDQRLPPDAHKPPGGGSFRTPIQEEQADAHSTLAKIRAKRSGSGVKQTLNFDLLKLAGDVESNPGPSRGHMTEYKPTVRLATRDDVPRAVRTLAAAFADYPATRHTVDPDRHIERVTELQELFLTRVGLDIGKVWVADDGAAVAVWTTPESVEAGAVFAEIGPRMAELSGSRLAAQQQMEGLLAPHRPKEPAWFLATVGVSPDHQGKGLGSAVVLPGVEAAERAGVPAFLETSAPRNLPFYERLGFTVTADVEVPEGPRTWCMTRKPGA

SEQ ID NO: 6483 - protein, 1263 aa, Artificial Sequence
  Synthetic Polypeptide
MALPVTALLLPLALLLHAARPDIQMTQSPSSLSASVGDRVTITCKASDHINNWLAWYQQKPGQAPKLLIYGATTLETGVPSRFSGSGSGTDYTLTISSLQPEDFATYYCQQSWNTPWTFGQGTKLEIKRLEDLKNVFPPEVAVFEPSEAEISHTQKATLVCLATGFYPDHVELSWWVNGKEVHSGVSTDPQPLKEQPALNDSRYCLSSRLRVSATFWQNPRNHFRCQVQFYGLSENDEWTQDRAKPVTQIVSAEAWGRADCGSLHCVGDTYPSNDRCCHECRPGNGMVSRCSRSQNTVCRPCGPGFYNDVVSSKPCKPCTWCNLRSGSERKQLCTATQDTVCRCRAGTQPLDSYKPGVDCAPCPPGHFSPGDNQACKPWTNCTLAGKHTLQPASNSSDAICEDRDPPATQPQETQGPPARPITVQPTEAWPRTSQGPSTRPVEVPGGRAVAAILGLGLVLGLLGPLAILLALYLLRRDQRLPPDAHKPPGGGSFRTPIQEEQADAHSTLAKIRAKRSGSGATNFSLLKQAGDVEENPGPTSMDWIWRILFLVGAATGAHSFEQVQLQQPGAELVKPGASVKMSCKASGYAFSSYWINWMKQKPGQGLEWIGQIYPGDGDTNYNGKFKGRATLTADTSSSTAYMQLSSLTSEDSAVYFCARSITTVVGCAMDYWGQGTSVTVSSTRIQNPDPAVYQLRDSKSSDKSVCLFTDFDSQTNVSQSKDSDVYITDKTVLDMRSMDFKSNSAVAWSNKSDFACANAFNNSIIPEDTFFPSPESSCGTLHCVGDTYPSNDRCCHECRPGNGMVSRCSRSQNTVCRPCGPGFYNDVVSSKPCKPCTWCNLRSGSERKQLCTATQDTVCRCRAGTQPLDSYKPGVDCAPCPPGHFSPGDNQACKPWTNCTLAGKHTLQPASNSSDAICEDRDPPATQPQETQGPPARPITVQPTEAWPRTSQGPSTRPVEVPGGRAVAAILGLGLVLGLLGPLAILLALYLLRRDQRLPPDAHKPPGGGSFRTPIQEEQADAHSTLAKIRAKRSGSGVKQTLNFDLLKLAGDVESNPGPSRGHMTEYKPTVRLATRDDVPRAVRTLAAAFADYPATRHTVDPDRHIERVTELQELFLTRVGLDIGKVWVADDGAAVAVWTTPESVEAGAVFAEIGPRMAELSGSRLAAQQQMEGLLAPHRPKEPAWFLATVGVSPDHQGKGLGSAVVLPGVEAAERAGVPAFLETSAPRNLPFYERLGFTVTADVEVPEGPRTWCMTRKPGA

SEQ ID NO: 6484 - protein, 1400 aa, Artificial Sequence
  Synthetic Polypeptide
MALPVTALLLPLALLLHAARPEVQLVESGGGLVQAGGSLRLSCAASGRTFSMGWFRQAPGKEREFVAAITYSGGSPYYADSVKGRFTISRDNAKNTVYLQMNSLKPEDTAVYYCAANPTYGSDWNAENWGQGTQVTVSSGTGGGGSGGGGSGGGGSEFDIQMTQSPSSLSASVGDRVTITCKASDHINNWLAWYQQKPGQAPKLLIYGATTLETGVPSRFSGSGSGTDYTLTISSLQPEDFATYYCQQSWNTPWTFGQGTKLEIKRLEDLKNVFPPEVAVFEPSEAEISHTQKATLVCLATGFYPDHVELSWWVNGKEVHSGVSTDPQPLKEQPALNDSRYCLSSRLRVSATFWQNPRNHFRCQVQFYGLSENDEWTQDRAKPVTQIVSAEAWGRADCGSLHCVGDTYPSNDRCCHECRPGNGMVSRCSRSQNTVCRPCGPGFYNDVVSSKPCKPCTWCNLRSGSERKQLCTATQDTVCRCRAGTQPLDSYKPGVDCAPCPPGHFSPGDNQACKPWTNCTLAGKHTLQPASNSSDAICEDRDPPATQPQETQGPPARPITVQPTEAWPRTSQGPSTRPVEVPGGRAVAAILGLGLVLGLLGPLAILLALYLLRRDQRLPPDAHKPPGGGSFRTPIQEEQADAHSTLAKIRAKRSGSGATNFSLLKQAGDVEENPGPTSMDWIWRILFLVGAATGAHSFEQVQLQQPGAELVKPGASVKMSCKASGYAFSSYWINWMKQKPGQGLEWIGQIYPGDGDTNYNGKFKGRATLTADTSSSTAYMQLSSLTSEDSAVYFCARSITTVVGCAMDYWGQGTSVTVSSTRIQNPDPAVYQLRDSKSSDKSVCLFTDFDSQTNVSQSKDSDVYITDKTVLDMRSMDFKSNSAVAWSNKSDFACANAFNNSIIPEDTFFPSPESSCGTLHCVGDTYPSNDRCCHECRPGNGMVSRCSRSQNTVCRPCGPGFYNDVVSSKPCKPCTWCNLRSGSERKQLCTATQDTVCRCRAGTQPLDSYKPGVDCAPCPPGHFSPGDNQACKPWTNCTLAGKHTLQPASNSSDAICEDRDPPATQPQETQGPPARPITVQPTEAWPRTSQGPSTRPVEVPGGRAVAAILGLGLVLGLLGPLAILLALYLLRRDQRLPPDAHKPPGGGSFRTPIQEEQADAHSTLAKIRAKRSGSGVKQTLNFDLLKLAGDVESNPGPSRGHMTEYKPTVRLATRDDVPRAVRTLAAAFADYPATRHTVDPDRHIERVTELQELFLTRVGLDIGKVWVADDGAAVAVWTTPESVEAGAVFAEIGPRMAELSGSRLAAQQQMEGLLAPHRPKEPAWFLATVGVSPDHQGKGLGSAVVLPGVEAAERAGVPAFLETSAPRNLPFYERLGFTVTADVEVPEGPRTWCMTRKPGA

SEQ ID NO: 6485 - protein, 1537 aa, Artificial Sequence
  Synthetic Polypeptide
MALPVTALLLPLALLLHAARPEVQLVESGGGLVQAGGSLRLSCAASGRTFSMGWFRQAPGKEREFVAAITYSGGSPYYADSVKGRFTISRDNAKNTVYLQMNSLKPEDTAVYYCAANPTYGSDWNAENWGQGTQVTVSSGTGGGGSGGGGSGGGGSEFDIQMTQSPSSLSASVGDRVTITCKASDHINNWLAWYQQKPGQAPKLLIYGATTLETGVPSRFSGSGSGTDYTLTISSLQPEDFATYYCQQSWNTPWTFGQGTKLEIKRLEDLKNVFPPEVAVFEPSEAEISHTQKATLVCLATGFYPDHVELSWWVNGKEVHSGVSTDPQPLKEQPALNDSRYCLSSRLRVSATFWQNPRNHFRCQVQFYGLSENDEWTQDRAKPVTQIVSAEAWGRADCGSLHCVGDTYPSNDRCCHECRPGNGMVSRCSRSQNTVCRPCGPGFYNDVVSSKPCKPCTWCNLRSGSERKQLCTATQDTVCRCRAGTQPLDSYKPGVDCAPCPPGHFSPGDNQACKPWTNCTLAGKHTLQPASNSSDAICEDRDPPATQPQETQGPPARPITVQPTEAWPRTSQGPSTRPVEVPGGRAVAAILGLGLVLGLLGPLAILLALYLLRRDQRLPPDAHKPPGGGSFRTPIQEEQADAHSTLAKIRAKRSGSGATNFSLLKQAGDVEENPGPTSMDWIWRILFLVGAATGAHSGPEVQLVESGGGLVQAGGSLRLSCAASGRTFTMGWFRQAPGKEREFVAAISLSPTLAYYADSVKGRFTISRDNAKNTVVLQMNSLKPEDTALYYCAADRKSVMSIRPDYWGQGTQVTVSSGSGGGGSGGGGSGGGGSFEQVQLQQPGAELVKPGASVKMSCKASGYAFSSYWINWMKQKPGQGLEWIGQIYPGDGDTNYNGKFKGRATLTADTSSSTAYMQLSSLTSEDSAVYFCARSITTVVGCAMDYWGQGTSVTVSSTRIQNPDPAVYQLRDSKSSDKSVCLFTDFDSQTNVSQSKDSDVYITDKTVLDMRSMDFKSNSAVAWSNKSDFACANAFNNSIIPEDTFFPSPESSCGTLHCVGDTYPSNDRCCHECRPGNGMVSRCSRSQNTVCRPCGPGFYNDVVSSKPCKPCTWCNLRSGSERKQLCTATQDTVCRCRAGTQPLDSYKPGVDCAPCPPGHFSPGDNQACKPWTNCTLAGKHTLQPASNSSDAICEDRDPPATQPQETQGPPARPITVQPTEAWPRTSQGPSTRPVEVPGGRAVAAILGLGLVLGLLGPLAILLALYLLRRDQRLPPDAHKPPGGGSFRTPIQEEQADAHSTLAKIRAKRSGSGVKQTLNFDLLKLAGDVESNPGPSRGHMTEYKPTVRLATRDDVPRAVRTLAAAFADYPATRHTVDPDRHIERVTELQELFLTRVGLDIGKVWVADDGAAVAVWTTPESVEAGAVFAEIGPRMAELSGSRLAAQQQMEGLLAPHRPKEPAWFLATVGVSPDHQGKGLGSAVVLPGVEAAERAGVPAFLETSAPRNLPFYERLGFTVTADVEVPEGPRTWCMTRKPGA

SEQ ID NO: 6486 - protein, 1270 aa, Artificial Sequence
  Synthetic Polypeptide
MALPVTALLLPLALLLHAARPEVQLVESGGGLVQAGGSLRLSCAASGRTFSMGWFRQAPGKEREFVAAITYSGGSPYYADSVKGRFTISRDNAKNTVYLQMNSLKPEDTAVYYCAANPTYGSDWNAENWGQGTQVTVSSLEDLKNVFPPEVAVFEPSEAEISHTQKATLVCLATGFYPDHVELSWWVNGKEVHSGVSTDPQPLKEQPALNDSRYCLSSRLRVSATFWQNPRNHFRCQVQFYGLSENDEWTQDRAKPVTQIVSAEAWGRADCGSLHCVGDTYPSNDRCCHECRPGNGMVSRCSRSQNTVCRPCGPGFYNDVVSSKPCKPCTWCNLRSGSERKQLCTATQDTVCRCRAGTQPLDSYKPGVDCAPCPPGHFSPGDNQACKPWTNCTLAGKHTLQPASNSSDAICEDRDPPATQPQETQGPPARPITVQPTEAWPRTSQGPSTRPVEVPGGRAVAAILGLGLVLGLLGPLAILLALYLLRRDQRLPPDAHKPPGGGSFRTPIQEEQADAHSTLAKIRAKRSGSGATNFSLLKQAGDVEENPGPTSMDWIWRILFLVGAATGAHSGPEVQLVESGGGLVQAGGSLRLSCAASGRTFTMGWFRQAPGKEREFVAAISLSPTLAYYADSVKGRFTISRDNAKNTVVLQMNSLKPEDTALYYCAADRKSVMSIRPDYWGQGTQVTVSSTRIQNPDPAVYQLRDSKSSDKSVCLFTDFDSQTNVSQSKDSDVYITDKTVLDMRSMDFKSNSAVAWSNKSDFACANAFNNSIIPEDTFFPSPESSCGTLHCVGDTYPSNDRCCHECRPGNGMVSRCSRSQNTVCRPCGPGFYNDVVSSKPCKPCTWCNLRSGSERKQLCTATQDTVCRCRAGTQPLDSYKPGVDCAPCPPGHFSPGDNQACKPWTNCTLAGKHTLQPASNSSDAICEDRDPPATQPQETQGPPARPITVQPTEAWPRTSQGPSTRPVEVPGGRAVAAILGLGLVLGLLGPLAILLALYLLRRDQRLPPDAHKPPGGGSFRTPIQEEQADAHSTLAKIRAKRSGSGVKQTLNFDLLKLAGDVESNPGPSRGHMTEYKPTVRLATRDDVPRAVRTLAAAFADYPATRHTVDPDRHIERVTELQELFLTRVGLDIGKVWVADDGAAVAVWTTPESVEAGAVFAEIGPRMAELSGSRLAAQQQMEGLLAPHRPKEPAWFLATVGVSPDHQGKGLGSAVVLPGVEAAERAGVPAFLETSAPRNLPFYERLGFTVTADVEVPEGPRTWCMTRKPGA

SEQ ID NO: 6487 - protein, 644 aa, Artificial Sequence
  Synthetic Polypeptide
MALPVTALLLPLALLLHAARPACEVQLLESGGGLIQPGGSLRLSCAASGFTFSSHAMTWVRQAPGKGLEWVSAISGSGDYTHYADSVKGRFTISRDNSKNTVYLQMNSLRAEDSAVYYCAKDEDGGSLLGHRGQGTLVTVSSGTGGGGSGGGGSGGGGSEFGSLELHCVGDTYPSNDRCCHECRPGNGMVSRCSRSQNTVCRPCGPGFYNDVVSSKPCKPCTWCNLRSGSERKQLCTATQDTVCRCRAGTQPLDSYKPGVDCAPCPPGHFSPGDNQACKPWTNCTLAGKHTLQPASNSSDAICEDRDPPATQPQETQGPPARPITVQPTEAWPRTSQGPSTRPVEVPGGRAVAAILGLGLVLGLLGPLAILLALYLLRRDQRLPPDAHKPPGGGSFRTPIQEEQADAHSTLAKIRAKRSGSGATNFSLLKQAGDVEENPGPTRGHMTEYKPTVRLATRDDVPRAVRTLAAAFADYPATRHTVDPDRHIERVTELQELFLTRVGLDIGKVWVADDGAAVAVWTTPESVEAGAVFAEIGPRMAELSGSRLAAQQQMEGLLAPHRPKEPAWFLATVGVSPDHQGKGLGSAVVLPGVEAAERAGVPAFLETSAPRNLPFYERLGFTVTADVEVPEGPRTWCMTRKPGA

SEQ ID NO: 6488 - protein, 516 aa, Artificial Sequence; identical to SEQ ID NO: 6456
  Synthetic Polypeptide

SEQ ID NO: 6489 - protein, 516 aa, Artificial Sequence; identical to SEQ ID NO: 6457
  Synthetic Polypeptide

SEQ ID NO: 6490 - protein, 390 aa, Artificial Sequence; identical to SEQ ID NO: 6458
  Synthetic Polypeptide

SEQ ID NO: 6491 - protein, 390 aa, Artificial Sequence; identical to SEQ ID NO: 6459
  Synthetic Polypeptide

SEQ ID NO: 6492 - protein, 390 aa, Artificial Sequence; identical to SEQ ID NO: 6460
  Synthetic Polypeptide

SEQ ID NO: 6493 - protein, 392 aa, Artificial Sequence; identical to SEQ ID NO: 6461
  Synthetic Polypeptide

SEQ ID NO: 6494 - protein, 400 aa, Artificial Sequence; identical to SEQ ID NO: 6462
  Synthetic Polypeptide

SEQ ID NO: 6495 - protein, 396 aa, Artificial Sequence; identical to SEQ ID NO: 6463
  Synthetic Polypeptide

SEQ ID NO: 6496 - protein, 391 aa, Artificial Sequence; identical to SEQ ID NO: 6464
  Synthetic Polypeptide

SEQ ID NO: 6497 - protein, 396 aa, Artificial Sequence; identical to SEQ ID NO: 6465
  Synthetic Polypeptide

SEQ ID NO: 6498 - protein, 330 aa, Artificial Sequence; identical to SEQ ID NO: 6466
  Synthetic Polypeptide

SEQ ID NO: 6499 - protein, 361 aa, Artificial Sequence; identical to SEQ ID NO: 6467
  Synthetic Polypeptide

SEQ ID NO: 6500 - protein, 362 aa, Artificial Sequence; identical to SEQ ID NO: 6468
  Synthetic Polypeptide

SEQ ID NO: 6501 - protein, 579 aa, Artificial Sequence; identical to SEQ ID NO: 6469
  Synthetic Polypeptide

SEQ ID NO: 6502 - protein, 459 aa, Artificial Sequence; identical to SEQ ID NO: 6470
  Synthetic Polypeptide

SEQ ID NO: 6503 - protein, 325 aa, Artificial Sequence; identical to SEQ ID NO: 6471
  Synthetic Polypeptide

SEQ ID NO: 6504 - protein, 300 aa, Artificial Sequence; identical to SEQ ID NO: 6472
  Synthetic Polypeptide

SEQ ID NO: 6505 - protein, 558 aa, Artificial Sequence; identical to SEQ ID NO: 6473
  Synthetic Polypeptide

SEQ ID NO: 6506 - protein, 558 aa, Artificial Sequence; identical to SEQ ID NO: 6474
  Synthetic Polypeptide

SEQ ID NO: 6507 - protein, 1121 aa, Artificial Sequence
  Synthetic Polypeptide
MALPVTALLLPLALLLHAARPDIQMTQSPSSLSASVGDRVTITCKASDHINNWLAWYQQKPGQAPKLLIYGATTLETGVPSRFSGSGSGTDYTLTISSLQPEDFATYYCQQSWNTPWTFGQGTKLEIKRLEGMRTEDLPKAVVFLEPQWYRVLEKDSVTLKCQGAYSPEDNSTQWFHNESLISSQASSYFIDAATVDDSGEYRCQTNLSTLSDPVQLEVHIGWLLLQAPRWVFKEEDPIHLRCHSWKNTALHKVTYLQNGKGRKYFHHNSDFYIPKATLKDSGSYFCRGLVGSKNVSSETVNITITQGLAVSTISSFFPPGYQVSFCLVMVLLFAVDTGLYFSVKTNIRSSTRDWKDHKFKWRKDPQDKRAKRSGSGATNFSLLKQAGDVEENPGPTSMDWIWRILFLVGAATGAHSFEQVQLQQPGAELVKPGASVKMSCKASGYAFSSYWINWMKQKPGQGLEWIGQIYPGDGDTNYNGKFKGRATLTADTSSSTAYMQLSSLTSEDSAVYFCARSITTVVGCAMDYWGQGTSVTVSSTRKGCQGSADHVVSISGVPLQLQPNSIQTKVDSIAWKKLLPSQNGFHHILKWENGSLPSNTSNDRFSFIVKNLSLLIKAAQQQDSGLYCLEVTSISGKVQTATFQVFVFDKVEKPRLQGQGKILDRGRCQVALSCLVSRDGNVSYAWYRGSKLIQTAGNLTYLDEEVDINGTHTYTCNVSNPVSWESHTLNLTQDCQNAHQEFRFWPFLVIIVILSALFLGTLACFCVWRRKRKEKQSETSPKEFLTIYEDVKDLKTRRNHEQEQTFPGGGSTIYSMIQSQSSAPTSQEPAYTLYSLIQPSRKSGSRKRNHSPSFNSTIYEVIGKSQPKAQNPARLSRKELENFDVYSRAKRSGSGVKQTLNFDLLKLAGDVESNPGPSRGHMTEYKPTVRLATRDDVPRAVRTLAAAFADYPATRHTVDPDRHIERVTELQELFLTRVGLDIGKVWVADDGAAVAVWTTPESVEAGAVFAEIGPRMAELSGSRLAAQQQMEGLLAPHRPKEPAWFLATVGVSPDHQGKGLGSAVVLPGVEAAERAGVPAFLETSAPRNLPFYERLGFTVTADVEVPEGPRTWCMTRKPGA

SEQ ID NO: 6508 - protein, 1175 aa, Artificial Sequence
  Synthetic Polypeptide
MALPVTALLLPLALLLHAARPACEVQLLESGGGLIQPGGSLRLSCAASGFTFSSHAMTWVRQAPGKGLEWVSAISGSGDYTHYADSVKGRFTISRDNSKNTVYLQMNSLRAEDSAVYYCAKDEDGGSLLGHRGQGTLVTVSSGTGGGGSGGGGSGGGGSEFGSLEGMRTEDLPKAVVFLEPQWYRVLEKDSVTLKCQGAYSPEDNSTQWFHNESLISSQASSYFIDAATVDDSGEYRCQTNLSTLSDPVQLEVHIGWLLLQAPRWVFKEEDPIHLRCHSWKNTALHKVTYLQNGKGRKYFHHNSDFYIPKATLKDSGSYFCRGLVGSKNVSSETVNITITQGLAVSTISSFFPPGYQVSFCLVMVLLFAVDTGLYFSVKTNIRSSTRDWKDHKFKWRKDPQDKRAKRSGSGATNFSLLKQAGDVEENPGPTSATMDWIWRILFLVGAATGAHSGPEVQLVESGGGLVQAGGSLRLSCAASGRTFSMGWFRQAPGKEREFVAAITYSGGSPYYADSVKGRFTISRDNAKNTVYLQMNSLKPEDTAVYYCAANPTYGSDWNAENWGQGTQVTVSSGSGGGGSGGGGSGGGGSFEGSTRKGCQGSADHVVSISGVPLQLQPNSIQTKVDSIAWKKLLPSQNGFHHILKWENGSLPSNTSNDRFSFIVKNLSLLIKAAQQQDSGLYCLEVTSISGKVQTATFQVFVFDKVEKPRLQGQGKILDRGRCQVALSCLVSRDGNVSYAWYRGSKLIQTAGNLTYLDEEVDINGTHTYTCNVSNPVSWESHTLNLTQDCQNAHQEFRFWPFLVIIVILSALFLGTLACFCVWRRKRKEKQSETSPKEFLTIYEDVKDLKTRRNHEQEQTFPGGGSTIYSMIQSQSSAPTSQEPAYTLYSLIQPSRKSGSRKRNHSPSFNSTIYEVIGKSQPKAQNPARLSRKELENFDVYSRAKRSGSGVKQTLNFDLLKLAGDVESNPGPSRGHMTEYKPTVRLATRDDVPRAVRTLAAAFADYPATRHTVDPDRHIERVTELQELFLTRVGLDIGKVWVADDGAAVAVWTTPESVEAGAVFAEIGPRMAELSGSRLAAQQQMEGLLAPHRPKEPAWFLATVGVSPDHQGKGLGSAVVLPGVEAAERAGVPAFLETSAPRNLPFYERLGFTVTADVEVPEGPRTWCMTRKPGA

SEQ ID NO: 6509 - protein, 1326 aa, Artificial Sequence
  Synthetic Polypeptide
MALPVTALLLPLALLLHAARPDIQMTQSPSSLSASVGDRVTITCKASDHINNWLAWYQQKPGQAPKLLIYGATTLETGVPSRFSGSGSGTDYTLTISSLQPEDFATYYCQQSWNTPWTFGQGTKLEIKRLEGQPKANPTVTLFPPSSEELQANKATLVCLISDFYPGAVTVAWKADGSPVKAGVETTKPSKQSNNKYAASSYLSLTPEQWKSHRSYSCQVTHEGSTVEKTVAPTECSGSGMRTEDLPKAVVFLEPQWYRVLEKDSVTLKCQGAYSPEDNSTQWFHNESLISSQASSYFIDAATVDDSGEYRCQTNLSTLSDPVQLEVHIGWLLLQAPRWVFKEEDPIHLRCHSWKNTALHKVTYLQNGKGRKYFHHNSDFYIPKATLKDSGSYFCRGLVGSKNVSSETVNITITQGLAVSTISSFFPPGYQVSFCLVMVLLFAVDTGLYFSVKTNIRSSTRDWKDHKFKWRKDPQDKRAKRSGSGATNFSLLKQAGDVEENPGPTSMDWIWRILFLVGAATGAHSFEQVQLQQPGAELVKPGASVKMSCKASGYAFSSYWINWMKQKPGQGLEWIGQIYPGDGDTNYNGKFKGRATLTADTSSSTAYMQLSSLTSEDSAVYFCARSITTVVGCAMDYWGQGTSVTVSSTRASTKGPSVFPLAPSSKSTSGGTAALGCLVKDYFPEPVTVSWNSGALTSGVHTFPAVLQSSGLYSLSSVVTVPSSSLGTQTYICNVNHKPSNTKVDKRVEPKSCGTKGCQGSADHVVSISGVPLQLQPNSIQTKVDSIAWKKLLPSQNGFHHILKWENGSLPSNTSNDRFSFIVKNLSLLIKAAQQQDSGLYCLEVTSISGKVQTATFQVFVFDKVEKPRLQGQGKILDRGRCQVALSCLVSRDGNVSYAWYRGSKLIQTAGNLTYLDEEVDINGTHTYTCNVSNPVSWESHTLNLTQDCQNAHQEFRFWPFLVIIVILSALFLGTLACFCVWRRKRKEKQSETSPKEFLTIYEDVKDLKTRRNHEQEQTFPGGGSTIYSMIQSQSSAPTSQEPAYTLYSLIQPSRKSGSRKRNHSPSFNSTIYEVIGKSQPKAQNPARLSRKELENFDVYSRAKRSGSGVKQTLNFDLLKLAGDVESNPGPSRGGIHTMATYEVLCEVARKLGTDDREVVLFLLNVFIPQPTLAQLIGALRALKEEGRLTFPLLAECLFRAGRRDLLRDLLHLDPRFLERHLAGTMSYFSPYQLTVLHVDGELCARDIRSLIFLSKDTIGSRSTPQTFLHWVYCMENLDLLGPTDVDALMSMLRSLSRVDLQRQVQTLMGLHLSGPSHSQHYRHTP

SEQ ID NO: 6510 - protein, 1379 aa, Artificial Sequence
  Synthetic Polypeptide
MALPVTALLLPLALLLHAARPDIQMTQSPSSLSASVGDRVTITCKASDHINNWLAWYQQKPGQAPKLLIYGATTLETGVPSRFSGSGSGTDYTLTISSLQPEDFATYYCQQSWNTPWTFGQGTKLEIKRLEGQPKANPTVTLFPPSSEELQANKATLVCLISDFYPGAVTVAWKADGSPVKAGVETTKPSKQSNNKYAASSYLSLTPEQWKSHRSYSCQVTHEGSTVEKTVAPTECSGSGMRTEDLPKAVVFLEPQWYRVLEKDSVTLKCQGAYSPEDNSTQWFHNESLISSQASSYFIDAATVDDSGEYRCQTNLSTLSDPVQLEVHIGWLLLQAPRWVFKEEDPIHLRCHSWKNTALHKVTYLQNGKGRKYFHHNSDFYIPKATLKDSGSYFCRGLVGSKNVSSETVNITITQGLAVSTISSFFPPGYQVSFCLVMVLLFAVDTGLYFSVKTNIRSSTRDWKDHKFKWRKDPQDKRAKRSGSGATNFSLLKQAGDVEENPGPTSMDWIWRILFLVGAATGAHSFEQVQLQQPGAELVKPGASVKMSCKASGYAFSSYWINWMKQKPGQGLEWIGQIYPGDGDTNYNGKFKGRATLTADTSSSTAYMQLSSLTSEDSAVYFCARSITTVVGCAMDYWGQGTSVTVSSTRASTKGPSVFPLAPSSKSTSGGTAALGCLVKDYFPEPVTVSWNSGALTSGVHTFPAVLQSSGLYSLSSVVTVPSSSLGTQTYICNVNHKPSNTKVDKRVEPKSCGTKGCQGSADHVVSISGVPLQLQPNSIQTKVDSIAWKKLLPSQNGFHHILKWENGSLPSNTSNDRFSFIVKNLSLLIKAAQQQDSGLYCLEVTSISGKVQTATFQVFVFDKVEKPRLQGQGKILDRGRCQVALSCLVSRDGNVSYAWYRGSKLIQTAGNLTYLDEEVDINGTHTYTCNVSNPVSWESHTLNLTQDCQNAHQEFRFWPFLVIIVILSALFLGTLACFCVWRRKRKEKQSETSPKEFLTIYEDVKDLKTRRNHEQEQTFPGGGSTIYSMIQSQSSAPTSQEPAYTLYSLIQPSRKSGSRKRNHSPSFNSTIYEVIGKSQPKAQNPARLSRKELENFDVYSRAKRSGSGVKQTLNFDLLKLAGDVESNPGPSRGGIHTMSDSKEVPSLPFLRHLLEELDSHEDSLLLFLCHDAAPGCTTVTQALCSLSQQRKLTLAALVEMLYVLQRMDLLKSRFGLSKEGAEQLLGTSFLTRYRKLMVCVGEELDSSELRALRLFACNLNPSLSTALSESSRFVELVLALENVGLVSPSSVSVLADMLRTLRRLDLCQQLVEYEQQEQARYRYCYAASPSLPVRTLRRGHGASEHEQLCMPVQESSDSPELLRTPVQESSSDSPEQTT

SEQ ID NO: 6511 - protein, 1334 aa, Artificial Sequence
  Synthetic Polypeptide
MALPVTALLLPLALLLHAARPDIQMTQSPSSLSASVGDRVTITCKASDHINNWLAWYQQKPGQAPKLLIYGATTLETGVPSRFSGSGSGTDYTLTISSLQPEDFATYYCQQSWNTPWTFGQGTKLEIKRLEGQPKANPTVTLFPPSSEELQANKATLVCLISDFYPGAVTVAWKADGSPVKAGVETTKPSKQSNNKYAASSYLSLTPEQWKSHRSYSCQVTHEGSTVEKTVAPTECSGSGMRTEDLPKAVVFLEPQWYRVLEKDSVTLKCQGAYSPEDNSTQWFHNESLISSQASSYFIDAATVDDSGEYRCQTNLSTLSDPVQLEVHIGWLLLQAPRWVFKEEDPIHLRCHSWKNTALHKVTYLQNGKGRKYFHHNSDFYIPKATLKDSGSYFCRGLVGSKNVSSETVNITITQGLAVSTISSFFPPGYQVSFCLVMVLLFAVDTGLYFSVKTNIRSSTRDWKDHKFKWRKDPQDKRAKRSGSGATNFSLLKQAGDVEENPGPTSMDWIWRILFLVGAATGAHSFEQVQLQQPGAELVKPGASVKMSCKASGYAFSSYWINWMKQKPGQGLEWIGQIYPGDGDTNYNGKFKGRATLTADTSSSTAYMQLSSLTSEDSAVYFCARSITTVVGCAMDYWGQGTSVTVSSTRASTKGPSVFPLAPSSKSTSGGTAALGCLVKDYFPEPVTVSWNSGALTSGVHTFPAVLQSSGLYSLSSVVTVPSSSLGTQTYICNVNHKPSNTKVDKRVEPKSCGTKGCQGSADHVVSISGVPLQLQPNSIQTKVDSIAWKKLLPSQNGFHHILKWENGSLPSNTSNDRFSFIVKNLSLLIKAAQQQDSGLYCLEVTSISGKVQTATFQVFVFDKVEKPRLQGQGKILDRGRCQVALSCLVSRDGNVSYAWYRGSKLIQTAGNLTYLDEEVDINGTHTYTCNVSNPVSWESHTLNLTQDCQNAHQEFRFWPFLVIIVILSALFLGTLACFCVWRRKRKEKQSETSPKEFLTIYEDVKDLKTRRNHEQEQTFPGGGSTIYSMIQSQSSAPTSQEPAYTLYSLIQPSRKSGSRKRNHSPSFNSTIYEVIGKSQPKAQNPARLSRKELENFDVYSRAKRSGSGVKQTLNFDLLKLAGDVESNPGPSRGHMTEYKPTVRLATRDDVPRAVRTLAAAFADYPATRHTVDPDRHIERVTELQELFLTRVGLDIGKVWVADDGAAVAVWTTPESVEAGAVFAEIGPRMAELSGSRLAAQQQMEGLLAPHRPKEPAWFLATVGVSPDHQGKGLGSAVVLPGVEAAERAGVPAFLETSAPRNLPFYERLGFTVTADVEVPEGPRTWCMTRKPGA

SEQ ID NO: 6512 - protein, 1471 aa, Artificial Sequence
  Synthetic Polypeptide
MALPVTALLLPLALLLHAARPEVQLVESGGGLVQAGGSLRLSCAASGRTFSMGWFRQAPGKEREFVAAITYSGGSPYYADSVKGRFTISRDNAKNTVYLQMNSLKPEDTAVYYCAANPTYGSDWNAENWGQGTQVTVSSGTGGGGSGGGGSGGGGSEFDIQMTQSPSSLSASVGDRVTITCKASDHINNWLAWYQQKPGQAPKLLIYGATTLETGVPSRFSGSGSGTDYTLTISSLQPEDFATYYCQQSWNTPWTFGQGTKLEIKRLEGQPKANPTVTLFPPSSEELQANKATLVCLISDFYPGAVTVAWKADGSPVKAGVETTKPSKQSNNKYAASSYLSLTPEQWKSHRSYSCQVTHEGSTVEKTVAPTECSGSGMRTEDLPKAVVFLEPQWYRVLEKDSVTLKCQGAYSPEDNSTQWFHNESLISSQASSYFIDAATVDDSGEYRCQTNLSTLSDPVQLEVHIGWLLLQAPRWVFKEEDPIHLRCHSWKNTALHKVTYLQNGKGRKYFHHNSDFYIPKATLKDSGSYFCRGLVGSKNVSSETVNITITQGLAVSTISSFFPPGYQVSFCLVMVLLFAVDTGLYFSVKTNIRSSTRDWKDHKFKWRKDPQDKRAKRSGSGATNFSLLKQAGDVEENPGPTSMDWIWRILFLVGAATGAHSFEQVQLQQPGAELVKPGASVKMSCKASGYAFSSYWINWMKQKPGQGLEWIGQIYPGDGDTNYNGKFKGRATLTADTSSSTAYMQLSSLTSEDSAVYFCARSITTVVGCAMDYWGQGTSVTVSSTRASTKGPSVFPLAPSSKSTSGGTAALGCLVKDYFPEPVTVSWNSGALTSGVHTFPAVLQSSGLYSLSSVVTVPSSSLGTQTYICNVNHKPSNTKVDKRVEPKSCGTKGCQGSADHVVSISGVPLQLQPNSIQTKVDSIAWKKLLPSQNGFHHILKWENGSLPSNTSNDRFSFIVKNLSLLIKAAQQQDSGLYCLEVTSISGKVQTATFQVFVFDKVEKPRLQGQGKILDRGRCQVALSCLVSRDGNVSYAWYRGSKLIQTAGNLTYLDEEVDINGTHTYTCNVSNPVSWESHTLNLTQDCQNAHQEFRFWPFLVIIVILSALFLGTLACFCVWRRKRKEKQSETSPKEFLTIYEDVKDLKTRRNHEQEQTFPGGGSTIYSMIQSQSSAPTSQEPAYTLYSLIQPSRKSGSRKRNHSPSFNSTIYEVIGKSQPKAQNPARLSRKELENFDVYSRAKRSGSGVKQTLNFDLLKLAGDVESNPGPSRGHMTEYKPTVRLATRDDVPRAVRTLAAAFADYPATRHTVDPDRHIERVTELQELFLTRVGLDIGKVWVADDGAAVAVWTTPESVEAGAVFAEIGPRMAELSGSRLAAQQQMEGLLAPHRPKEPAWFLATVGVSPDHQGKGLGSAVVLPGVEAAERAGVPAFLETSAPRNLPFYERLGFTVTADVEVPEGPRTWCMTRKPGA

SEQ ID NO: 6513 - protein, 1608 aa, Artificial Sequence
  Synthetic Polypeptide
MALPVTALLLPLALLLHAARPEVQLVESGGGLVQAGGSLRLSCAASGRTFSMGWFRQAPGKEREFVAAITYSGGSPYYADSVKGRFTISRDNAKNTVYLQMNSLKPEDTAVYYCAANPTYGSDWNAENWGQGTQVTVSSGTGGGGSGGGGSGGGGSEFDIQMTQSPSSLSASVGDRVTITCKASDHINNWLAWYQQKPGQAPKLLIYGATTLETGVPSRFSGSGSGTDYTLTISSLQPEDFATYYCQQSWNTPWTFGQGTKLEIKRLEGQPKANPTVTLFPPSSEELQANKATLVCLISDFYPGAVTVAWKADGSPVKAGVETTKPSKQSNNKYAASSYLSLTPEQWKSHRSYSCQVTHEGSTVEKTVAPTECSGSGMRTEDLPKAVVFLEPQWYRVLEKDSVTLKCQGAYSPEDNSTQWFHNESLISSQASSYFIDAATVDDSGEYRCQTNLSTLSDPVQLEVHIGWLLLQAPRWVFKEEDPIHLRCHSWKNTALHKVTYLQNGKGRKYFHHNSDFYIPKATLKDSGSYFCRGLVGSKNVSSETVNITITQGLAVSTISSFFPPGYQVSFCLVMVLLFAVDTGLYFSVKTNIRSSTRDWKDHKFKWRKDPQDKRAKRSGSGATNFSLLKQAGDVEENPGPTSMDWIWRILFLVGAATGAHSGPEVQLVESGGGLVQAGGSLRLSCAASGRTFTMGWFRQAPGKEREFVAAISLSPTLAYYADSVKGRFTISRDNAKNTVVLQMNSLKPEDTALYYCAADRKSVMSIRPDYWGQGTQVTVSSGSGGGGSGGGGSGGGGSFEQVQLQQPGAELVKPGASVKMSCKASGYAFSSYWINWMKQKPGQGLEWIGQIYPGDGDTNYNGKFKGRATLTADTSSSTAYMQLSSLTSEDSAVYFCARSITTVVGCAMDYWGQGTSVTVSSTRASTKGPSVFPLAPSSKSTSGGTAALGCLVKDYFPEPVTVSWNSGALTSGVHTFPAVLQSSGLYSLSSVVTVPSSSLGTQTYICNVNHKPSNTKVDKRVEPKSCGTKGCQGSADHVVSISGVPLQLQPNSIQTKVDSIAWKKLLPSQNGFHHILKWENGSLPSNTSNDRFSFIVKNLSLLIKAAQQQDSGLYCLEVTSISGKVQTATFQVFVFDKVEKPRLQGQGKILDRGRCQVALSCLVSRDGNVSYAWYRGSKLIQTAGNLTYLDEEVDINGTHTYTCNVSNPVSWESHTLNLTQDCQNAHQEFRFWPFLVIIVILSALFLGTLACFCVWRRKRKEKQSETSPKEFLTIYEDVKDLKTRRNHEQEQTFPGGGSTIYSMIQSQSSAPTSQEPAYTLYSLIQPSRKSGSRKRNHSPSFNSTIYEVIGKSQPKAQNPARLSRKELENFDVYSRAKRSGSGVKQTLNFDLLKLAGDVESNPGPSRGHMTEYKPTVRLATRDDVPRAVRTLAAAFADYPATRHTVDPDRHIERVTELQELFLTRVGLDIGKVWVADDGAAVAVWTTPESVEAGAVFAEIGPRMAELSGSRLAAQQQMEGLLAPHRPKEPAWFLATVGVSPDHQGKGLGSAVVLPGVEAAERAGVPAFLETSAPRNLPFYERLGFTVTADVEVPEGPRTWCMTRKPGA

SEQ ID NO: 6514 - protein, 1341 aa, Artificial Sequence
  Synthetic Polypeptide
MALPVTALLLPLALLLHAARPEVQLVESGGGLVQAGGSLRLSCAASGRTFSMGWFRQAPGKEREFVAAITYSGGSPYYADSVKGRFTISRDNAKNTVYLQMNSLKPEDTAVYYCAANPTYGSDWNAENWGQGTQVTVSSLEGQPKANPTVTLFPPSSEELQANKATLVCLISDFYPGAVTVAWKADGSPVKAGVETTKPSKQSNNKYAASSYLSLTPEQWKSHRSYSCQVTHEGSTVEKTVAPTECSGSGMRTEDLPKAVVFLEPQWYRVLEKDSVTLKCQGAYSPEDNSTQWFHNESLISSQASSYFIDAATVDDSGEYRCQTNLSTLSDPVQLEVHIGWLLLQAPRWVFKEEDPIHLRCHSWKNTALHKVTYLQNGKGRKYFHHNSDFYIPKATLKDSGSYFCRGLVGSKNVSSETVNITITQGLAVSTISSFFPPGYQVSFCLVMVLLFAVDTGLYFSVKTNIRSSTRDWKDHKFKWRKDPQDKRAKRSGSGATNFSLLKQAGDVEENPGPTSMDWIWRILFLVGAATGAHSGPEVQLVESGGGLVQAGGSLRLSCAASGRTFTMGWFRQAPGKEREFVAAISLSPTLAYYADSVKGRFTISRDNAKNTVVLQMNSLKPEDTALYYCAADRKSVMSIRPDYWGQGTQVTVSSTRASTKGPSVFPLAPSSKSTSGGTAALGCLVKDYFPEPVTVSWNSGALTSGVHTFPAVLQSSGLYSLSSVVTVPSSSLGTQTYICNVNHKPSNTKVDKRVEPKSCGTKGCQGSADHVVSISGVPLQLQPNSIQTKVDSIAWKKLLPSQNGFHHILKWENGSLPSNTSNDRFSFIVKNLSLLIKAAQQQDSGLYCLEVTSISGKVQTATFQVFVFDKVEKPRLQGQGKILDRGRCQVALSCLVSRDGNVSYAWYRGSKLIQTAGNLTYLDEEVDINGTHTYTCNVSNPVSWESHTLNLTQDCQNAHQEFRFWPFLVIIVILSALFLGTLACFCVWRRKRKEKQSETSPKEFLTIYEDVKDLKTRRNHEQEQTFPGGGSTIYSMIQSQSSAPTSQEPAYTLYSLIQPSRKSGSRKRNHSPSFNSTIYEVIGKSQPKAQNPARLSRKELENFDVYSRAKRSGSGVKQTLNFDLLKLAGDVESNPGPSRGHMTEYKPTVRLATRDDVPRAVRTLAAAFADYPATRHTVDPDRHIERVTELQELFLTRVGLDIGKVWVADDGAAVAVWTTPESVEAGAVFAEIGPRMAELSGSRLAAQQQMEGLLAPHRPKEPAWFLATVGVSPDHQGKGLGSAVVLPGVEAAERAGVPAFLETSAPRNLPFYERLGFTVTADVEVPEGPRTWCMTRKPGA

SEQ ID NO: 6515 - protein, 1349 aa, Artificial Sequence
  Synthetic Polypeptide
MALPVTALLLPLALLLHAARPDIQMTQSPSSLSASVGDRVTITCKASDHINNWLAWYQQKPGQAPKLLIYGATTLETGVPSRFSGSGSGTDYTLTISSLQPEDFATYYCQQSWNTPWTFGQGTKLEIKRLEDLKNVFPPEVAVFEPSEAEISHTQKATLVCLATGFYPDHVELSWWVNGKEVHSGVSTDPQPLKEQPALNDSRYCLSSRLRVSATFWQNPRNHFRCQVQFYGLSENDEWTQDRAKPVTQIVSAEAWGRADCGSGMRTEDLPKAVVFLEPQWYRVLEKDSVTLKCQGAYSPEDNSTQWFHNESLISSQASSYFIDAATVDDSGEYRCQTNLSTLSDPVQLEVHIGWLLLQAPRWVFKEEDPIHLRCHSWKNTALHKVTYLQNGKGRKYFHHNSDFYIPKATLKDSGSYFCRGLVGSKNVSSETVNITITQGLAVSTISSFFPPGYQVSFCLVMVLLFAVDTGLYFSVKTNIRSSTRDWKDHKFKWRKDPQDKRAKRSGSGATNFSLLKQAGDVEENPGPTSMDWIWRILFLVGAATGAHSFEQVQLQQPGAELVKPGASVKMSCKASGYAFSSYWINWMKQKPGQGLEWIGQIYPGDGDTNYNGKFKGRATLTADTSSSTAYMQLSSLTSEDSAVYFCARSITTVVGCAMDYWGQGTSVTVSSTRIQNPDPAVYQLRDSKSSDKSVCLFTDFDSQTNVSQSKDSDVYITDKTVLDMRSMDFKSNSAVAWSNKSDFACANAFNNSIIPEDTFFPSPESSCGTKGCQGSADHVVSISGVPLQLQPNSIQTKVDSIAWKKLLPSQNGFHHILKWENGSLPSNTSNDRFSFIVKNLSLLIKAAQQQDSGLYCLEVTSISGKVQTATFQVFVFDKVEKPRLQGQGKILDRGRCQVALSCLVSRDGNVSYAWYRGSKLIQTAGNLTYLDEEVDINGTHTYTCNVSNPVSWESHTLNLTQDCQNAHQEFRFWPFLVIIVILSALFLGTLACFCVWRRKRKEKQSETSPKEFLTIYEDVKDLKTRRNHEQEQTFPGGGSTIYSMIQSQSSAPTSQEPAYTLYSLIQPSRKSGSRKRNHSPSFNSTIYEVIGKSQPKAQNPARLSRKELENFDVYSRAKRSGSGVKQTLNFDLLKLAGDVESNPGPSRGHMTEYKPTVRLATRDDVPRAVRTLAAAFADYPATRHTVDPDRHIERVTELQELFLTRVGLDIGKVWVADDGAAVAVWTTPESVEAGAVFAEIGPRMAELSGSRLAAQQQMEGLLAPHRPKEPAWFLATVGVSPDHQGKGLGSAVVLPGVEAAERAGVPAFLETSAPRNLPFYERLGFTVTADVEVPEGPRTWCMTRKPGA

SEQ ID NO: 6516 - protein, 1486 aa, Artificial Sequence
  Synthetic Polypeptide
MALPVTALLLPLALLLHAARPEVQLVESGGGLVQAGGSLRLSCAASGRTFSMGWFRQAPGKEREFVAAITYSGGSPYYADSVKGRFTISRDNAKNTVYLQMNSLKPEDTAVYYCAANPTYGSDWNAENWGQGTQVTVSSGTGGGGSGGGGSGGGGSEFDIQMTQSPSSLSASVGDRVTITCKASDHINNWLAWYQQKPGQAPKLLIYGATTLETGVPSRFSGSGSGTDYTLTISSLQPEDFATYYCQQSWNTPWTFGQGTKLEIKRLEDLKNVFPPEVAVFEPSEAEISHTQKATLVCLATGFYPDHVELSWWVNGKEVHSGVSTDPQPLKEQPALNDSRYCLSSRLRVSATFWQNPRNHFRCQVQFYGLSENDEWTQDRAKPVTQIVSAEAWGRADCGSGMRTEDLPKAVVFLEPQWYRVLEKDSVTLKCQGAYSPEDNSTQWFHNESLISSQASSYFIDAATVDDSGEYRCQTNLSTLSDPVQLEVHIGWLLLQAPRWVFKEEDPIHLRCHSWKNTALHKVTYLQNGKGRKYFHHNSDFYIPKATLKDSGSYFCRGLVGSKNVSSETVNITITQGLAVSTISSFFPPGYQVSFCLVMVLLFAVDTGLYFSVKTNIRSSTRDWKDHKFKWRKDPQDKRAKRSGSGATNFSLLKQAGDVEENPGPTSMDWIWRILFLVGAATGAHSFEQVQLQQPGAELVKPGASVKMSCKASGYAFSSYWINWMKQKPGQGLEWIGQIYPGDGDTNYNGKFKGRATLTADTSSSTAYMQLSSLTSEDSAVYFCARSITTVVGCAMDYWGQGTSVTVSSTRIQNPDPAVYQLRDSKSSDKSVCLFTDFDSQTNVSQSKDSDVYITDKTVLDMRSMDFKSNSAVAWSNKSDFACANAFNNSIIPEDTFFPSPESSCGTKGCQGSADHVVSISGVPLQLQPNSIQTKVDSIAWKKLLPSQNGFHHILKWENGSLPSNTSNDRFSFIVKNLSLLIKAAQQQDSGLYCLEVTSISGKVQTATFQVFVFDKVEKPRLQGQGKILDRGRCQVALSCLVSRDGNVSYAWYRGSKLIQTAGNLTYLDEEVDINGTHTYTCNVSNPVSWESHTLNLTQDCQNAHQEFRFWPFLVIIVILSALFLGTLACFCVWRRKRKEKQSETSPKEFLTIYEDVKDLKTRRNHEQEQTFPGGGSTIYSMIQSQSSAPTSQEPAYTLYSLIQPSRKSGSRKRNHSPSFNSTIYEVIGKSQPKAQNPARLSRKELENFDVYSRAKRSGSGVKQTLNFDLLKLAGDVESNPGPSRGHMTEYKPTVRLATRDDVPRAVRTLAAAFADYPATRHTVDPDRHIERVTELQELFLTRVGLDIGKVWVADDGAAVAVWTTPESVEAGAVFAEIGPRMAELSGSRLAAQQQMEGLLAPHRPKEPAWFLATVGVSPDHQGKGLGSAVVLPGVEAAERAGVPAFLETSAPRNLPFYERLGFTVTADVEVPEGPRTWCMTRKPGA

SEQ ID NO: 6517 - protein, 1623 aa, Artificial Sequence
  Synthetic Polypeptide
MALPVTALLLPLALLLHAARPEVQLVESGGGLVQAGGSLRLSCAASGRTFSMGWFRQAPGKEREFVAAITYSGGSPYYADSVKGRFTISRDNAKNTVYLQMNSLKPEDTAVYYCAANPTYGSDWNAENWGQGTQVTVSSGTGGGGSGGGGSGGGGSEFDIQMTQSPSSLSASVGDRVTITCKASDHINNWLAWYQQKPGQAPKLLIYGATTLETGVPSRFSGSGSGTDYTLTISSLQPEDFATYYCQQSWNTPWTFGQGTKLEIKRLEDLKNVFPPEVAVFEPSEAEISHTQKATLVCLATGFYPDHVELSWWVNGKEVHSGVSTDPQPLKEQPALNDSRYCLSSRLRVSATFWQNPRNHFRCQVQFYGLSENDEWTQDRAKPVTQIVSAEAWGRADCGSGMRTEDLPKAVVFLEPQWYRVLEKDSVTLKCQGAYSPEDNSTQWFHNESLISSQASSYFIDAATVDDSGEYRCQTNLSTLSDPVQLEVHIGWLLLQAPRWVFKEEDPIHLRCHSWKNTALHKVTYLQNGKGRKYFHHNSDFYIPKATLKDSGSYFCRGLVGSKNVSSETVNITITQGLAVSTISSFFPPGYQVSFCLVMVLLFAVDTGLYFSVKTNIRSSTRDWKDHKFKWRKDPQDKRAKRSGSGATNFSLLKQAGDVEENPGPTSMDWIWRILFLVGAATGAHSGPEVQLVESGGGLVQAGGSLRLSCAASGRTFTMGWFRQAPGKEREFVAAISLSPTLAYYADSVKGRFTISRDNAKNTVVLQMNSLKPEDTALYYCAADRKSVMSIRPDYWGQGTQVTVSSGSGGGGSGGGGSGGGGSFEQVQLQQPGAELVKPGASVKMSCKASGYAFSSYWINWMKQKPGQGLEWIGQIYPGDGDTNYNGKFKGRATLTADTSSSTAYMQLSSLTSEDSAVYFCARSITTVVGCAMDYWGQGTSVTVSSTRIQNPDPAVYQLRDSKSSDKSVCLFTDFDSQTNVSQSKDSDVYITDKTVLDMRSMDFKSNSAVAWSNKSDFACANAFNNSIIPEDTFFPSPESSCGTKGCQGSADHVVSISGVPLQLQPNSIQTKVDSIAWKKLLPSQNGFHHILKWENGSLPSNTSNDRFSFIVKNLSLLIKAAQQQDSGLYCLEVTSISGKVQTATFQVFVFDKVEKPRLQGQGKILDRGRCQVALSCLVSRDGNVSYAWYRGSKLIQTAGNLTYLDEEVDINGTHTYTCNVSNPVSWESHTLNLTQDCQNAHQEFRFWPFLVIIVILSALFLGTLACFCVWRRKRKEKQSETSPKEFLTIYEDVKDLKTRRNHEQEQTFPGGGSTIYSMIQSQSSAPTSQEPAYTLYSLIQPSRKSGSRKRNHSPSFNSTIYEVIGKSQPKAQNPARLSRKELENFDVYSRAKRSGSGVKQTLNFDLLKLAGDVESNPGPSRGHMTEYKPTVRLATRDDVPRAVRTLAAAFADYPATRHTVDPDRHIERVTELQELFLTRVGLDIGKVWVADDGAAVAVWTTPESVEAGAVFAEIGPRMAELSGSRLAAQQQMEGLLAPHRPKEPAWFLATVGVSPDHQGKGLGSAVVLPGVEAAERAGVPAFLETSAPRNLPFYERLGFTVTADVEVPEGPRTWCMTRKPGA

SEQ ID NO: 6518 - protein, 1356 aa, Artificial Sequence
  Synthetic Polypeptide
MALPVTALLLPLALLLHAARPEVQLVESGGGLVQAGGSLRLSCAASGRTFSMGWFRQAPGKEREFVAAITYSGGSPYYADSVKGRFTISRDNAKNTVYLQMNSLKPEDTAVYYCAANPTYGSDWNAENWGQGTQVTVSSLEDLKNVFPPEVAVFEPSEAEISHTQKATLVCLATGFYPDHVELSWWVNGKEVHSGVSTDPQPLKEQPALNDSRYCLSSRLRVSATFWQNPRNHFRCQVQFYGLSENDEWTQDRAKPVTQIVSAEAWGRADCGSGMRTEDLPKAVVFLEPQWYRVLEKDSVTLKCQGAYSPEDNSTQWFHNESLISSQASSYFIDAATVDDSGEYRCQTNLSTLSDPVQLEVHIGWLLLQAPRWVFKEEDPIHLRCHSWKNTALHKVTYLQNGKGRKYFHHNSDFYIPKATLKDSGSYFCRGLVGSKNVSSETVNITITQGLAVSTISSFFPPGYQVSFCLVMVLLFAVDTGLYFSVKTNIRSSTRDWKDHKFKWRKDPQDKRAKRSGSGATNFSLLKQAGDVEENPGPTSMDWIWRILFLVGAATGAHSGPEVQLVESGGGLVQAGGSLRLSCAASGRTFTMGWFRQAPGKEREFVAAISLSPTLAYYADSVKGRFTISRDNAKNTVVLQMNSLKPEDTALYYCAADRKSVMSIRPDYWGQGTQVTVSSTRIQNPDPAVYQLRDSKSSDKSVCLFTDFDSQTNVSQSKDSDVYITDKTVLDMRSMDFKSNSAVAWSNKSDFACANAFNNSIIPEDTFFPSPESSCGTKGCQGSADHVVSISGVPLQLQPNSIQTKVDSIAWKKLLPSQNGFHHILKWENGSLPSNTSNDRFSFIVKNLSLLIKAAQQQDSGLYCLEVTSISGKVQTATFQVFVFDKVEKPRLQGQGKILDRGRCQVALSCLVSRDGNVSYAWYRGSKLIQTAGNLTYLDEEVDINGTHTYTCNVSNPVSWESHTLNLTQDCQNAHQEFRFWPFLVIIVILSALFLGTLACFCVWRRKRKEKQSETSPKEFLTIYEDVKDLKTRRNHEQEQTFPGGGSTIYSMIQSQSSAPTSQEPAYTLYSLIQPSRKSGSRKRNHSPSFNSTIYEVIGKSQPKAQNPARLSRKELENFDVYSRAKRSGSGVKQTLNFDLLKLAGDVESNPGPSRGHMTEYKPTVRLATRDDVPRAVRTLAAAFADYPATRHTVDPDRHIERVTELQELFLTRVGLDIGKVWVADDGAAVAVWTTPESVEAGAVFAEIGPRMAELSGSRLAAQQQMEGLLAPHRPKEPAWFLATVGVSPDHQGKGLGSAVVLPGVEAAERAGVPAFLETSAPRNLPFYERLGFTVTADVEVPEGPRTWCMTRKPGA

SEQ ID NO: 6519 - protein, 633 aa, Artificial Sequence; identical to SEQ ID NO: 4032
  Synthetic Polypeptide

SEQ ID NO: 6520 - protein, 613 aa, Artificial Sequence
  Synthetic Polypeptide
MALPVTALLLPLALLLHAARPDIQMTQSPSSLSASVGDRVTITCKASDHINNWLAWYQQKPGQAPKLLIYGATTLETGVPSRFSGSGSGTDYTLTISSLQPEDFATYYCQQSWNTPWTFGQGTKLEIKRGGGGSGGGGSGGGGSQVQLQQPGAELVKPGASVKMSCKASGYAFSSYWINWMKQKPGQGLEWIGQIYPGDGDTNYNGKFKGRATLTADTSSSTAYMQLSSLTSEDSAVYFCARSITTVVGCAMDYWGQGTSVTVSSTRKGCQGSADHVVSISGVPLQLQPNSIQTKVDSIAWKKLLPSQNGFHHILKWENGSLPSNTSNDRFSFIVKNLSLLIKAAQQQDSGLYCLEVTSISGKVQTATFQVFVFDKVEKPRLQGQGKILDRGRCQVALSCLVSRDGNVSYAWYRGSKLIQTAGNLTYLDEEVDINGTHTYTCNVSNPVSWESHTLNLTQDCQNAHQEFRFWPFLVIIVILSALFLGTLACFCVWRRKRKEKQSETSPKEFLTIYEDVKDLKTRRNHEQEQTFPGGGSTIYSMIQSQSSAPTSQEPAYTLYSLIQPSRKSGSRKRNHSPSFNSTIYEVIGKSQPKAQNPARLSRKELENFDVYS

SEQ ID NO: 6521 - protein, 613 aa, Artificial Sequence
  Synthetic Polypeptide
MALPVTALLLPLALLLHAARPEIVLTQSPATLSLSPGERATLSCRASQSVSSYLAWYQQKPGQAPRLLIYDASNRATGIPARFSGSGSGTDFTLTISSLEPEDFAVYYCQQRSNWPITFGQGTRLEIKGGGGSGGGGSGGGGSEVQLVESGGGLVQPGRSLRLSCAASGFTFNDYAMHWVRQAPGKGLEWVSTISWNSGSIGYADSVKGRFTISRDNAKKSLYLQMNSLRAEDTALYYCAKDIQYGNYYYGMDVWGQGTTVTVSSTRKGCQGSADHVVSISGVPLQLQPNSIQTKVDSIAWKKLLPSQNGFHHILKWENGSLPSNTSNDRFSFIVKNLSLLIKAAQQQDSGLYCLEVTSISGKVQTATFQVFVFDKVEKPRLQGQGKILDRGRCQVALSCLVSRDGNVSYAWYRGSKLIQTAGNLTYLDEEVDINGTHTYTCNVSNPVSWESHTLNLTQDCQNAHQEFRFWPFLVIIVILSALFLGTLACFCVWRRKRKEKQSETSPKEFLTIYEDVKDLKTRRNHEQEQTFPGGGSTIYSMIQSQSSAPTSQEPAYTLYSLIQPSRKSGSRKRNHSPSFNSTIYEVIGKSQPKAQNPARLSRKELENFDVYS

SEQ ID NO: 6522 - protein, 487 aa, Artificial Sequence
  Synthetic Polypeptide
MALPVTALLLPLALLLHAARPEVQLVESGGGLVQAGGSLRLSCAASGRTFSMGWFRQAPGKEREFVAAITYSGGSPYYADSVKGRFTISRDNAKNTVYLQMNSLKPEDTAVYYCAANPTYGSDWNAENWGQGTQVTVSSTRKGCQGSADHVVSISGVPLQLQPNSIQTKVDSIAWKKLLPSQNGFHHILKWENGSLPSNTSNDRFSFIVKNLSLLIKAAQQQDSGLYCLEVTSISGKVQTATFQVFVFDKVEKPRLQGQGKILDRGRCQVALSCLVSRDGNVSYAWYRGSKLIQTAGNLTYLDEEVDINGTHTYTCNVSNPVSWESHTLNLTQDCQNAHQEFRFWPFLVIIVILSALFLGTLACFCVWRRKRKEKQSETSPKEFLTIYEDVKDLKTRRNHEQEQTFPGGGSTIYSMIQSQSSAPTSQEPAYTLYSLIQPSRKSGSRKRNHSPSFNSTIYEVIGKSQPKAQNPARLSRKELENFDVYS

SEQ ID NO: 6523 - protein, 487 aa, Artificial Sequence
  Synthetic Polypeptide
MALPVTALLLPLALLLHAARPQLQLQESGPGLVKPSETLSLTCTVSGGSISSGDYYWGWIRQPPGKGLEWIGHIYYSGATYYNPSLKSRVTISVDTSRNQFSLKLSSVTAADTAVYYCTRDDSSNWRSRGQGTLVTVSSTRKGCQGSADHVVSISGVPLQLQPNSIQTKVDSIAWKKLLPSQNGFHHILKWENGSLPSNTSNDRFSFIVKNLSLLIKAAQQQDSGLYCLEVTSISGKVQTATFQVFVFDKVEKPRLQGQGKILDRGRCQVALSCLVSRDGNVSYAWYRGSKLIQTAGNLTYLDEEVDINGTHTYTCNVSNPVSWESHTLNLTQDCQNAHQEFRFWPFLVIIVILSALFLGTLACFCVWRRKRKEKQSETSPKEFLTIYEDVKDLKTRRNHEQEQTFPGGGSTIYSMIQSQSSAPTSQEPAYTLYSLIQPSRKSGSRKRNHSPSFNSTIYEVIGKSQPKAQNPARLSRKELENFDVYS

SEQ ID NO: 6524 - protein, 487 aa, Artificial Sequence
  Synthetic Polypeptide
MALPVTALLLPLALLLHAARPQLQLQESGPGLVKPSETLSLTCTVSGDSISSGDYYWGWIRQPPGKGLEWIGHIYYSGVTYYNPSLKSRVTISVDTSRNQFSLKLSSVTAADTAVYYCTREDSSNWRSRGQGTLVTVSSTRKGCQGSADHVVSISGVPLQLQPNSIQTKVDSIAWKKLLPSQNGFHHILKWENGSLPSNTSNDRFSFIVKNLSLLIKAAQQQDSGLYCLEVTSISGKVQTATFQVFVFDKVEKPRLQGQGKILDRGRCQVALSCLVSRDGNVSYAWYRGSKLIQTAGNLTYLDEEVDINGTHTYTCNVSNPVSWESHTLNLTQDCQNAHQEFRFWPFLVIIVILSALFLGTLACFCVWRRKRKEKQSETSPKEFLTIYEDVKDLKTRRNHEQEQTFPGGGSTIYSMIQSQSSAPTSQEPAYTLYSLIQPSRKSGSRKRNHSPSFNSTIYEVIGKSQPKAQNPARLSRKELENFDVYS

SEQ ID NO: 6525 - protein, 489 aa, Artificial Sequence
  Synthetic Polypeptide
MALPVTALLLPLALLLHAARPEVQLQESGGGLVQPGGSLRLSCAASGRTFSSLFMGWFRQAPGKERELVAAISRYSLYTYYADSVKGRFTISADNAKNAVYLQMNSLKPEDTAVYYCASKLEYTSNDYDSWGQGTQVTVSSTRKGCQGSADHVVSISGVPLQLQPNSIQTKVDSIAWKKLLPSQNGFHHILKWENGSLPSNTSNDRFSFIVKNLSLLIKAAQQQDSGLYCLEVTSISGKVQTATFQVFVFDKVEKPRLQGQGKILDRGRCQVALSCLVSRDGNVSYAWYRGSKLIQTAGNLTYLDEEVDINGTHTYTCNVSNPVSWESHTLNLTQDCQNAHQEFRFWPFLVIIVILSALFLGTLACFCVWRRKRKEKQSETSPKEFLTIYEDVKDLKTRRNHEQEQTFPGGGSTIYSMIQSQSSAPTSQEPAYTLYSLIQPSRKSGSRKRNHSPSFNSTIYEVIGKSQPKAQNPARLSRKELENFDVYS

SEQ ID NO: 6526 - protein, 497 aa, Artificial Sequence
  Synthetic Polypeptide
MALPVTALLLPLALLLHAARPEVQLVESGGGLVQPGGSLRLSCAASGFASDYYIIGWFRQAPGKEREGVSCISSRYANTNYADSVKGRFTISRDNAKNTVYLQMNSLKPEDTAVYYCAADTRRYTCPDIATMHRNFDSWGQGTLVTVSSTRKGCQGSADHVVSISGVPLQLQPNSIQTKVDSIAWKKLLPSQNGFHHILKWENGSLPSNTSNDRFSFIVKNLSLLIKAAQQQDSGLYCLEVTSISGKVQTATFQVFVFDKVEKPRLQGQGKILDRGRCQVALSCLVSRDGNVSYAWYRGSKLIQTAGNLTYLDEEVDINGTHTYTCNVSNPVSWESHTLNLTQDCQNAHQEFRFWPFLVIIVILSALFLGTLACFCVWRRKRKEKQSETSPKEFLTIYEDVKDLKTRRNHEQEQTFPGGGSTIYSMIQSQSSAPTSQEPAYTLYSLIQPSRKSGSRKRNHSPSFNSTIYEVIGKSQPKAQNPARLSRKELENFDVYS

SEQ ID NO: 6527 - protein, 493 aa, Artificial Sequence
  Synthetic Polypeptide
MALPVTALLLPLALLLHAARPEVQLVESGGSLVQPGGSLRLSCAASGFTFDDYAMSWVRQVPGKGLEWVSSINWSGTHTDYADSVKGRFTISRNNANNTLYLQMNSLKSEDTAVYYCAKNWRDAGTTWFEKSGSAGQGTQVTVSSTRKGCQGSADHVVSISGVPLQLQPNSIQTKVDSIAWKKLLPSQNGFHHILKWENGSLPSNTSNDRFSFIVKNLSLLIKAAQQQDSGLYCLEVTSISGKVQTATFQVFVFDKVEKPRLQGQGKILDRGRCQVALSCLVSRDGNVSYAWYRGSKLIQTAGNLTYLDEEVDINGTHTYTCNVSNPVSWESHTLNLTQDCQNAHQEFRFWPFLVIIVILSALFLGTLACFCVWRRKRKEKQSETSPKEFLTIYEDVKDLKTRRNHEQEQTFPGGGSTIYSMIQSQSSAPTSQEPAYTLYSLIQPSRKSGSRKRNHSPSFNSTIYEVIGKSQPKAQNPARLSRKELENFDVYS

SEQ ID NO: 6528 - protein, 488 aa, Artificial Sequence
  Synthetic Polypeptide
MALPVTALLLPLALLLHAARPEVQLVESGGGLVQPGGSLRLSCAASGFNIKDTCIGWVRRAPGKEEELVAKICKYSGHTRYADSVKGRFTISADTSKNTAYLQMNSLRAEDTAVYYCAAVSVRDGHYNYWGQGTTVTVSSTRKGCQGSADHVVSISGVPLQLQPNSIQTKVDSIAWKKLLPSQNGFHHILKWENGSLPSNTSNDRFSFIVKNLSLLIKAAQQQDSGLYCLEVTSISGKVQTATFQVFVFDKVEKPRLQGQGKILDRGRCQVALSCLVSRDGNVSYAWYRGSKLIQTAGNLTYLDEEVDINGTHTYTCNVSNPVSWESHTLNLTQDCQNAHQEFRFWPFLVIIVILSALFLGTLACFCVWRRKRKEKQSETSPKEFLTIYEDVKDLKTRRNHEQEQTFPGGGSTIYSMIQSQSSAPTSQEPAYTLYSLIQPSRKSGSRKRNHSPSFNSTIYEVIGKSQPKAQNPARLSRKELENFDVYS

SEQ ID NO: 6529 - protein, 493 aa, Artificial Sequence
  Synthetic Polypeptide
MALPVTALLLPLALLLHAARPGSDLGIKLLFAAAKGQDDEVRILLAAGADVNAKDFEGYTPLHVAAYDGHLEIVEVLLKAGADVNAKDSQGRTPLHEAAYSGHLEIVEVLLKAGADVNAQDDAGETPADLAAAWGHEDIAEVLQKTRKGCQGSADHVVSISGVPLQLQPNSIQTKVDSIAWKKLLPSQNGFHHILKWENGSLPSNTSNDRFSFIVKNLSLLIKAAQQQDSGLYCLEVTSISGKVQTATFQVFVFDKVEKPRLQGQGKILDRGRCQVALSCLVSRDGNVSYAWYRGSKLIQTAGNLTYLDEEVDINGTHTYTCNVSNPVSWESHTLNLTQDCQNAHQEFRFWPFLVIIVILSALFLGTLACFCVWRRKRKEKQSETSPKEFLTIYEDVKDLKTRRNHEQEQTFPGGGSTIYSMIQSQSSAPTSQEPAYTLYSLIQPSRKSGSRKRNHSPSFNSTIYEVIGKSQPKAQNPARLSRKELENFDVYS

SEQ ID NO: 6530 - protein, 427 aa, Artificial Sequence
  Synthetic Polypeptide
MALPVTALLLPLALLLHAARPVDNKFNKERYSAYYEIWQLPNLNVRQKAAFIGSLQDDPSQSANLLAEAKKLNDAQAPKTRKGCQGSADHVVSISGVPLQLQPNSIQTKVDSIAWKKLLPSQNGFHHILKWENGSLPSNTSNDRFSFIVKNLSLLIKAAQQQDSGLYCLEVTSISGKVQTATFQVFVFDKVEKPRLQGQGKILDRGRCQVALSCLVSRDGNVSYAWYRGSKLIQTAGNLTYLDEEVDINGTHTYTCNVSNPVSWESHTLNLTQDCQNAHQEFRFWPFLVIIVILSALFLGTLACFCVWRRKRKEKQSETSPKEFLTIYEDVKDLKTRRNHEQEQTFPGGGSTIYSMIQSQSSAPTSQEPAYTLYSLIQPSRKSGSRKRNHSPSFNSTIYEVIGKSQPKAQNPARLSRKELENFDVYS

SEQ ID NO: 6531 - protein, 458 aa, Artificial Sequence
  Synthetic Polypeptide
MALPVTALLLPLALLLHAARPLPAPKNLVVSRVTEDSARLSWTAPDAAFDSFAIGYWEWDDDGEAIVLTVPGSERSYDLTGLKPGTEYPVYIAGVKGGQWSFPLSAIFTTTRKGCQGSADHVVSISGVPLQLQPNSIQTKVDSIAWKKLLPSQNGFHHILKWENGSLPSNTSNDRFSFIVKNLSLLIKAAQQQDSGLYCLEVTSISGKVQTATFQVFVFDKVEKPRLQGQGKILDRGRCQVALSCLVSRDGNVSYAWYRGSKLIQTAGNLTYLDEEVDINGTHTYTCNVSNPVSWESHTLNLTQDCQNAHQEFRFWPFLVIIVILSALFLGTLACFCVWRRKRKEKQSETSPKEFLTIYEDVKDLKTRRNHEQEQTFPGGGSTIYSMIQSQSSAPTSQEPAYTLYSLIQPSRKSGSRKRNHSPSFNSTIYEVIGKSQPKAQNPARLSRKELENFDVYS

SEQ ID NO: 6532 - protein, 459 aa, Artificial Sequence
  Synthetic Polypeptide
MALPVTALLLPLALLLHAARPMLPAPKNLVVSRITEDSARLSWTAPDAAFDSFPIRYIETLIWGEAIWLDVPGSERSYDLTGLKPGTEYAVVITGVKGGRFSSPLVASFTTTRKGCQGSADHVVSISGVPLQLQPNSIQTKVDSIAWKKLLPSQNGFHHILKWENGSLPSNTSNDRFSFIVKNLSLLIKAAQQQDSGLYCLEVTSISGKVQTATFQVFVFDKVEKPRLQGQGKILDRGRCQVALSCLVSRDGNVSYAWYRGSKLIQTAGNLTYLDEEVDINGTHTYTCNVSNPVSWESHTLNLTQDCQNAHQEFRFWPFLVIIVILSALFLGTLACFCVWRRKRKEKQSETSPKEFLTIYEDVKDLKTRRNHEQEQTFPGGGSTIYSMIQSQSSAPTSQEPAYTLYSLIQPSRKSGSRKRNHSPSFNSTIYEVIGKSQPKAQNPARLSRKELENFDVYS

SEQ ID NO: 6533 - protein, 676 aa, Artificial Sequence
  Synthetic Polypeptide
MALPVTALLLPLALLLHAARPMALPVTALLLPLALLLHAARPLFNQEVQIPLTESYCGPCPKNWICYKNNCYQFFDESKNWYESQASCMSQNASLLKVYSKEDQDLLKLVKSYHWMGLVHIPTNGSWQWEDGSILSPNLLTIIEMQKGDCALYASSFKGYIENCSTPNTYICMQRTVGGGGSGGGGSGGGGSDLFNQEVQIPLTESYCGPCPKNWICYKNNCYQFFDESKNWYESQASCMSQNASLLKVYSKEDQDLLKLVKSYHWMGLVHIPTNGSWQWEDGSILSPNLLTIIEMQKGDCALYASSFKGYIENCSTPNTYICMQRTVTRKGCQGSADHVVSISGVPLQLQPNSIQTKVDSIAWKKLLPSQNGFHHILKWENGSLPSNTSNDRFSFIVKNLSLLIKAAQQQDSGLYCLEVTSISGKVQTATFQVFVFDKVEKPRLQGQGKILDRGRCQVALSCLVSRDGNVSYAWYRGSKLIQTAGNLTYLDEEVDINGTHTYTCNVSNPVSWESHTLNLTQDCQNAHQEFRFWPFLVIIVILSALFLGTLACFCVWRRKRKEKQSETSPKEFLTIYEDVKDLKTRRNHEQEQTFPGGGSTIYSMIQSQSSAPTSQEPAYTLYSLIQPSRKSGSRKRNHSPSFNSTIYEVIGKSQPKAQNPARLSRKELENFDVYS

SEQ ID NO: 6534 - protein, 556 aa, Artificial Sequence
  Synthetic Polypeptide
MALPVTALLLPLALLLHAARPMELTDLLLAAMLLAVARLTLSSPVAPACDPRLLNKLLRDSHLLHSRLSQCPDVDPLSIPVLLPAVDFSLGEWKTQTEQSKAQDILGAVSLLLEGVMAARGQLEPSCLSSLLGQLSGQVRLLLGALQGLLGTQLPLQGRTTAHKDPNALFLSLQQLLRGKVRFLLLVEGPTLCVRRTLPTTAVPSSTSTRKGCQGSADHVVSISGVPLQLQPNSIQTKVDSIAWKKLLPSQNGFHHILKWENGSLPSNTSNDRFSFIVKNLSLLIKAAQQQDSGLYCLEVTSISGKVQTATFQVFVFDKVEKPRLQGQGKILDRGRCQVALSCLVSRDGNVSYAWYRGSKLIQTAGNLTYLDEEVDINGTHTYTCNVSNPVSWESHTLNLTQDCQNAHQEFRFWPFLVIIVILSALFLGTLACFCVWRRKRKEKQSETSPKEFLTIYEDVKDLKTRRNHEQEQTFPGGGSTIYSMIQSQSSAPTSQEPAYTLYSLIQPSRKSGSRKRNHSPSFNSTIYEVIGKSQPKAQNPARLSRKELENFDVYS

SEQ ID NO: 6535 - protein, 422 aa, Artificial Sequence
  Synthetic Polypeptide
MALPVTALLLPLALLLHAARPMDPDLEIRAAFLRQRNTALRTEVAELEQEVQRLENEVSQYETRYGPLGGGKTRTRKGCQGSADHVVSISGVPLQLQPNSIQTKVDSIAWKKLLPSQNGFHHILKWENGSLPSNTSNDRFSFIVKNLSLLIKAAQQQDSGLYCLEVTSISGKVQTATFQVFVFDKVEKPRLQGQGKILDRGRCQVALSCLVSRDGNVSYAWYRGSKLIQTAGNLTYLDEEVDINGTHTYTCNVSNPVSWESHTLNLTQDCQNAHQEFRFWPFLVIIVILSALFLGTLACFCVWRRKRKEKQSETSPKEFLTIYEDVKDLKTRRNHEQEQTFPGGGSTIYSMIQSQSSAPTSQEPAYTLYSLIQPSRKSGSRKRNHSPSFNSTIYEVIGKSQPKAQNPARLSRKELENFDVYS

SEQ ID NO: 6536 - protein, 397 aa, Artificial Sequence
  Synthetic Polypeptide
MALPVTALLLPLALLLHAARPEVAALEKEVAALEKEVAALEKEVAALEKTRKGCQGSADHVVSISGVPLQLQPNSIQTKVDSIAWKKLLPSQNGFHHILKWENGSLPSNTSNDRFSFIVKNLSLLIKAAQQQDSGLYCLEVTSISGKVQTATFQVFVFDKVEKPRLQGQGKILDRGRCQVALSCLVSRDGNVSYAWYRGSKLIQTAGNLTYLDEEVDINGTHTYTCNVSNPVSWESHTLNLTQDCQNAHQEFRFWPFLVIIVILSALFLGTLACFCVWRRKRKEKQSETSPKEFLTIYEDVKDLKTRRNHEQEQTFPGGGSTIYSMIQSQSSAPTSQEPAYTLYSLIQPSRKSGSRKRNHSPSFNSTIYEVIGKSQPKAQNPARLSRKELENFDVYS

SEQ ID NO: 6537 - protein, 655 aa, Artificial Sequence
  Synthetic Polypeptide
MALPVTALLLPLALLLHAARPLFNQEVQIPLTESYCGPCPKNWICYKNNCYQFFDESKNWYESQASCMSQNASLLKVYSKEDQDLLKLVKSAHWMGLVHIPTNGSWQWEDGSILSPNLLTIIEMQKGDCALYASSFKGFIENCSTPNTYICMQRTVGGGGSGGGGSGGGGSDLFNQEVQIPLTESYCGPCPKNWICYKNNCYQFFDESKNWYESQASCMSQNASLLKVYSKEDQDLLKLVKSAHWMGLVHIPTNGSWQWEDGSILSPNLLTIIEMQKGDCALYASSFKGFIENCSTPNTYICMQRTVTRKGCQGSADHVVSISGVPLQLQPNSIQTKVDSIAWKKLLPSQNGFHHILKWENGSLPSNTSNDRFSFIVKNLSLLIKAAQQQDSGLYCLEVTSISGKVQTATFQVFVFDKVEKPRLQGQGKILDRGRCQVALSCLVSRDGNVSYAWYRGSKLIQTAGNLTYLDEEVDINGTHTYTCNVSNPVSWESHTLNLTQDCQNAHQEFRFWPFLVIIVILSALFLGTLACFCVWRRKRKEKQSETSPKEFLTIYEDVKDLKTRRNHEQEQTFPGGGSTIYSMIQSQSSAPTSQEPAYTLYSLIQPSRKSGSRKRNHSPSFNSTIYEVIGKSQPKAQNPARLSRKELENFDVYS

SEQ ID NO: 6538 - protein, 655 aa, Artificial Sequence
  Synthetic Polypeptide
MALPVTALLLPLALLLHAARPLFNQEVQIPLTESYCGPCPKNWICYKNNCYQFFDESKNWYESQASCMSQNASLLKVYSKEDQDLLKLVKSAHWMGLVHIPTNGSWQWEDGSILSPNLLTIIEMQKGDCALYASSFKGYIENCSTPNTYICMQRTVSGGGGSGGGGSGGGGDLFNQEVQIPLTESYCGPCPKNWICYKNNCYQFFDESKNWYESQASCMSQNASLLKVYSKEDQDLLKLVKSAHWMGLVHIPTNGSWQWEDGSILSPNLLTIIEMQKGDCALYASSFKGYIENCSTPNTYICMQRTVTRKGCQGSADHVVSISGVPLQLQPNSIQTKVDSIAWKKLLPSQNGFHHILKWENGSLPSNTSNDRFSFIVKNLSLLIKAAQQQDSGLYCLEVTSISGKVQTATFQVFVFDKVEKPRLQGQGKILDRGRCQVALSCLVSRDGNVSYAWYRGSKLIQTAGNLTYLDEEVDINGTHTYTCNVSNPVSWESHTLNLTQDCQNAHQEFRFWPFLVIIVILSALFLGTLACFCVWRRKRKEKQSETSPKEFLTIYEDVKDLKTRRNHEQEQTFPGGGSTIYSMIQSQSSAPTSQEPAYTLYSLIQPSRKSGSRKRNHSPSFNSTIYEVIGKSQPKAQNPARLSRKELENFDVYS

SEQ ID NO: 6539 - protein, 1229 aa, Artificial Sequence
  Synthetic Polypeptide
MALPVTALLLPLALLLHAARPDIQMTQSPSSLSASVGDRVTITCKASDHINNWLAWYQQKPGQAPKLLIYGATTLETGVPSRFSGSGSGTDYTLTISSLQPEDFATYYCQQSWNTPWTFGQGTKLEIKRLEKGCQGSADHVVSISGVPLQLQPNSIQTKVDSIAWKKLLPSQNGFHHILKWENGSLPSNTSNDRFSFIVKNLSLLIKAAQQQDSGLYCLEVTSISGKVQTATFQVFVFDKVEKPRLQGQGKILDRGRCQVALSCLVSRDGNVSYAWYRGSKLIQTAGNLTYLDEEVDINGTHTYTCNVSNPVSWESHTLNLTQDCQNAHQEFRFWPFLVIIVILSALFLGTLACFCVWRRKRKEKQSETSPKEFLTIYEDVKDLKTRRNHEQEQTFPGGGSTIYSMIQSQSSAPTSQEPAYTLYSLIQPSRKSGSRKRNHSPSFNSTIYEVIGKSQPKAQNPARLSRKELENFDVYSRAKRSGSGATNFSLLKQAGDVEENPGPTSMDWIWRILFLVGAATGAHSFEQVQLQQPGAELVKPGASVKMSCKASGYAFSSYWINWMKQKPGQGLEWIGQIYPGDGDTNYNGKFKGRATLTADTSSSTAYMQLSSLTSEDSAVYFCARSITTVVGCAMDYWGQGTSVTVSSTRKGCQGSADHVVSISGVPLQLQPNSIQTKVDSIAWKKLLPSQNGFHHILKWENGSLPSNTSNDRFSFIVKNLSLLIKAAQQQDSGLYCLEVTSISGKVQTATFQVFVFDKVEKPRLQGQGKILDRGRCQVALSCLVSRDGNVSYAWYRGSKLIQTAGNLTYLDEEVDINGTHTYTCNVSNPVSWESHTLNLTQDCQNAHQEFRFWPFLVIIVILSALFLGTLACFCVWRRKRKEKQSETSPKEFLTIYEDVKDLKTRRNHEQEQTFPGGGSTIYSMIQSQSSAPTSQEPAYTLYSLIQPSRKSGSRKRNHSPSFNSTIYEVIGKSQPKAQNPARLSRKELENFDVYSRAKRSGSGVKQTLNFDLLKLAGDVESNPGPSRGHMTEYKPTVRLATRDDVPRAVRTLAAAFADYPATRHTVDPDRHIERVTELQELFLTRVGLDIGKVWVADDGAAVAVWTTPESVEAGAVFAEIGPRMAELSGSRLAAQQQMEGLLAPHRPKEPAWFLATVGVSPDHQGKGLGSAVVLPGVEAAERAGVPAFLETSAPRNLPFYERLGFTVTADVEVPEGPRTWCMTRKPGA

SEQ ID NO: 6540 - protein, 1283 aa, Artificial Sequence
  Synthetic Polypeptide
MALPVTALLLPLALLLHAARPACEVQLLESGGGLIQPGGSLRLSCAASGFTFSSHAMTWVRQAPGKGLEWVSAISGSGDYTHYADSVKGRFTISRDNSKNTVYLQMNSLRAEDSAVYYCAKDEDGGSLLGHRGQGTLVTVSSGTGGGGSGGGGSGGGGSEFGSLEKGCQGSADHVVSISGVPLQLQPNSIQTKVDSIAWKKLLPSQNGFHHILKWENGSLPSNTSNDRFSFIVKNLSLLIKAAQQQDSGLYCLEVTSISGKVQTATFQVFVFDKVEKPRLQGQGKILDRGRCQVALSCLVSRDGNVSYAWYRGSKLIQTAGNLTYLDEEVDINGTHTYTCNVSNPVSWESHTLNLTQDCQNAHQEFRFWPFLVIIVILSALFLGTLACFCVWRRKRKEKQSETSPKEFLTIYEDVKDLKTRRNHEQEQTFPGGGSTIYSMIQSQSSAPTSQEPAYTLYSLIQPSRKSGSRKRNHSPSFNSTIYEVIGKSQPKAQNPARLSRKELENFDVYSRAKRSGSGATNFSLLKQAGDVEENPGPTSATMDWIWRILFLVGAATGAHSGPEVQLVESGGGLVQAGGSLRLSCAASGRTFSMGWFRQAPGKEREFVAAITYSGGSPYYADSVKGRFTISRDNAKNTVYLQMNSLKPEDTAVYYCAANPTYGSDWNAENWGQGTQVTVSSGSGGGGSGGGGSGGGGSFEGSTRKGCQGSADHVVSISGVPLQLQPNSIQTKVDSIAWKKLLPSQNGFHHILKWENGSLPSNTSNDRFSFIVKNLSLLIKAAQQQDSGLYCLEVTSISGKVQTATFQVFVFDKVEKPRLQGQGKILDRGRCQVALSCLVSRDGNVSYAWYRGSKLIQTAGNLTYLDEEVDINGTHTYTCNVSNPVSWESHTLNLTQDCQNAHQEFRFWPFLVIIVILSALFLGTLACFCVWRRKRKEKQSETSPKEFLTIYEDVKDLKTRRNHEQEQTFPGGGSTIYSMIQSQSSAPTSQEPAYTLYSLIQPSRKSGSRKRNHSPSFNSTIYEVIGKSQPKAQNPARLSRKELENFDVYSRAKRSGSGVKQTLNFDLLKLAGDVESNPGPSRGHMTEYKPTVRLATRDDVPRAVRTLAAAFADYPATRHTVDPDRHIERVTELQELFLTRVGLDIGKVWVADDGAAVAVWTTPESVEAGAVFAEIGPRMAELSGSRLAAQQQMEGLLAPHRPKEPAWFLATVGVSPDHQGKGLGSAVVLPGVEAAERAGVPAFLETSAPRNLPFYERLGFTVTADVEVPEGPRTWCMTRKPGA

SEQ ID NO: 6541 - protein, 1434 aa, Artificial Sequence
  Synthetic Polypeptide
MALPVTALLLPLALLLHAARPDIQMTQSPSSLSASVGDRVTITCKASDHINNWLAWYQQKPGQAPKLLIYGATTLETGVPSRFSGSGSGTDYTLTISSLQPEDFATYYCQQSWNTPWTFGQGTKLEIKRLEGQPKANPTVTLFPPSSEELQANKATLVCLISDFYPGAVTVAWKADGSPVKAGVETTKPSKQSNNKYAASSYLSLTPEQWKSHRSYSCQVTHEGSTVEKTVAPTECSGSKGCQGSADHVVSISGVPLQLQPNSIQTKVDSIAWKKLLPSQNGFHHILKWENGSLPSNTSNDRFSFIVKNLSLLIKAAQQQDSGLYCLEVTSISGKVQTATFQVFVFDKVEKPRLQGQGKILDRGRCQVALSCLVSRDGNVSYAWYRGSKLIQTAGNLTYLDEEVDINGTHTYTCNVSNPVSWESHTLNLTQDCQNAHQEFRFWPFLVIIVILSALFLGTLACFCVWRRKRKEKQSETSPKEFLTIYEDVKDLKTRRNHEQEQTFPGGGSTIYSMIQSQSSAPTSQEPAYTLYSLIQPSRKSGSRKRNHSPSFNSTIYEVIGKSQPKAQNPARLSRKELENFDVYSRAKRSGSGATNFSLLKQAGDVEENPGPTSMDWIWRILFLVGAATGAHSFEQVQLQQPGAELVKPGASVKMSCKASGYAFSSYWINWMKQKPGQGLEWIGQIYPGDGDTNYNGKFKGRATLTADTSSSTAYMQLSSLTSEDSAVYFCARSITTVVGCAMDYWGQGTSVTVSSTRASTKGPSVFPLAPSSKSTSGGTAALGCLVKDYFPEPVTVSWNSGALTSGVHTFPAVLQSSGLYSLSSVVTVPSSSLGTQTYICNVNHKPSNTKVDKRVEPKSCGTKGCQGSADHVVSISGVPLQLQPNSIQTKVDSIAWKKLLPSQNGFHHILKWENGSLPSNTSNDRFSFIVKNLSLLIKAAQQQDSGLYCLEVTSISGKVQTATFQVFVFDKVEKPRLQGQGKILDRGRCQVALSCLVSRDGNVSYAWYRGSKLIQTAGNLTYLDEEVDINGTHTYTCNVSNPVSWESHTLNLTQDCQNAHQEFRFWPFLVIIVILSALFLGTLACFCVWRRKRKEKQSETSPKEFLTIYEDVKDLKTRRNHEQEQTFPGGGSTIYSMIQSQSSAPTSQEPAYTLYSLIQPSRKSGSRKRNHSPSFNSTIYEVIGKSQPKAQNPARLSRKELENFDVYSRAKRSGSGVKQTLNFDLLKLAGDVESNPGPSRGGIHTMATYEVLCEVARKLGTDDREVVLFLLNVFIPQPTLAQLIGALRALKEEGRLTFPLLAECLFRAGRRDLLRDLLHLDPRFLERHLAGTMSYFSPYQLTVLHVDGELCARDIRSLIFLSKDTIGSRSTPQTFLHWVYCMENLDLLGPTDVDALMSMLRSLSRVDLQRQVQTLMGLHLSGPSHSQHYRHTP

SEQ ID NO: 6542 - protein, 1487 aa, Artificial Sequence
  Synthetic Polypeptide
MALPVTALLLPLALLLHAARPDIQMTQSPSSLSASVGDRVTITCKASDHINNWLAWYQQKPGQAPKLLIYGATTLETGVPSRFSGSGSGTDYTLTISSLQPEDFATYYCQQSWNTPWTFGQGTKLEIKRLEGQPKANPTVTLFPPSSEELQANKATLVCLISDFYPGAVTVAWKADGSPVKAGVETTKPSKQSNNKYAASSYLSLTPEQWKSHRSYSCQVTHEGSTVEKTVAPTECSGSKGCQGSADHVVSISGVPLQLQPNSIQTKVDSIAWKKLLPSQNGFHHILKWENGSLPSNTSNDRFSFIVKNLSLLIKAAQQQDSGLYCLEVTSISGKVQTATFQVFVFDKVEKPRLQGQGKILDRGRCQVALSCLVSRDGNVSYAWYRGSKLIQTAGNLTYLDEEVDINGTHTYTCNVSNPVSWESHTLNLTQDCQNAHQEFRFWPFLVIIVILSALFLGTLACFCVWRRKRKEKQSETSPKEFLTIYEDVKDLKTRRNHEQEQTFPGGGSTIYSMIQSQSSAPTSQEPAYTLYSLIQPSRKSGSRKRNHSPSFNSTIYEVIGKSQPKAQNPARLSRKELENFDVYSRAKRSGSGATNFSLLKQAGDVEENPGPTSMDWIWRILFLVGAATGAHSFEQVQLQQPGAELVKPGASVKMSCKASGYAFSSYWINWMKQKPGQGLEWIGQIYPGDGDTNYNGKFKGRATLTADTSSSTAYMQLSSLTSEDSAVYFCARSITTVVGCAMDYWGQGTSVTVSSTRASTKGPSVFPLAPSSKSTSGGTAALGCLVKDYFPEPVTVSWNSGALTSGVHTFPAVLQSSGLYSLSSVVTVPSSSLGTQTYICNVNHKPSNTKVDKRVEPKSCGTKGCQGSADHVVSISGVPLQLQPNSIQTKVDSIAWKKLLPSQNGFHHILKWENGSLPSNTSNDRFSFIVKNLSLLIKAAQQQDSGLYCLEVTSISGKVQTATFQVFVFDKVEKPRLQGQGKILDRGRCQVALSCLVSRDGNVSYAWYRGSKLIQTAGNLTYLDEEVDINGTHTYTCNVSNPVSWESHTLNLTQDCQNAHQEFRFWPFLVIIVILSALFLGTLACFCVWRRKRKEKQSETSPKEFLTIYEDVKDLKTRRNHEQEQTFPGGGSTIYSMIQSQSSAPTSQEPAYTLYSLIQPSRKSGSRKRNHSPSFNSTIYEVIGKSQPKAQNPARLSRKELENFDVYSRAKRSGSGVKQTLNFDLLKLAGDVESNPGPSRGGIHTMSDSKEVPSLPFLRHLLEELDSHEDSLLLFLCHDAAPGCTTVTQALCSLSQQRKLTLAALVEMLYVLQRMDLLKSRFGLSKEGAEQLLGTSFLTRYRKLMVCVGEELDSSELRALRLFACNLNPSLSTALSESSRFVELVLALENVGLVSPSSVSVLADMLRTLRRLDLCQQLVEYEQQEQARYRYCYAASPSLPVRTLRRGHGASEHEQLCMPVQESSDSPELLRTPVQESSSDSPEQTT

SEQ ID NO: 6543 - protein, 1442 aa, Artificial Sequence
  Synthetic Polypeptide
MALPVTALLLPLALLLHAARPDIQMTQSPSSLSASVGDRVTITCKASDHINNWLAWYQQKPGQAPKLLIYGATTLETGVPSRFSGSGSGTDYTLTISSLQPEDFATYYCQQSWNTPWTFGQGTKLEIKRLEGQPKANPTVTLFPPSSEELQANKATLVCLISDFYPGAVTVAWKADGSPVKAGVETTKPSKQSNNKYAASSYLSLTPEQWKSHRSYSCQVTHEGSTVEKTVAPTECSGSKGCQGSADHVVSISGVPLQLQPNSIQTKVDSIAWKKLLPSQNGFHHILKWENGSLPSNTSNDRFSFIVKNLSLLIKAAQQQDSGLYCLEVTSISGKVQTATFQVFVFDKVEKPRLQGQGKILDRGRCQVALSCLVSRDGNVSYAWYRGSKLIQTAGNLTYLDEEVDINGTHTYTCNVSNPVSWESHTLNLTQDCQNAHQEFRFWPFLVIIVILSALFLGTLACFCVWRRKRKEKQSETSPKEFLTIYEDVKDLKTRRNHEQEQTFPGGGSTIYSMIQSQSSAPTSQEPAYTLYSLIQPSRKSGSRKRNHSPSFNSTIYEVIGKSQPKAQNPARLSRKELENFDVYSRAKRSGSGATNFSLLKQAGDVEENPGPTSMDWIWRILFLVGAATGAHSFEQVQLQQPGAELVKPGASVKMSCKASGYAFSSYWINWMKQKPGQGLEWIGQIYPGDGDTNYNGKFKGRATLTADTSSSTAYMQLSSLTSEDSAVYFCARSITTVVGCAMDYWGQGTSVTVSSTRASTKGPSVFPLAPSSKSTSGGTAALGCLVKDYFPEPVTVSWNSGALTSGVHTFPAVLQSSGLYSLSSVVTVPSSSLGTQTYICNVNHKPSNTKVDKRVEPKSCGTKGCQGSADHVVSISGVPLQLQPNSIQTKVDSIAWKKLLPSQNGFHHILKWENGSLPSNTSNDRFSFIVKNLSLLIKAAQQQDSGLYCLEVTSISGKVQTATFQVFVFDKVEKPRLQGQGKILDRGRCQVALSCLVSRDGNVSYAWYRGSKLIQTAGNLTYLDEEVDINGTHTYTCNVSNPVSWESHTLNLTQDCQNAHQEFRFWPFLVIIVILSALFLGTLACFCVWRRKRKEKQSETSPKEFLTIYEDVKDLKTRRNHEQEQTFPGGGSTIYSMIQSQSSAPTSQEPAYTLYSLIQPSRKSGSRKRNHSPSFNSTIYEVIGKSQPKAQNPARLSRKELENFDVYSRAKRSGSGVKQTLNFDLLKLAGDVESNPGPSRGHMTEYKPTVRLATRDDVPRAVRTLAAAFADYPATRHTVDPDRHIERVTELQELFLTRVGLDIGKVWVADDGAAVAVWTTPESVEAGAVFAEIGPRMAELSGSRLAAQQQMEGLLAPHRPKEPAWFLATVGVSPDHQGKGLGSAVVLPGVEAAERAGVPAFLETSAPRNLPFYERLGFTVTADVEVPEGPRTWCMTRKPGA

SEQ ID NO: 6544 - protein, 1579 aa, Artificial Sequence
  Synthetic Polypeptide
MALPVTALLLPLALLLHAARPEVQLVESGGGLVQAGGSLRLSCAASGRTFSMGWFRQAPGKEREFVAAITYSGGSPYYADSVKGRFTISRDNAKNTVYLQMNSLKPEDTAVYYCAANPTYGSDWNAENWGQGTQVTVSSGTGGGGSGGGGSGGGGSEFDIQMTQSPSSLSASVGDRVTITCKASDHINNWLAWYQQKPGQAPKLLIYGATTLETGVPSRFSGSGSGTDYTLTISSLQPEDFATYYCQQSWNTPWTFGQGTKLEIKRLEGQPKANPTVTLFPPSSEELQANKATLVCLISDFYPGAVTVAWKADGSPVKAGVETTKPSKQSNNKYAASSYLSLTPEQWKSHRSYSCQVTHEGSTVEKTVAPTECSGSKGCQGSADHVVSISGVPLQLQPNSIQTKVDSIAWKKLLPSQNGFHHILKWENGSLPSNTSNDRFSFIVKNLSLLIKAAQQQDSGLYCLEVTSISGKVQTATFQVFVFDKVEKPRLQGQGKILDRGRCQVALSCLVSRDGNVSYAWYRGSKLIQTAGNLTYLDEEVDINGTHTYTCNVSNPVSWESHTLNLTQDCQNAHQEFRFWPFLVIIVILSALFLGTLACFCVWRRKRKEKQSETSPKEFLTIYEDVKDLKTRRNHEQEQTFPGGGSTIYSMIQSQSSAPTSQEPAYTLYSLIQPSRKSGSRKRNHSPSFNSTIYEVIGKSQPKAQNPARLSRKELENFDVYSRAKRSGSGATNFSLLKQAGDVEENPGPTSMDWIWRILFLVGAATGAHSFEQVQLQQPGAELVKPGASVKMSCKASGYAFSSYWINWMKQKPGQGLEWIGQIYPGDGDTNYNGKFKGRATLTADTSSSTAYMQLSSLTSEDSAVYFCARSITTVVGCAMDYWGQGTSVTVSSTRASTKGPSVFPLAPSSKSTSGGTAALGCLVKDYFPEPVTVSWNSGALTSGVHTFPAVLQSSGLYSLSSVVTVPSSSLGTQTYICNVNHKPSNTKVDKRVEPKSCGTKGCQGSADHVVSISGVPLQLQPNSIQTKVDSIAWKKLLPSQNGFHHILKWENGSLPSNTSNDRFSFIVKNLSLLIKAAQQQDSGLYCLEVTSISGKVQTATFQVFVFDKVEKPRLQGQGKILDRGRCQVALSCLVSRDGNVSYAWYRGSKLIQTAGNLTYLDEEVDINGTHTYTCNVSNPVSWESHTLNLTQDCQNAHQEFRFWPFLVIIVILSALFLGTLACFCVWRRKRKEKQSETSPKEFLTIYEDVKDLKTRRNHEQEQTFPGGGSTIYSMIQSQSSAPTSQEPAYTLYSLIQPSRKSGSRKRNHSPSFNSTIYEVIGKSQPKAQNPARLSRKELENFDVYSRAKRSGSGVKQTLNFDLLKLAGDVESNPGPSRGHMTEYKPTVRLATRDDVPRAVRTLAAAFADYPATRHTVDPDRHIERVTELQELFLTRVGLDIGKVWVADDGAAVAVWTTPESVEAGAVFAEIGPRMAELSGSRLAAQQQMEGLLAPHRPKEPAWFLATVGVSPDHQGKGLGSAVVLPGVEAAERAGVPAFLETSAPRNLPFYERLGFTVTADVEVPEGPRTWCMTRKPGA

SEQ ID NO: 6545 - protein, 1716 aa, Artificial Sequence
  Synthetic Polypeptide
MALPVTALLLPLALLLHAARPEVQLVESGGGLVQAGGSLRLSCAASGRTFSMGWFRQAPGKEREFVAAITYSGGSPYYADSVKGRFTISRDNAKNTVYLQMNSLKPEDTAVYYCAANPTYGSDWNAENWGQGTQVTVSSGTGGGGSGGGGSGGGGSEFDIQMTQSPSSLSASVGDRVTITCKASDHINNWLAWYQQKPGQAPKLLIYGATTLETGVPSRFSGSGSGTDYTLTISSLQPEDFATYYCQQSWNTPWTFGQGTKLEIKRLEGQPKANPTVTLFPPSSEELQANKATLVCLISDFYPGAVTVAWKADGSPVKAGVETTKPSKQSNNKYAASSYLSLTPEQWKSHRSYSCQVTHEGSTVEKTVAPTECSGSKGCQGSADHVVSISGVPLQLQPNSIQTKVDSIAWKKLLPSQNGFHHILKWENGSLPSNTSNDRFSFIVKNLSLLIKAAQQQDSGLYCLEVTSISGKVQTATFQVFVFDKVEKPRLQGQGKILDRGRCQVALSCLVSRDGNVSYAWYRGSKLIQTAGNLTYLDEEVDINGTHTYTCNVSNPVSWESHTLNLTQDCQNAHQEFRFWPFLVIIVILSALFLGTLACFCVWRRKRKEKQSETSPKEFLTIYEDVKDLKTRRNHEQEQTFPGGGSTIYSMIQSQSSAPTSQEPAYTLYSLIQPSRKSGSRKRNHSPSFNSTIYEVIGKSQPKAQNPARLSRKELENFDVYSRAKRSGSGATNFSLLKQAGDVEENPGPTSMDWIWRILFLVGAATGAHSGPEVQLVESGGGLVQAGGSLRLSCAASGRTFTMGWFRQAPGKEREFVAAISLSPTLAYYADSVKGRFTISRDNAKNTVVLQMNSLKPEDTALYYCAADRKSVMSIRPDYWGQGTQVTVSSGSGGGGSGGGGSGGGGSFEQVQLQQPGAELVKPGASVKMSCKASGYAFSSYWINWMKQKPGQGLEWIGQIYPGDGDTNYNGKFKGRATLTADTSSSTAYMQLSSLTSEDSAVYFCARSITTVVGCAMDYWGQGTSVTVSSTRASTKGPSVFPLAPSSKSTSGGTAALGCLVKDYFPEPVTVSWNSGALTSGVHTFPAVLQSSGLYSLSSVVTVPSSSLGTQTYICNVNHKPSNTKVDKRVEPKSCGTKGCQGSADHVVSISGVPLQLQPNSIQTKVDSIAWKKLLPSQNGFHHILKWENGSLPSNTSNDRFSFIVKNLSLLIKAAQQQDSGLYCLEVTSISGKVQTATFQVFVFDKVEKPRLQGQGKILDRGRCQVALSCLVSRDGNVSYAWYRGSKLIQTAGNLTYLDEEVDINGTHTYTCNVSNPVSWESHTLNLTQDCQNAHQEFRFWPFLVIIVILSALFLGTLACFCVWRRKRKEKQSETSPKEFLTIYEDVKDLKTRRNHEQEQTFPGGGSTIYSMIQSQSSAPTSQEPAYTLYSLIQPSRKSGSRKRNHSPSFNSTIYEVIGKSQPKAQNPARLSRKELENFDVYSRAKRSGSGVKQTLNFDLLKLAGDVESNPGPSRGHMTEYKPTVRLATRDDVPRAVRTLAAAFADYPATRHTVDPDRHIERVTELQELFLTRVGLDIGKVWVADDGAAVAVWTTPESVEAGAVFAEIGPRMAELSGSRLAAQQQMEGLLAPHRPKEPAWFLATVGVSPDHQGKGLGSAVVLPGVEAAERAGVPAFLETSAPRNLPFYERLGFTVTADVEVPEGPRTWCMTRKPGA

SEQ ID NO: 6546 - protein, 1449 aa, Artificial Sequence
  Synthetic Polypeptide
MALPVTALLLPLALLLHAARPEVQLVESGGGLVQAGGSLRLSCAASGRTFSMGWFRQAPGKEREFVAAITYSGGSPYYADSVKGRFTISRDNAKNTVYLQMNSLKPEDTAVYYCAANPTYGSDWNAENWGQGTQVTVSSLEGQPKANPTVTLFPPSSEELQANKATLVCLISDFYPGAVTVAWKADGSPVKAGVETTKPSKQSNNKYAASSYLSLTPEQWKSHRSYSCQVTHEGSTVEKTVAPTECSGSKGCQGSADHVVSISGVPLQLQPNSIQTKVDSIAWKKLLPSQNGFHHILKWENGSLPSNTSNDRFSFIVKNLSLLIKAAQQQDSGLYCLEVTSISGKVQTATFQVFVFDKVEKPRLQGQGKILDRGRCQVALSCLVSRDGNVSYAWYRGSKLIQTAGNLTYLDEEVDINGTHTYTCNVSNPVSWESHTLNLTQDCQNAHQEFRFWPFLVIIVILSALFLGTLACFCVWRRKRKEKQSETSPKEFLTIYEDVKDLKTRRNHEQEQTFPGGGSTIYSMIQSQSSAPTSQEPAYTLYSLIQPSRKSGSRKRNHSPSFNSTIYEVIGKSQPKAQNPARLSRKELENFDVYSRAKRSGSGATNFSLLKQAGDVEENPGPTSMDWIWRILFLVGAATGAHSGPEVQLVESGGGLVQAGGSLRLSCAASGRTFTMGWFRQAPGKEREFVAAISLSPTLAYYADSVKGRFTISRDNAKNTVVLQMNSLKPEDTALYYCAADRKSVMSIRPDYWGQGTQVTVSSTRASTKGPSVFPLAPSSKSTSGGTAALGCLVKDYFPEPVTVSWNSGALTSGVHTFPAVLQSSGLYSLSSVVTVPSSSLGTQTYICNVNHKPSNTKVDKRVEPKSCGTKGCQGSADHVVSISGVPLQLQPNSIQTKVDSIAWKKLLPSQNGFHHILKWENGSLPSNTSNDRFSFIVKNLSLLIKAAQQQDSGLYCLEVTSISGKVQTATFQVFVFDKVEKPRLQGQGKILDRGRCQVALSCLVSRDGNVSYAWYRGSKLIQTAGNLTYLDEEVDINGTHTYTCNVSNPVSWESHTLNLTQDCQNAHQEFRFWPFLVIIVILSALFLGTLACFCVWRRKRKEKQSETSPKEFLTIYEDVKDLKTRRNHEQEQTFPGGGSTIYSMIQSQSSAPTSQEPAYTLYSLIQPSRKSGSRKRNHSPSFNSTIYEVIGKSQPKAQNPARLSRKELENFDVYSRAKRSGSGVKQTLNFDLLKLAGDVESNPGPSRGHMTEYKPTVRLATRDDVPRAVRTLAAAFADYPATRHTVDPDRHIERVTELQELFLTRVGLDIGKVWVADDGAAVAVWTTPESVEAGAVFAEIGPRMAELSGSRLAAQQQMEGLLAPHRPKEPAWFLATVGVSPDHQGKGLGSAVVLPGVEAAERAGVPAFLETSAPRNLPFYERLGFTVTADVEVPEGPRTWCMTRKPGA

SEQ ID NO: 6547 - protein, 1457 aa, Artificial Sequence
  Synthetic Polypeptide
MALPVTALLLPLALLLHAARPDIQMTQSPSSLSASVGDRVTITCKASDHINNWLAWYQQKPGQAPKLLIYGATTLETGVPSRFSGSGSGTDYTLTISSLQPEDFATYYCQQSWNTPWTFGQGTKLEIKRLEDLKNVFPPEVAVFEPSEAEISHTQKATLVCLATGFYPDHVELSWWVNGKEVHSGVSTDPQPLKEQPALNDSRYCLSSRLRVSATFWQNPRNHFRCQVQFYGLSENDEWTQDRAKPVTQIVSAEAWGRADCGSKGCQGSADHVVSISGVPLQLQPNSIQTKVDSIAWKKLLPSQNGFHHILKWENGSLPSNTSNDRFSFIVKNLSLLIKAAQQQDSGLYCLEVTSISGKVQTATFQVFVFDKVEKPRLQGQGKILDRGRCQVALSCLVSRDGNVSYAWYRGSKLIQTAGNLTYLDEEVDINGTHTYTCNVSNPVSWESHTLNLTQDCQNAHQEFRFWPFLVIIVILSALFLGTLACFCVWRRKRKEKQSETSPKEFLTIYEDVKDLKTRRNHEQEQTFPGGGSTIYSMIQSQSSAPTSQEPAYTLYSLIQPSRKSGSRKRNHSPSFNSTIYEVIGKSQPKAQNPARLSRKELENFDVYSRAKRSGSGATNFSLLKQAGDVEENPGPTSMDWIWRILFLVGAATGAHSFEQVQLQQPGAELVKPGASVKMSCKASGYAFSSYWINWMKQKPGQGLEWIGQIYPGDGDTNYNGKFKGRATLTADTSSSTAYMQLSSLTSEDSAVYFCARSITTVVGCAMDYWGQGTSVTVSSTRIQNPDPAVYQLRDSKSSDKSVCLFTDFDSQTNVSQSKDSDVYITDKTVLDMRSMDFKSNSAVAWSNKSDFACANAFNNSIIPEDTFFPSPESSCGTKGCQGSADHVVSISGVPLQLQPNSIQTKVDSIAWKKLLPSQNGFHHILKWENGSLPSNTSNDRFSFIVKNLSLLIKAAQQQDSGLYCLEVTSISGKVQTATFQVFVFDKVEKPRLQGQGKILDRGRCQVALSCLVSRDGNVSYAWYRGSKLIQTAGNLTYLDEEVDINGTHTYTCNVSNPVSWESHTLNLTQDCQNAHQEFRFWPFLVIIVILSALFLGTLACFCVWRRKRKEKQSETSPKEFLTIYEDVKDLKTRRNHEQEQTFPGGGSTIYSMIQSQSSAPTSQEPAYTLYSLIQPSRKSGSRKRNHSPSFNSTIYEVIGKSQPKAQNPARLSRKELENFDVYSRAKRSGSGVKQTLNFDLLKLAGDVESNPGPSRGHMTEYKPTVRLATRDDVPRAVRTLAAAFADYPATRHTVDPDRHIERVTELQELFLTRVGLDIGKVWVADDGAAVAVWTTPESVEAGAVFAEIGPRMAELSGSRLAAQQQMEGLLAPHRPKEPAWFLATVGVSPDHQGKGLGSAVVLPGVEAAERAGVPAFLETSAPRNLPFYERLGFTVTADVEVPEGPRTWCMTRKPGA

SEQ ID NO: 6548 - protein, 1594 aa, Artificial Sequence
  Synthetic Polypeptide
MALPVTALLLPLALLLHAARPEVQLVESGGGLVQAGGSLRLSCAASGRTFSMGWFRQAPGKEREFVAAITYSGGSPYYADSVKGRFTISRDNAKNTVYLQMNSLKPEDTAVYYCAANPTYGSDWNAENWGQGTQVTVSSGTGGGGSGGGGSGGGGSEFDIQMTQSPSSLSASVGDRVTITCKASDHINNWLAWYQQKPGQAPKLLIYGATTLETGVPSRFSGSGSGTDYTLTISSLQPEDFATYYCQQSWNTPWTFGQGTKLEIKRLEDLKNVFPPEVAVFEPSEAEISHTQKATLVCLATGFYPDHVELSWWVNGKEVHSGVSTDPQPLKEQPALNDSRYCLSSRLRVSATFWQNPRNHFRCQVQFYGLSENDEWTQDRAKPVTQIVSAEAWGRADCGSKGCQGSADHVVSISGVPLQLQPNSIQTKVDSIAWKKLLPSQNGFHHILKWENGSLPSNTSNDRFSFIVKNLSLLIKAAQQQDSGLYCLEVTSISGKVQTATFQVFVFDKVEKPRLQGQGKILDRGRCQVALSCLVSRDGNVSYAWYRGSKLIQTAGNLTYLDEEVDINGTHTYTCNVSNPVSWESHTLNLTQDCQNAHQEFRFWPFLVIIVILSALFLGTLACFCVWRRKRKEKQSETSPKEFLTIYEDVKDLKTRRNHEQEQTFPGGGSTIYSMIQSQSSAPTSQEPAYTLYSLIQPSRKSGSRKRNHSPSFNSTIYEVIGKSQPKAQNPARLSRKELENFDVYSRAKRSGSGATNFSLLKQAGDVEENPGPTSMDWIWRILFLVGAATGAHSFEQVQLQQPGAELVKPGASVKMSCKASGYAFSSYWINWMKQKPGQGLEWIGQIYPGDGDTNYNGKFKGRATLTADTSSSTAYMQLSSLTSEDSAVYFCARSITTVVGCAMDYWGQGTSVTVSSTRIQNPDPAVYQLRDSKSSDKSVCLFTDFDSQTNVSQSKDSDVYITDKTVLDMRSMDFKSNSAVAWSNKSDFACANAFNNSIIPEDTFFPSPESSCGTKGCQGSADHVVSISGVPLQLQPNSIQTKVDSIAWKKLLPSQNGFHHILKWENGSLPSNTSNDRFSFIVKNLSLLIKAAQQQDSGLYCLEVTSISGKVQTATFQVFVFDKVEKPRLQGQGKILDRGRCQVALSCLVSRDGNVSYAWYRGSKLIQTAGNLTYLDEEVDINGTHTYTCNVSNPVSWESHTLNLTQDCQNAHQEFRFWPFLVIIVILSALFLGTLACFCVWRRKRKEKQSETSPKEFLTIYEDVKDLKTRRNHEQEQTFPGGGSTIYSMIQSQSSAPTSQEPAYTLYSLIQPSRKSGSRKRNHSPSFNSTIYEVIGKSQPKAQNPARLSRKELENFDVYSRAKRSGSGVKQTLNFDLLKLAGDVESNPGPSRGHMTEYKPTVRLATRDDVPRAVRTLAAAFADYPATRHTVDPDRHIERVTELQELFLTRVGLDIGKVWVADDGAAVAVWTTPESVEAGAVFAEIGPRMAELSGSRLAAQQQMEGLLAPHRPKEPAWFLATVGVSPDHQGKGLGSAVVLPGVEAAERAGVPAFLETSAPRNLPFYERLGFTVTADVEVPEGPRTWCMTRKPGA

SEQ ID NO: 6549 - protein, 1731 aa, Artificial Sequence
  Synthetic Polypeptide
MALPVTALLLPLALLLHAARPEVQLVESGGGLVQAGGSLRLSCAASGRTFSMGWFRQAPGKEREFVAAITYSGGSPYYADSVKGRFTISRDNAKNTVYLQMNSLKPEDTAVYYCAANPTYGSDWNAENWGQGTQVTVSSGTGGGGSGGGGSGGGGSEFDIQMTQSPSSLSASVGDRVTITCKASDHINNWLAWYQQKPGQAPKLLIYGATTLETGVPSRFSGSGSGTDYTLTISSLQPEDFATYYCQQSWNTPWTFGQGTKLEIKRLEDLKNVFPPEVAVFEPSEAEISHTQKATLVCLATGFYPDHVELSWWVNGKEVHSGVSTDPQPLKEQPALNDSRYCLSSRLRVSATFWQNPRNHFRCQVQFYGLSENDEWTQDRAKPVTQIVSAEAWGRADCGSKGCQGSADHVVSISGVPLQLQPNSIQTKVDSIAWKKLLPSQNGFHHILKWENGSLPSNTSNDRFSFIVKNLSLLIKAAQQQDSGLYCLEVTSISGKVQTATFQVFVFDKVEKPRLQGQGKILDRGRCQVALSCLVSRDGNVSYAWYRGSKLIQTAGNLTYLDEEVDINGTHTYTCNVSNPVSWESHTLNLTQDCQNAHQEFRFWPFLVIIVILSALFLGTLACFCVWRRKRKEKQSETSPKEFLTIYEDVKDLKTRRNHEQEQTFPGGGSTIYSMIQSQSSAPTSQEPAYTLYSLIQPSRKSGSRKRNHSPSFNSTIYEVIGKSQPKAQNPARLSRKELENFDVYSRAKRSGSGATNFSLLKQAGDVEENPGPTSMDWIWRILFLVGAATGAHSGPEVQLVESGGGLVQAGGSLRLSCAASGRTFTMGWFRQAPGKEREFVAAISLSPTLAYYADSVKGRFTISRDNAKNTVVLQMNSLKPEDTALYYCAADRKSVMSIRPDYWGQGTQVTVSSGSGGGGSGGGGSGGGGSFEQVQLQQPGAELVKPGASVKMSCKASGYAFSSYWINWMKQKPGQGLEWIGQIYPGDGDTNYNGKFKGRATLTADTSSSTAYMQLSSLTSEDSAVYFCARSITTVVGCAMDYWGQGTSVTVSSTRIQNPDPAVYQLRDSKSSDKSVCLFTDFDSQTNVSQSKDSDVYITDKTVLDMRSMDFKSNSAVAWSNKSDFACANAFNNSIIPEDTFFPSPESSCGTKGCQGSADHVVSISGVPLQLQPNSIQTKVDSIAWKKLLPSQNGFHHILKWENGSLPSNTSNDRFSFIVKNLSLLIKAAQQQDSGLYCLEVTSISGKVQTATFQVFVFDKVEKPRLQGQGKILDRGRCQVALSCLVSRDGNVSYAWYRGSKLIQTAGNLTYLDEEVDINGTHTYTCNVSNPVSWESHTLNLTQDCQNAHQEFRFWPFLVIIVILSALFLGTLACFCVWRRKRKEKQSETSPKEFLTIYEDVKDLKTRRNHEQEQTFPGGGSTIYSMIQSQSSAPTSQEPAYTLYSLIQPSRKSGSRKRNHSPSFNSTIYEVIGKSQPKAQNPARLSRKELENFDVYSRAKRSGSGVKQTLNFDLLKLAGDVESNPGPSRGHMTEYKPTVRLATRDDVPRAVRTLAAAFADYPATRHTVDPDRHIERVTELQELFLTRVGLDIGKVWVADDGAAVAVWTTPESVEAGAVFAEIGPRMAELSGSRLAAQQQMEGLLAPHRPKEPAWFLATVGVSPDHQGKGLGSAVVLPGVEAAERAGVPAFLETSAPRNLPFYERLGFTVTADVEVPEGPRTWCMTRKPGA

SEQ ID NO: 6550 - protein, 1464 aa, Artificial Sequence
  Synthetic Polypeptide
MALPVTALLLPLALLLHAARPEVQLVESGGGLVQAGGSLRLSCAASGRTFSMGWFRQAPGKEREFVAAITYSGGSPYYADSVKGRFTISRDNAKNTVYLQMNSLKPEDTAVYYCAANPTYGSDWNAENWGQGTQVTVSSLEDLKNVFPPEVAVFEPSEAEISHTQKATLVCLATGFYPDHVELSWWVNGKEVHSGVSTDPQPLKEQPALNDSRYCLSSRLRVSATFWQNPRNHFRCQVQFYGLSENDEWTQDRAKPVTQIVSAEAWGRADCGSKGCQGSADHVVSISGVPLQLQPNSIQTKVDSIAWKKLLPSQNGFHHILKWENGSLPSNTSNDRFSFIVKNLSLLIKAAQQQDSGLYCLEVTSISGKVQTATFQVFVFDKVEKPRLQGQGKILDRGRCQVALSCLVSRDGNVSYAWYRGSKLIQTAGNLTYLDEEVDINGTHTYTCNVSNPVSWESHTLNLTQDCQNAHQEFRFWPFLVIIVILSALFLGTLACFCVWRRKRKEKQSETSPKEFLTIYEDVKDLKTRRNHEQEQTFPGGGSTIYSMIQSQSSAPTSQEPAYTLYSLIQPSRKSGSRKRNHSPSFNSTIYEVIGKSQPKAQNPARLSRKELENFDVYSRAKRSGSGATNFSLLKQAGDVEENPGPTSMDWIWRILFLVGAATGAHSGPEVQLVESGGGLVQAGGSLRLSCAASGRTFTMGWFRQAPGKEREFVAAISLSPTLAYYADSVKGRFTISRDNAKNTVVLQMNSLKPEDTALYYCAADRKSVMSIRPDYWGQGTQVTVSSTRIQNPDPAVYQLRDSKSSDKSVCLFTDFDSQTNVSQSKDSDVYITDKTVLDMRSMDFKSNSAVAWSNKSDFACANAFNNSIIPEDTFFPSPESSCGTKGCQGSADHVVSISGVPLQLQPNSIQTKVDSIAWKKLLPSQNGFHHILKWENGSLPSNTSNDRFSFIVKNLSLLIKAAQQQDSGLYCLEVTSISGKVQTATFQVFVFDKVEKPRLQGQGKILDRGRCQVALSCLVSRDGNVSYAWYRGSKLIQTAGNLTYLDEEVDINGTHTYTCNVSNPVSWESHTLNLTQDCQNAHQEFRFWPFLVIIVILSALFLGTLACFCVWRRKRKEKQSETSPKEFLTIYEDVKDLKTRRNHEQEQTFPGGGSTIYSMIQSQSSAPTSQEPAYTLYSLIQPSRKSGSRKRNHSPSFNSTIYEVIGKSQPKAQNPARLSRKELENFDVYSRAKRSGSGVKQTLNFDLLKLAGDVESNPGPSRGHMTEYKPTVRLATRDDVPRAVRTLAAAFADYPATRHTVDPDRHIERVTELQELFLTRVGLDIGKVWVADDGAAVAVWTTPESVEAGAVFAEIGPRMAELSGSRLAAQQQMEGLLAPHRPKEPAWFLATVGVSPDHQGKGLGSAVVLPGVEAAERAGVPAFLETSAPRNLPFYERLGFTVTADVEVPEGPRTWCMTRKPGA

SEQ ID NO: 6551 - protein, 741 aa, Artificial Sequence
  Synthetic Polypeptide
MALPVTALLLPLALLLHAARPACEVQLLESGGGLIQPGGSLRLSCAASGFTFSSHAMTWVRQAPGKGLEWVSAISGSGDYTHYADSVKGRFTISRDNSKNTVYLQMNSLRAEDSAVYYCAKDEDGGSLLGHRGQGTLVTVSSGTGGGGSGGGGSGGGGSEFGSLEKGCQGSADHVVSISGVPLQLQPNSIQTKVDSIAWKKLLPSQNGFHHILKWENGSLPSNTSNDRFSFIVKNLSLLIKAAQQQDSGLYCLEVTSISGKVQTATFQVFVFDKVEKPRLQGQGKILDRGRCQVALSCLVSRDGNVSYAWYRGSKLIQTAGNLTYLDEEVDINGTHTYTCNVSNPVSWESHTLNLTQDCQNAHQEFRFWPFLVIIVILSALFLGTLACFCVWRRKRKEKQSETSPKEFLTIYEDVKDLKTRRNHEQEQTFPGGGSTIYSMIQSQSSAPTSQEPAYTLYSLIQPSRKSGSRKRNHSPSFNSTIYEVIGKSQPKAQNPARLSRKELENFDVYSRAKRSGSGATNFSLLKQAGDVEENPGPTRGHMTEYKPTVRLATRDDVPRAVRTLAAAFADYPATRHTVDPDRHIERVTELQELFLTRVGLDIGKVWVADDGAAVAVWTTPESVEAGAVFAEIGPRMAELSGSRLAAQQQMEGLLAPHRPKEPAWFLATVGVSPDHQGKGLGSAVVLPGVEAAERAGVPAFLETSAPRNLPFYERLGFTVTADVEVPEGPRTWCMTRKPGA

SEQ ID NO: 6552 - protein, 613 aa, Artificial Sequence; identical to SEQ ID NO: 6520
  Synthetic Polypeptide

SEQ ID NO: 6553 - protein, 613 aa, Artificial Sequence; identical to SEQ ID NO: 6521
  Synthetic Polypeptide

SEQ ID NO: 6554 - protein, 487 aa, Artificial Sequence; identical to SEQ ID NO: 6522
  Synthetic Polypeptide

SEQ ID NO: 6555 - protein, 487 aa, Artificial Sequence; identical to SEQ ID NO: 6523
  Synthetic Polypeptide

SEQ ID NO: 6556 - protein, 487 aa, Artificial Sequence; identical to SEQ ID NO: 6524
  Synthetic Polypeptide

SEQ ID NO: 6557 - protein, 489 aa, Artificial Sequence; identical to SEQ ID NO: 6525
  Synthetic Polypeptide

SEQ ID NO: 6558 - protein, 497 aa, Artificial Sequence; identical to SEQ ID NO: 6526
  Synthetic Polypeptide

SEQ ID NO: 6559 - protein, 493 aa, Artificial Sequence; identical to SEQ ID NO: 6527
  Synthetic Polypeptide

SEQ ID NO: 6560 - protein, 488 aa, Artificial Sequence; identical to SEQ ID NO: 6528
  Synthetic Polypeptide

SEQ ID NO: 6561 - protein, 493 aa, Artificial Sequence; identical to SEQ ID NO: 6529
  Synthetic Polypeptide

SEQ ID NO: 6562 - protein, 427 aa, Artificial Sequence; identical to SEQ ID NO: 6530
  Synthetic Polypeptide

SEQ ID NO: 6563 - protein, 458 aa, Artificial Sequence; identical to SEQ ID NO: 6531
  Synthetic Polypeptide

SEQ ID NO: 6564 - protein, 459 aa, Artificial Sequence; identical to SEQ ID NO: 6532
  Synthetic Polypeptide

SEQ ID NO: 6565 - protein, 676 aa, Artificial Sequence; identical to SEQ ID NO: 6533
  Synthetic Polypeptide

SEQ ID NO: 6566 - protein, 556 aa, Artificial Sequence; identical to SEQ ID NO: 6534
  Synthetic Polypeptide

SEQ ID NO: 6567 - protein, 422 aa, Artificial Sequence; identical to SEQ ID NO: 6535
  Synthetic Polypeptide

SEQ ID NO: 6568 - protein, 397 aa, Artificial Sequence; identical to SEQ ID NO: 6536
  Synthetic Polypeptide

SEQ ID NO: 6569 - protein, 655 aa, Artificial Sequence; identical to SEQ ID NO: 6537
  Synthetic Polypeptide

SEQ ID NO: 6570 - protein, 655 aa, Artificial Sequence; identical to SEQ ID NO: 6538
  Synthetic Polypeptide

SEQ ID NO: 6571 - protein, 1043 aa, Artificial Sequence
  Synthetic Polypeptide
MALPVTALLLPLALLLHAARPDIQMTQSPSSLSASVGDRVTITCKASDHINNWLAWYQQKPGQAPKLLIYGATTLETGVPSRFSGSGSGTDYTLTISSLQPEDFATYYCQQSWNTPWTFGQGTKLEIKRLEGMRTEDLPKAVVFLEPQWYRVLEKDSVTLKCQGAYSPEDNSTQWFHNESLISSQASSYFIDAATVDDSGEYRCQTNLSTLSDPVQLEVHIGWLLLQAPRWVFKEEDPIHLRCHSWKNTALHKVTYLQNGKGRKYFHHNSDFYIPKATLKDSGSYFCRGLVGSKNVSSETVNITITQGLAVSTISSFFPPGYQVSFCLVMVLLFAVDTGLYFSVKTNIRSSTRDWKDHKFKWRKDPQDKRAKRSGSGATNFSLLKQAGDVEENPGPTSMDWIWRILFLVGAATGAHSFEQVQLQQPGAELVKPGASVKMSCKASGYAFSSYWINWMKQKPGQGLEWIGQIYPGDGDTNYNGKFKGRATLTADTSSSTAYMQLSSLTSEDSAVYFCARSITTVVGCAMDYWGQGTSVTVSSTRTPAAPPKAVLKLEPQWINVLQEDSVTLTCRGTHSPESDSIQWFHNGNLIPTHTQPSYRFKANNNDSGEYTCQTGQTSLSDPVHLTVLSEWLVLQTPHLEFQEGETIVLRCHSWKDKPLVKVTFFQNGKSKKFSRSDPNFSIPQANHSHSGDYHCTGNIGYTLYSSKPVTITVQAPSSSPMGIIVAVVTGIAVAAIVAAVVALIYCRKKRISALPGYPECREMGETLPEKPANPTNPDEADKVGAENTITYSLLMHPDALEEPDDQNRIRAKRSGSGVKQTLNFDLLKLAGDVESNPGPSRGHMTEYKPTVRLATRDDVPRAVRTLAAAFADYPATRHTVDPDRHIERVTELQELFLTRVGLDIGKVWVADDGAAVAVWTTPESVEAGAVFAEIGPRMAELSGSRLAAQQQMEGLLAPHRPKEPAWFLATVGVSPDHQGKGLGSAVVLPGVEAAERAGVPAFLETSAPRNLPFYERLGFTVTADVEVPEGPRTWCMTRKPGA

SEQ ID NO: 6572 - protein, 1097 aa, Artificial Sequence
  Synthetic Polypeptide
MALPVTALLLPLALLLHAARPACEVQLLESGGGLIQPGGSLRLSCAASGFTFSSHAMTWVRQAPGKGLEWVSAISGSGDYTHYADSVKGRFTISRDNSKNTVYLQMNSLRAEDSAVYYCAKDEDGGSLLGHRGQGTLVTVSSGTGGGGSGGGGSGGGGSEFGSLEGMRTEDLPKAVVFLEPQWYRVLEKDSVTLKCQGAYSPEDNSTQWFHNESLISSQASSYFIDAATVDDSGEYRCQTNLSTLSDPVQLEVHIGWLLLQAPRWVFKEEDPIHLRCHSWKNTALHKVTYLQNGKGRKYFHHNSDFYIPKATLKDSGSYFCRGLVGSKNVSSETVNITITQGLAVSTISSFFPPGYQVSFCLVMVLLFAVDTGLYFSVKTNIRSSTRDWKDHKFKWRKDPQDKRAKRSGSGATNFSLLKQAGDVEENPGPTSATMDWIWRILFLVGAATGAHSGPEVQLVESGGGLVQAGGSLRLSCAASGRTFSMGWFRQAPGKEREFVAAITYSGGSPYYADSVKGRFTISRDNAKNTVYLQMNSLKPEDTAVYYCAANPTYGSDWNAENWGQGTQVTVSSGSGGGGSGGGGSGGGGSFEGSTRTPAAPPKAVLKLEPQWINVLQEDSVTLTCRGTHSPESDSIQWFHNGNLIPTHTQPSYRFKANNNDSGEYTCQTGQTSLSDPVHLTVLSEWLVLQTPHLEFQEGETIVLRCHSWKDKPLVKVTFFQNGKSKKFSRSDPNFSIPQANHSHSGDYHCTGNIGYTLYSSKPVTITVQAPSSSPMGIIVAVVTGIAVAAIVAAVVALIYCRKKRISALPGYPECREMGETLPEKPANPTNPDEADKVGAENTITYSLLMHPDALEEPDDQNRIRAKRSGSGVKQTLNFDLLKLAGDVESNPGPSRGHMTEYKPTVRLATRDDVPRAVRTLAAAFADYPATRHTVDPDRHIERVTELQELFLTRVGLDIGKVWVADDGAAVAVWTTPESVEAGAVFAEIGPRMAELSGSRLAAQQQMEGLLAPHRPKEPAWFLATVGVSPDHQGKGLGSAVVLPGVEAAERAGVPAFLETSAPRNLPFYERLGFTVTADVEVPEGPRTWCMTRKPGA

SEQ ID NO: 6573 - protein, 1248 aa, Artificial Sequence
  Synthetic Polypeptide
MALPVTALLLPLALLLHAARPDIQMTQSPSSLSASVGDRVTITCKASDHINNWLAWYQQKPGQAPKLLIYGATTLETGVPSRFSGSGSGTDYTLTISSLQPEDFATYYCQQSWNTPWTFGQGTKLEIKRLEGQPKANPTVTLFPPSSEELQANKATLVCLISDFYPGAVTVAWKADGSPVKAGVETTKPSKQSNNKYAASSYLSLTPEQWKSHRSYSCQVTHEGSTVEKTVAPTECSGSGMRTEDLPKAVVFLEPQWYRVLEKDSVTLKCQGAYSPEDNSTQWFHNESLISSQASSYFIDAATVDDSGEYRCQTNLSTLSDPVQLEVHIGWLLLQAPRWVFKEEDPIHLRCHSWKNTALHKVTYLQNGKGRKYFHHNSDFYIPKATLKDSGSYFCRGLVGSKNVSSETVNITITQGLAVSTISSFFPPGYQVSFCLVMVLLFAVDTGLYFSVKTNIRSSTRDWKDHKFKWRKDPQDKRAKRSGSGATNFSLLKQAGDVEENPGPTSMDWIWRILFLVGAATGAHSFEQVQLQQPGAELVKPGASVKMSCKASGYAFSSYWINWMKQKPGQGLEWIGQIYPGDGDTNYNGKFKGRATLTADTSSSTAYMQLSSLTSEDSAVYFCARSITTVVGCAMDYWGQGTSVTVSSTRASTKGPSVFPLAPSSKSTSGGTAALGCLVKDYFPEPVTVSWNSGALTSGVHTFPAVLQSSGLYSLSSVVTVPSSSLGTQTYICNVNHKPSNTKVDKRVEPKSCGTTPAAPPKAVLKLEPQWINVLQEDSVTLTCRGTHSPESDSIQWFHNGNLIPTHTQPSYRFKANNNDSGEYTCQTGQTSLSDPVHLTVLSEWLVLQTPHLEFQEGETIVLRCHSWKDKPLVKVTFFQNGKSKKFSRSDPNFSIPQANHSHSGDYHCTGNIGYTLYSSKPVTITVQAPSSSPMGIIVAVVTGIAVAAIVAAVVALIYCRKKRISALPGYPECREMGETLPEKPANPTNPDEADKVGAENTITYSLLMHPDALEEPDDQNRIRAKRSGSGVKQTLNFDLLKLAGDVESNPGPSRGGIHTMATYEVLCEVARKLGTDDREVVLFLLNVFIPQPTLAQLIGALRALKEEGRLTFPLLAECLFRAGRRDLLRDLLHLDPRFLERHLAGTMSYFSPYQLTVLHVDGELCARDIRSLIFLSKDTIGSRSTPQTFLHWVYCMENLDLLGPTDVDALMSMLRSLSRVDLQRQVQTLMGLHLSGPSHSQHYRHTP

SEQ ID NO: 6574 - protein, 1301 aa, Artificial Sequence
  Synthetic Polypeptide
MALPVTALLLPLALLLHAARPDIQMTQSPSSLSASVGDRVTITCKASDHINNWLAWYQQKPGQAPKLLIYGATTLETGVPSRFSGSGSGTDYTLTISSLQPEDFATYYCQQSWNTPWTFGQGTKLEIKRLEGQPKANPTVTLFPPSSEELQANKATLVCLISDFYPGAVTVAWKADGSPVKAGVETTKPSKQSNNKYAASSYLSLTPEQWKSHRSYSCQVTHEGSTVEKTVAPTECSGSGMRTEDLPKAVVFLEPQWYRVLEKDSVTLKCQGAYSPEDNSTQWFHNESLISSQASSYFIDAATVDDSGEYRCQTNLSTLSDPVQLEVHIGWLLLQAPRWVFKEEDPIHLRCHSWKNTALHKVTYLQNGKGRKYFHHNSDFYIPKATLKDSGSYFCRGLVGSKNVSSETVNITITQGLAVSTISSFFPPGYQVSFCLVMVLLFAVDTGLYFSVKTNIRSSTRDWKDHKFKWRKDPQDKRAKRSGSGATNFSLLKQAGDVEENPGPTSMDWIWRILFLVGAATGAHSFEQVQLQQPGAELVKPGASVKMSCKASGYAFSSYWINWMKQKPGQGLEWIGQIYPGDGDTNYNGKFKGRATLTADTSSSTAYMQLSSLTSEDSAVYFCARSITTVVGCAMDYWGQGTSVTVSSTRASTKGPSVFPLAPSSKSTSGGTAALGCLVKDYFPEPVTVSWNSGALTSGVHTFPAVLQSSGLYSLSSVVTVPSSSLGTQTYICNVNHKPSNTKVDKRVEPKSCGTTPAAPPKAVLKLEPQWINVLQEDSVTLTCRGTHSPESDSIQWFHNGNLIPTHTQPSYRFKANNNDSGEYTCQTGQTSLSDPVHLTVLSEWLVLQTPHLEFQEGETIVLRCHSWKDKPLVKVTFFQNGKSKKFSRSDPNFSIPQANHSHSGDYHCTGNIGYTLYSSKPVTITVQAPSSSPMGIIVAVVTGIAVAAIVAAVVALIYCRKKRISALPGYPECREMGETLPEKPANPTNPDEADKVGAENTITYSLLMHPDALEEPDDQNRIRAKRSGSGVKQTLNFDLLKLAGDVESNPGPSRGGIHTMSDSKEVPSLPFLRHLLEELDSHEDSLLLFLCHDAAPGCTTVTQALCSLSQQRKLTLAALVEMLYVLQRMDLLKSRFGLSKEGAEQLLGTSFLTRYRKLMVCVGEELDSSELRALRLFACNLNPSLSTALSESSRFVELVLALENVGLVSPSSVSVLADMLRTLRRLDLCQQLVEYEQQEQARYRYCYAASPSLPVRTLRRGHGASEHEQLCMPVQESSDSPELLRTPVQESSSDSPEQTT

SEQ ID NO: 6575 - protein, 1256 aa, Artificial Sequence
  Synthetic Polypeptide
MALPVTALLLPLALLLHAARPDIQMTQSPSSLSASVGDRVTITCKASDHINNWLAWYQQKPGQAPKLLIYGATTLETGVPSRFSGSGSGTDYTLTISSLQPEDFATYYCQQSWNTPWTFGQGTKLEIKRLEGQPKANPTVTLFPPSSEELQANKATLVCLISDFYPGAVTVAWKADGSPVKAGVETTKPSKQSNNKYAASSYLSLTPEQWKSHRSYSCQVTHEGSTVEKTVAPTECSGSGMRTEDLPKAVVFLEPQWYRVLEKDSVTLKCQGAYSPEDNSTQWFHNESLISSQASSYFIDAATVDDSGEYRCQTNLSTLSDPVQLEVHIGWLLLQAPRWVFKEEDPIHLRCHSWKNTALHKVTYLQNGKGRKYFHHNSDFYIPKATLKDSGSYFCRGLVGSKNVSSETVNITITQGLAVSTISSFFPPGYQVSFCLVMVLLFAVDTGLYFSVKTNIRSSTRDWKDHKFKWRKDPQDKRAKRSGSGATNFSLLKQAGDVEENPGPTSMDWIWRILFLVGAATGAHSFEQVQLQQPGAELVKPGASVKMSCKASGYAFSSYWINWMKQKPGQGLEWIGQIYPGDGDTNYNGKFKGRATLTADTSSSTAYMQLSSLTSEDSAVYFCARSITTVVGCAMDYWGQGTSVTVSSTRASTKGPSVFPLAPSSKSTSGGTAALGCLVKDYFPEPVTVSWNSGALTSGVHTFPAVLQSSGLYSLSSVVTVPSSSLGTQTYICNVNHKPSNTKVDKRVEPKSCGTTPAAPPKAVLKLEPQWINVLQEDSVTLTCRGTHSPESDSIQWFHNGNLIPTHTQPSYRFKANNNDSGEYTCQTGQTSLSDPVHLTVLSEWLVLQTPHLEFQEGETIVLRCHSWKDKPLVKVTFFQNGKSKKFSRSDPNFSIPQANHSHSGDYHCTGNIGYTLYSSKPVTITVQAPSSSPMGIIVAVVTGIAVAAIVAAVVALIYCRKKRISALPGYPECREMGETLPEKPANPTNPDEADKVGAENTITYSLLMHPDALEEPDDQNRIRAKRSGSGVKQTLNFDLLKLAGDVESNPGPSRGHMTEYKPTVRLATRDDVPRAVRTLAAAFADYPATRHTVDPDRHIERVTELQELFLTRVGLDIGKVWVADDGAAVAVWTTPESVEAGAVFAEIGPRMAELSGSRLAAQQQMEGLLAPHRPKEPAWFLATVGVSPDHQGKGLGSAVVLPGVEAAERAGVPAFLETSAPRNLPFYERLGFTVTADVEVPEGPRTWCMTRKPGA

SEQ ID NO: 6576 - protein, 1393 aa, Artificial Sequence
  Synthetic Polypeptide
MALPVTALLLPLALLLHAARPEVQLVESGGGLVQAGGSLRLSCAASGRTFSMGWFRQAPGKEREFVAAITYSGGSPYYADSVKGRFTISRDNAKNTVYLQMNSLKPEDTAVYYCAANPTYGSDWNAENWGQGTQVTVSSGTGGGGSGGGGSGGGGSEFDIQMTQSPSSLSASVGDRVTITCKASDHINNWLAWYQQKPGQAPKLLIYGATTLETGVPSRFSGSGSGTDYTLTISSLQPEDFATYYCQQSWNTPWTFGQGTKLEIKRLEGQPKANPTVTLFPPSSEELQANKATLVCLISDFYPGAVTVAWKADGSPVKAGVETTKPSKQSNNKYAASSYLSLTPEQWKSHRSYSCQVTHEGSTVEKTVAPTECSGSGMRTEDLPKAVVFLEPQWYRVLEKDSVTLKCQGAYSPEDNSTQWFHNESLISSQASSYFIDAATVDDSGEYRCQTNLSTLSDPVQLEVHIGWLLLQAPRWVFKEEDPIHLRCHSWKNTALHKVTYLQNGKGRKYFHHNSDFYIPKATLKDSGSYFCRGLVGSKNVSSETVNITITQGLAVSTISSFFPPGYQVSFCLVMVLLFAVDTGLYFSVKTNIRSSTRDWKDHKFKWRKDPQDKRAKRSGSGATNFSLLKQAGDVEENPGPTSMDWIWRILFLVGAATGAHSFEQVQLQQPGAELVKPGASVKMSCKASGYAFSSYWINWMKQKPGQGLEWIGQIYPGDGDTNYNGKFKGRATLTADTSSSTAYMQLSSLTSEDSAVYFCARSITTVVGCAMDYWGQGTSVTVSSTRASTKGPSVFPLAPSSKSTSGGTAALGCLVKDYFPEPVTVSWNSGALTSGVHTFPAVLQSSGLYSLSSVVTVPSSSLGTQTYICNVNHKPSNTKVDKRVEPKSCGTTPAAPPKAVLKLEPQWINVLQEDSVTLTCRGTHSPESDSIQWFHNGNLIPTHTQPSYRFKANNNDSGEYTCQTGQTSLSDPVHLTVLSEWLVLQTPHLEFQEGETIVLRCHSWKDKPLVKVTFFQNGKSKKFSRSDPNFSIPQANHSHSGDYHCTGNIGYTLYSSKPVTITVQAPSSSPMGIIVAVVTGIAVAAIVAAVVALIYCRKKRISALPGYPECREMGETLPEKPANPTNPDEADKVGAENTITYSLLMHPDALEEPDDQNRIRAKRSGSGVKQTLNFDLLKLAGDVESNPGPSRGHMTEYKPTVRLATRDDVPRAVRTLAAAFADYPATRHTVDPDRHIERVTELQELFLTRVGLDIGKVWVADDGAAVAVWTTPESVEAGAVFAEIGPRMAELSGSRLAAQQQMEGLLAPHRPKEPAWFLATVGVSPDHQGKGLGSAVVLPGVEAAERAGVPAFLETSAPRNLPFYERLGFTVTADVEVPEGPRTWCMTRKPGA

SEQ ID NO: 6577 - protein, 1530 aa, Artificial Sequence
  Synthetic Polypeptide
MALPVTALLLPLALLLHAARPEVQLVESGGGLVQAGGSLRLSCAASGRTFSMGWFRQAPGKEREFVAAITYSGGSPYYADSVKGRFTISRDNAKNTVYLQMNSLKPEDTAVYYCAANPTYGSDWNAENWGQGTQVTVSSGTGGGGSGGGGSGGGGSEFDIQMTQSPSSLSASVGDRVTITCKASDHINNWLAWYQQKPGQAPKLLIYGATTLETGVPSRFSGSGSGTDYTLTISSLQPEDFATYYCQQSWNTPWTFGQGTKLEIKRLEGQPKANPTVTLFPPSSEELQANKATLVCLISDFYPGAVTVAWKADGSPVKAGVETTKPSKQSNNKYAASSYLSLTPEQWKSHRSYSCQVTHEGSTVEKTVAPTECSGSGMRTEDLPKAVVFLEPQWYRVLEKDSVTLKCQGAYSPEDNSTQWFHNESLISSQASSYFIDAATVDDSGEYRCQTNLSTLSDPVQLEVHIGWLLLQAPRWVFKEEDPIHLRCHSWKNTALHKVTYLQNGKGRKYFHHNSDFYIPKATLKDSGSYFCRGLVGSKNVSSETVNITITQGLAVSTISSFFPPGYQVSFCLVMVLLFAVDTGLYFSVKTNIRSSTRDWKDHKFKWRKDPQDKRAKRSGSGATNFSLLKQAGDVEENPGPTSMDWIWRILFLVGAATGAHSGPEVQLVESGGGLVQAGGSLRLSCAASGRTFTMGWFRQAPGKEREFVAAISLSPTLAYYADSVKGRFTISRDNAKNTVVLQMNSLKPEDTALYYCAADRKSVMSIRPDYWGQGTQVTVSSGSGGGGSGGGGSGGGGSFEQVQLQQPGAELVKPGASVKMSCKASGYAFSSYWINWMKQKPGQGLEWIGQIYPGDGDTNYNGKFKGRATLTADTSSSTAYMQLSSLTSEDSAVYFCARSITTVVGCAMDYWGQGTSVTVSSTRASTKGPSVFPLAPSSKSTSGGTAALGCLVKDYFPEPVTVSWNSGALTSGVHTFPAVLQSSGLYSLSSVVTVPSSSLGTQTYICNVNHKPSNTKVDKRVEPKSCGTTPAAPPKAVLKLEPQWINVLQEDSVTLTCRGTHSPESDSIQWFHNGNLIPTHTQPSYRFKANNNDSGEYTCQTGQTSLSDPVHLTVLSEWLVLQTPHLEFQEGETIVLRCHSWKDKPLVKVTFFQNGKSKKFSRSDPNFSIPQANHSHSGDYHCTGNIGYTLYSSKPVTITVQAPSSSPMGIIVAVVTGIAVAAIVAAVVALIYCRKKRISALPGYPECREMGETLPEKPANPTNPDEADKVGAENTITYSLLMHPDALEEPDDQNRIRAKRSGSGVKQTLNFDLLKLAGDVESNPGPSRGHMTEYKPTVRLATRDDVPRAVRTLAAAFADYPATRHTVDPDRHIERVTELQELFLTRVGLDIGKVWVADDGAAVAVWTTPESVEAGAVFAEIGPRMAELSGSRLAAQQQMEGLLAPHRPKEPAWFLATVGVSPDHQGKGLGSAVVLPGVEAAERAGVPAFLETSAPRNLPFYERLGFTVTADVEVPEGPRTWCMTRKPGA

SEQ ID NO: 6578 - protein, 1263 aa, Artificial Sequence
  Synthetic Polypeptide
MALPVTALLLPLALLLHAARPEVQLVESGGGLVQAGGSLRLSCAASGRTFSMGWFRQAPGKEREFVAAITYSGGSPYYADSVKGRFTISRDNAKNTVYLQMNSLKPEDTAVYYCAANPTYGSDWNAENWGQGTQVTVSSLEGQPKANPTVTLFPPSSEELQANKATLVCLISDFYPGAVTVAWKADGSPVKAGVETTKPSKQSNNKYAASSYLSLTPEQWKSHRSYSCQVTHEGSTVEKTVAPTECSGSGMRTEDLPKAVVFLEPQWYRVLEKDSVTLKCQGAYSPEDNSTQWFHNESLISSQASSYFIDAATVDDSGEYRCQTNLSTLSDPVQLEVHIGWLLLQAPRWVFKEEDPIHLRCHSWKNTALHKVTYLQNGKGRKYFHHNSDFYIPKATLKDSGSYFCRGLVGSKNVSSETVNITITQGLAVSTISSFFPPGYQVSFCLVMVLLFAVDTGLYFSVKTNIRSSTRDWKDHKFKWRKDPQDKRAKRSGSGATNFSLLKQAGDVEENPGPTSMDWIWRILFLVGAATGAHSGPEVQLVESGGGLVQAGGSLRLSCAASGRTFTMGWFRQAPGKEREFVAAISLSPTLAYYADSVKGRFTISRDNAKNTVVLQMNSLKPEDTALYYCAADRKSVMSIRPDYWGQGTQVTVSSTRASTKGPSVFPLAPSSKSTSGGTAALGCLVKDYFPEPVTVSWNSGALTSGVHTFPAVLQSSGLYSLSSVVTVPSSSLGTQTYICNVNHKPSNTKVDKRVEPKSCGTTPAAPPKAVLKLEPQWINVLQEDSVTLTCRGTHSPESDSIQWFHNGNLIPTHTQPSYRFKANNNDSGEYTCQTGQTSLSDPVHLTVLSEWLVLQTPHLEFQEGETIVLRCHSWKDKPLVKVTFFQNGKSKKFSRSDPNFSIPQANHSHSGDYHCTGNIGYTLYSSKPVTITVQAPSSSPMGIIVAVVTGIAVAAIVAAVVALIYCRKKRISALPGYPECREMGETLPEKPANPTNPDEADKVGAENTITYSLLMHPDALEEPDDQNRIRAKRSGSGVKQTLNFDLLKLAGDVESNPGPSRGHMTEYKPTVRLATRDDVPRAVRTLAAAFADYPATRHTVDPDRHIERVTELQELFLTRVGLDIGKVWVADDGAAVAVWTTPESVEAGAVFAEIGPRMAELSGSRLAAQQQMEGLLAPHRPKEPAWFLATVGVSPDHQGKGLGSAVVLPGVEAAERAGVPAFLETSAPRNLPFYERLGFTVTADVEVPEGPRTWCMTRKPGA

SEQ ID NO: 6579 - protein, 1271 aa, Artificial Sequence
  Synthetic Polypeptide
MALPVTALLLPLALLLHAARPDIQMTQSPSSLSASVGDRVTITCKASDHINNWLAWYQQKPGQAPKLLIYGATTLETGVPSRFSGSGSGTDYTLTISSLQPEDFATYYCQQSWNTPWTFGQGTKLEIKRLEDLKNVFPPEVAVFEPSEAEISHTQKATLVCLATGFYPDHVELSWWVNGKEVHSGVSTDPQPLKEQPALNDSRYCLSSRLRVSATFWQNPRNHFRCQVQFYGLSENDEWTQDRAKPVTQIVSAEAWGRADCGSGMRTEDLPKAVVFLEPQWYRVLEKDSVTLKCQGAYSPEDNSTQWFHNESLISSQASSYFIDAATVDDSGEYRCQTNLSTLSDPVQLEVHIGWLLLQAPRWVFKEEDPIHLRCHSWKNTALHKVTYLQNGKGRKYFHHNSDFYIPKATLKDSGSYFCRGLVGSKNVSSETVNITITQGLAVSTISSFFPPGYQVSFCLVMVLLFAVDTGLYFSVKTNIRSSTRDWKDHKFKWRKDPQDKRAKRSGSGATNFSLLKQAGDVEENPGPTSMDWIWRILFLVGAATGAHSFEQVQLQQPGAELVKPGASVKMSCKASGYAFSSYWINWMKQKPGQGLEWIGQIYPGDGDTNYNGKFKGRATLTADTSSSTAYMQLSSLTSEDSAVYFCARSITTVVGCAMDYWGQGTSVTVSSTRIQNPDPAVYQLRDSKSSDKSVCLFTDFDSQTNVSQSKDSDVYITDKTVLDMRSMDFKSNSAVAWSNKSDFACANAFNNSIIPEDTFFPSPESSCGTTPAAPPKAVLKLEPQWINVLQEDSVTLTCRGTHSPESDSIQWFHNGNLIPTHTQPSYRFKANNNDSGEYTCQTGQTSLSDPVHLTVLSEWLVLQTPHLEFQEGETIVLRCHSWKDKPLVKVTFFQNGKSKKFSRSDPNFSIPQANHSHSGDYHCTGNIGYTLYSSKPVTITVQAPSSSPMGIIVAVVTGIAVAAIVAAVVALIYCRKKRISALPGYPECREMGETLPEKPANPTNPDEADKVGAENTITYSLLMHPDALEEPDDQNRIRAKRSGSGVKQTLNFDLLKLAGDVESNPGPSRGHMTEYKPTVRLATRDDVPRAVRTLAAAFADYPATRHTVDPDRHIERVTELQELFLTRVGLDIGKVWVADDGAAVAVWTTPESVEAGAVFAEIGPRMAELSGSRLAAQQQMEGLLAPHRPKEPAWFLATVGVSPDHQGKGLGSAVVLPGVEAAERAGVPAFLETSAPRNLPFYERLGFTVTADVEVPEGPRTWCMTRKPGA

SEQ ID NO: 6580 - protein, 1408 aa, Artificial Sequence
  Synthetic Polypeptide
MALPVTALLLPLALLLHAARPEVQLVESGGGLVQAGGSLRLSCAASGRTFSMGWFRQAPGKEREFVAAITYSGGSPYYADSVKGRFTISRDNAKNTVYLQMNSLKPEDTAVYYCAANPTYGSDWNAENWGQGTQVTVSSGTGGGGSGGGGSGGGGSEFDIQMTQSPSSLSASVGDRVTITCKASDHINNWLAWYQQKPGQAPKLLIYGATTLETGVPSRFSGSGSGTDYTLTISSLQPEDFATYYCQQSWNTPWTFGQGTKLEIKRLEDLKNVFPPEVAVFEPSEAEISHTQKATLVCLATGFYPDHVELSWWVNGKEVHSGVSTDPQPLKEQPALNDSRYCLSSRLRVSATFWQNPRNHFRCQVQFYGLSENDEWTQDRAKPVTQIVSAEAWGRADCGSGMRTEDLPKAVVFLEPQWYRVLEKDSVTLKCQGAYSPEDNSTQWFHNESLISSQASSYFIDAATVDDSGEYRCQTNLSTLSDPVQLEVHIGWLLLQAPRWVFKEEDPIHLRCHSWKNTALHKVTYLQNGKGRKYFHHNSDFYIPKATLKDSGSYFCRGLVGSKNVSSETVNITITQGLAVSTISSFFPPGYQVSFCLVMVLLFAVDTGLYFSVKTNIRSSTRDWKDHKFKWRKDPQDKRAKRSGSGATNFSLLKQAGDVEENPGPTSMDWIWRILFLVGAATGAHSFEQVQLQQPGAELVKPGASVKMSCKASGYAFSSYWINWMKQKPGQGLEWIGQIYPGDGDTNYNGKFKGRATLTADTSSSTAYMQLSSLTSEDSAVYFCARSITTVVGCAMDYWGQGTSVTVSSTRIQNPDPAVYQLRDSKSSDKSVCLFTDFDSQTNVSQSKDSDVYITDKTVLDMRSMDFKSNSAVAWSNKSDFACANAFNNSIIPEDTFFPSPESSCGTTPAAPPKAVLKLEPQWINVLQEDSVTLTCRGTHSPESDSIQWFHNGNLIPTHTQPSYRFKANNNDSGEYTCQTGQTSLSDPVHLTVLSEWLVLQTPHLEFQEGETIVLRCHSWKDKPLVKVTFFQNGKSKKFSRSDPNFSIPQANHSHSGDYHCTGNIGYTLYSSKPVTITVQAPSSSPMGIIVAVVTGIAVAAIVAAVVALIYCRKKRISALPGYPECREMGETLPEKPANPTNPDEADKVGAENTITYSLLMHPDALEEPDDQNRIRAKRSGSGVKQTLNFDLLKLAGDVESNPGPSRGHMTEYKPTVRLATRDDVPRAVRTLAAAFADYPATRHTVDPDRHIERVTELQELFLTRVGLDIGKVWVADDGAAVAVWTTPESVEAGAVFAEIGPRMAELSGSRLAAQQQMEGLLAPHRPKEPAWFLATVGVSPDHQGKGLGSAVVLPGVEAAERAGVPAFLETSAPRNLPFYERLGFTVTADVEVPEGPRTWCMTRKPGA

SEQ ID NO: 6581 - protein, 1545 aa, Artificial Sequence
  Synthetic Polypeptide
MALPVTALLLPLALLLHAARPEVQLVESGGGLVQAGGSLRLSCAASGRTFSMGWFRQAPGKEREFVAAITYSGGSPYYADSVKGRFTISRDNAKNTVYLQMNSLKPEDTAVYYCAANPTYGSDWNAENWGQGTQVTVSSGTGGGGSGGGGSGGGGSEFDIQMTQSPSSLSASVGDRVTITCKASDHINNWLAWYQQKPGQAPKLLIYGATTLETGVPSRFSGSGSGTDYTLTISSLQPEDFATYYCQQSWNTPWTFGQGTKLEIKRLEDLKNVFPPEVAVFEPSEAEISHTQKATLVCLATGFYPDHVELSWWVNGKEVHSGVSTDPQPLKEQPALNDSRYCLSSRLRVSATFWQNPRNHFRCQVQFYGLSENDEWTQDRAKPVTQIVSAEAWGRADCGSGMRTEDLPKAVVFLEPQWYRVLEKDSVTLKCQGAYSPEDNSTQWFHNESLISSQASSYFIDAATVDDSGEYRCQTNLSTLSDPVQLEVHIGWLLLQAPRWVFKEEDPIHLRCHSWKNTALHKVTYLQNGKGRKYFHHNSDFYIPKATLKDSGSYFCRGLVGSKNVSSETVNITITQGLAVSTISSFFPPGYQVSFCLVMVLLFAVDTGLYFSVKTNIRSSTRDWKDHKFKWRKDPQDKRAKRSGSGATNFSLLKQAGDVEENPGPTSMDWIWRILFLVGAATGAHSGPEVQLVESGGGLVQAGGSLRLSCAASGRTFTMGWFRQAPGKEREFVAAISLSPTLAYYADSVKGRFTISRDNAKNTVVLQMNSLKPEDTALYYCAADRKSVMSIRPDYWGQGTQVTVSSGSGGGGSGGGGSGGGGSFEQVQLQQPGAELVKPGASVKMSCKASGYAFSSYWINWMKQKPGQGLEWIGQIYPGDGDTNYNGKFKGRATLTADTSSSTAYMQLSSLTSEDSAVYFCARSITTVVGCAMDYWGQGTSVTVSSTRIQNPDPAVYQLRDSKSSDKSVCLFTDFDSQTNVSQSKDSDVYITDKTVLDMRSMDFKSNSAVAWSNKSDFACANAFNNSIIPEDTFFPSPESSCGTTPAAPPKAVLKLEPQWINVLQEDSVTLTCRGTHSPESDSIQWFHNGNLIPTHTQPSYRFKANNNDSGEYTCQTGQTSLSDPVHLTVLSEWLVLQTPHLEFQEGETIVLRCHSWKDKPLVKVTFFQNGKSKKFSRSDPNFSIPQANHSHSGDYHCTGNIGYTLYSSKPVTITVQAPSSSPMGIIVAVVTGIAVAAIVAAVVALIYCRKKRISALPGYPECREMGETLPEKPANPTNPDEADKVGAENTITYSLLMHPDALEEPDDQNRIRAKRSGSGVKQTLNFDLLKLAGDVESNPGPSRGHMTEYKPTVRLATRDDVPRAVRTLAAAFADYPATRHTVDPDRHIERVTELQELFLTRVGLDIGKVWVADDGAAVAVWTTPESVEAGAVFAEIGPRMAELSGSRLAAQQQMEGLLAPHRPKEPAWFLATVGVSPDHQGKGLGSAVVLPGVEAAERAGVPAFLETSAPRNLPFYERLGFTVTADVEVPEGPRTWCMTRKPGA

SEQ ID NO: 6582 - protein, 1278 aa, Artificial Sequence
  Synthetic Polypeptide
MALPVTALLLPLALLLHAARPEVQLVESGGGLVQAGGSLRLSCAASGRTFSMGWFRQAPGKEREFVAAITYSGGSPYYADSVKGRFTISRDNAKNTVYLQMNSLKPEDTAVYYCAANPTYGSDWNAENWGQGTQVTVSSLEDLKNVFPPEVAVFEPSEAEISHTQKATLVCLATGFYPDHVELSWWVNGKEVHSGVSTDPQPLKEQPALNDSRYCLSSRLRVSATFWQNPRNHFRCQVQFYGLSENDEWTQDRAKPVTQIVSAEAWGRADCGSGMRTEDLPKAVVFLEPQWYRVLEKDSVTLKCQGAYSPEDNSTQWFHNESLISSQASSYFIDAATVDDSGEYRCQTNLSTLSDPVQLEVHIGWLLLQAPRWVFKEEDPIHLRCHSWKNTALHKVTYLQNGKGRKYFHHNSDFYIPKATLKDSGSYFCRGLVGSKNVSSETVNITITQGLAVSTISSFFPPGYQVSFCLVMVLLFAVDTGLYFSVKTNIRSSTRDWKDHKFKWRKDPQDKRAKRSGSGATNFSLLKQAGDVEENPGPTSMDWIWRILFLVGAATGAHSGPEVQLVESGGGLVQAGGSLRLSCAASGRTFTMGWFRQAPGKEREFVAAISLSPTLAYYADSVKGRFTISRDNAKNTVVLQMNSLKPEDTALYYCAADRKSVMSIRPDYWGQGTQVTVSSTRIQNPDPAVYQLRDSKSSDKSVCLFTDFDSQTNVSQSKDSDVYITDKTVLDMRSMDFKSNSAVAWSNKSDFACANAFNNSIIPEDTFFPSPESSCGTTPAAPPKAVLKLEPQWINVLQEDSVTLTCRGTHSPESDSIQWFHNGNLIPTHTQPSYRFKANNNDSGEYTCQTGQTSLSDPVHLTVLSEWLVLQTPHLEFQEGETIVLRCHSWKDKPLVKVTFFQNGKSKKFSRSDPNFSIPQANHSHSGDYHCTGNIGYTLYSSKPVTITVQAPSSSPMGIIVAVVTGIAVAAIVAAVVALIYCRKKRISALPGYPECREMGETLPEKPANPTNPDEADKVGAENTITYSLLMHPDALEEPDDQNRIRAKRSGSGVKQTLNFDLLKLAGDVESNPGPSRGHMTEYKPTVRLATRDDVPRAVRTLAAAFADYPATRHTVDPDRHIERVTELQELFLTRVGLDIGKVWVADDGAAVAVWTTPESVEAGAVFAEIGPRMAELSGSRLAAQQQMEGLLAPHRPKEPAWFLATVGVSPDHQGKGLGSAVVLPGVEAAERAGVPAFLETSAPRNLPFYERLGFTVTADVEVPEGPRTWCMTRKPGA

SEQ ID NO: 6583 - protein, 633 aa, Artificial Sequence; identical to SEQ ID NO: 4032
  Synthetic Polypeptide

SEQ ID NO: 6584 - protein, 535 aa, Artificial Sequence
  Synthetic Polypeptide
MALPVTALLLPLALLLHAARPDIQMTQSPSSLSASVGDRVTITCKASDHINNWLAWYQQKPGQAPKLLIYGATTLETGVPSRFSGSGSGTDYTLTISSLQPEDFATYYCQQSWNTPWTFGQGTKLEIKRGGGGSGGGGSGGGGSQVQLQQPGAELVKPGASVKMSCKASGYAFSSYWINWMKQKPGQGLEWIGQIYPGDGDTNYNGKFKGRATLTADTSSSTAYMQLSSLTSEDSAVYFCARSITTVVGCAMDYWGQGTSVTVSSTRTPAAPPKAVLKLEPQWINVLQEDSVTLTCRGTHSPESDSIQWFHNGNLIPTHTQPSYRFKANNNDSGEYTCQTGQTSLSDPVHLTVLSEWLVLQTPHLEFQEGETIVLRCHSWKDKPLVKVTFFQNGKSKKFSRSDPNFSIPQANHSHSGDYHCTGNIGYTLYSSKPVTITVQAPSSSPMGIIVAVVTGIAVAAIVAAVVALIYCRKKRISALPGYPECREMGETLPEKPANPTNPDEADKVGAENTITYSLLMHPDALEEPDDQNRI

SEQ ID NO: 6585 - protein, 535 aa, Artificial Sequence
  Synthetic Polypeptide
MALPVTALLLPLALLLHAARPEIVLTQSPATLSLSPGERATLSCRASQSVSSYLAWYQQKPGQAPRLLIYDASNRATGIPARFSGSGSGTDFTLTISSLEPEDFAVYYCQQRSNWPITFGQGTRLEIKGGGGSGGGGSGGGGSEVQLVESGGGLVQPGRSLRLSCAASGFTFNDYAMHWVRQAPGKGLEWVSTISWNSGSIGYADSVKGRFTISRDNAKKSLYLQMNSLRAEDTALYYCAKDIQYGNYYYGMDVWGQGTTVTVSSTRTPAAPPKAVLKLEPQWINVLQEDSVTLTCRGTHSPESDSIQWFHNGNLIPTHTQPSYRFKANNNDSGEYTCQTGQTSLSDPVHLTVLSEWLVLQTPHLEFQEGETIVLRCHSWKDKPLVKVTFFQNGKSKKFSRSDPNFSIPQANHSHSGDYHCTGNIGYTLYSSKPVTITVQAPSSSPMGIIVAVVTGIAVAAIVAAVVALIYCRKKRISALPGYPECREMGETLPEKPANPTNPDEADKVGAENTITYSLLMHPDALEEPDDQNRI

SEQ ID NO: 6586 - protein, 409 aa, Artificial Sequence
  Synthetic Polypeptide
MALPVTALLLPLALLLHAARPEVQLVESGGGLVQAGGSLRLSCAASGRTFSMGWFRQAPGKEREFVAAITYSGGSPYYADSVKGRFTISRDNAKNTVYLQMNSLKPEDTAVYYCAANPTYGSDWNAENWGQGTQVTVSSTRTPAAPPKAVLKLEPQWINVLQEDSVTLTCRGTHSPESDSIQWFHNGNLIPTHTQPSYRFKANNNDSGEYTCQTGQTSLSDPVHLTVLSEWLVLQTPHLEFQEGETIVLRCHSWKDKPLVKVTFFQNGKSKKFSRSDPNFSIPQANHSHSGDYHCTGNIGYTLYSSKPVTITVQAPSSSPMGIIVAVVTGIAVAAIVAAVVALIYCRKKRISALPGYPECREMGETLPEKPANPTNPDEADKVGAENTITYSLLMHPDALEEPDDQNRI

SEQ ID NO: 6587 - protein, 409 aa, Artificial Sequence
  Synthetic Polypeptide
MALPVTALLLPLALLLHAARPQLQLQESGPGLVKPSETLSLTCTVSGGSISSGDYYWGWIRQPPGKGLEWIGHIYYSGATYYNPSLKSRVTISVDTSRNQFSLKLSSVTAADTAVYYCTRDDSSNWRSRGQGTLVTVSSTRTPAAPPKAVLKLEPQWINVLQEDSVTLTCRGTHSPESDSIQWFHNGNLIPTHTQPSYRFKANNNDSGEYTCQTGQTSLSDPVHLTVLSEWLVLQTPHLEFQEGETIVLRCHSWKDKPLVKVTFFQNGKSKKFSRSDPNFSIPQANHSHSGDYHCTGNIGYTLYSSKPVTITVQAPSSSPMGIIVAVVTGIAVAAIVAAVVALIYCRKKRISALPGYPECREMGETLPEKPANPTNPDEADKVGAENTITYSLLMHPDALEEPDDQNRI

SEQ ID NO: 6588 - protein, 409 aa, Artificial Sequence
  Synthetic Polypeptide
MALPVTALLLPLALLLHAARPQLQLQESGPGLVKPSETLSLTCTVSGDSISSGDYYWGWIRQPPGKGLEWIGHIYYSGVTYYNPSLKSRVTISVDTSRNQFSLKLSSVTAADTAVYYCTREDSSNWRSRGQGTLVTVSSTRTPAAPPKAVLKLEPQWINVLQEDSVTLTCRGTHSPESDSIQWFHNGNLIPTHTQPSYRFKANNNDSGEYTCQTGQTSLSDPVHLTVLSEWLVLQTPHLEFQEGETIVLRCHSWKDKPLVKVTFFQNGKSKKFSRSDPNFSIPQANHSHSGDYHCTGNIGYTLYSSKPVTITVQAPSSSPMGIIVAVVTGIAVAAIVAAVVALIYCRKKRISALPGYPECREMGETLPEKPANPTNPDEADKVGAENTITYSLLMHPDALEEPDDQNRI

SEQ ID NO: 6589 - protein, 411 aa, Artificial Sequence
  Synthetic Polypeptide
MALPVTALLLPLALLLHAARPEVQLQESGGGLVQPGGSLRLSCAASGRTFSSLFMGWFRQAPGKERELVAAISRYSLYTYYADSVKGRFTISADNAKNAVYLQMNSLKPEDTAVYYCASKLEYTSNDYDSWGQGTQVTVSSTRTPAAPPKAVLKLEPQWINVLQEDSVTLTCRGTHSPESDSIQWFHNGNLIPTHTQPSYRFKANNNDSGEYTCQTGQTSLSDPVHLTVLSEWLVLQTPHLEFQEGETIVLRCHSWKDKPLVKVTFFQNGKSKKFSRSDPNFSIPQANHSHSGDYHCTGNIGYTLYSSKPVTITVQAPSSSPMGIIVAVVTGIAVAAIVAAVVALIYCRKKRISALPGYPECREMGETLPEKPANPTNPDEADKVGAENTITYSLLMHPDALEEPDDQNRI

SEQ ID NO: 6590 - protein, 419 aa, Artificial Sequence
  Synthetic Polypeptide
MALPVTALLLPLALLLHAARPEVQLVESGGGLVQPGGSLRLSCAASGFASDYYIIGWFRQAPGKEREGVSCISSRYANTNYADSVKGRFTISRDNAKNTVYLQMNSLKPEDTAVYYCAADTRRYTCPDIATMHRNFDSWGQGTLVTVSSTRTPAAPPKAVLKLEPQWINVLQEDSVTLTCRGTHSPESDSIQWFHNGNLIPTHTQPSYRFKANNNDSGEYTCQTGQTSLSDPVHLTVLSEWLVLQTPHLEFQEGETIVLRCHSWKDKPLVKVTFFQNGKSKKFSRSDPNFSIPQANHSHSGDYHCTGNIGYTLYSSKPVTITVQAPSSSPMGIIVAVVTGIAVAAIVAAVVALIYCRKKRISALPGYPECREMGETLPEKPANPTNPDEADKVGAENTITYSLLMHPDALEEPDDQNRI

SEQ ID NO: 6591 - protein, 415 aa, Artificial Sequence
  Synthetic Polypeptide
MALPVTALLLPLALLLHAARPEVQLVESGGSLVQPGGSLRLSCAASGFTFDDYAMSWVRQVPGKGLEWVSSINWSGTHTDYADSVKGRFTISRNNANNTLYLQMNSLKSEDTAVYYCAKNWRDAGTTWFEKSGSAGQGTQVTVSSTRTPAAPPKAVLKLEPQWINVLQEDSVTLTCRGTHSPESDSIQWFHNGNLIPTHTQPSYRFKANNNDSGEYTCQTGQTSLSDPVHLTVLSEWLVLQTPHLEFQEGETIVLRCHSWKDKPLVKVTFFQNGKSKKFSRSDPNFSIPQANHSHSGDYHCTGNIGYTLYSSKPVTITVQAPSSSPMGIIVAVVTGIAVAAIVAAVVALIYCRKKRISALPGYPECREMGETLPEKPANPTNPDEADKVGAENTITYSLLMHPDALEEPDDQNRI

SEQ ID NO: 6592 - protein, 410 aa, Artificial Sequence
  Synthetic Polypeptide
MALPVTALLLPLALLLHAARPEVQLVESGGGLVQPGGSLRLSCAASGFNIKDTCIGWVRRAPGKEEELVAKICKYSGHTRYADSVKGRFTISADTSKNTAYLQMNSLRAEDTAVYYCAAVSVRDGHYNYWGQGTTVTVSSTRTPAAPPKAVLKLEPQWINVLQEDSVTLTCRGTHSPESDSIQWFHNGNLIPTHTQPSYRFKANNNDSGEYTCQTGQTSLSDPVHLTVLSEWLVLQTPHLEFQEGETIVLRCHSWKDKPLVKVTFFQNGKSKKFSRSDPNFSIPQANHSHSGDYHCTGNIGYTLYSSKPVTITVQAPSSSPMGIIVAVVTGIAVAAIVAAVVALIYCRKKRISALPGYPECREMGETLPEKPANPTNPDEADKVGAENTITYSLLMHPDALEEPDDQNRI

SEQ ID NO: 6593 - protein, 415 aa, Artificial Sequence
  Synthetic Polypeptide
MALPVTALLLPLALLLHAARPGSDLGIKLLFAAAKGQDDEVRILLAAGADVNAKDFEGYTPLHVAAYDGHLEIVEVLLKAGADVNAKDSQGRTPLHEAAYSGHLEIVEVLLKAGADVNAQDDAGETPADLAAAWGHEDIAEVLQKTRTPAAPPKAVLKLEPQWINVLQEDSVTLTCRGTHSPESDSIQWFHNGNLIPTHTQPSYRFKANNNDSGEYTCQTGQTSLSDPVHLTVLSEWLVLQTPHLEFQEGETIVLRCHSWKDKPLVKVTFFQNGKSKKFSRSDPNFSIPQANHSHSGDYHCTGNIGYTLYSSKPVTITVQAPSSSPMGIIVAVVTGIAVAAIVAAVVALIYCRKKRISALPGYPECREMGETLPEKPANPTNPDEADKVGAENTITYSLLMHPDALEEPDDQNRI

SEQ ID NO: 6594 - protein, 349 aa, Artificial Sequence
  Synthetic Polypeptide
MALPVTALLLPLALLLHAARPVDNKFNKERYSAYYEIWQLPNLNVRQKAAFIGSLQDDPSQSANLLAEAKKLNDAQAPKTRTPAAPPKAVLKLEPQWINVLQEDSVTLTCRGTHSPESDSIQWFHNGNLIPTHTQPSYRFKANNNDSGEYTCQTGQTSLSDPVHLTVLSEWLVLQTPHLEFQEGETIVLRCHSWKDKPLVKVTFFQNGKSKKFSRSDPNFSIPQANHSHSGDYHCTGNIGYTLYSSKPVTITVQAPSSSPMGIIVAVVTGIAVAAIVAAVVALIYCRKKRISALPGYPECREMGETLPEKPANPTNPDEADKVGAENTITYSLLMHPDALEEPDDQNRI

SEQ ID NO: 6595 - protein, 380 aa, Artificial Sequence
  Synthetic Polypeptide
MALPVTALLLPLALLLHAARPLPAPKNLVVSRVTEDSARLSWTAPDAAFDSFAIGYWEWDDDGEAIVLTVPGSERSYDLTGLKPGTEYPVYIAGVKGGQWSFPLSAIFTTTRTPAAPPKAVLKLEPQWINVLQEDSVTLTCRGTHSPESDSIQWFHNGNLIPTHTQPSYRFKANNNDSGEYTCQTGQTSLSDPVHLTVLSEWLVLQTPHLEFQEGETIVLRCHSWKDKPLVKVTFFQNGKSKKFSRSDPNFSIPQANHSHSGDYHCTGNIGYTLYSSKPVTITVQAPSSSPMGIIVAVVTGIAVAAIVAAVVALIYCRKKRISALPGYPECREMGETLPEKPANPTNPDEADKVGAENTITYSLLMHPDALEEPDDQNRI

SEQ ID NO: 6596 - protein, 381 aa, Artificial Sequence
  Synthetic Polypeptide
MALPVTALLLPLALLLHAARPMLPAPKNLVVSRITEDSARLSWTAPDAAFDSFPIRYIETLIWGEAIWLDVPGSERSYDLTGLKPGTEYAVVITGVKGGRFSSPLVASFTTTRTPAAPPKAVLKLEPQWINVLQEDSVTLTCRGTHSPESDSIQWFHNGNLIPTHTQPSYRFKANNNDSGEYTCQTGQTSLSDPVHLTVLSEWLVLQTPHLEFQEGETIVLRCHSWKDKPLVKVTFFQNGKSKKFSRSDPNFSIPQANHSHSGDYHCTGNIGYTLYSSKPVTITVQAPSSSPMGIIVAVVTGIAVAAIVAAVVALIYCRKKRISALPGYPECREMGETLPEKPANPTNPDEADKVGAENTITYSLLMHPDALEEPDDQNRI

SEQ ID NO: 6597 - protein, 598 aa, Artificial Sequence
  Synthetic Polypeptide
MALPVTALLLPLALLLHAARPMALPVTALLLPLALLLHAARPLFNQEVQIPLTESYCGPCPKNWICYKNNCYQFFDESKNWYESQASCMSQNASLLKVYSKEDQDLLKLVKSYHWMGLVHIPTNGSWQWEDGSILSPNLLTIIEMQKGDCALYASSFKGYIENCSTPNTYICMQRTVGGGGSGGGGSGGGGSDLFNQEVQIPLTESYCGPCPKNWICYKNNCYQFFDESKNWYESQASCMSQNASLLKVYSKEDQDLLKLVKSYHWMGLVHIPTNGSWQWEDGSILSPNLLTIIEMQKGDCALYASSFKGYIENCSTPNTYICMQRTVTRTPAAPPKAVLKLEPQWINVLQEDSVTLTCRGTHSPESDSIQWFHNGNLIPTHTQPSYRFKANNNDSGEYTCQTGQTSLSDPVHLTVLSEWLVLQTPHLEFQEGETIVLRCHSWKDKPLVKVTFFQNGKSKKFSRSDPNFSIPQANHSHSGDYHCTGNIGYTLYSSKPVTITVQAPSSSPMGIIVAVVTGIAVAAIVAAVVALIYCRKKRISALPGYPECREMGETLPEKPANPTNPDEADKVGAENTITYSLLMHPDALEEPDDQNRI

SEQ ID NO: 6598 - protein, 478 aa, Artificial Sequence
  Synthetic Polypeptide
MALPVTALLLPLALLLHAARPMELTDLLLAAMLLAVARLTLSSPVAPACDPRLLNKLLRDSHLLHSRLSQCPDVDPLSIPVLLPAVDFSLGEWKTQTEQSKAQDILGAVSLLLEGVMAARGQLEPSCLSSLLGQLSGQVRLLLGALQGLLGTQLPLQGRTTAHKDPNALFLSLQQLLRGKVRFLLLVEGPTLCVRRTLPTTAVPSSTSTRTPAAPPKAVLKLEPQWINVLQEDSVTLTCRGTHSPESDSIQWFHNGNLIPTHTQPSYRFKANNNDSGEYTCQTGQTSLSDPVHLTVLSEWLVLQTPHLEFQEGETIVLRCHSWKDKPLVKVTFFQNGKSKKFSRSDPNFSIPQANHSHSGDYHCTGNIGYTLYSSKPVTITVQAPSSSPMGIIVAVVTGIAVAAIVAAVVALIYCRKKRISALPGYPECREMGETLPEKPANPTNPDEADKVGAENTITYSLLMHPDALEEPDDQNRI

SEQ ID NO: 6599 - protein, 344 aa, Artificial Sequence
  Synthetic Polypeptide
MALPVTALLLPLALLLHAARPMDPDLEIRAAFLRQRNTALRTEVAELEQEVQRLENEVSQYETRYGPLGGGKTRTRTPAAPPKAVLKLEPQWINVLQEDSVTLTCRGTHSPESDSIQWFHNGNLIPTHTQPSYRFKANNNDSGEYTCQTGQTSLSDPVHLTVLSEWLVLQTPHLEFQEGETIVLRCHSWKDKPLVKVTFFQNGKSKKFSRSDPNFSIPQANHSHSGDYHCTGNIGYTLYSSKPVTITVQAPSSSPMGIIVAVVTGIAVAAIVAAVVALIYCRKKRISALPGYPECREMGETLPEKPANPTNPDEADKVGAENTITYSLLMHPDALEEPDDQNRI

SEQ ID NO: 6600 - protein, 319 aa, Artificial Sequence
  Synthetic Polypeptide
MALPVTALLLPLALLLHAARPEVAALEKEVAALEKEVAALEKEVAALEKTRTPAAPPKAVLKLEPQWINVLQEDSVTLTCRGTHSPESDSIQWFHNGNLIPTHTQPSYRFKANNNDSGEYTCQTGQTSLSDPVHLTVLSEWLVLQTPHLEFQEGETIVLRCHSWKDKPLVKVTFFQNGKSKKFSRSDPNFSIPQANHSHSGDYHCTGNIGYTLYSSKPVTITVQAPSSSPMGIIVAVVTGIAVAAIVAAVVALIYCRKKRISALPGYPECREMGETLPEKPANPTNPDEADKVGAENTITYSLLMHPDALEEPDDQNRI

SEQ ID NO: 6601 - protein, 577 aa, Artificial Sequence
  Synthetic Polypeptide
MALPVTALLLPLALLLHAARPLFNQEVQIPLTESYCGPCPKNWICYKNNCYQFFDESKNWYESQASCMSQNASLLKVYSKEDQDLLKLVKSAHWMGLVHIPTNGSWQWEDGSILSPNLLTIIEMQKGDCALYASSFKGFIENCSTPNTYICMQRTVGGGGSGGGGSGGGGSDLFNQEVQIPLTESYCGPCPKNWICYKNNCYQFFDESKNWYESQASCMSQNASLLKVYSKEDQDLLKLVKSAHWMGLVHIPTNGSWQWEDGSILSPNLLTIIEMQKGDCALYASSFKGFIENCSTPNTYICMQRTVTRTPAAPPKAVLKLEPQWINVLQEDSVTLTCRGTHSPESDSIQWFHNGNLIPTHTQPSYRFKANNNDSGEYTCQTGQTSLSDPVHLTVLSEWLVLQTPHLEFQEGETIVLRCHSWKDKPLVKVTFFQNGKSKKFSRSDPNFSIPQANHSHSGDYHCTGNIGYTLYSSKPVTITVQAPSSSPMGIIVAVVTGIAVAAIVAAVVALIYCRKKRISALPGYPECREMGETLPEKPANPTNPDEADKVGAENTITYSLLMHPDALEEPDDQNRI

SEQ ID NO: 6602 - protein, 577 aa, Artificial Sequence
  Synthetic Polypeptide
MALPVTALLLPLALLLHAARPLFNQEVQIPLTESYCGPCPKNWICYKNNCYQFFDESKNWYESQASCMSQNASLLKVYSKEDQDLLKLVKSAHWMGLVHIPTNGSWQWEDGSILSPNLLTIIEMQKGDCALYASSFKGYIENCSTPNTYICMQRTVSGGGGSGGGGSGGGGDLFNQEVQIPLTESYCGPCPKNWICYKNNCYQFFDESKNWYESQASCMSQNASLLKVYSKEDQDLLKLVKSAHWMGLVHIPTNGSWQWEDGSILSPNLLTIIEMQKGDCALYASSFKGYIENCSTPNTYICMQRTVTRTPAAPPKAVLKLEPQWINVLQEDSVTLTCRGTHSPESDSIQWFHNGNLIPTHTQPSYRFKANNNDSGEYTCQTGQTSLSDPVHLTVLSEWLVLQTPHLEFQEGETIVLRCHSWKDKPLVKVTFFQNGKSKKFSRSDPNFSIPQANHSHSGDYHCTGNIGYTLYSSKPVTITVQAPSSSPMGIIVAVVTGIAVAAIVAAVVALIYCRKKRISALPGYPECREMGETLPEKPANPTNPDEADKVGAENTITYSLLMHPDALEEPDDQNRI

SEQ ID NO: 6603 - protein, 1073 aa, Artificial Sequence
  Synthetic Polypeptide
MALPVTALLLPLALLLHAARPDIQMTQSPSSLSASVGDRVTITCKASDHINNWLAWYQQKPGQAPKLLIYGATTLETGVPSRFSGSGSGTDYTLTISSLQPEDFATYYCQQSWNTPWTFGQGTKLEIKRLETPAAPPKAVLKLEPQWINVLQEDSVTLTCRGTHSPESDSIQWFHNGNLIPTHTQPSYRFKANNNDSGEYTCQTGQTSLSDPVHLTVLSEWLVLQTPHLEFQEGETIVLRCHSWKDKPLVKVTFFQNGKSKKFSRSDPNFSIPQANHSHSGDYHCTGNIGYTLYSSKPVTITVQAPSSSPMGIIVAVVTGIAVAAIVAAVVALIYCRKKRISALPGYPECREMGETLPEKPANPTNPDEADKVGAENTITYSLLMHPDALEEPDDQNRIRAKRSGSGATNFSLLKQAGDVEENPGPTSMDWIWRILFLVGAATGAHSFEQVQLQQPGAELVKPGASVKMSCKASGYAFSSYWINWMKQKPGQGLEWIGQIYPGDGDTNYNGKFKGRATLTADTSSSTAYMQLSSLTSEDSAVYFCARSITTVVGCAMDYWGQGTSVTVSSTRTPAAPPKAVLKLEPQWINVLQEDSVTLTCRGTHSPESDSIQWFHNGNLIPTHTQPSYRFKANNNDSGEYTCQTGQTSLSDPVHLTVLSEWLVLQTPHLEFQEGETIVLRCHSWKDKPLVKVTFFQNGKSKKFSRSDPNFSIPQANHSHSGDYHCTGNIGYTLYSSKPVTITVQAPSSSPMGIIVAVVTGIAVAAIVAAVVALIYCRKKRISALPGYPECREMGETLPEKPANPTNPDEADKVGAENTITYSLLMHPDALEEPDDQNRIRAKRSGSGVKQTLNFDLLKLAGDVESNPGPSRGHMTEYKPTVRLATRDDVPRAVRTLAAAFADYPATRHTVDPDRHIERVTELQELFLTRVGLDIGKVWVADDGAAVAVWTTPESVEAGAVFAEIGPRMAELSGSRLAAQQQMEGLLAPHRPKEPAWFLATVGVSPDHQGKGLGSAVVLPGVEAAERAGVPAFLETSAPRNLPFYERLGFTVTADVEVPEGPRTWCMTRKPGA

SEQ ID NO: 6604 - protein, 1127 aa, Artificial Sequence
  Synthetic Polypeptide
MALPVTALLLPLALLLHAARPACEVQLLESGGGLIQPGGSLRLSCAASGFTFSSHAMTWVRQAPGKGLEWVSAISGSGDYTHYADSVKGRFTISRDNSKNTVYLQMNSLRAEDSAVYYCAKDEDGGSLLGHRGQGTLVTVSSGTGGGGSGGGGSGGGGSEFGSLETPAAPPKAVLKLEPQWINVLQEDSVTLTCRGTHSPESDSIQWFHNGNLIPTHTQPSYRFKANNNDSGEYTCQTGQTSLSDPVHLTVLSEWLVLQTPHLEFQEGETIVLRCHSWKDKPLVKVTFFQNGKSKKFSRSDPNFSIPQANHSHSGDYHCTGNIGYTLYSSKPVTITVQAPSSSPMGIIVAVVTGIAVAAIVAAVVALIYCRKKRISALPGYPECREMGETLPEKPANPTNPDEADKVGAENTITYSLLMHPDALEEPDDQNRIRAKRSGSGATNFSLLKQAGDVEENPGPTSATMDWIWRILFLVGAATGAHSGPEVQLVESGGGLVQAGGSLRLSCAASGRTFSMGWFRQAPGKEREFVAAITYSGGSPYYADSVKGRFTISRDNAKNTVYLQMNSLKPEDTAVYYCAANPTYGSDWNAENWGQGTQVTVSSGSGGGGSGGGGSGGGGSFEGSTRTPAAPPKAVLKLEPQWINVLQEDSVTLTCRGTHSPESDSIQWFHNGNLIPTHTQPSYRFKANNNDSGEYTCQTGQTSLSDPVHLTVLSEWLVLQTPHLEFQEGETIVLRCHSWKDKPLVKVTFFQNGKSKKFSRSDPNFSIPQANHSHSGDYHCTGNIGYTLYSSKPVTITVQAPSSSPMGIIVAVVTGIAVAAIVAAVVALIYCRKKRISALPGYPECREMGETLPEKPANPTNPDEADKVGAENTITYSLLMHPDALEEPDDQNRIRAKRSGSGVKQTLNFDLLKLAGDVESNPGPSRGHMTEYKPTVRLATRDDVPRAVRTLAAAFADYPATRHTVDPDRHIERVTELQELFLTRVGLDIGKVWVADDGAAVAVWTTPESVEAGAVFAEIGPRMAELSGSRLAAQQQMEGLLAPHRPKEPAWFLATVGVSPDHQGKGLGSAVVLPGVEAAERAGVPAFLETSAPRNLPFYERLGFTVTADVEVPEGPRTWCMTRKPGA

SEQ ID NO: 6605 - protein, 1278 aa, Artificial Sequence
  Synthetic Polypeptide
MALPVTALLLPLALLLHAARPDIQMTQSPSSLSASVGDRVTITCKASDHINNWLAWYQQKPGQAPKLLIYGATTLETGVPSRFSGSGSGTDYTLTISSLQPEDFATYYCQQSWNTPWTFGQGTKLEIKRLEGQPKANPTVTLFPPSSEELQANKATLVCLISDFYPGAVTVAWKADGSPVKAGVETTKPSKQSNNKYAASSYLSLTPEQWKSHRSYSCQVTHEGSTVEKTVAPTECSGSTPAAPPKAVLKLEPQWINVLQEDSVTLTCRGTHSPESDSIQWFHNGNLIPTHTQPSYRFKANNNDSGEYTCQTGQTSLSDPVHLTVLSEWLVLQTPHLEFQEGETIVLRCHSWKDKPLVKVTFFQNGKSKKFSRSDPNFSIPQANHSHSGDYHCTGNIGYTLYSSKPVTITVQAPSSSPMGIIVAVVTGIAVAAIVAAVVALIYCRKKRISALPGYPECREMGETLPEKPANPTNPDEADKVGAENTITYSLLMHPDALEEPDDQNRIRAKRSGSGATNFSLLKQAGDVEENPGPTSMDWIWRILFLVGAATGAHSFEQVQLQQPGAELVKPGASVKMSCKASGYAFSSYWINWMKQKPGQGLEWIGQIYPGDGDTNYNGKFKGRATLTADTSSSTAYMQLSSLTSEDSAVYFCARSITTVVGCAMDYWGQGTSVTVSSTRASTKGPSVFPLAPSSKSTSGGTAALGCLVKDYFPEPVTVSWNSGALTSGVHTFPAVLQSSGLYSLSSVVTVPSSSLGTQTYICNVNHKPSNTKVDKRVEPKSCGTTPAAPPKAVLKLEPQWINVLQEDSVTLTCRGTHSPESDSIQWFHNGNLIPTHTQPSYRFKANNNDSGEYTCQTGQTSLSDPVHLTVLSEWLVLQTPHLEFQEGETIVLRCHSWKDKPLVKVTFFQNGKSKKFSRSDPNFSIPQANHSHSGDYHCTGNIGYTLYSSKPVTITVQAPSSSPMGIIVAVVTGIAVAAIVAAVVALIYCRKKRISALPGYPECREMGETLPEKPANPTNPDEADKVGAENTITYSLLMHPDALEEPDDQNRIRAKRSGSGVKQTLNFDLLKLAGDVESNPGPSRGGIHTMATYEVLCEVARKLGTDDREVVLFLLNVFIPQPTLAQLIGALRALKEEGRLTFPLLAECLFRAGRRDLLRDLLHLDPRFLERHLAGTMSYFSPYQLTVLHVDGELCARDIRSLIFLSKDTIGSRSTPQTFLHWVYCMENLDLLGPTDVDALMSMLRSLSRVDLQRQVQTLMGLHLSGPSHSQHYRHTP

SEQ ID NO: 6606 - protein, 1331 aa, Artificial Sequence
  Synthetic Polypeptide
MALPVTALLLPLALLLHAARPDIQMTQSPSSLSASVGDRVTITCKASDHINNWLAWYQQKPGQAPKLLIYGATTLETGVPSRFSGSGSGTDYTLTISSLQPEDFATYYCQQSWNTPWTFGQGTKLEIKRLEGQPKANPTVTLFPPSSEELQANKATLVCLISDFYPGAVTVAWKADGSPVKAGVETTKPSKQSNNKYAASSYLSLTPEQWKSHRSYSCQVTHEGSTVEKTVAPTECSGSTPAAPPKAVLKLEPQWINVLQEDSVTLTCRGTHSPESDSIQWFHNGNLIPTHTQPSYRFKANNNDSGEYTCQTGQTSLSDPVHLTVLSEWLVLQTPHLEFQEGETIVLRCHSWKDKPLVKVTFFQNGKSKKFSRSDPNFSIPQANHSHSGDYHCTGNIGYTLYSSKPVTITVQAPSSSPMGIIVAVVTGIAVAAIVAAVVALIYCRKKRISALPGYPECREMGETLPEKPANPTNPDEADKVGAENTITYSLLMHPDALEEPDDQNRIRAKRSGSGATNFSLLKQAGDVEENPGPTSMDWIWRILFLVGAATGAHSFEQVQLQQPGAELVKPGASVKMSCKASGYAFSSYWINWMKQKPGQGLEWIGQIYPGDGDTNYNGKFKGRATLTADTSSSTAYMQLSSLTSEDSAVYFCARSITTVVGCAMDYWGQGTSVTVSSTRASTKGPSVFPLAPSSKSTSGGTAALGCLVKDYFPEPVTVSWNSGALTSGVHTFPAVLQSSGLYSLSSVVTVPSSSLGTQTYICNVNHKPSNTKVDKRVEPKSCGTTPAAPPKAVLKLEPQWINVLQEDSVTLTCRGTHSPESDSIQWFHNGNLIPTHTQPSYRFKANNNDSGEYTCQTGQTSLSDPVHLTVLSEWLVLQTPHLEFQEGETIVLRCHSWKDKPLVKVTFFQNGKSKKFSRSDPNFSIPQANHSHSGDYHCTGNIGYTLYSSKPVTITVQAPSSSPMGIIVAVVTGIAVAAIVAAVVALIYCRKKRISALPGYPECREMGETLPEKPANPTNPDEADKVGAENTITYSLLMHPDALEEPDDQNRIRAKRSGSGVKQTLNFDLLKLAGDVESNPGPSRGGIHTMSDSKEVPSLPFLRHLLEELDSHEDSLLLFLCHDAAPGCTTVTQALCSLSQQRKLTLAALVEMLYVLQRMDLLKSRFGLSKEGAEQLLGTSFLTRYRKLMVCVGEELDSSELRALRLFACNLNPSLSTALSESSRFVELVLALENVGLVSPSSVSVLADMLRTLRRLDLCQQLVEYEQQEQARYRYCYAASPSLPVRTLRRGHGASEHEQLCMPVQESSDSPELLRTPVQESSSDSPEQTT

SEQ ID NO: 6607 - protein, 1286 aa, Artificial Sequence
  Synthetic Polypeptide
MALPVTALLLPLALLLHAARPDIQMTQSPSSLSASVGDRVTITCKASDHINNWLAWYQQKPGQAPKLLIYGATTLETGVPSRFSGSGSGTDYTLTISSLQPEDFATYYCQQSWNTPWTFGQGTKLEIKRLEGQPKANPTVTLFPPSSEELQANKATLVCLISDFYPGAVTVAWKADGSPVKAGVETTKPSKQSNNKYAASSYLSLTPEQWKSHRSYSCQVTHEGSTVEKTVAPTECSGSTPAAPPKAVLKLEPQWINVLQEDSVTLTCRGTHSPESDSIQWFHNGNLIPTHTQPSYRFKANNNDSGEYTCQTGQTSLSDPVHLTVLSEWLVLQTPHLEFQEGETIVLRCHSWKDKPLVKVTFFQNGKSKKFSRSDPNFSIPQANHSHSGDYHCTGNIGYTLYSSKPVTITVQAPSSSPMGIIVAVVTGIAVAAIVAAVVALIYCRKKRISALPGYPECREMGETLPEKPANPTNPDEADKVGAENTITYSLLMHPDALEEPDDQNRIRAKRSGSGATNFSLLKQAGDVEENPGPTSMDWIWRILFLVGAATGAHSFEQVQLQQPGAELVKPGASVKMSCKASGYAFSSYWINWMKQKPGQGLEWIGQIYPGDGDTNYNGKFKGRATLTADTSSSTAYMQLSSLTSEDSAVYFCARSITTVVGCAMDYWGQGTSVTVSSTRASTKGPSVFPLAPSSKSTSGGTAALGCLVKDYFPEPVTVSWNSGALTSGVHTFPAVLQSSGLYSLSSVVTVPSSSLGTQTYICNVNHKPSNTKVDKRVEPKSCGTTPAAPPKAVLKLEPQWINVLQEDSVTLTCRGTHSPESDSIQWFHNGNLIPTHTQPSYRFKANNNDSGEYTCQTGQTSLSDPVHLTVLSEWLVLQTPHLEFQEGETIVLRCHSWKDKPLVKVTFFQNGKSKKFSRSDPNFSIPQANHSHSGDYHCTGNIGYTLYSSKPVTITVQAPSSSPMGIIVAVVTGIAVAAIVAAVVALIYCRKKRISALPGYPECREMGETLPEKPANPTNPDEADKVGAENTITYSLLMHPDALEEPDDQNRIRAKRSGSGVKQTLNFDLLKLAGDVESNPGPSRGHMTEYKPTVRLATRDDVPRAVRTLAAAFADYPATRHTVDPDRHIERVTELQELFLTRVGLDIGKVWVADDGAAVAVWTTPESVEAGAVFAEIGPRMAELSGSRLAAQQQMEGLLAPHRPKEPAWFLATVGVSPDHQGKGLGSAVVLPGVEAAERAGVPAFLETSAPRNLPFYERLGFTVTADVEVPEGPRTWCMTRKPGA

SEQ ID NO: 6608 - protein, 1423 aa, Artificial Sequence
  Synthetic Polypeptide
MALPVTALLLPLALLLHAARPEVQLVESGGGLVQAGGSLRLSCAASGRTFSMGWFRQAPGKEREFVAAITYSGGSPYYADSVKGRFTISRDNAKNTVYLQMNSLKPEDTAVYYCAANPTYGSDWNAENWGQGTQVTVSSGTGGGGSGGGGSGGGGSEFDIQMTQSPSSLSASVGDRVTITCKASDHINNWLAWYQQKPGQAPKLLIYGATTLETGVPSRFSGSGSGTDYTLTISSLQPEDFATYYCQQSWNTPWTFGQGTKLEIKRLEGQPKANPTVTLFPPSSEELQANKATLVCLISDFYPGAVTVAWKADGSPVKAGVETTKPSKQSNNKYAASSYLSLTPEQWKSHRSYSCQVTHEGSTVEKTVAPTECSGSTPAAPPKAVLKLEPQWINVLQEDSVTLTCRGTHSPESDSIQWFHNGNLIPTHTQPSYRFKANNNDSGEYTCQTGQTSLSDPVHLTVLSEWLVLQTPHLEFQEGETIVLRCHSWKDKPLVKVTFFQNGKSKKFSRSDPNFSIPQANHSHSGDYHCTGNIGYTLYSSKPVTITVQAPSSSPMGIIVAVVTGIAVAAIVAAVVALIYCRKKRISALPGYPECREMGETLPEKPANPTNPDEADKVGAENTITYSLLMHPDALEEPDDQNRIRAKRSGSGATNFSLLKQAGDVEENPGPTSMDWIWRILFLVGAATGAHSFEQVQLQQPGAELVKPGASVKMSCKASGYAFSSYWINWMKQKPGQGLEWIGQIYPGDGDTNYNGKFKGRATLTADTSSSTAYMQLSSLTSEDSAVYFCARSITTVVGCAMDYWGQGTSVTVSSTRASTKGPSVFPLAPSSKSTSGGTAALGCLVKDYFPEPVTVSWNSGALTSGVHTFPAVLQSSGLYSLSSVVTVPSSSLGTQTYICNVNHKPSNTKVDKRVEPKSCGTTPAAPPKAVLKLEPQWINVLQEDSVTLTCRGTHSPESDSIQWFHNGNLIPTHTQPSYRFKANNNDSGEYTCQTGQTSLSDPVHLTVLSEWLVLQTPHLEFQEGETIVLRCHSWKDKPLVKVTFFQNGKSKKFSRSDPNFSIPQANHSHSGDYHCTGNIGYTLYSSKPVTITVQAPSSSPMGIIVAVVTGIAVAAIVAAVVALIYCRKKRISALPGYPECREMGETLPEKPANPTNPDEADKVGAENTITYSLLMHPDALEEPDDQNRIRAKRSGSGVKQTLNFDLLKLAGDVESNPGPSRGHMTEYKPTVRLATRDDVPRAVRTLAAAFADYPATRHTVDPDRHIERVTELQELFLTRVGLDIGKVWVADDGAAVAVWTTPESVEAGAVFAEIGPRMAELSGSRLAAQQQMEGLLAPHRPKEPAWFLATVGVSPDHQGKGLGSAVVLPGVEAAERAGVPAFLETSAPRNLPFYERLGFTVTADVEVPEGPRTWCMTRKPGA

SEQ ID NO: 6609 - protein, 1560 aa, Artificial Sequence
  Synthetic Polypeptide
MALPVTALLLPLALLLHAARPEVQLVESGGGLVQAGGSLRLSCAASGRTFSMGWFRQAPGKEREFVAAITYSGGSPYYADSVKGRFTISRDNAKNTVYLQMNSLKPEDTAVYYCAANPTYGSDWNAENWGQGTQVTVSSGTGGGGSGGGGSGGGGSEFDIQMTQSPSSLSASVGDRVTITCKASDHINNWLAWYQQKPGQAPKLLIYGATTLETGVPSRFSGSGSGTDYTLTISSLQPEDFATYYCQQSWNTPWTFGQGTKLEIKRLEGQPKANPTVTLFPPSSEELQANKATLVCLISDFYPGAVTVAWKADGSPVKAGVETTKPSKQSNNKYAASSYLSLTPEQWKSHRSYSCQVTHEGSTVEKTVAPTECSGSTPAAPPKAVLKLEPQWINVLQEDSVTLTCRGTHSPESDSIQWFHNGNLIPTHTQPSYRFKANNNDSGEYTCQTGQTSLSDPVHLTVLSEWLVLQTPHLEFQEGETIVLRCHSWKDKPLVKVTFFQNGKSKKFSRSDPNFSIPQANHSHSGDYHCTGNIGYTLYSSKPVTITVQAPSSSPMGIIVAVVTGIAVAAIVAAVVALIYCRKKRISALPGYPECREMGETLPEKPANPTNPDEADKVGAENTITYSLLMHPDALEEPDDQNRIRAKRSGSGATNFSLLKQAGDVEENPGPTSMDWIWRILFLVGAATGAHSGPEVQLVESGGGLVQAGGSLRLSCAASGRTFTMGWFRQAPGKEREFVAAISLSPTLAYYADSVKGRFTISRDNAKNTVVLQMNSLKPEDTALYYCAADRKSVMSIRPDYWGQGTQVTVSSGSGGGGSGGGGSGGGGSFEQVQLQQPGAELVKPGASVKMSCKASGYAFSSYWINWMKQKPGQGLEWIGQIYPGDGDTNYNGKFKGRATLTADTSSSTAYMQLSSLTSEDSAVYFCARSITTVVGCAMDYWGQGTSVTVSSTRASTKGPSVFPLAPSSKSTSGGTAALGCLVKDYFPEPVTVSWNSGALTSGVHTFPAVLQSSGLYSLSSVVTVPSSSLGTQTYICNVNHKPSNTKVDKRVEPKSCGTTPAAPPKAVLKLEPQWINVLQEDSVTLTCRGTHSPESDSIQWFHNGNLIPTHTQPSYRFKANNNDSGEYTCQTGQTSLSDPVHLTVLSEWLVLQTPHLEFQEGETIVLRCHSWKDKPLVKVTFFQNGKSKKFSRSDPNFSIPQANHSHSGDYHCTGNIGYTLYSSKPVTITVQAPSSSPMGIIVAVVTGIAVAAIVAAVVALIYCRKKRISALPGYPECREMGETLPEKPANPTNPDEADKVGAENTITYSLLMHPDALEEPDDQNRIRAKRSGSGVKQTLNFDLLKLAGDVESNPGPSRGHMTEYKPTVRLATRDDVPRAVRTLAAAFADYPATRHTVDPDRHIERVTELQELFLTRVGLDIGKVWVADDGAAVAVWTTPESVEAGAVFAEIGPRMAELSGSRLAAQQQMEGLLAPHRPKEPAWFLATVGVSPDHQGKGLGSAVVLPGVEAAERAGVPAFLETSAPRNLPFYERLGFTVTADVEVPEGPRTWCMTRKPGA

SEQ ID NO: 6610 - protein, 1293 aa, Artificial Sequence
  Synthetic Polypeptide
MALPVTALLLPLALLLHAARPEVQLVESGGGLVQAGGSLRLSCAASGRTFSMGWFRQAPGKEREFVAAITYSGGSPYYADSVKGRFTISRDNAKNTVYLQMNSLKPEDTAVYYCAANPTYGSDWNAENWGQGTQVTVSSLEGQPKANPTVTLFPPSSEELQANKATLVCLISDFYPGAVTVAWKADGSPVKAGVETTKPSKQSNNKYAASSYLSLTPEQWKSHRSYSCQVTHEGSTVEKTVAPTECSGSTPAAPPKAVLKLEPQWINVLQEDSVTLTCRGTHSPESDSIQWFHNGNLIPTHTQPSYRFKANNNDSGEYTCQTGQTSLSDPVHLTVLSEWLVLQTPHLEFQEGETIVLRCHSWKDKPLVKVTFFQNGKSKKFSRSDPNFSIPQANHSHSGDYHCTGNIGYTLYSSKPVTITVQAPSSSPMGIIVAVVTGIAVAAIVAAVVALIYCRKKRISALPGYPECREMGETLPEKPANPTNPDEADKVGAENTITYSLLMHPDALEEPDDQNRIRAKRSGSGATNFSLLKQAGDVEENPGPTSMDWIWRILFLVGAATGAHSGPEVQLVESGGGLVQAGGSLRLSCAASGRTFTMGWFRQAPGKEREFVAAISLSPTLAYYADSVKGRFTISRDNAKNTVVLQMNSLKPEDTALYYCAADRKSVMSIRPDYWGQGTQVTVSSTRASTKGPSVFPLAPSSKSTSGGTAALGCLVKDYFPEPVTVSWNSGALTSGVHTFPAVLQSSGLYSLSSVVTVPSSSLGTQTYICNVNHKPSNTKVDKRVEPKSCGTTPAAPPKAVLKLEPQWINVLQEDSVTLTCRGTHSPESDSIQWFHNGNLIPTHTQPSYRFKANNNDSGEYTCQTGQTSLSDPVHLTVLSEWLVLQTPHLEFQEGETIVLRCHSWKDKPLVKVTFFQNGKSKKFSRSDPNFSIPQANHSHSGDYHCTGNIGYTLYSSKPVTITVQAPSSSPMGIIVAVVTGIAVAAIVAAVVALIYCRKKRISALPGYPECREMGETLPEKPANPTNPDEADKVGAENTITYSLLMHPDALEEPDDQNRIRAKRSGSGVKQTLNFDLLKLAGDVESNPGPSRGHMTEYKPTVRLATRDDVPRAVRTLAAAFADYPATRHTVDPDRHIERVTELQELFLTRVGLDIGKVWVADDGAAVAVWTTPESVEAGAVFAEIGPRMAELSGSRLAAQQQMEGLLAPHRPKEPAWFLATVGVSPDHQGKGLGSAVVLPGVEAAERAGVPAFLETSAPRNLPFYERLGFTVTADVEVPEGPRTWCMTRKPGA

SEQ ID NO: 6611 - protein, 1301 aa, Artificial Sequence
  Synthetic Polypeptide
MALPVTALLLPLALLLHAARPDIQMTQSPSSLSASVGDRVTITCKASDHINNWLAWYQQKPGQAPKLLIYGATTLETGVPSRFSGSGSGTDYTLTISSLQPEDFATYYCQQSWNTPWTFGQGTKLEIKRLEDLKNVFPPEVAVFEPSEAEISHTQKATLVCLATGFYPDHVELSWWVNGKEVHSGVSTDPQPLKEQPALNDSRYCLSSRLRVSATFWQNPRNHFRCQVQFYGLSENDEWTQDRAKPVTQIVSAEAWGRADCGSTPAAPPKAVLKLEPQWINVLQEDSVTLTCRGTHSPESDSIQWFHNGNLIPTHTQPSYRFKANNNDSGEYTCQTGQTSLSDPVHLTVLSEWLVLQTPHLEFQEGETIVLRCHSWKDKPLVKVTFFQNGKSKKFSRSDPNFSIPQANHSHSGDYHCTGNIGYTLYSSKPVTITVQAPSSSPMGIIVAVVTGIAVAAIVAAVVALIYCRKKRISALPGYPECREMGETLPEKPANPTNPDEADKVGAENTITYSLLMHPDALEEPDDQNRIRAKRSGSGATNFSLLKQAGDVEENPGPTSMDWIWRILFLVGAATGAHSFEQVQLQQPGAELVKPGASVKMSCKASGYAFSSYWINWMKQKPGQGLEWIGQIYPGDGDTNYNGKFKGRATLTADTSSSTAYMQLSSLTSEDSAVYFCARSITTVVGCAMDYWGQGTSVTVSSTRIQNPDPAVYQLRDSKSSDKSVCLFTDFDSQTNVSQSKDSDVYITDKTVLDMRSMDFKSNSAVAWSNKSDFACANAFNNSIIPEDTFFPSPESSCGTTPAAPPKAVLKLEPQWINVLQEDSVTLTCRGTHSPESDSIQWFHNGNLIPTHTQPSYRFKANNNDSGEYTCQTGQTSLSDPVHLTVLSEWLVLQTPHLEFQEGETIVLRCHSWKDKPLVKVTFFQNGKSKKFSRSDPNFSIPQANHSHSGDYHCTGNIGYTLYSSKPVTITVQAPSSSPMGIIVAVVTGIAVAAIVAAVVALIYCRKKRISALPGYPECREMGETLPEKPANPTNPDEADKVGAENTITYSLLMHPDALEEPDDQNRIRAKRSGSGVKQTLNFDLLKLAGDVESNPGPSRGHMTEYKPTVRLATRDDVPRAVRTLAAAFADYPATRHTVDPDRHIERVTELQELFLTRVGLDIGKVWVADDGAAVAVWTTPESVEAGAVFAEIGPRMAELSGSRLAAQQQMEGLLAPHRPKEPAWFLATVGVSPDHQGKGLGSAVVLPGVEAAERAGVPAFLETSAPRNLPFYERLGFTVTADVEVPEGPRTWCMTRKPGA

SEQ ID NO: 6612 - protein, 1438 aa, Artificial Sequence
  Synthetic Polypeptide
MALPVTALLLPLALLLHAARPEVQLVESGGGLVQAGGSLRLSCAASGRTFSMGWFRQAPGKEREFVAAITYSGGSPYYADSVKGRFTISRDNAKNTVYLQMNSLKPEDTAVYYCAANPTYGSDWNAENWGQGTQVTVSSGTGGGGSGGGGSGGGGSEFDIQMTQSPSSLSASVGDRVTITCKASDHINNWLAWYQQKPGQAPKLLIYGATTLETGVPSRFSGSGSGTDYTLTISSLQPEDFATYYCQQSWNTPWTFGQGTKLEIKRLEDLKNVFPPEVAVFEPSEAEISHTQKATLVCLATGFYPDHVELSWWVNGKEVHSGVSTDPQPLKEQPALNDSRYCLSSRLRVSATFWQNPRNHFRCQVQFYGLSENDEWTQDRAKPVTQIVSAEAWGRADCGSTPAAPPKAVLKLEPQWINVLQEDSVTLTCRGTHSPESDSIQWFHNGNLIPTHTQPSYRFKANNNDSGEYTCQTGQTSLSDPVHLTVLSEWLVLQTPHLEFQEGETIVLRCHSWKDKPLVKVTFFQNGKSKKFSRSDPNFSIPQANHSHSGDYHCTGNIGYTLYSSKPVTITVQAPSSSPMGIIVAVVTGIAVAAIVAAVVALIYCRKKRISALPGYPECREMGETLPEKPANPTNPDEADKVGAENTITYSLLMHPDALEEPDDQNRIRAKRSGSGATNFSLLKQAGDVEENPGPTSMDWIWRILFLVGAATGAHSFEQVQLQQPGAELVKPGASVKMSCKASGYAFSSYWINWMKQKPGQGLEWIGQIYPGDGDTNYNGKFKGRATLTADTSSSTAYMQLSSLTSEDSAVYFCARSITTVVGCAMDYWGQGTSVTVSSTRIQNPDPAVYQLRDSKSSDKSVCLFTDFDSQTNVSQSKDSDVYITDKTVLDMRSMDFKSNSAVAWSNKSDFACANAFNNSIIPEDTFFPSPESSCGTTPAAPPKAVLKLEPQWINVLQEDSVTLTCRGTHSPESDSIQWFHNGNLIPTHTQPSYRFKANNNDSGEYTCQTGQTSLSDPVHLTVLSEWLVLQTPHLEFQEGETIVLRCHSWKDKPLVKVTFFQNGKSKKFSRSDPNFSIPQANHSHSGDYHCTGNIGYTLYSSKPVTITVQAPSSSPMGIIVAVVTGIAVAAIVAAVVALIYCRKKRISALPGYPECREMGETLPEKPANPTNPDEADKVGAENTITYSLLMHPDALEEPDDQNRIRAKRSGSGVKQTLNFDLLKLAGDVESNPGPSRGHMTEYKPTVRLATRDDVPRAVRTLAAAFADYPATRHTVDPDRHIERVTELQELFLTRVGLDIGKVWVADDGAAVAVWTTPESVEAGAVFAEIGPRMAELSGSRLAAQQQMEGLLAPHRPKEPAWFLATVGVSPDHQGKGLGSAVVLPGVEAAERAGVPAFLETSAPRNLPFYERLGFTVTADVEVPEGPRTWCMTRKPGA

SEQ ID NO: 6613 - protein, 1575 aa, Artificial Sequence
  Synthetic Polypeptide
MALPVTALLLPLALLLHAARPEVQLVESGGGLVQAGGSLRLSCAASGRTFSMGWFRQAPGKEREFVAAITYSGGSPYYADSVKGRFTISRDNAKNTVYLQMNSLKPEDTAVYYCAANPTYGSDWNAENWGQGTQVTVSSGTGGGGSGGGGSGGGGSEFDIQMTQSPSSLSASVGDRVTITCKASDHINNWLAWYQQKPGQAPKLLIYGATTLETGVPSRFSGSGSGTDYTLTISSLQPEDFATYYCQQSWNTPWTFGQGTKLEIKRLEDLKNVFPPEVAVFEPSEAEISHTQKATLVCLATGFYPDHVELSWWVNGKEVHSGVSTDPQPLKEQPALNDSRYCLSSRLRVSATFWQNPRNHFRCQVQFYGLSENDEWTQDRAKPVTQIVSAEAWGRADCGSTPAAPPKAVLKLEPQWINVLQEDSVTLTCRGTHSPESDSIQWFHNGNLIPTHTQPSYRFKANNNDSGEYTCQTGQTSLSDPVHLTVLSEWLVLQTPHLEFQEGETIVLRCHSWKDKPLVKVTFFQNGKSKKFSRSDPNFSIPQANHSHSGDYHCTGNIGYTLYSSKPVTITVQAPSSSPMGIIVAVVTGIAVAAIVAAVVALIYCRKKRISALPGYPECREMGETLPEKPANPTNPDEADKVGAENTITYSLLMHPDALEEPDDQNRIRAKRSGSGATNFSLLKQAGDVEENPGPTSMDWIWRILFLVGAATGAHSGPEVQLVESGGGLVQAGGSLRLSCAASGRTFTMGWFRQAPGKEREFVAAISLSPTLAYYADSVKGRFTISRDNAKNTVVLQMNSLKPEDTALYYCAADRKSVMSIRPDYWGQGTQVTVSSGSGGGGSGGGGSGGGGSFEQVQLQQPGAELVKPGASVKMSCKASGYAFSSYWINWMKQKPGQGLEWIGQIYPGDGDTNYNGKFKGRATLTADTSSSTAYMQLSSLTSEDSAVYFCARSITTVVGCAMDYWGQGTSVTVSSTRIQNPDPAVYQLRDSKSSDKSVCLFTDFDSQTNVSQSKDSDVYITDKTVLDMRSMDFKSNSAVAWSNKSDFACANAFNNSIIPEDTFFPSPESSCGTTPAAPPKAVLKLEPQWINVLQEDSVTLTCRGTHSPESDSIQWFHNGNLIPTHTQPSYRFKANNNDSGEYTCQTGQTSLSDPVHLTVLSEWLVLQTPHLEFQEGETIVLRCHSWKDKPLVKVTFFQNGKSKKFSRSDPNFSIPQANHSHSGDYHCTGNIGYTLYSSKPVTITVQAPSSSPMGIIVAVVTGIAVAAIVAAVVALIYCRKKRISALPGYPECREMGETLPEKPANPTNPDEADKVGAENTITYSLLMHPDALEEPDDQNRIRAKRSGSGVKQTLNFDLLKLAGDVESNPGPSRGHMTEYKPTVRLATRDDVPRAVRTLAAAFADYPATRHTVDPDRHIERVTELQELFLTRVGLDIGKVWVADDGAAVAVWTTPESVEAGAVFAEIGPRMAELSGSRLAAQQQMEGLLAPHRPKEPAWFLATVGVSPDHQGKGLGSAVVLPGVEAAERAGVPAFLETSAPRNLPFYERLGFTVTADVEVPEGPRTWCMTRKPGA

SEQ ID NO: 6614 - protein, 1308 aa, Artificial Sequence
  Synthetic Polypeptide
MALPVTALLLPLALLLHAARPEVQLVESGGGLVQAGGSLRLSCAASGRTFSMGWFRQAPGKEREFVAAITYSGGSPYYADSVKGRFTISRDNAKNTVYLQMNSLKPEDTAVYYCAANPTYGSDWNAENWGQGTQVTVSSLEDLKNVFPPEVAVFEPSEAEISHTQKATLVCLATGFYPDHVELSWWVNGKEVHSGVSTDPQPLKEQPALNDSRYCLSSRLRVSATFWQNPRNHFRCQVQFYGLSENDEWTQDRAKPVTQIVSAEAWGRADCGSTPAAPPKAVLKLEPQWINVLQEDSVTLTCRGTHSPESDSIQWFHNGNLIPTHTQPSYRFKANNNDSGEYTCQTGQTSLSDPVHLTVLSEWLVLQTPHLEFQEGETIVLRCHSWKDKPLVKVTFFQNGKSKKFSRSDPNFSIPQANHSHSGDYHCTGNIGYTLYSSKPVTITVQAPSSSPMGIIVAVVTGIAVAAIVAAVVALIYCRKKRISALPGYPECREMGETLPEKPANPTNPDEADKVGAENTITYSLLMHPDALEEPDDQNRIRAKRSGSGATNFSLLKQAGDVEENPGPTSMDWIWRILFLVGAATGAHSGPEVQLVESGGGLVQAGGSLRLSCAASGRTFTMGWFRQAPGKEREFVAAISLSPTLAYYADSVKGRFTISRDNAKNTVVLQMNSLKPEDTALYYCAADRKSVMSIRPDYWGQGTQVTVSSTRIQNPDPAVYQLRDSKSSDKSVCLFTDFDSQTNVSQSKDSDVYITDKTVLDMRSMDFKSNSAVAWSNKSDFACANAFNNSIIPEDTFFPSPESSCGTTPAAPPKAVLKLEPQWINVLQEDSVTLTCRGTHSPESDSIQWFHNGNLIPTHTQPSYRFKANNNDSGEYTCQTGQTSLSDPVHLTVLSEWLVLQTPHLEFQEGETIVLRCHSWKDKPLVKVTFFQNGKSKKFSRSDPNFSIPQANHSHSGDYHCTGNIGYTLYSSKPVTITVQAPSSSPMGIIVAVVTGIAVAAIVAAVVALIYCRKKRISALPGYPECREMGETLPEKPANPTNPDEADKVGAENTITYSLLMHPDALEEPDDQNRIRAKRSGSGVKQTLNFDLLKLAGDVESNPGPSRGHMTEYKPTVRLATRDDVPRAVRTLAAAFADYPATRHTVDPDRHIERVTELQELFLTRVGLDIGKVWVADDGAAVAVWTTPESVEAGAVFAEIGPRMAELSGSRLAAQQQMEGLLAPHRPKEPAWFLATVGVSPDHQGKGLGSAVVLPGVEAAERAGVPAFLETSAPRNLPFYERLGFTVTADVEVPEGPRTWCMTRKPGA

SEQ ID NO: 6615 - protein, 663 aa, Artificial Sequence
  Synthetic Polypeptide
MALPVTALLLPLALLLHAARPACEVQLLESGGGLIQPGGSLRLSCAASGFTFSSHAMTWVRQAPGKGLEWVSAISGSGDYTHYADSVKGRFTISRDNSKNTVYLQMNSLRAEDSAVYYCAKDEDGGSLLGHRGQGTLVTVSSGTGGGGSGGGGSGGGGSEFGSLETPAAPPKAVLKLEPQWINVLQEDSVTLTCRGTHSPESDSIQWFHNGNLIPTHTQPSYRFKANNNDSGEYTCQTGQTSLSDPVHLTVLSEWLVLQTPHLEFQEGETIVLRCHSWKDKPLVKVTFFQNGKSKKFSRSDPNFSIPQANHSHSGDYHCTGNIGYTLYSSKPVTITVQAPSSSPMGIIVAVVTGIAVAAIVAAVVALIYCRKKRISALPGYPECREMGETLPEKPANPTNPDEADKVGAENTITYSLLMHPDALEEPDDQNRIRAKRSGSGATNFSLLKQAGDVEENPGPTRGHMTEYKPTVRLATRDDVPRAVRTLAAAFADYPATRHTVDPDRHIERVTELQELFLTRVGLDIGKVWVADDGAAVAVWTTPESVEAGAVFAEIGPRMAELSGSRLAAQQQMEGLLAPHRPKEPAWFLATVGVSPDHQGKGLGSAVVLPGVEAAERAGVPAFLETSAPRNLPFYERLGFTVTADVEVPEGPRTWCMTRKPGA

SEQ ID NO: 6616 - protein, 535 aa, Artificial Sequence; identical to SEQ ID NO: 6584
  Synthetic Polypeptide

SEQ ID NO: 6617 - protein, 535 aa, Artificial Sequence; identical to SEQ ID NO: 6585
  Synthetic Polypeptide

SEQ ID NO: 6618 - protein, 409 aa, Artificial Sequence; identical to SEQ ID NO: 6586
  Synthetic Polypeptide

SEQ ID NO: 6619 - protein, 409 aa, Artificial Sequence; identical to SEQ ID NO: 6587
  Synthetic Polypeptide

SEQ ID NO: 6620 - protein, 409 aa, Artificial Sequence; identical to SEQ ID NO: 6588
  Synthetic Polypeptide

SEQ ID NO: 6621 - protein, 411 aa, Artificial Sequence; identical to SEQ ID NO: 6589
  Synthetic Polypeptide

SEQ ID NO: 6622 - protein, 419 aa, Artificial Sequence; identical to SEQ ID NO: 6590
  Synthetic Polypeptide

SEQ ID NO: 6623 - protein, 415 aa, Artificial Sequence; identical to SEQ ID NO: 6591
  Synthetic Polypeptide

SEQ ID NO: 6624 - protein, 410 aa, Artificial Sequence; identical to SEQ ID NO: 6592
  Synthetic Polypeptide

SEQ ID NO: 6625 - protein, 415 aa, Artificial Sequence; identical to SEQ ID NO: 6593
  Synthetic Polypeptide

SEQ ID NO: 6626 - protein, 349 aa, Artificial Sequence; identical to SEQ ID NO: 6594
  Synthetic Polypeptide

SEQ ID NO: 6627 - protein, 380 aa, Artificial Sequence; identical to SEQ ID NO: 6595
  Synthetic Polypeptide

SEQ ID NO: 6628 - protein, 381 aa, Artificial Sequence; identical to SEQ ID NO: 6596
  Synthetic Polypeptide

SEQ ID NO: 6629 - protein, 598 aa, Artificial Sequence; identical to SEQ ID NO: 6597
  Synthetic Polypeptide

SEQ ID NO: 6630 - protein, 478 aa, Artificial Sequence; identical to SEQ ID NO: 6598
  Synthetic Polypeptide

SEQ ID NO: 6631 - protein, 344 aa, Artificial Sequence; identical to SEQ ID NO: 6599
  Synthetic Polypeptide

SEQ ID NO: 6632 - protein, 319 aa, Artificial Sequence; identical to SEQ ID NO: 6600
  Synthetic Polypeptide

SEQ ID NO: 6633 - protein, 577 aa, Artificial Sequence; identical to SEQ ID NO: 6601
  Synthetic Polypeptide

SEQ ID NO: 6634 - protein, 577 aa, Artificial Sequence; identical to SEQ ID NO: 6602
  Synthetic Polypeptide

SEQ ID NO: 6635 - protein, 1135 aa, Artificial Sequence
  Synthetic Polypeptide
MALPVTALLLPLALLLHAARPDIQMTQSPSSLSASVGDRVTITCKASDHINNWLAWYQQKPGQAPKLLIYGATTLETGVPSRFSGSGSGTDYTLTISSLQPEDFATYYCQQSWNTPWTFGQGTKLEIKRLEGMRTEDLPKAVVFLEPQWYRVLEKDSVTLKCQGAYSPEDNSTQWFHNESLISSQASSYFIDAATVDDSGEYRCQTNLSTLSDPVQLEVHIGWLLLQAPRWVFKEEDPIHLRCHSWKNTALHKVTYLQNGKGRKYFHHNSDFYIPKATLKDSGSYFCRGLVGSKNVSSETVNITITQGLAVSTISSFFPPGYQVSFCLVMVLLFAVDTGLYFSVKTNIRSSTRDWKDHKFKWRKDPQDKRAKRSGSGATNFSLLKQAGDVEENPGPTSMDWIWRILFLVGAATGAHSFEQVQLQQPGAELVKPGASVKMSCKASGYAFSSYWINWMKQKPGQGLEWIGQIYPGDGDTNYNGKFKGRATLTADTSSSTAYMQLSSLTSEDSAVYFCARSITTVVGCAMDYWGQGTSVTVSSTRQVVDTTKAVITLQPPWVSVFQEETVTLHCEVLHLPGSSSTQWFLNGTATQTSTPSYRITSASVNDSGEYRCQRGLSGRSDPIQLEIHRGWLLLQVSSRVFTEGEPLALRCHAWKDKLVYNVLYYRNGKAFKFFHWNSNLTILKTNISHNGTYHCSGMGKHRYTSAGISVTVKELFPAPVLNASVTSPLLEGNLVTLSCETKLLLQRPGLQLYFSFYMGSKTLRGRNTSSEYQILTARREDSGLYWCEAATEDGNVLKRSPELELQVLGLQLPTPVWFHVLFYLAVGIMFLVNTVLWVTIRKELKRKKKWDLEISLDSGHEKKVISSLQEDRHLEEELKCQEQKEEQLQEGVHRKEPQGATRAKRSGSGVKQTLNFDLLKLAGDVESNPGPSRGHMTEYKPTVRLATRDDVPRAVRTLAAAFADYPATRHTVDPDRHIERVTELQELFLTRVGLDIGKVWVADDGAAVAVWTTPESVEAGAVFAEIGPRMAELSGSRLAAQQQMEGLLAPHRPKEPAWFLATVGVSPDHQGKGLGSAVVLPGVEAAERAGVPAFLETSAPRNLPFYERLGFTVTADVEVPEGPRTWCMTRKPGA

SEQ ID NO: 6636 - protein, 1189 aa, Artificial Sequence
  Synthetic Polypeptide
MALPVTALLLPLALLLHAARPACEVQLLESGGGLIQPGGSLRLSCAASGFTFSSHAMTWVRQAPGKGLEWVSAISGSGDYTHYADSVKGRFTISRDNSKNTVYLQMNSLRAEDSAVYYCAKDEDGGSLLGHRGQGTLVTVSSGTGGGGSGGGGSGGGGSEFGSLEGMRTEDLPKAVVFLEPQWYRVLEKDSVTLKCQGAYSPEDNSTQWFHNESLISSQASSYFIDAATVDDSGEYRCQTNLSTLSDPVQLEVHIGWLLLQAPRWVFKEEDPIHLRCHSWKNTALHKVTYLQNGKGRKYFHHNSDFYIPKATLKDSGSYFCRGLVGSKNVSSETVNITITQGLAVSTISSFFPPGYQVSFCLVMVLLFAVDTGLYFSVKTNIRSSTRDWKDHKFKWRKDPQDKRAKRSGSGATNFSLLKQAGDVEENPGPTSATMDWIWRILFLVGAATGAHSGPEVQLVESGGGLVQAGGSLRLSCAASGRTFSMGWFRQAPGKEREFVAAITYSGGSPYYADSVKGRFTISRDNAKNTVYLQMNSLKPEDTAVYYCAANPTYGSDWNAENWGQGTQVTVSSGSGGGGSGGGGSGGGGSFEGSTRQVVDTTKAVITLQPPWVSVFQEETVTLHCEVLHLPGSSSTQWFLNGTATQTSTPSYRITSASVNDSGEYRCQRGLSGRSDPIQLEIHRGWLLLQVSSRVFTEGEPLALRCHAWKDKLVYNVLYYRNGKAFKFFHWNSNLTILKTNISHNGTYHCSGMGKHRYTSAGISVTVKELFPAPVLNASVTSPLLEGNLVTLSCETKLLLQRPGLQLYFSFYMGSKTLRGRNTSSEYQILTARREDSGLYWCEAATEDGNVLKRSPELELQVLGLQLPTPVWFHVLFYLAVGIMFLVNTVLWVTIRKELKRKKKWDLEISLDSGHEKKVISSLQEDRHLEEELKCQEQKEEQLQEGVHRKEPQGATRAKRSGSGVKQTLNFDLLKLAGDVESNPGPSRGHMTEYKPTVRLATRDDVPRAVRTLAAAFADYPATRHTVDPDRHIERVTELQELFLTRVGLDIGKVWVADDGAAVAVWTTPESVEAGAVFAEIGPRMAELSGSRLAAQQQMEGLLAPHRPKEPAWFLATVGVSPDHQGKGLGSAVVLPGVEAAERAGVPAFLETSAPRNLPFYERLGFTVTADVEVPEGPRTWCMTRKPGA

SEQ ID NO: 6637 - protein, 1340 aa, Artificial Sequence
  Synthetic Polypeptide
MALPVTALLLPLALLLHAARPDIQMTQSPSSLSASVGDRVTITCKASDHINNWLAWYQQKPGQAPKLLIYGATTLETGVPSRFSGSGSGTDYTLTISSLQPEDFATYYCQQSWNTPWTFGQGTKLEIKRLEGQPKANPTVTLFPPSSEELQANKATLVCLISDFYPGAVTVAWKADGSPVKAGVETTKPSKQSNNKYAASSYLSLTPEQWKSHRSYSCQVTHEGSTVEKTVAPTECSGSGMRTEDLPKAVVFLEPQWYRVLEKDSVTLKCQGAYSPEDNSTQWFHNESLISSQASSYFIDAATVDDSGEYRCQTNLSTLSDPVQLEVHIGWLLLQAPRWVFKEEDPIHLRCHSWKNTALHKVTYLQNGKGRKYFHHNSDFYIPKATLKDSGSYFCRGLVGSKNVSSETVNITITQGLAVSTISSFFPPGYQVSFCLVMVLLFAVDTGLYFSVKTNIRSSTRDWKDHKFKWRKDPQDKRAKRSGSGATNFSLLKQAGDVEENPGPTSMDWIWRILFLVGAATGAHSFEQVQLQQPGAELVKPGASVKMSCKASGYAFSSYWINWMKQKPGQGLEWIGQIYPGDGDTNYNGKFKGRATLTADTSSSTAYMQLSSLTSEDSAVYFCARSITTVVGCAMDYWGQGTSVTVSSTRASTKGPSVFPLAPSSKSTSGGTAALGCLVKDYFPEPVTVSWNSGALTSGVHTFPAVLQSSGLYSLSSVVTVPSSSLGTQTYICNVNHKPSNTKVDKRVEPKSCGTQVVDTTKAVITLQPPWVSVFQEETVTLHCEVLHLPGSSSTQWFLNGTATQTSTPSYRITSASVNDSGEYRCQRGLSGRSDPIQLEIHRGWLLLQVSSRVFTEGEPLALRCHAWKDKLVYNVLYYRNGKAFKFFHWNSNLTILKTNISHNGTYHCSGMGKHRYTSAGISVTVKELFPAPVLNASVTSPLLEGNLVTLSCETKLLLQRPGLQLYFSFYMGSKTLRGRNTSSEYQILTARREDSGLYWCEAATEDGNVLKRSPELELQVLGLQLPTPVWFHVLFYLAVGIMFLVNTVLWVTIRKELKRKKKWDLEISLDSGHEKKVISSLQEDRHLEEELKCQEQKEEQLQEGVHRKEPQGATRAKRSGSGVKQTLNFDLLKLAGDVESNPGPSRGGIHTMATYEVLCEVARKLGTDDREVVLFLLNVFIPQPTLAQLIGALRALKEEGRLTFPLLAECLFRAGRRDLLRDLLHLDPRFLERHLAGTMSYFSPYQLTVLHVDGELCARDIRSLIFLSKDTIGSRSTPQTFLHWVYCMENLDLLGPTDVDALMSMLRSLSRVDLQRQVQTLMGLHLSGPSHSQHYRHTP

SEQ ID NO: 6638 - protein, 1393 aa, Artificial Sequence
  Synthetic Polypeptide
MALPVTALLLPLALLLHAARPDIQMTQSPSSLSASVGDRVTITCKASDHINNWLAWYQQKPGQAPKLLIYGATTLETGVPSRFSGSGSGTDYTLTISSLQPEDFATYYCQQSWNTPWTFGQGTKLEIKRLEGQPKANPTVTLFPPSSEELQANKATLVCLISDFYPGAVTVAWKADGSPVKAGVETTKPSKQSNNKYAASSYLSLTPEQWKSHRSYSCQVTHEGSTVEKTVAPTECSGSGMRTEDLPKAVVFLEPQWYRVLEKDSVTLKCQGAYSPEDNSTQWFHNESLISSQASSYFIDAATVDDSGEYRCQTNLSTLSDPVQLEVHIGWLLLQAPRWVFKEEDPIHLRCHSWKNTALHKVTYLQNGKGRKYFHHNSDFYIPKATLKDSGSYFCRGLVGSKNVSSETVNITITQGLAVSTISSFFPPGYQVSFCLVMVLLFAVDTGLYFSVKTNIRSSTRDWKDHKFKWRKDPQDKRAKRSGSGATNFSLLKQAGDVEENPGPTSMDWIWRILFLVGAATGAHSFEQVQLQQPGAELVKPGASVKMSCKASGYAFSSYWINWMKQKPGQGLEWIGQIYPGDGDTNYNGKFKGRATLTADTSSSTAYMQLSSLTSEDSAVYFCARSITTVVGCAMDYWGQGTSVTVSSTRASTKGPSVFPLAPSSKSTSGGTAALGCLVKDYFPEPVTVSWNSGALTSGVHTFPAVLQSSGLYSLSSVVTVPSSSLGTQTYICNVNHKPSNTKVDKRVEPKSCGTQVVDTTKAVITLQPPWVSVFQEETVTLHCEVLHLPGSSSTQWFLNGTATQTSTPSYRITSASVNDSGEYRCQRGLSGRSDPIQLEIHRGWLLLQVSSRVFTEGEPLALRCHAWKDKLVYNVLYYRNGKAFKFFHWNSNLTILKTNISHNGTYHCSGMGKHRYTSAGISVTVKELFPAPVLNASVTSPLLEGNLVTLSCETKLLLQRPGLQLYFSFYMGSKTLRGRNTSSEYQILTARREDSGLYWCEAATEDGNVLKRSPELELQVLGLQLPTPVWFHVLFYLAVGIMFLVNTVLWVTIRKELKRKKKWDLEISLDSGHEKKVISSLQEDRHLEEELKCQEQKEEQLQEGVHRKEPQGATRAKRSGSGVKQTLNFDLLKLAGDVESNPGPSRGGIHTMSDSKEVPSLPFLRHLLEELDSHEDSLLLFLCHDAAPGCTTVTQALCSLSQQRKLTLAALVEMLYVLQRMDLLKSRFGLSKEGAEQLLGTSFLTRYRKLMVCVGEELDSSELRALRLFACNLNPSLSTALSESSRFVELVLALENVGLVSPSSVSVLADMLRTLRRLDLCQQLVEYEQQEQARYRYCYAASPSLPVRTLRRGHGASEHEQLCMPVQESSDSPELLRTPVQESSSDSPEQTT

SEQ ID NO: 6639 - protein, 1348 aa, Artificial Sequence
  Synthetic Polypeptide
MALPVTALLLPLALLLHAARPDIQMTQSPSSLSASVGDRVTITCKASDHINNWLAWYQQKPGQAPKLLIYGATTLETGVPSRFSGSGSGTDYTLTISSLQPEDFATYYCQQSWNTPWTFGQGTKLEIKRLEGQPKANPTVTLFPPSSEELQANKATLVCLISDFYPGAVTVAWKADGSPVKAGVETTKPSKQSNNKYAASSYLSLTPEQWKSHRSYSCQVTHEGSTVEKTVAPTECSGSGMRTEDLPKAVVFLEPQWYRVLEKDSVTLKCQGAYSPEDNSTQWFHNESLISSQASSYFIDAATVDDSGEYRCQTNLSTLSDPVQLEVHIGWLLLQAPRWVFKEEDPIHLRCHSWKNTALHKVTYLQNGKGRKYFHHNSDFYIPKATLKDSGSYFCRGLVGSKNVSSETVNITITQGLAVSTISSFFPPGYQVSFCLVMVLLFAVDTGLYFSVKTNIRSSTRDWKDHKFKWRKDPQDKRAKRSGSGATNFSLLKQAGDVEENPGPTSMDWIWRILFLVGAATGAHSFEQVQLQQPGAELVKPGASVKMSCKASGYAFSSYWINWMKQKPGQGLEWIGQIYPGDGDTNYNGKFKGRATLTADTSSSTAYMQLSSLTSEDSAVYFCARSITTVVGCAMDYWGQGTSVTVSSTRASTKGPSVFPLAPSSKSTSGGTAALGCLVKDYFPEPVTVSWNSGALTSGVHTFPAVLQSSGLYSLSSVVTVPSSSLGTQTYICNVNHKPSNTKVDKRVEPKSCGTQVVDTTKAVITLQPPWVSVFQEETVTLHCEVLHLPGSSSTQWFLNGTATQTSTPSYRITSASVNDSGEYRCQRGLSGRSDPIQLEIHRGWLLLQVSSRVFTEGEPLALRCHAWKDKLVYNVLYYRNGKAFKFFHWNSNLTILKTNISHNGTYHCSGMGKHRYTSAGISVTVKELFPAPVLNASVTSPLLEGNLVTLSCETKLLLQRPGLQLYFSFYMGSKTLRGRNTSSEYQILTARREDSGLYWCEAATEDGNVLKRSPELELQVLGLQLPTPVWFHVLFYLAVGIMFLVNTVLWVTIRKELKRKKKWDLEISLDSGHEKKVISSLQEDRHLEEELKCQEQKEEQLQEGVHRKEPQGATRAKRSGSGVKQTLNFDLLKLAGDVESNPGPSRGHMTEYKPTVRLATRDDVPRAVRTLAAAFADYPATRHTVDPDRHIERVTELQELFLTRVGLDIGKVWVADDGAAVAVWTTPESVEAGAVFAEIGPRMAELSGSRLAAQQQMEGLLAPHRPKEPAWFLATVGVSPDHQGKGLGSAVVLPGVEAAERAGVPAFLETSAPRNLPFYERLGFTVTADVEVPEGPRTWCMTRKPGA

SEQ ID NO: 6640 - protein, 1485 aa, Artificial Sequence
  Synthetic Polypeptide
MALPVTALLLPLALLLHAARPEVQLVESGGGLVQAGGSLRLSCAASGRTFSMGWFRQAPGKEREFVAAITYSGGSPYYADSVKGRFTISRDNAKNTVYLQMNSLKPEDTAVYYCAANPTYGSDWNAENWGQGTQVTVSSGTGGGGSGGGGSGGGGSEFDIQMTQSPSSLSASVGDRVTITCKASDHINNWLAWYQQKPGQAPKLLIYGATTLETGVPSRFSGSGSGTDYTLTISSLQPEDFATYYCQQSWNTPWTFGQGTKLEIKRLEGQPKANPTVTLFPPSSEELQANKATLVCLISDFYPGAVTVAWKADGSPVKAGVETTKPSKQSNNKYAASSYLSLTPEQWKSHRSYSCQVTHEGSTVEKTVAPTECSGSGMRTEDLPKAVVFLEPQWYRVLEKDSVTLKCQGAYSPEDNSTQWFHNESLISSQASSYFIDAATVDDSGEYRCQTNLSTLSDPVQLEVHIGWLLLQAPRWVFKEEDPIHLRCHSWKNTALHKVTYLQNGKGRKYFHHNSDFYIPKATLKDSGSYFCRGLVGSKNVSSETVNITITQGLAVSTISSFFPPGYQVSFCLVMVLLFAVDTGLYFSVKTNIRSSTRDWKDHKFKWRKDPQDKRAKRSGSGATNFSLLKQAGDVEENPGPTSMDWIWRILFLVGAATGAHSFEQVQLQQPGAELVKPGASVKMSCKASGYAFSSYWINWMKQKPGQGLEWIGQIYPGDGDTNYNGKFKGRATLTADTSSSTAYMQLSSLTSEDSAVYFCARSITTVVGCAMDYWGQGTSVTVSSTRASTKGPSVFPLAPSSKSTSGGTAALGCLVKDYFPEPVTVSWNSGALTSGVHTFPAVLQSSGLYSLSSVVTVPSSSLGTQTYICNVNHKPSNTKVDKRVEPKSCGTQVVDTTKAVITLQPPWVSVFQEETVTLHCEVLHLPGSSSTQWFLNGTATQTSTPSYRITSASVNDSGEYRCQRGLSGRSDPIQLEIHRGWLLLQVSSRVFTEGEPLALRCHAWKDKLVYNVLYYRNGKAFKFFHWNSNLTILKTNISHNGTYHCSGMGKHRYTSAGISVTVKELFPAPVLNASVTSPLLEGNLVTLSCETKLLLQRPGLQLYFSFYMGSKTLRGRNTSSEYQILTARREDSGLYWCEAATEDGNVLKRSPELELQVLGLQLPTPVWFHVLFYLAVGIMFLVNTVLWVTIRKELKRKKKWDLEISLDSGHEKKVISSLQEDRHLEEELKCQEQKEEQLQEGVHRKEPQGATRAKRSGSGVKQTLNFDLLKLAGDVESNPGPSRGHMTEYKPTVRLATRDDVPRAVRTLAAAFADYPATRHTVDPDRHIERVTELQELFLTRVGLDIGKVWVADDGAAVAVWTTPESVEAGAVFAEIGPRMAELSGSRLAAQQQMEGLLAPHRPKEPAWFLATVGVSPDHQGKGLGSAVVLPGVEAAERAGVPAFLETSAPRNLPFYERLGFTVTADVEVPEGPRTWCMTRKPGA

SEQ ID NO: 6641 - protein, 1622 aa, Artificial Sequence
  Synthetic Polypeptide
MALPVTALLLPLALLLHAARPEVQLVESGGGLVQAGGSLRLSCAASGRTFSMGWFRQAPGKEREFVAAITYSGGSPYYADSVKGRFTISRDNAKNTVYLQMNSLKPEDTAVYYCAANPTYGSDWNAENWGQGTQVTVSSGTGGGGSGGGGSGGGGSEFDIQMTQSPSSLSASVGDRVTITCKASDHINNWLAWYQQKPGQAPKLLIYGATTLETGVPSRFSGSGSGTDYTLTISSLQPEDFATYYCQQSWNTPWTFGQGTKLEIKRLEGQPKANPTVTLFPPSSEELQANKATLVCLISDFYPGAVTVAWKADGSPVKAGVETTKPSKQSNNKYAASSYLSLTPEQWKSHRSYSCQVTHEGSTVEKTVAPTECSGSGMRTEDLPKAVVFLEPQWYRVLEKDSVTLKCQGAYSPEDNSTQWFHNESLISSQASSYFIDAATVDDSGEYRCQTNLSTLSDPVQLEVHIGWLLLQAPRWVFKEEDPIHLRCHSWKNTALHKVTYLQNGKGRKYFHHNSDFYIPKATLKDSGSYFCRGLVGSKNVSSETVNITITQGLAVSTISSFFPPGYQVSFCLVMVLLFAVDTGLYFSVKTNIRSSTRDWKDHKFKWRKDPQDKRAKRSGSGATNFSLLKQAGDVEENPGPTSMDWIWRILFLVGAATGAHSGPEVQLVESGGGLVQAGGSLRLSCAASGRTFTMGWFRQAPGKEREFVAAISLSPTLAYYADSVKGRFTISRDNAKNTVVLQMNSLKPEDTALYYCAADRKSVMSIRPDYWGQGTQVTVSSGSGGGGSGGGGSGGGGSFEQVQLQQPGAELVKPGASVKMSCKASGYAFSSYWINWMKQKPGQGLEWIGQIYPGDGDTNYNGKFKGRATLTADTSSSTAYMQLSSLTSEDSAVYFCARSITTVVGCAMDYWGQGTSVTVSSTRASTKGPSVFPLAPSSKSTSGGTAALGCLVKDYFPEPVTVSWNSGALTSGVHTFPAVLQSSGLYSLSSVVTVPSSSLGTQTYICNVNHKPSNTKVDKRVEPKSCGTQVVDTTKAVITLQPPWVSVFQEETVTLHCEVLHLPGSSSTQWFLNGTATQTSTPSYRITSASVNDSGEYRCQRGLSGRSDPIQLEIHRGWLLLQVSSRVFTEGEPLALRCHAWKDKLVYNVLYYRNGKAFKFFHWNSNLTILKTNISHNGTYHCSGMGKHRYTSAGISVTVKELFPAPVLNASVTSPLLEGNLVTLSCETKLLLQRPGLQLYFSFYMGSKTLRGRNTSSEYQILTARREDSGLYWCEAATEDGNVLKRSPELELQVLGLQLPTPVWFHVLFYLAVGIMFLVNTVLWVTIRKELKRKKKWDLEISLDSGHEKKVISSLQEDRHLEEELKCQEQKEEQLQEGVHRKEPQGATRAKRSGSGVKQTLNFDLLKLAGDVESNPGPSRGHMTEYKPTVRLATRDDVPRAVRTLAAAFADYPATRHTVDPDRHIERVTELQELFLTRVGLDIGKVWVADDGAAVAVWTTPESVEAGAVFAEIGPRMAELSGSRLAAQQQMEGLLAPHRPKEPAWFLATVGVSPDHQGKGLGSAVVLPGVEAAERAGVPAFLETSAPRNLPFYERLGFTVTADVEVPEGPRTWCMTRKPGA

SEQ ID NO: 6642 - protein, 1355 aa, Artificial Sequence
  Synthetic Polypeptide
MALPVTALLLPLALLLHAARPEVQLVESGGGLVQAGGSLRLSCAASGRTFSMGWFRQAPGKEREFVAAITYSGGSPYYADSVKGRFTISRDNAKNTVYLQMNSLKPEDTAVYYCAANPTYGSDWNAENWGQGTQVTVSSLEGQPKANPTVTLFPPSSEELQANKATLVCLISDFYPGAVTVAWKADGSPVKAGVETTKPSKQSNNKYAASSYLSLTPEQWKSHRSYSCQVTHEGSTVEKTVAPTECSGSGMRTEDLPKAVVFLEPQWYRVLEKDSVTLKCQGAYSPEDNSTQWFHNESLISSQASSYFIDAATVDDSGEYRCQTNLSTLSDPVQLEVHIGWLLLQAPRWVFKEEDPIHLRCHSWKNTALHKVTYLQNGKGRKYFHHNSDFYIPKATLKDSGSYFCRGLVGSKNVSSETVNITITQGLAVSTISSFFPPGYQVSFCLVMVLLFAVDTGLYFSVKTNIRSSTRDWKDHKFKWRKDPQDKRAKRSGSGATNFSLLKQAGDVEENPGPTSMDWIWRILFLVGAATGAHSGPEVQLVESGGGLVQAGGSLRLSCAASGRTFTMGWFRQAPGKEREFVAAISLSPTLAYYADSVKGRFTISRDNAKNTVVLQMNSLKPEDTALYYCAADRKSVMSIRPDYWGQGTQVTVSSTRASTKGPSVFPLAPSSKSTSGGTAALGCLVKDYFPEPVTVSWNSGALTSGVHTFPAVLQSSGLYSLSSVVTVPSSSLGTQTYICNVNHKPSNTKVDKRVEPKSCGTQVVDTTKAVITLQPPWVSVFQEETVTLHCEVLHLPGSSSTQWFLNGTATQTSTPSYRITSASVNDSGEYRCQRGLSGRSDPIQLEIHRGWLLLQVSSRVFTEGEPLALRCHAWKDKLVYNVLYYRNGKAFKFFHWNSNLTILKTNISHNGTYHCSGMGKHRYTSAGISVTVKELFPAPVLNASVTSPLLEGNLVTLSCETKLLLQRPGLQLYFSFYMGSKTLRGRNTSSEYQILTARREDSGLYWCEAATEDGNVLKRSPELELQVLGLQLPTPVWFHVLFYLAVGIMFLVNTVLWVTIRKELKRKKKWDLEISLDSGHEKKVISSLQEDRHLEEELKCQEQKEEQLQEGVHRKEPQGATRAKRSGSGVKQTLNFDLLKLAGDVESNPGPSRGHMTEYKPTVRLATRDDVPRAVRTLAAAFADYPATRHTVDPDRHIERVTELQELFLTRVGLDIGKVWVADDGAAVAVWTTPESVEAGAVFAEIGPRMAELSGSRLAAQQQMEGLLAPHRPKEPAWFLATVGVSPDHQGKGLGSAVVLPGVEAAERAGVPAFLETSAPRNLPFYERLGFTVTADVEVPEGPRTWCMTRKPGA

SEQ ID NO: 6643 - protein, 1363 aa, Artificial Sequence
  Synthetic Polypeptide
MALPVTALLLPLALLLHAARPDIQMTQSPSSLSASVGDRVTITCKASDHINNWLAWYQQKPGQAPKLLIYGATTLETGVPSRFSGSGSGTDYTLTISSLQPEDFATYYCQQSWNTPWTFGQGTKLEIKRLEDLKNVFPPEVAVFEPSEAEISHTQKATLVCLATGFYPDHVELSWWVNGKEVHSGVSTDPQPLKEQPALNDSRYCLSSRLRVSATFWQNPRNHFRCQVQFYGLSENDEWTQDRAKPVTQIVSAEAWGRADCGSGMRTEDLPKAVVFLEPQWYRVLEKDSVTLKCQGAYSPEDNSTQWFHNESLISSQASSYFIDAATVDDSGEYRCQTNLSTLSDPVQLEVHIGWLLLQAPRWVFKEEDPIHLRCHSWKNTALHKVTYLQNGKGRKYFHHNSDFYIPKATLKDSGSYFCRGLVGSKNVSSETVNITITQGLAVSTISSFFPPGYQVSFCLVMVLLFAVDTGLYFSVKTNIRSSTRDWKDHKFKWRKDPQDKRAKRSGSGATNFSLLKQAGDVEENPGPTSMDWIWRILFLVGAATGAHSFEQVQLQQPGAELVKPGASVKMSCKASGYAFSSYWINWMKQKPGQGLEWIGQIYPGDGDTNYNGKFKGRATLTADTSSSTAYMQLSSLTSEDSAVYFCARSITTVVGCAMDYWGQGTSVTVSSTRIQNPDPAVYQLRDSKSSDKSVCLFTDFDSQTNVSQSKDSDVYITDKTVLDMRSMDFKSNSAVAWSNKSDFACANAFNNSIIPEDTFFPSPESSCGTQVVDTTKAVITLQPPWVSVFQEETVTLHCEVLHLPGSSSTQWFLNGTATQTSTPSYRITSASVNDSGEYRCQRGLSGRSDPIQLEIHRGWLLLQVSSRVFTEGEPLALRCHAWKDKLVYNVLYYRNGKAFKFFHWNSNLTILKTNISHNGTYHCSGMGKHRYTSAGISVTVKELFPAPVLNASVTSPLLEGNLVTLSCETKLLLQRPGLQLYFSFYMGSKTLRGRNTSSEYQILTARREDSGLYWCEAATEDGNVLKRSPELELQVLGLQLPTPVWFHVLFYLAVGIMFLVNTVLWVTIRKELKRKKKWDLEISLDSGHEKKVISSLQEDRHLEEELKCQEQKEEQLQEGVHRKEPQGATRAKRSGSGVKQTLNFDLLKLAGDVESNPGPSRGHMTEYKPTVRLATRDDVPRAVRTLAAAFADYPATRHTVDPDRHIERVTELQELFLTRVGLDIGKVWVADDGAAVAVWTTPESVEAGAVFAEIGPRMAELSGSRLAAQQQMEGLLAPHRPKEPAWFLATVGVSPDHQGKGLGSAVVLPGVEAAERAGVPAFLETSAPRNLPFYERLGFTVTADVEVPEGPRTWCMTRKPGA

SEQ ID NO: 6644 - protein, 1500 aa, Artificial Sequence
  Synthetic Polypeptide
MALPVTALLLPLALLLHAARPEVQLVESGGGLVQAGGSLRLSCAASGRTFSMGWFRQAPGKEREFVAAITYSGGSPYYADSVKGRFTISRDNAKNTVYLQMNSLKPEDTAVYYCAANPTYGSDWNAENWGQGTQVTVSSGTGGGGSGGGGSGGGGSEFDIQMTQSPSSLSASVGDRVTITCKASDHINNWLAWYQQKPGQAPKLLIYGATTLETGVPSRFSGSGSGTDYTLTISSLQPEDFATYYCQQSWNTPWTFGQGTKLEIKRLEDLKNVFPPEVAVFEPSEAEISHTQKATLVCLATGFYPDHVELSWWVNGKEVHSGVSTDPQPLKEQPALNDSRYCLSSRLRVSATFWQNPRNHFRCQVQFYGLSENDEWTQDRAKPVTQIVSAEAWGRADCGSGMRTEDLPKAVVFLEPQWYRVLEKDSVTLKCQGAYSPEDNSTQWFHNESLISSQASSYFIDAATVDDSGEYRCQTNLSTLSDPVQLEVHIGWLLLQAPRWVFKEEDPIHLRCHSWKNTALHKVTYLQNGKGRKYFHHNSDFYIPKATLKDSGSYFCRGLVGSKNVSSETVNITITQGLAVSTISSFFPPGYQVSFCLVMVLLFAVDTGLYFSVKTNIRSSTRDWKDHKFKWRKDPQDKRAKRSGSGATNFSLLKQAGDVEENPGPTSMDWIWRILFLVGAATGAHSFEQVQLQQPGAELVKPGASVKMSCKASGYAFSSYWINWMKQKPGQGLEWIGQIYPGDGDTNYNGKFKGRATLTADTSSSTAYMQLSSLTSEDSAVYFCARSITTVVGCAMDYWGQGTSVTVSSTRIQNPDPAVYQLRDSKSSDKSVCLFTDFDSQTNVSQSKDSDVYITDKTVLDMRSMDFKSNSAVAWSNKSDFACANAFNNSIIPEDTFFPSPESSCGTQVVDTTKAVITLQPPWVSVFQEETVTLHCEVLHLPGSSSTQWFLNGTATQTSTPSYRITSASVNDSGEYRCQRGLSGRSDPIQLEIHRGWLLLQVSSRVFTEGEPLALRCHAWKDKLVYNVLYYRNGKAFKFFHWNSNLTILKTNISHNGTYHCSGMGKHRYTSAGISVTVKELFPAPVLNASVTSPLLEGNLVTLSCETKLLLQRPGLQLYFSFYMGSKTLRGRNTSSEYQILTARREDSGLYWCEAATEDGNVLKRSPELELQVLGLQLPTPVWFHVLFYLAVGIMFLVNTVLWVTIRKELKRKKKWDLEISLDSGHEKKVISSLQEDRHLEEELKCQEQKEEQLQEGVHRKEPQGATRAKRSGSGVKQTLNFDLLKLAGDVESNPGPSRGHMTEYKPTVRLATRDDVPRAVRTLAAAFADYPATRHTVDPDRHIERVTELQELFLTRVGLDIGKVWVADDGAAVAVWTTPESVEAGAVFAEIGPRMAELSGSRLAAQQQMEGLLAPHRPKEPAWFLATVGVSPDHQGKGLGSAVVLPGVEAAERAGVPAFLETSAPRNLPFYERLGFTVTADVEVPEGPRTWCMTRKPGA

SEQ ID NO: 6645 - protein, 1637 aa, Artificial Sequence
  Synthetic Polypeptide
MALPVTALLLPLALLLHAARPEVQLVESGGGLVQAGGSLRLSCAASGRTFSMGWFRQAPGKEREFVAAITYSGGSPYYADSVKGRFTISRDNAKNTVYLQMNSLKPEDTAVYYCAANPTYGSDWNAENWGQGTQVTVSSGTGGGGSGGGGSGGGGSEFDIQMTQSPSSLSASVGDRVTITCKASDHINNWLAWYQQKPGQAPKLLIYGATTLETGVPSRFSGSGSGTDYTLTISSLQPEDFATYYCQQSWNTPWTFGQGTKLEIKRLEDLKNVFPPEVAVFEPSEAEISHTQKATLVCLATGFYPDHVELSWWVNGKEVHSGVSTDPQPLKEQPALNDSRYCLSSRLRVSATFWQNPRNHFRCQVQFYGLSENDEWTQDRAKPVTQIVSAEAWGRADCGSGMRTEDLPKAVVFLEPQWYRVLEKDSVTLKCQGAYSPEDNSTQWFHNESLISSQASSYFIDAATVDDSGEYRCQTNLSTLSDPVQLEVHIGWLLLQAPRWVFKEEDPIHLRCHSWKNTALHKVTYLQNGKGRKYFHHNSDFYIPKATLKDSGSYFCRGLVGSKNVSSETVNITITQGLAVSTISSFFPPGYQVSFCLVMVLLFAVDTGLYFSVKTNIRSSTRDWKDHKFKWRKDPQDKRAKRSGSGATNFSLLKQAGDVEENPGPTSMDWIWRILFLVGAATGAHSGPEVQLVESGGGLVQAGGSLRLSCAASGRTFTMGWFRQAPGKEREFVAAISLSPTLAYYADSVKGRFTISRDNAKNTVVLQMNSLKPEDTALYYCAADRKSVMSIRPDYWGQGTQVTVSSGSGGGGSGGGGSGGGGSFEQVQLQQPGAELVKPGASVKMSCKASGYAFSSYWINWMKQKPGQGLEWIGQIYPGDGDTNYNGKFKGRATLTADTSSSTAYMQLSSLTSEDSAVYFCARSITTVVGCAMDYWGQGTSVTVSSTRIQNPDPAVYQLRDSKSSDKSVCLFTDFDSQTNVSQSKDSDVYITDKTVLDMRSMDFKSNSAVAWSNKSDFACANAFNNSIIPEDTFFPSPESSCGTQVVDTTKAVITLQPPWVSVFQEETVTLHCEVLHLPGSSSTQWFLNGTATQTSTPSYRITSASVNDSGEYRCQRGLSGRSDPIQLEIHRGWLLLQVSSRVFTEGEPLALRCHAWKDKLVYNVLYYRNGKAFKFFHWNSNLTILKTNISHNGTYHCSGMGKHRYTSAGISVTVKELFPAPVLNASVTSPLLEGNLVTLSCETKLLLQRPGLQLYFSFYMGSKTLRGRNTSSEYQILTARREDSGLYWCEAATEDGNVLKRSPELELQVLGLQLPTPVWFHVLFYLAVGIMFLVNTVLWVTIRKELKRKKKWDLEISLDSGHEKKVISSLQEDRHLEEELKCQEQKEEQLQEGVHRKEPQGATRAKRSGSGVKQTLNFDLLKLAGDVESNPGPSRGHMTEYKPTVRLATRDDVPRAVRTLAAAFADYPATRHTVDPDRHIERVTELQELFLTRVGLDIGKVWVADDGAAVAVWTTPESVEAGAVFAEIGPRMAELSGSRLAAQQQMEGLLAPHRPKEPAWFLATVGVSPDHQGKGLGSAVVLPGVEAAERAGVPAFLETSAPRNLPFYERLGFTVTADVEVPEGPRTWCMTRKPGA

SEQ ID NO: 6646 - protein, 1370 aa, Artificial Sequence
  Synthetic Polypeptide
MALPVTALLLPLALLLHAARPEVQLVESGGGLVQAGGSLRLSCAASGRTFSMGWFRQAPGKEREFVAAITYSGGSPYYADSVKGRFTISRDNAKNTVYLQMNSLKPEDTAVYYCAANPTYGSDWNAENWGQGTQVTVSSLEDLKNVFPPEVAVFEPSEAEISHTQKATLVCLATGFYPDHVELSWWVNGKEVHSGVSTDPQPLKEQPALNDSRYCLSSRLRVSATFWQNPRNHFRCQVQFYGLSENDEWTQDRAKPVTQIVSAEAWGRADCGSGMRTEDLPKAVVFLEPQWYRVLEKDSVTLKCQGAYSPEDNSTQWFHNESLISSQASSYFIDAATVDDSGEYRCQTNLSTLSDPVQLEVHIGWLLLQAPRWVFKEEDPIHLRCHSWKNTALHKVTYLQNGKGRKYFHHNSDFYIPKATLKDSGSYFCRGLVGSKNVSSETVNITITQGLAVSTISSFFPPGYQVSFCLVMVLLFAVDTGLYFSVKTNIRSSTRDWKDHKFKWRKDPQDKRAKRSGSGATNFSLLKQAGDVEENPGPTSMDWIWRILFLVGAATGAHSGPEVQLVESGGGLVQAGGSLRLSCAASGRTFTMGWFRQAPGKEREFVAAISLSPTLAYYADSVKGRFTISRDNAKNTVVLQMNSLKPEDTALYYCAADRKSVMSIRPDYWGQGTQVTVSSTRIQNPDPAVYQLRDSKSSDKSVCLFTDFDSQTNVSQSKDSDVYITDKTVLDMRSMDFKSNSAVAWSNKSDFACANAFNNSIIPEDTFFPSPESSCGTQVVDTTKAVITLQPPWVSVFQEETVTLHCEVLHLPGSSSTQWFLNGTATQTSTPSYRITSASVNDSGEYRCQRGLSGRSDPIQLEIHRGWLLLQVSSRVFTEGEPLALRCHAWKDKLVYNVLYYRNGKAFKFFHWNSNLTILKTNISHNGTYHCSGMGKHRYTSAGISVTVKELFPAPVLNASVTSPLLEGNLVTLSCETKLLLQRPGLQLYFSFYMGSKTLRGRNTSSEYQILTARREDSGLYWCEAATEDGNVLKRSPELELQVLGLQLPTPVWFHVLFYLAVGIMFLVNTVLWVTIRKELKRKKKWDLEISLDSGHEKKVISSLQEDRHLEEELKCQEQKEEQLQEGVHRKEPQGATRAKRSGSGVKQTLNFDLLKLAGDVESNPGPSRGHMTEYKPTVRLATRDDVPRAVRTLAAAFADYPATRHTVDPDRHIERVTELQELFLTRVGLDIGKVWVADDGAAVAVWTTPESVEAGAVFAEIGPRMAELSGSRLAAQQQMEGLLAPHRPKEPAWFLATVGVSPDHQGKGLGSAVVLPGVEAAERAGVPAFLETSAPRNLPFYERLGFTVTADVEVPEGPRTWCMTRKPGA

SEQ ID NO: 6647 - protein, 633 aa, Artificial Sequence; identical to SEQ ID NO: 4032
  Synthetic Polypeptide

SEQ ID NO: 6648 - protein, 627 aa, Artificial Sequence
  Synthetic Polypeptide
MALPVTALLLPLALLLHAARPDIQMTQSPSSLSASVGDRVTITCKASDHINNWLAWYQQKPGQAPKLLIYGATTLETGVPSRFSGSGSGTDYTLTISSLQPEDFATYYCQQSWNTPWTFGQGTKLEIKRGGGGSGGGGSGGGGSQVQLQQPGAELVKPGASVKMSCKASGYAFSSYWINWMKQKPGQGLEWIGQIYPGDGDTNYNGKFKGRATLTADTSSSTAYMQLSSLTSEDSAVYFCARSITTVVGCAMDYWGQGTSVTVSSTRQVVDTTKAVITLQPPWVSVFQEETVTLHCEVLHLPGSSSTQWFLNGTATQTSTPSYRITSASVNDSGEYRCQRGLSGRSDPIQLEIHRGWLLLQVSSRVFTEGEPLALRCHAWKDKLVYNVLYYRNGKAFKFFHWNSNLTILKTNISHNGTYHCSGMGKHRYTSAGISVTVKELFPAPVLNASVTSPLLEGNLVTLSCETKLLLQRPGLQLYFSFYMGSKTLRGRNTSSEYQILTARREDSGLYWCEAATEDGNVLKRSPELELQVLGLQLPTPVWFHVLFYLAVGIMFLVNTVLWVTIRKELKRKKKWDLEISLDSGHEKKVISSLQEDRHLEEELKCQEQKEEQLQEGVHRKEPQGAT

SEQ ID NO: 6649 - protein, 627 aa, Artificial Sequence
  Synthetic Polypeptide
MALPVTALLLPLALLLHAARPEIVLTQSPATLSLSPGERATLSCRASQSVSSYLAWYQQKPGQAPRLLIYDASNRATGIPARFSGSGSGTDFTLTISSLEPEDFAVYYCQQRSNWPITFGQGTRLEIKGGGGSGGGGSGGGGSEVQLVESGGGLVQPGRSLRLSCAASGFTFNDYAMHWVRQAPGKGLEWVSTISWNSGSIGYADSVKGRFTISRDNAKKSLYLQMNSLRAEDTALYYCAKDIQYGNYYYGMDVWGQGTTVTVSSTRQVVDTTKAVITLQPPWVSVFQEETVTLHCEVLHLPGSSSTQWFLNGTATQTSTPSYRITSASVNDSGEYRCQRGLSGRSDPIQLEIHRGWLLLQVSSRVFTEGEPLALRCHAWKDKLVYNVLYYRNGKAFKFFHWNSNLTILKTNISHNGTYHCSGMGKHRYTSAGISVTVKELFPAPVLNASVTSPLLEGNLVTLSCETKLLLQRPGLQLYFSFYMGSKTLRGRNTSSEYQILTARREDSGLYWCEAATEDGNVLKRSPELELQVLGLQLPTPVWFHVLFYLAVGIMFLVNTVLWVTIRKELKRKKKWDLEISLDSGHEKKVISSLQEDRHLEEELKCQEQKEEQLQEGVHRKEPQGAT

SEQ ID NO: 6650 - protein, 501 aa, Artificial Sequence
  Synthetic Polypeptide
MALPVTALLLPLALLLHAARPEVQLVESGGGLVQAGGSLRLSCAASGRTFSMGWFRQAPGKEREFVAAITYSGGSPYYADSVKGRFTISRDNAKNTVYLQMNSLKPEDTAVYYCAANPTYGSDWNAENWGQGTQVTVSSTRQVVDTTKAVITLQPPWVSVFQEETVTLHCEVLHLPGSSSTQWFLNGTATQTSTPSYRITSASVNDSGEYRCQRGLSGRSDPIQLEIHRGWLLLQVSSRVFTEGEPLALRCHAWKDKLVYNVLYYRNGKAFKFFHWNSNLTILKTNISHNGTYHCSGMGKHRYTSAGISVTVKELFPAPVLNASVTSPLLEGNLVTLSCETKLLLQRPGLQLYFSFYMGSKTLRGRNTSSEYQILTARREDSGLYWCEAATEDGNVLKRSPELELQVLGLQLPTPVWFHVLFYLAVGIMFLVNTVLWVTIRKELKRKKKWDLEISLDSGHEKKVISSLQEDRHLEEELKCQEQKEEQLQEGVHRKEPQGAT

SEQ ID NO: 6651 - protein, 501 aa, Artificial Sequence
  Synthetic Polypeptide
MALPVTALLLPLALLLHAARPQLQLQESGPGLVKPSETLSLTCTVSGGSISSGDYYWGWIRQPPGKGLEWIGHIYYSGATYYNPSLKSRVTISVDTSRNQFSLKLSSVTAADTAVYYCTRDDSSNWRSRGQGTLVTVSSTRQVVDTTKAVITLQPPWVSVFQEETVTLHCEVLHLPGSSSTQWFLNGTATQTSTPSYRITSASVNDSGEYRCQRGLSGRSDPIQLEIHRGWLLLQVSSRVFTEGEPLALRCHAWKDKLVYNVLYYRNGKAFKFFHWNSNLTILKTNISHNGTYHCSGMGKHRYTSAGISVTVKELFPAPVLNASVTSPLLEGNLVTLSCETKLLLQRPGLQLYFSFYMGSKTLRGRNTSSEYQILTARREDSGLYWCEAATEDGNVLKRSPELELQVLGLQLPTPVWFHVLFYLAVGIMFLVNTVLWVTIRKELKRKKKWDLEISLDSGHEKKVISSLQEDRHLEEELKCQEQKEEQLQEGVHRKEPQGAT

SEQ ID NO: 6652 - protein, 501 aa, Artificial Sequence
  Synthetic Polypeptide
MALPVTALLLPLALLLHAARPQLQLQESGPGLVKPSETLSLTCTVSGDSISSGDYYWGWIRQPPGKGLEWIGHIYYSGVTYYNPSLKSRVTISVDTSRNQFSLKLSSVTAADTAVYYCTREDSSNWRSRGQGTLVTVSSTRQVVDTTKAVITLQPPWVSVFQEETVTLHCEVLHLPGSSSTQWFLNGTATQTSTPSYRITSASVNDSGEYRCQRGLSGRSDPIQLEIHRGWLLLQVSSRVFTEGEPLALRCHAWKDKLVYNVLYYRNGKAFKFFHWNSNLTILKTNISHNGTYHCSGMGKHRYTSAGISVTVKELFPAPVLNASVTSPLLEGNLVTLSCETKLLLQRPGLQLYFSFYMGSKTLRGRNTSSEYQILTARREDSGLYWCEAATEDGNVLKRSPELELQVLGLQLPTPVWFHVLFYLAVGIMFLVNTVLWVTIRKELKRKKKWDLEISLDSGHEKKVISSLQEDRHLEEELKCQEQKEEQLQEGVHRKEPQGAT

SEQ ID NO: 6653 - protein, 503 aa, Artificial Sequence
  Synthetic Polypeptide
MALPVTALLLPLALLLHAARPEVQLQESGGGLVQPGGSLRLSCAASGRTFSSLFMGWFRQAPGKERELVAAISRYSLYTYYADSVKGRFTISADNAKNAVYLQMNSLKPEDTAVYYCASKLEYTSNDYDSWGQGTQVTVSSTRQVVDTTKAVITLQPPWVSVFQEETVTLHCEVLHLPGSSSTQWFLNGTATQTSTPSYRITSASVNDSGEYRCQRGLSGRSDPIQLEIHRGWLLLQVSSRVFTEGEPLALRCHAWKDKLVYNVLYYRNGKAFKFFHWNSNLTILKTNISHNGTYHCSGMGKHRYTSAGISVTVKELFPAPVLNASVTSPLLEGNLVTLSCETKLLLQRPGLQLYFSFYMGSKTLRGRNTSSEYQILTARREDSGLYWCEAATEDGNVLKRSPELELQVLGLQLPTPVWFHVLFYLAVGIMFLVNTVLWVTIRKELKRKKKWDLEISLDSGHEKKVISSLQEDRHLEEELKCQEQKEEQLQEGVHRKEPQGAT

SEQ ID NO: 6654 - protein, 511 aa, Artificial Sequence
  Synthetic Polypeptide
MALPVTALLLPLALLLHAARPEVQLVESGGGLVQPGGSLRLSCAASGFASDYYIIGWFRQAPGKEREGVSCISSRYANTNYADSVKGRFTISRDNAKNTVYLQMNSLKPEDTAVYYCAADTRRYTCPDIATMHRNFDSWGQGTLVTVSSTRQVVDTTKAVITLQPPWVSVFQEETVTLHCEVLHLPGSSSTQWFLNGTATQTSTPSYRITSASVNDSGEYRCQRGLSGRSDPIQLEIHRGWLLLQVSSRVFTEGEPLALRCHAWKDKLVYNVLYYRNGKAFKFFHWNSNLTILKTNISHNGTYHCSGMGKHRYTSAGISVTVKELFPAPVLNASVTSPLLEGNLVTLSCETKLLLQRPGLQLYFSFYMGSKTLRGRNTSSEYQILTARREDSGLYWCEAATEDGNVLKRSPELELQVLGLQLPTPVWFHVLFYLAVGIMFLVNTVLWVTIRKELKRKKKWDLEISLDSGHEKKVISSLQEDRHLEEELKCQEQKEEQLQEGVHRKEPQGAT

SEQ ID NO: 6655 - protein, 507 aa, Artificial Sequence
  Synthetic Polypeptide
MALPVTALLLPLALLLHAARPEVQLVESGGSLVQPGGSLRLSCAASGFTFDDYAMSWVRQVPGKGLEWVSSINWSGTHTDYADSVKGRFTISRNNANNTLYLQMNSLKSEDTAVYYCAKNWRDAGTTWFEKSGSAGQGTQVTVSSTRQVVDTTKAVITLQPPWVSVFQEETVTLHCEVLHLPGSSSTQWFLNGTATQTSTPSYRITSASVNDSGEYRCQRGLSGRSDPIQLEIHRGWLLLQVSSRVFTEGEPLALRCHAWKDKLVYNVLYYRNGKAFKFFHWNSNLTILKTNISHNGTYHCSGMGKHRYTSAGISVTVKELFPAPVLNASVTSPLLEGNLVTLSCETKLLLQRPGLQLYFSFYMGSKTLRGRNTSSEYQILTARREDSGLYWCEAATEDGNVLKRSPELELQVLGLQLPTPVWFHVLFYLAVGIMFLVNTVLWVTIRKELKRKKKWDLEISLDSGHEKKVISSLQEDRHLEEELKCQEQKEEQLQEGVHRKEPQGAT

SEQ ID NO: 6656 - protein, 502 aa, Artificial Sequence
  Synthetic Polypeptide
MALPVTALLLPLALLLHAARPEVQLVESGGGLVQPGGSLRLSCAASGFNIKDTCIGWVRRAPGKEEELVAKICKYSGHTRYADSVKGRFTISADTSKNTAYLQMNSLRAEDTAVYYCAAVSVRDGHYNYWGQGTTVTVSSTRQVVDTTKAVITLQPPWVSVFQEETVTLHCEVLHLPGSSSTQWFLNGTATQTSTPSYRITSASVNDSGEYRCQRGLSGRSDPIQLEIHRGWLLLQVSSRVFTEGEPLALRCHAWKDKLVYNVLYYRNGKAFKFFHWNSNLTILKTNISHNGTYHCSGMGKHRYTSAGISVTVKELFPAPVLNASVTSPLLEGNLVTLSCETKLLLQRPGLQLYFSFYMGSKTLRGRNTSSEYQILTARREDSGLYWCEAATEDGNVLKRSPELELQVLGLQLPTPVWFHVLFYLAVGIMFLVNTVLWVTIRKELKRKKKWDLEISLDSGHEKKVISSLQEDRHLEEELKCQEQKEEQLQEGVHRKEPQGAT

SEQ ID NO: 6657 - protein, 507 aa, Artificial Sequence
  Synthetic Polypeptide
MALPVTALLLPLALLLHAARPGSDLGIKLLFAAAKGQDDEVRILLAAGADVNAKDFEGYTPLHVAAYDGHLEIVEVLLKAGADVNAKDSQGRTPLHEAAYSGHLEIVEVLLKAGADVNAQDDAGETPADLAAAWGHEDIAEVLQKTRQVVDTTKAVITLQPPWVSVFQEETVTLHCEVLHLPGSSSTQWFLNGTATQTSTPSYRITSASVNDSGEYRCQRGLSGRSDPIQLEIHRGWLLLQVSSRVFTEGEPLALRCHAWKDKLVYNVLYYRNGKAFKFFHWNSNLTILKTNISHNGTYHCSGMGKHRYTSAGISVTVKELFPAPVLNASVTSPLLEGNLVTLSCETKLLLQRPGLQLYFSFYMGSKTLRGRNTSSEYQILTARREDSGLYWCEAATEDGNVLKRSPELELQVLGLQLPTPVWFHVLFYLAVGIMFLVNTVLWVTIRKELKRKKKWDLEISLDSGHEKKVISSLQEDRHLEEELKCQEQKEEQLQEGVHRKEPQGAT

SEQ ID NO: 6658 - protein, 441 aa, Artificial Sequence
  Synthetic Polypeptide
MALPVTALLLPLALLLHAARPVDNKFNKERYSAYYEIWQLPNLNVRQKAAFIGSLQDDPSQSANLLAEAKKLNDAQAPKTRQVVDTTKAVITLQPPWVSVFQEETVTLHCEVLHLPGSSSTQWFLNGTATQTSTPSYRITSASVNDSGEYRCQRGLSGRSDPIQLEIHRGWLLLQVSSRVFTEGEPLALRCHAWKDKLVYNVLYYRNGKAFKFFHWNSNLTILKTNISHNGTYHCSGMGKHRYTSAGISVTVKELFPAPVLNASVTSPLLEGNLVTLSCETKLLLQRPGLQLYFSFYMGSKTLRGRNTSSEYQILTARREDSGLYWCEAATEDGNVLKRSPELELQVLGLQLPTPVWFHVLFYLAVGIMFLVNTVLWVTIRKELKRKKKWDLEISLDSGHEKKVISSLQEDRHLEEELKCQEQKEEQLQEGVHRKEPQGAT

SEQ ID NO: 6659 - protein, 472 aa, Artificial Sequence
  Synthetic Polypeptide
MALPVTALLLPLALLLHAARPLPAPKNLVVSRVTEDSARLSWTAPDAAFDSFAIGYWEWDDDGEAIVLTVPGSERSYDLTGLKPGTEYPVYIAGVKGGQWSFPLSAIFTTTRQVVDTTKAVITLQPPWVSVFQEETVTLHCEVLHLPGSSSTQWFLNGTATQTSTPSYRITSASVNDSGEYRCQRGLSGRSDPIQLEIHRGWLLLQVSSRVFTEGEPLALRCHAWKDKLVYNVLYYRNGKAFKFFHWNSNLTILKTNISHNGTYHCSGMGKHRYTSAGISVTVKELFPAPVLNASVTSPLLEGNLVTLSCETKLLLQRPGLQLYFSFYMGSKTLRGRNTSSEYQILTARREDSGLYWCEAATEDGNVLKRSPELELQVLGLQLPTPVWFHVLFYLAVGIMFLVNTVLWVTIRKELKRKKKWDLEISLDSGHEKKVISSLQEDRHLEEELKCQEQKEEQLQEGVHRKEPQGAT

SEQ ID NO: 6660 - protein, 473 aa, Artificial Sequence
  Synthetic Polypeptide
MALPVTALLLPLALLLHAARPMLPAPKNLVVSRITEDSARLSWTAPDAAFDSFPIRYIETLIWGEAIWLDVPGSERSYDLTGLKPGTEYAVVITGVKGGRFSSPLVASFTTTRQVVDTTKAVITLQPPWVSVFQEETVTLHCEVLHLPGSSSTQWFLNGTATQTSTPSYRITSASVNDSGEYRCQRGLSGRSDPIQLEIHRGWLLLQVSSRVFTEGEPLALRCHAWKDKLVYNVLYYRNGKAFKFFHWNSNLTILKTNISHNGTYHCSGMGKHRYTSAGISVTVKELFPAPVLNASVTSPLLEGNLVTLSCETKLLLQRPGLQLYFSFYMGSKTLRGRNTSSEYQILTARREDSGLYWCEAATEDGNVLKRSPELELQVLGLQLPTPVWFHVLFYLAVGIMFLVNTVLWVTIRKELKRKKKWDLEISLDSGHEKKVISSLQEDRHLEEELKCQEQKEEQLQEGVHRKEPQGAT

SEQ ID NO: 6661 - protein, 690 aa, Artificial Sequence
  Synthetic Polypeptide
MALPVTALLLPLALLLHAARPMALPVTALLLPLALLLHAARPLFNQEVQIPLTESYCGPCPKNWICYKNNCYQFFDESKNWYESQASCMSQNASLLKVYSKEDQDLLKLVKSYHWMGLVHIPTNGSWQWEDGSILSPNLLTIIEMQKGDCALYASSFKGYIENCSTPNTYICMQRTVGGGGSGGGGSGGGGSDLFNQEVQIPLTESYCGPCPKNWICYKNNCYQFFDESKNWYESQASCMSQNASLLKVYSKEDQDLLKLVKSYHWMGLVHIPTNGSWQWEDGSILSPNLLTIIEMQKGDCALYASSFKGYIENCSTPNTYICMQRTVTRQVVDTTKAVITLQPPWVSVFQEETVTLHCEVLHLPGSSSTQWFLNGTATQTSTPSYRITSASVNDSGEYRCQRGLSGRSDPIQLEIHRGWLLLQVSSRVFTEGEPLALRCHAWKDKLVYNVLYYRNGKAFKFFHWNSNLTILKTNISHNGTYHCSGMGKHRYTSAGISVTVKELFPAPVLNASVTSPLLEGNLVTLSCETKLLLQRPGLQLYFSFYMGSKTLRGRNTSSEYQILTARREDSGLYWCEAATEDGNVLKRSPELELQVLGLQLPTPVWFHVLFYLAVGIMFLVNTVLWVTIRKELKRKKKWDLEISLDSGHEKKVISSLQEDRHLEEELKCQEQKEEQLQEGVHRKEPQGAT

SEQ ID NO: 6662 - protein, 570 aa, Artificial Sequence
  Synthetic Polypeptide
MALPVTALLLPLALLLHAARPMELTDLLLAAMLLAVARLTLSSPVAPACDPRLLNKLLRDSHLLHSRLSQCPDVDPLSIPVLLPAVDFSLGEWKTQTEQSKAQDILGAVSLLLEGVMAARGQLEPSCLSSLLGQLSGQVRLLLGALQGLLGTQLPLQGRTTAHKDPNALFLSLQQLLRGKVRFLLLVEGPTLCVRRTLPTTAVPSSTSTRQVVDTTKAVITLQPPWVSVFQEETVTLHCEVLHLPGSSSTQWFLNGTATQTSTPSYRITSASVNDSGEYRCQRGLSGRSDPIQLEIHRGWLLLQVSSRVFTEGEPLALRCHAWKDKLVYNVLYYRNGKAFKFFHWNSNLTILKTNISHNGTYHCSGMGKHRYTSAGISVTVKELFPAPVLNASVTSPLLEGNLVTLSCETKLLLQRPGLQLYFSFYMGSKTLRGRNTSSEYQILTARREDSGLYWCEAATEDGNVLKRSPELELQVLGLQLPTPVWFHVLFYLAVGIMFLVNTVLWVTIRKELKRKKKWDLEISLDSGHEKKVISSLQEDRHLEEELKCQEQKEEQLQEGVHRKEPQGAT

SEQ ID NO: 6663 - protein, 436 aa, Artificial Sequence
  Synthetic Polypeptide
MALPVTALLLPLALLLHAARPMDPDLEIRAAFLRQRNTALRTEVAELEQEVQRLENEVSQYETRYGPLGGGKTRTRQVVDTTKAVITLQPPWVSVFQEETVTLHCEVLHLPGSSSTQWFLNGTATQTSTPSYRITSASVNDSGEYRCQRGLSGRSDPIQLEIHRGWLLLQVSSRVFTEGEPLALRCHAWKDKLVYNVLYYRNGKAFKFFHWNSNLTILKTNISHNGTYHCSGMGKHRYTSAGISVTVKELFPAPVLNASVTSPLLEGNLVTLSCETKLLLQRPGLQLYFSFYMGSKTLRGRNTSSEYQILTARREDSGLYWCEAATEDGNVLKRSPELELQVLGLQLPTPVWFHVLFYLAVGIMFLVNTVLWVTIRKELKRKKKWDLEISLDSGHEKKVISSLQEDRHLEEELKCQEQKEEQLQEGVHRKEPQGAT

SEQ ID NO: 6664 - protein, 411 aa, Artificial Sequence
  Synthetic Polypeptide
MALPVTALLLPLALLLHAARPEVAALEKEVAALEKEVAALEKEVAALEKTRQVVDTTKAVITLQPPWVSVFQEETVTLHCEVLHLPGSSSTQWFLNGTATQTSTPSYRITSASVNDSGEYRCQRGLSGRSDPIQLEIHRGWLLLQVSSRVFTEGEPLALRCHAWKDKLVYNVLYYRNGKAFKFFHWNSNLTILKTNISHNGTYHCSGMGKHRYTSAGISVTVKELFPAPVLNASVTSPLLEGNLVTLSCETKLLLQRPGLQLYFSFYMGSKTLRGRNTSSEYQILTARREDSGLYWCEAATEDGNVLKRSPELELQVLGLQLPTPVWFHVLFYLAVGIMFLVNTVLWVTIRKELKRKKKWDLEISLDSGHEKKVISSLQEDRHLEEELKCQEQKEEQLQEGVHRKEPQGAT

SEQ ID NO: 6665 - protein, 669 aa, Artificial Sequence
  Synthetic Polypeptide
MALPVTALLLPLALLLHAARPLFNQEVQIPLTESYCGPCPKNWICYKNNCYQFFDESKNWYESQASCMSQNASLLKVYSKEDQDLLKLVKSAHWMGLVHIPTNGSWQWEDGSILSPNLLTIIEMQKGDCALYASSFKGFIENCSTPNTYICMQRTVGGGGSGGGGSGGGGSDLFNQEVQIPLTESYCGPCPKNWICYKNNCYQFFDESKNWYESQASCMSQNASLLKVYSKEDQDLLKLVKSAHWMGLVHIPTNGSWQWEDGSILSPNLLTIIEMQKGDCALYASSFKGFIENCSTPNTYICMQRTVTRQVVDTTKAVITLQPPWVSVFQEETVTLHCEVLHLPGSSSTQWFLNGTATQTSTPSYRITSASVNDSGEYRCQRGLSGRSDPIQLEIHRGWLLLQVSSRVFTEGEPLALRCHAWKDKLVYNVLYYRNGKAFKFFHWNSNLTILKTNISHNGTYHCSGMGKHRYTSAGISVTVKELFPAPVLNASVTSPLLEGNLVTLSCETKLLLQRPGLQLYFSFYMGSKTLRGRNTSSEYQILTARREDSGLYWCEAATEDGNVLKRSPELELQVLGLQLPTPVWFHVLFYLAVGIMFLVNTVLWVTIRKELKRKKKWDLEISLDSGHEKKVISSLQEDRHLEEELKCQEQKEEQLQEGVHRKEPQGAT

SEQ ID NO: 6666 - protein, 669 aa, Artificial Sequence
  Synthetic Polypeptide
MALPVTALLLPLALLLHAARPLFNQEVQIPLTESYCGPCPKNWICYKNNCYQFFDESKNWYESQASCMSQNASLLKVYSKEDQDLLKLVKSAHWMGLVHIPTNGSWQWEDGSILSPNLLTIIEMQKGDCALYASSFKGYIENCSTPNTYICMQRTVSGGGGSGGGGSGGGGDLFNQEVQIPLTESYCGPCPKNWICYKNNCYQFFDESKNWYESQASCMSQNASLLKVYSKEDQDLLKLVKSAHWMGLVHIPTNGSWQWEDGSILSPNLLTIIEMQKGDCALYASSFKGYIENCSTPNTYICMQRTVTRQVVDTTKAVITLQPPWVSVFQEETVTLHCEVLHLPGSSSTQWFLNGTATQTSTPSYRITSASVNDSGEYRCQRGLSGRSDPIQLEIHRGWLLLQVSSRVFTEGEPLALRCHAWKDKLVYNVLYYRNGKAFKFFHWNSNLTILKTNISHNGTYHCSGMGKHRYTSAGISVTVKELFPAPVLNASVTSPLLEGNLVTLSCETKLLLQRPGLQLYFSFYMGSKTLRGRNTSSEYQILTARREDSGLYWCEAATEDGNVLKRSPELELQVLGLQLPTPVWFHVLFYLAVGIMFLVNTVLWVTIRKELKRKKKWDLEISLDSGHEKKVISSLQEDRHLEEELKCQEQKEEQLQEGVHRKEPQGAT

SEQ ID NO: 6667 - protein, 1257 aa, Artificial Sequence
  Synthetic Polypeptide
MALPVTALLLPLALLLHAARPDIQMTQSPSSLSASVGDRVTITCKASDHINNWLAWYQQKPGQAPKLLIYGATTLETGVPSRFSGSGSGTDYTLTISSLQPEDFATYYCQQSWNTPWTFGQGTKLEIKRLEQVVDTTKAVITLQPPWVSVFQEETVTLHCEVLHLPGSSSTQWFLNGTATQTSTPSYRITSASVNDSGEYRCQRGLSGRSDPIQLEIHRGWLLLQVSSRVFTEGEPLALRCHAWKDKLVYNVLYYRNGKAFKFFHWNSNLTILKTNISHNGTYHCSGMGKHRYTSAGISVTVKELFPAPVLNASVTSPLLEGNLVTLSCETKLLLQRPGLQLYFSFYMGSKTLRGRNTSSEYQILTARREDSGLYWCEAATEDGNVLKRSPELELQVLGLQLPTPVWFHVLFYLAVGIMFLVNTVLWVTIRKELKRKKKWDLEISLDSGHEKKVISSLQEDRHLEEELKCQEQKEEQLQEGVHRKEPQGATRAKRSGSGATNFSLLKQAGDVEENPGPTSMDWIWRILFLVGAATGAHSFEQVQLQQPGAELVKPGASVKMSCKASGYAFSSYWINWMKQKPGQGLEWIGQIYPGDGDTNYNGKFKGRATLTADTSSSTAYMQLSSLTSEDSAVYFCARSITTVVGCAMDYWGQGTSVTVSSTRQVVDTTKAVITLQPPWVSVFQEETVTLHCEVLHLPGSSSTQWFLNGTATQTSTPSYRITSASVNDSGEYRCQRGLSGRSDPIQLEIHRGWLLLQVSSRVFTEGEPLALRCHAWKDKLVYNVLYYRNGKAFKFFHWNSNLTILKTNISHNGTYHCSGMGKHRYTSAGISVTVKELFPAPVLNASVTSPLLEGNLVTLSCETKLLLQRPGLQLYFSFYMGSKTLRGRNTSSEYQILTARREDSGLYWCEAATEDGNVLKRSPELELQVLGLQLPTPVWFHVLFYLAVGIMFLVNTVLWVTIRKELKRKKKWDLEISLDSGHEKKVISSLQEDRHLEEELKCQEQKEEQLQEGVHRKEPQGATRAKRSGSGVKQTLNFDLLKLAGDVESNPGPSRGHMTEYKPTVRLATRDDVPRAVRTLAAAFADYPATRHTVDPDRHIERVTELQELFLTRVGLDIGKVWVADDGAAVAVWTTPESVEAGAVFAEIGPRMAELSGSRLAAQQQMEGLLAPHRPKEPAWFLATVGVSPDHQGKGLGSAVVLPGVEAAERAGVPAFLETSAPRNLPFYERLGFTVTADVEVPEGPRTWCMTRKPGA

SEQ ID NO: 6668 - protein, 1311 aa, Artificial Sequence
  Synthetic Polypeptide
MALPVTALLLPLALLLHAARPACEVQLLESGGGLIQPGGSLRLSCAASGFTFSSHAMTWVRQAPGKGLEWVSAISGSGDYTHYADSVKGRFTISRDNSKNTVYLQMNSLRAEDSAVYYCAKDEDGGSLLGHRGQGTLVTVSSGTGGGGSGGGGSGGGGSEFGSLEQVVDTTKAVITLQPPWVSVFQEETVTLHCEVLHLPGSSSTQWFLNGTATQTSTPSYRITSASVNDSGEYRCQRGLSGRSDPIQLEIHRGWLLLQVSSRVFTEGEPLALRCHAWKDKLVYNVLYYRNGKAFKFFHWNSNLTILKTNISHNGTYHCSGMGKHRYTSAGISVTVKELFPAPVLNASVTSPLLEGNLVTLSCETKLLLQRPGLQLYFSFYMGSKTLRGRNTSSEYQILTARREDSGLYWCEAATEDGNVLKRSPELELQVLGLQLPTPVWFHVLFYLAVGIMFLVNTVLWVTIRKELKRKKKWDLEISLDSGHEKKVISSLQEDRHLEEELKCQEQKEEQLQEGVHRKEPQGATRAKRSGSGATNFSLLKQAGDVEENPGPTSATMDWIWRILFLVGAATGAHSGPEVQLVESGGGLVQAGGSLRLSCAASGRTFSMGWFRQAPGKEREFVAAITYSGGSPYYADSVKGRFTISRDNAKNTVYLQMNSLKPEDTAVYYCAANPTYGSDWNAENWGQGTQVTVSSGSGGGGSGGGGSGGGGSFEGSTRQVVDTTKAVITLQPPWVSVFQEETVTLHCEVLHLPGSSSTQWFLNGTATQTSTPSYRITSASVNDSGEYRCQRGLSGRSDPIQLEIHRGWLLLQVSSRVFTEGEPLALRCHAWKDKLVYNVLYYRNGKAFKFFHWNSNLTILKTNISHNGTYHCSGMGKHRYTSAGISVTVKELFPAPVLNASVTSPLLEGNLVTLSCETKLLLQRPGLQLYFSFYMGSKTLRGRNTSSEYQILTARREDSGLYWCEAATEDGNVLKRSPELELQVLGLQLPTPVWFHVLFYLAVGIMFLVNTVLWVTIRKELKRKKKWDLEISLDSGHEKKVISSLQEDRHLEEELKCQEQKEEQLQEGVHRKEPQGATRAKRSGSGVKQTLNFDLLKLAGDVESNPGPSRGHMTEYKPTVRLATRDDVPRAVRTLAAAFADYPATRHTVDPDRHIERVTELQELFLTRVGLDIGKVWVADDGAAVAVWTTPESVEAGAVFAEIGPRMAELSGSRLAAQQQMEGLLAPHRPKEPAWFLATVGVSPDHQGKGLGSAVVLPGVEAAERAGVPAFLETSAPRNLPFYERLGFTVTADVEVPEGPRTWCMTRKPGA

SEQ ID NO: 6669 - protein, 1462 aa, Artificial Sequence
  Synthetic Polypeptide
MALPVTALLLPLALLLHAARPDIQMTQSPSSLSASVGDRVTITCKASDHINNWLAWYQQKPGQAPKLLIYGATTLETGVPSRFSGSGSGTDYTLTISSLQPEDFATYYCQQSWNTPWTFGQGTKLEIKRLEGQPKANPTVTLFPPSSEELQANKATLVCLISDFYPGAVTVAWKADGSPVKAGVETTKPSKQSNNKYAASSYLSLTPEQWKSHRSYSCQVTHEGSTVEKTVAPTECSGSQVVDTTKAVITLQPPWVSVFQEETVTLHCEVLHLPGSSSTQWFLNGTATQTSTPSYRITSASVNDSGEYRCQRGLSGRSDPIQLEIHRGWLLLQVSSRVFTEGEPLALRCHAWKDKLVYNVLYYRNGKAFKFFHWNSNLTILKTNISHNGTYHCSGMGKHRYTSAGISVTVKELFPAPVLNASVTSPLLEGNLVTLSCETKLLLQRPGLQLYFSFYMGSKTLRGRNTSSEYQILTARREDSGLYWCEAATEDGNVLKRSPELELQVLGLQLPTPVWFHVLFYLAVGIMFLVNTVLWVTIRKELKRKKKWDLEISLDSGHEKKVISSLQEDRHLEEELKCQEQKEEQLQEGVHRKEPQGATRAKRSGSGATNFSLLKQAGDVEENPGPTSMDWIWRILFLVGAATGAHSFEQVQLQQPGAELVKPGASVKMSCKASGYAFSSYWINWMKQKPGQGLEWIGQIYPGDGDTNYNGKFKGRATLTADTSSSTAYMQLSSLTSEDSAVYFCARSITTVVGCAMDYWGQGTSVTVSSTRASTKGPSVFPLAPSSKSTSGGTAALGCLVKDYFPEPVTVSWNSGALTSGVHTFPAVLQSSGLYSLSSVVTVPSSSLGTQTYICNVNHKPSNTKVDKRVEPKSCGTQVVDTTKAVITLQPPWVSVFQEETVTLHCEVLHLPGSSSTQWFLNGTATQTSTPSYRITSASVNDSGEYRCQRGLSGRSDPIQLEIHRGWLLLQVSSRVFTEGEPLALRCHAWKDKLVYNVLYYRNGKAFKFFHWNSNLTILKTNISHNGTYHCSGMGKHRYTSAGISVTVKELFPAPVLNASVTSPLLEGNLVTLSCETKLLLQRPGLQLYFSFYMGSKTLRGRNTSSEYQILTARREDSGLYWCEAATEDGNVLKRSPELELQVLGLQLPTPVWFHVLFYLAVGIMFLVNTVLWVTIRKELKRKKKWDLEISLDSGHEKKVISSLQEDRHLEEELKCQEQKEEQLQEGVHRKEPQGATRAKRSGSGVKQTLNFDLLKLAGDVESNPGPSRGGIHTMATYEVLCEVARKLGTDDREVVLFLLNVFIPQPTLAQLIGALRALKEEGRLTFPLLAECLFRAGRRDLLRDLLHLDPRFLERHLAGTMSYFSPYQLTVLHVDGELCARDIRSLIFLSKDTIGSRSTPQTFLHWVYCMENLDLLGPTDVDALMSMLRSLSRVDLQRQVQTLMGLHLSGPSHSQHYRHTP

SEQ ID NO: 6670 - protein, 1515 aa, Artificial Sequence
  Synthetic Polypeptide
MALPVTALLLPLALLLHAARPDIQMTQSPSSLSASVGDRVTITCKASDHINNWLAWYQQKPGQAPKLLIYGATTLETGVPSRFSGSGSGTDYTLTISSLQPEDFATYYCQQSWNTPWTFGQGTKLEIKRLEGQPKANPTVTLFPPSSEELQANKATLVCLISDFYPGAVTVAWKADGSPVKAGVETTKPSKQSNNKYAASSYLSLTPEQWKSHRSYSCQVTHEGSTVEKTVAPTECSGSQVVDTTKAVITLQPPWVSVFQEETVTLHCEVLHLPGSSSTQWFLNGTATQTSTPSYRITSASVNDSGEYRCQRGLSGRSDPIQLEIHRGWLLLQVSSRVFTEGEPLALRCHAWKDKLVYNVLYYRNGKAFKFFHWNSNLTILKTNISHNGTYHCSGMGKHRYTSAGISVTVKELFPAPVLNASVTSPLLEGNLVTLSCETKLLLQRPGLQLYFSFYMGSKTLRGRNTSSEYQILTARREDSGLYWCEAATEDGNVLKRSPELELQVLGLQLPTPVWFHVLFYLAVGIMFLVNTVLWVTIRKELKRKKKWDLEISLDSGHEKKVISSLQEDRHLEEELKCQEQKEEQLQEGVHRKEPQGATRAKRSGSGATNFSLLKQAGDVEENPGPTSMDWIWRILFLVGAATGAHSFEQVQLQQPGAELVKPGASVKMSCKASGYAFSSYWINWMKQKPGQGLEWIGQIYPGDGDTNYNGKFKGRATLTADTSSSTAYMQLSSLTSEDSAVYFCARSITTVVGCAMDYWGQGTSVTVSSTRASTKGPSVFPLAPSSKSTSGGTAALGCLVKDYFPEPVTVSWNSGALTSGVHTFPAVLQSSGLYSLSSVVTVPSSSLGTQTYICNVNHKPSNTKVDKRVEPKSCGTQVVDTTKAVITLQPPWVSVFQEETVTLHCEVLHLPGSSSTQWFLNGTATQTSTPSYRITSASVNDSGEYRCQRGLSGRSDPIQLEIHRGWLLLQVSSRVFTEGEPLALRCHAWKDKLVYNVLYYRNGKAFKFFHWNSNLTILKTNISHNGTYHCSGMGKHRYTSAGISVTVKELFPAPVLNASVTSPLLEGNLVTLSCETKLLLQRPGLQLYFSFYMGSKTLRGRNTSSEYQILTARREDSGLYWCEAATEDGNVLKRSPELELQVLGLQLPTPVWFHVLFYLAVGIMFLVNTVLWVTIRKELKRKKKWDLEISLDSGHEKKVISSLQEDRHLEEELKCQEQKEEQLQEGVHRKEPQGATRAKRSGSGVKQTLNFDLLKLAGDVESNPGPSRGGIHTMSDSKEVPSLPFLRHLLEELDSHEDSLLLFLCHDAAPGCTTVTQALCSLSQQRKLTLAALVEMLYVLQRMDLLKSRFGLSKEGAEQLLGTSFLTRYRKLMVCVGEELDSSELRALRLFACNLNPSLSTALSESSRFVELVLALENVGLVSPSSVSVLADMLRTLRRLDLCQQLVEYEQQEQARYRYCYAASPSLPVRTLRRGHGASEHEQLCMPVQESSDSPELLRTPVQESSSDSPEQTT

SEQ ID NO: 6671 - protein, 1470 aa, Artificial Sequence
  Synthetic Polypeptide
MALPVTALLLPLALLLHAARPDIQMTQSPSSLSASVGDRVTITCKASDHINNWLAWYQQKPGQAPKLLIYGATTLETGVPSRFSGSGSGTDYTLTISSLQPEDFATYYCQQSWNTPWTFGQGTKLEIKRLEGQPKANPTVTLFPPSSEELQANKATLVCLISDFYPGAVTVAWKADGSPVKAGVETTKPSKQSNNKYAASSYLSLTPEQWKSHRSYSCQVTHEGSTVEKTVAPTECSGSQVVDTTKAVITLQPPWVSVFQEETVTLHCEVLHLPGSSSTQWFLNGTATQTSTPSYRITSASVNDSGEYRCQRGLSGRSDPIQLEIHRGWLLLQVSSRVFTEGEPLALRCHAWKDKLVYNVLYYRNGKAFKFFHWNSNLTILKTNISHNGTYHCSGMGKHRYTSAGISVTVKELFPAPVLNASVTSPLLEGNLVTLSCETKLLLQRPGLQLYFSFYMGSKTLRGRNTSSEYQILTARREDSGLYWCEAATEDGNVLKRSPELELQVLGLQLPTPVWFHVLFYLAVGIMFLVNTVLWVTIRKELKRKKKWDLEISLDSGHEKKVISSLQEDRHLEEELKCQEQKEEQLQEGVHRKEPQGATRAKRSGSGATNFSLLKQAGDVEENPGPTSMDWIWRILFLVGAATGAHSFEQVQLQQPGAELVKPGASVKMSCKASGYAFSSYWINWMKQKPGQGLEWIGQIYPGDGDTNYNGKFKGRATLTADTSSSTAYMQLSSLTSEDSAVYFCARSITTVVGCAMDYWGQGTSVTVSSTRASTKGPSVFPLAPSSKSTSGGTAALGCLVKDYFPEPVTVSWNSGALTSGVHTFPAVLQSSGLYSLSSVVTVPSSSLGTQTYICNVNHKPSNTKVDKRVEPKSCGTQVVDTTKAVITLQPPWVSVFQEETVTLHCEVLHLPGSSSTQWFLNGTATQTSTPSYRITSASVNDSGEYRCQRGLSGRSDPIQLEIHRGWLLLQVSSRVFTEGEPLALRCHAWKDKLVYNVLYYRNGKAFKFFHWNSNLTILKTNISHNGTYHCSGMGKHRYTSAGISVTVKELFPAPVLNASVTSPLLEGNLVTLSCETKLLLQRPGLQLYFSFYMGSKTLRGRNTSSEYQILTARREDSGLYWCEAATEDGNVLKRSPELELQVLGLQLPTPVWFHVLFYLAVGIMFLVNTVLWVTIRKELKRKKKWDLEISLDSGHEKKVISSLQEDRHLEEELKCQEQKEEQLQEGVHRKEPQGATRAKRSGSGVKQTLNFDLLKLAGDVESNPGPSRGHMTEYKPTVRLATRDDVPRAVRTLAAAFADYPATRHTVDPDRHIERVTELQELFLTRVGLDIGKVWVADDGAAVAVWTTPESVEAGAVFAEIGPRMAELSGSRLAAQQQMEGLLAPHRPKEPAWFLATVGVSPDHQGKGLGSAVVLPGVEAAERAGVPAFLETSAPRNLPFYERLGFTVTADVEVPEGPRTWCMTRKPGA

SEQ ID NO: 6672 - protein, 1607 aa, Artificial Sequence
  Synthetic Polypeptide
MALPVTALLLPLALLLHAARPEVQLVESGGGLVQAGGSLRLSCAASGRTFSMGWFRQAPGKEREFVAAITYSGGSPYYADSVKGRFTISRDNAKNTVYLQMNSLKPEDTAVYYCAANPTYGSDWNAENWGQGTQVTVSSGTGGGGSGGGGSGGGGSEFDIQMTQSPSSLSASVGDRVTITCKASDHINNWLAWYQQKPGQAPKLLIYGATTLETGVPSRFSGSGSGTDYTLTISSLQPEDFATYYCQQSWNTPWTFGQGTKLEIKRLEGQPKANPTVTLFPPSSEELQANKATLVCLISDFYPGAVTVAWKADGSPVKAGVETTKPSKQSNNKYAASSYLSLTPEQWKSHRSYSCQVTHEGSTVEKTVAPTECSGSQVVDTTKAVITLQPPWVSVFQEETVTLHCEVLHLPGSSSTQWFLNGTATQTSTPSYRITSASVNDSGEYRCQRGLSGRSDPIQLEIHRGWLLLQVSSRVFTEGEPLALRCHAWKDKLVYNVLYYRNGKAFKFFHWNSNLTILKTNISHNGTYHCSGMGKHRYTSAGISVTVKELFPAPVLNASVTSPLLEGNLVTLSCETKLLLQRPGLQLYFSFYMGSKTLRGRNTSSEYQILTARREDSGLYWCEAATEDGNVLKRSPELELQVLGLQLPTPVWFHVLFYLAVGIMFLVNTVLWVTIRKELKRKKKWDLEISLDSGHEKKVISSLQEDRHLEEELKCQEQKEEQLQEGVHRKEPQGATRAKRSGSGATNFSLLKQAGDVEENPGPTSMDWIWRILFLVGAATGAHSFEQVQLQQPGAELVKPGASVKMSCKASGYAFSSYWINWMKQKPGQGLEWIGQIYPGDGDTNYNGKFKGRATLTADTSSSTAYMQLSSLTSEDSAVYFCARSITTVVGCAMDYWGQGTSVTVSSTRASTKGPSVFPLAPSSKSTSGGTAALGCLVKDYFPEPVTVSWNSGALTSGVHTFPAVLQSSGLYSLSSVVTVPSSSLGTQTYICNVNHKPSNTKVDKRVEPKSCGTQVVDTTKAVITLQPPWVSVFQEETVTLHCEVLHLPGSSSTQWFLNGTATQTSTPSYRITSASVNDSGEYRCQRGLSGRSDPIQLEIHRGWLLLQVSSRVFTEGEPLALRCHAWKDKLVYNVLYYRNGKAFKFFHWNSNLTILKTNISHNGTYHCSGMGKHRYTSAGISVTVKELFPAPVLNASVTSPLLEGNLVTLSCETKLLLQRPGLQLYFSFYMGSKTLRGRNTSSEYQILTARREDSGLYWCEAATEDGNVLKRSPELELQVLGLQLPTPVWFHVLFYLAVGIMFLVNTVLWVTIRKELKRKKKWDLEISLDSGHEKKVISSLQEDRHLEEELKCQEQKEEQLQEGVHRKEPQGATRAKRSGSGVKQTLNFDLLKLAGDVESNPGPSRGHMTEYKPTVRLATRDDVPRAVRTLAAAFADYPATRHTVDPDRHIERVTELQELFLTRVGLDIGKVWVADDGAAVAVWTTPESVEAGAVFAEIGPRMAELSGSRLAAQQQMEGLLAPHRPKEPAWFLATVGVSPDHQGKGLGSAVVLPGVEAAERAGVPAFLETSAPRNLPFYERLGFTVTADVEVPEGPRTWCMTRKPGA

SEQ ID NO: 6673 - protein, 1744 aa, Artificial Sequence
  Synthetic Polypeptide
MALPVTALLLPLALLLHAARPEVQLVESGGGLVQAGGSLRLSCAASGRTFSMGWFRQAPGKEREFVAAITYSGGSPYYADSVKGRFTISRDNAKNTVYLQMNSLKPEDTAVYYCAANPTYGSDWNAENWGQGTQVTVSSGTGGGGSGGGGSGGGGSEFDIQMTQSPSSLSASVGDRVTITCKASDHINNWLAWYQQKPGQAPKLLIYGATTLETGVPSRFSGSGSGTDYTLTISSLQPEDFATYYCQQSWNTPWTFGQGTKLEIKRLEGQPKANPTVTLFPPSSEELQANKATLVCLISDFYPGAVTVAWKADGSPVKAGVETTKPSKQSNNKYAASSYLSLTPEQWKSHRSYSCQVTHEGSTVEKTVAPTECSGSQVVDTTKAVITLQPPWVSVFQEETVTLHCEVLHLPGSSSTQWFLNGTATQTSTPSYRITSASVNDSGEYRCQRGLSGRSDPIQLEIHRGWLLLQVSSRVFTEGEPLALRCHAWKDKLVYNVLYYRNGKAFKFFHWNSNLTILKTNISHNGTYHCSGMGKHRYTSAGISVTVKELFPAPVLNASVTSPLLEGNLVTLSCETKLLLQRPGLQLYFSFYMGSKTLRGRNTSSEYQILTARREDSGLYWCEAATEDGNVLKRSPELELQVLGLQLPTPVWFHVLFYLAVGIMFLVNTVLWVTIRKELKRKKKWDLEISLDSGHEKKVISSLQEDRHLEEELKCQEQKEEQLQEGVHRKEPQGATRAKRSGSGATNFSLLKQAGDVEENPGPTSMDWIWRILFLVGAATGAHSGPEVQLVESGGGLVQAGGSLRLSCAASGRTFTMGWFRQAPGKEREFVAAISLSPTLAYYADSVKGRFTISRDNAKNTVVLQMNSLKPEDTALYYCAADRKSVMSIRPDYWGQGTQVTVSSGSGGGGSGGGGSGGGGSFEQVQLQQPGAELVKPGASVKMSCKASGYAFSSYWINWMKQKPGQGLEWIGQIYPGDGDTNYNGKFKGRATLTADTSSSTAYMQLSSLTSEDSAVYFCARSITTVVGCAMDYWGQGTSVTVSSTRASTKGPSVFPLAPSSKSTSGGTAALGCLVKDYFPEPVTVSWNSGALTSGVHTFPAVLQSSGLYSLSSVVTVPSSSLGTQTYICNVNHKPSNTKVDKRVEPKSCGTQVVDTTKAVITLQPPWVSVFQEETVTLHCEVLHLPGSSSTQWFLNGTATQTSTPSYRITSASVNDSGEYRCQRGLSGRSDPIQLEIHRGWLLLQVSSRVFTEGEPLALRCHAWKDKLVYNVLYYRNGKAFKFFHWNSNLTILKTNISHNGTYHCSGMGKHRYTSAGISVTVKELFPAPVLNASVTSPLLEGNLVTLSCETKLLLQRPGLQLYFSFYMGSKTLRGRNTSSEYQILTARREDSGLYWCEAATEDGNVLKRSPELELQVLGLQLPTPVWFHVLFYLAVGIMFLVNTVLWVTIRKELKRKKKWDLEISLDSGHEKKVISSLQEDRHLEEELKCQEQKEEQLQEGVHRKEPQGATRAKRSGSGVKQTLNFDLLKLAGDVESNPGPSRGHMTEYKPTVRLATRDDVPRAVRTLAAAFADYPATRHTVDPDRHIERVTELQELFLTRVGLDIGKVWVADDGAAVAVWTTPESVEAGAVFAEIGPRMAELSGSRLAAQQQMEGLLAPHRPKEPAWFLATVGVSPDHQGKGLGSAVVLPGVEAAERAGVPAFLETSAPRNLPFYERLGFTVTADVEVPEGPRTWCMTRKPGA

SEQ ID NO: 6674 - protein, 1477 aa, Artificial Sequence
  Synthetic Polypeptide
MALPVTALLLPLALLLHAARPEVQLVESGGGLVQAGGSLRLSCAASGRTFSMGWFRQAPGKEREFVAAITYSGGSPYYADSVKGRFTISRDNAKNTVYLQMNSLKPEDTAVYYCAANPTYGSDWNAENWGQGTQVTVSSLEGQPKANPTVTLFPPSSEELQANKATLVCLISDFYPGAVTVAWKADGSPVKAGVETTKPSKQSNNKYAASSYLSLTPEQWKSHRSYSCQVTHEGSTVEKTVAPTECSGSQVVDTTKAVITLQPPWVSVFQEETVTLHCEVLHLPGSSSTQWFLNGTATQTSTPSYRITSASVNDSGEYRCQRGLSGRSDPIQLEIHRGWLLLQVSSRVFTEGEPLALRCHAWKDKLVYNVLYYRNGKAFKFFHWNSNLTILKTNISHNGTYHCSGMGKHRYTSAGISVTVKELFPAPVLNASVTSPLLEGNLVTLSCETKLLLQRPGLQLYFSFYMGSKTLRGRNTSSEYQILTARREDSGLYWCEAATEDGNVLKRSPELELQVLGLQLPTPVWFHVLFYLAVGIMFLVNTVLWVTIRKELKRKKKWDLEISLDSGHEKKVISSLQEDRHLEEELKCQEQKEEQLQEGVHRKEPQGATRAKRSGSGATNFSLLKQAGDVEENPGPTSMDWIWRILFLVGAATGAHSGPEVQLVESGGGLVQAGGSLRLSCAASGRTFTMGWFRQAPGKEREFVAAISLSPTLAYYADSVKGRFTISRDNAKNTVVLQMNSLKPEDTALYYCAADRKSVMSIRPDYWGQGTQVTVSSTRASTKGPSVFPLAPSSKSTSGGTAALGCLVKDYFPEPVTVSWNSGALTSGVHTFPAVLQSSGLYSLSSVVTVPSSSLGTQTYICNVNHKPSNTKVDKRVEPKSCGTQVVDTTKAVITLQPPWVSVFQEETVTLHCEVLHLPGSSSTQWFLNGTATQTSTPSYRITSASVNDSGEYRCQRGLSGRSDPIQLEIHRGWLLLQVSSRVFTEGEPLALRCHAWKDKLVYNVLYYRNGKAFKFFHWNSNLTILKTNISHNGTYHCSGMGKHRYTSAGISVTVKELFPAPVLNASVTSPLLEGNLVTLSCETKLLLQRPGLQLYFSFYMGSKTLRGRNTSSEYQILTARREDSGLYWCEAATEDGNVLKRSPELELQVLGLQLPTPVWFHVLFYLAVGIMFLVNTVLWVTIRKELKRKKKWDLEISLDSGHEKKVISSLQEDRHLEEELKCQEQKEEQLQEGVHRKEPQGATRAKRSGSGVKQTLNFDLLKLAGDVESNPGPSRGHMTEYKPTVRLATRDDVPRAVRTLAAAFADYPATRHTVDPDRHIERVTELQELFLTRVGLDIGKVWVADDGAAVAVWTTPESVEAGAVFAEIGPRMAELSGSRLAAQQQMEGLLAPHRPKEPAWFLATVGVSPDHQGKGLGSAVVLPGVEAAERAGVPAFLETSAPRNLPFYERLGFTVTADVEVPEGPRTWCMTRKPGA

SEQ ID NO: 6675 - protein, 1485 aa, Artificial Sequence
  Synthetic Polypeptide
MALPVTALLLPLALLLHAARPDIQMTQSPSSLSASVGDRVTITCKASDHINNWLAWYQQKPGQAPKLLIYGATTLETGVPSRFSGSGSGTDYTLTISSLQPEDFATYYCQQSWNTPWTFGQGTKLEIKRLEDLKNVFPPEVAVFEPSEAEISHTQKATLVCLATGFYPDHVELSWWVNGKEVHSGVSTDPQPLKEQPALNDSRYCLSSRLRVSATFWQNPRNHFRCQVQFYGLSENDEWTQDRAKPVTQIVSAEAWGRADCGSQVVDTTKAVITLQPPWVSVFQEETVTLHCEVLHLPGSSSTQWFLNGTATQTSTPSYRITSASVNDSGEYRCQRGLSGRSDPIQLEIHRGWLLLQVSSRVFTEGEPLALRCHAWKDKLVYNVLYYRNGKAFKFFHWNSNLTILKTNISHNGTYHCSGMGKHRYTSAGISVTVKELFPAPVLNASVTSPLLEGNLVTLSCETKLLLQRPGLQLYFSFYMGSKTLRGRNTSSEYQILTARREDSGLYWCEAATEDGNVLKRSPELELQVLGLQLPTPVWFHVLFYLAVGIMFLVNTVLWVTIRKELKRKKKWDLEISLDSGHEKKVISSLQEDRHLEEELKCQEQKEEQLQEGVHRKEPQGATRAKRSGSGATNFSLLKQAGDVEENPGPTSMDWIWRILFLVGAATGAHSFEQVQLQQPGAELVKPGASVKMSCKASGYAFSSYWINWMKQKPGQGLEWIGQIYPGDGDTNYNGKFKGRATLTADTSSSTAYMQLSSLTSEDSAVYFCARSITTVVGCAMDYWGQGTSVTVSSTRIQNPDPAVYQLRDSKSSDKSVCLFTDFDSQTNVSQSKDSDVYITDKTVLDMRSMDFKSNSAVAWSNKSDFACANAFNNSIIPEDTFFPSPESSCGTQVVDTTKAVITLQPPWVSVFQEETVTLHCEVLHLPGSSSTQWFLNGTATQTSTPSYRITSASVNDSGEYRCQRGLSGRSDPIQLEIHRGWLLLQVSSRVFTEGEPLALRCHAWKDKLVYNVLYYRNGKAFKFFHWNSNLTILKTNISHNGTYHCSGMGKHRYTSAGISVTVKELFPAPVLNASVTSPLLEGNLVTLSCETKLLLQRPGLQLYFSFYMGSKTLRGRNTSSEYQILTARREDSGLYWCEAATEDGNVLKRSPELELQVLGLQLPTPVWFHVLFYLAVGIMFLVNTVLWVTIRKELKRKKKWDLEISLDSGHEKKVISSLQEDRHLEEELKCQEQKEEQLQEGVHRKEPQGATRAKRSGSGVKQTLNFDLLKLAGDVESNPGPSRGHMTEYKPTVRLATRDDVPRAVRTLAAAFADYPATRHTVDPDRHIERVTELQELFLTRVGLDIGKVWVADDGAAVAVWTTPESVEAGAVFAEIGPRMAELSGSRLAAQQQMEGLLAPHRPKEPAWFLATVGVSPDHQGKGLGSAVVLPGVEAAERAGVPAFLETSAPRNLPFYERLGFTVTADVEVPEGPRTWCMTRKPGA

SEQ ID NO: 6676 - protein, 1622 aa, Artificial Sequence
  Synthetic Polypeptide
MALPVTALLLPLALLLHAARPEVQLVESGGGLVQAGGSLRLSCAASGRTFSMGWFRQAPGKEREFVAAITYSGGSPYYADSVKGRFTISRDNAKNTVYLQMNSLKPEDTAVYYCAANPTYGSDWNAENWGQGTQVTVSSGTGGGGSGGGGSGGGGSEFDIQMTQSPSSLSASVGDRVTITCKASDHINNWLAWYQQKPGQAPKLLIYGATTLETGVPSRFSGSGSGTDYTLTISSLQPEDFATYYCQQSWNTPWTFGQGTKLEIKRLEDLKNVFPPEVAVFEPSEAEISHTQKATLVCLATGFYPDHVELSWWVNGKEVHSGVSTDPQPLKEQPALNDSRYCLSSRLRVSATFWQNPRNHFRCQVQFYGLSENDEWTQDRAKPVTQIVSAEAWGRADCGSQVVDTTKAVITLQPPWVSVFQEETVTLHCEVLHLPGSSSTQWFLNGTATQTSTPSYRITSASVNDSGEYRCQRGLSGRSDPIQLEIHRGWLLLQVSSRVFTEGEPLALRCHAWKDKLVYNVLYYRNGKAFKFFHWNSNLTILKTNISHNGTYHCSGMGKHRYTSAGISVTVKELFPAPVLNASVTSPLLEGNLVTLSCETKLLLQRPGLQLYFSFYMGSKTLRGRNTSSEYQILTARREDSGLYWCEAATEDGNVLKRSPELELQVLGLQLPTPVWFHVLFYLAVGIMFLVNTVLWVTIRKELKRKKKWDLEISLDSGHEKKVISSLQEDRHLEEELKCQEQKEEQLQEGVHRKEPQGATRAKRSGSGATNFSLLKQAGDVEENPGPTSMDWIWRILFLVGAATGAHSFEQVQLQQPGAELVKPGASVKMSCKASGYAFSSYWINWMKQKPGQGLEWIGQIYPGDGDTNYNGKFKGRATLTADTSSSTAYMQLSSLTSEDSAVYFCARSITTVVGCAMDYWGQGTSVTVSSTRIQNPDPAVYQLRDSKSSDKSVCLFTDFDSQTNVSQSKDSDVYITDKTVLDMRSMDFKSNSAVAWSNKSDFACANAFNNSIIPEDTFFPSPESSCGTQVVDTTKAVITLQPPWVSVFQEETVTLHCEVLHLPGSSSTQWFLNGTATQTSTPSYRITSASVNDSGEYRCQRGLSGRSDPIQLEIHRGWLLLQVSSRVFTEGEPLALRCHAWKDKLVYNVLYYRNGKAFKFFHWNSNLTILKTNISHNGTYHCSGMGKHRYTSAGISVTVKELFPAPVLNASVTSPLLEGNLVTLSCETKLLLQRPGLQLYFSFYMGSKTLRGRNTSSEYQILTARREDSGLYWCEAATEDGNVLKRSPELELQVLGLQLPTPVWFHVLFYLAVGIMFLVNTVLWVTIRKELKRKKKWDLEISLDSGHEKKVISSLQEDRHLEEELKCQEQKEEQLQEGVHRKEPQGATRAKRSGSGVKQTLNFDLLKLAGDVESNPGPSRGHMTEYKPTVRLATRDDVPRAVRTLAAAFADYPATRHTVDPDRHIERVTELQELFLTRVGLDIGKVWVADDGAAVAVWTTPESVEAGAVFAEIGPRMAELSGSRLAAQQQMEGLLAPHRPKEPAWFLATVGVSPDHQGKGLGSAVVLPGVEAAERAGVPAFLETSAPRNLPFYERLGFTVTADVEVPEGPRTWCMTRKPGA

SEQ ID NO: 6677 - protein, 1759 aa, Artificial Sequence
  Synthetic Polypeptide
MALPVTALLLPLALLLHAARPEVQLVESGGGLVQAGGSLRLSCAASGRTFSMGWFRQAPGKEREFVAAITYSGGSPYYADSVKGRFTISRDNAKNTVYLQMNSLKPEDTAVYYCAANPTYGSDWNAENWGQGTQVTVSSGTGGGGSGGGGSGGGGSEFDIQMTQSPSSLSASVGDRVTITCKASDHINNWLAWYQQKPGQAPKLLIYGATTLETGVPSRFSGSGSGTDYTLTISSLQPEDFATYYCQQSWNTPWTFGQGTKLEIKRLEDLKNVFPPEVAVFEPSEAEISHTQKATLVCLATGFYPDHVELSWWVNGKEVHSGVSTDPQPLKEQPALNDSRYCLSSRLRVSATFWQNPRNHFRCQVQFYGLSENDEWTQDRAKPVTQIVSAEAWGRADCGSQVVDTTKAVITLQPPWVSVFQEETVTLHCEVLHLPGSSSTQWFLNGTATQTSTPSYRITSASVNDSGEYRCQRGLSGRSDPIQLEIHRGWLLLQVSSRVFTEGEPLALRCHAWKDKLVYNVLYYRNGKAFKFFHWNSNLTILKTNISHNGTYHCSGMGKHRYTSAGISVTVKELFPAPVLNASVTSPLLEGNLVTLSCETKLLLQRPGLQLYFSFYMGSKTLRGRNTSSEYQILTARREDSGLYWCEAATEDGNVLKRSPELELQVLGLQLPTPVWFHVLFYLAVGIMFLVNTVLWVTIRKELKRKKKWDLEISLDSGHEKKVISSLQEDRHLEEELKCQEQKEEQLQEGVHRKEPQGATRAKRSGSGATNFSLLKQAGDVEENPGPTSMDWIWRILFLVGAATGAHSGPEVQLVESGGGLVQAGGSLRLSCAASGRTFTMGWFRQAPGKEREFVAAISLSPTLAYYADSVKGRFTISRDNAKNTVVLQMNSLKPEDTALYYCAADRKSVMSIRPDYWGQGTQVTVSSGSGGGGSGGGGSGGGGSFEQVQLQQPGAELVKPGASVKMSCKASGYAFSSYWINWMKQKPGQGLEWIGQIYPGDGDTNYNGKFKGRATLTADTSSSTAYMQLSSLTSEDSAVYFCARSITTVVGCAMDYWGQGTSVTVSSTRIQNPDPAVYQLRDSKSSDKSVCLFTDFDSQTNVSQSKDSDVYITDKTVLDMRSMDFKSNSAVAWSNKSDFACANAFNNSIIPEDTFFPSPESSCGTQVVDTTKAVITLQPPWVSVFQEETVTLHCEVLHLPGSSSTQWFLNGTATQTSTPSYRITSASVNDSGEYRCQRGLSGRSDPIQLEIHRGWLLLQVSSRVFTEGEPLALRCHAWKDKLVYNVLYYRNGKAFKFFHWNSNLTILKTNISHNGTYHCSGMGKHRYTSAGISVTVKELFPAPVLNASVTSPLLEGNLVTLSCETKLLLQRPGLQLYFSFYMGSKTLRGRNTSSEYQILTARREDSGLYWCEAATEDGNVLKRSPELELQVLGLQLPTPVWFHVLFYLAVGIMFLVNTVLWVTIRKELKRKKKWDLEISLDSGHEKKVISSLQEDRHLEEELKCQEQKEEQLQEGVHRKEPQGATRAKRSGSGVKQTLNFDLLKLAGDVESNPGPSRGHMTEYKPTVRLATRDDVPRAVRTLAAAFADYPATRHTVDPDRHIERVTELQELFLTRVGLDIGKVWVADDGAAVAVWTTPESVEAGAVFAEIGPRMAELSGSRLAAQQQMEGLLAPHRPKEPAWFLATVGVSPDHQGKGLGSAVVLPGVEAAERAGVPAFLETSAPRNLPFYERLGFTVTADVEVPEGPRTWCMTRKPGA

SEQ ID NO: 6678 - protein, 1492 aa, Artificial Sequence
  Synthetic Polypeptide
MALPVTALLLPLALLLHAARPEVQLVESGGGLVQAGGSLRLSCAASGRTFSMGWFRQAPGKEREFVAAITYSGGSPYYADSVKGRFTISRDNAKNTVYLQMNSLKPEDTAVYYCAANPTYGSDWNAENWGQGTQVTVSSLEDLKNVFPPEVAVFEPSEAEISHTQKATLVCLATGFYPDHVELSWWVNGKEVHSGVSTDPQPLKEQPALNDSRYCLSSRLRVSATFWQNPRNHFRCQVQFYGLSENDEWTQDRAKPVTQIVSAEAWGRADCGSQVVDTTKAVITLQPPWVSVFQEETVTLHCEVLHLPGSSSTQWFLNGTATQTSTPSYRITSASVNDSGEYRCQRGLSGRSDPIQLEIHRGWLLLQVSSRVFTEGEPLALRCHAWKDKLVYNVLYYRNGKAFKFFHWNSNLTILKTNISHNGTYHCSGMGKHRYTSAGISVTVKELFPAPVLNASVTSPLLEGNLVTLSCETKLLLQRPGLQLYFSFYMGSKTLRGRNTSSEYQILTARREDSGLYWCEAATEDGNVLKRSPELELQVLGLQLPTPVWFHVLFYLAVGIMFLVNTVLWVTIRKELKRKKKWDLEISLDSGHEKKVISSLQEDRHLEEELKCQEQKEEQLQEGVHRKEPQGATRAKRSGSGATNFSLLKQAGDVEENPGPTSMDWIWRILFLVGAATGAHSGPEVQLVESGGGLVQAGGSLRLSCAASGRTFTMGWFRQAPGKEREFVAAISLSPTLAYYADSVKGRFTISRDNAKNTVVLQMNSLKPEDTALYYCAADRKSVMSIRPDYWGQGTQVTVSSTRIQNPDPAVYQLRDSKSSDKSVCLFTDFDSQTNVSQSKDSDVYITDKTVLDMRSMDFKSNSAVAWSNKSDFACANAFNNSIIPEDTFFPSPESSCGTQVVDTTKAVITLQPPWVSVFQEETVTLHCEVLHLPGSSSTQWFLNGTATQTSTPSYRITSASVNDSGEYRCQRGLSGRSDPIQLEIHRGWLLLQVSSRVFTEGEPLALRCHAWKDKLVYNVLYYRNGKAFKFFHWNSNLTILKTNISHNGTYHCSGMGKHRYTSAGISVTVKELFPAPVLNASVTSPLLEGNLVTLSCETKLLLQRPGLQLYFSFYMGSKTLRGRNTSSEYQILTARREDSGLYWCEAATEDGNVLKRSPELELQVLGLQLPTPVWFHVLFYLAVGIMFLVNTVLWVTIRKELKRKKKWDLEISLDSGHEKKVISSLQEDRHLEEELKCQEQKEEQLQEGVHRKEPQGATRAKRSGSGVKQTLNFDLLKLAGDVESNPGPSRGHMTEYKPTVRLATRDDVPRAVRTLAAAFADYPATRHTVDPDRHIERVTELQELFLTRVGLDIGKVWVADDGAAVAVWTTPESVEAGAVFAEIGPRMAELSGSRLAAQQQMEGLLAPHRPKEPAWFLATVGVSPDHQGKGLGSAVVLPGVEAAERAGVPAFLETSAPRNLPFYERLGFTVTADVEVPEGPRTWCMTRKPGA

SEQ ID NO: 6679 - protein, 755 aa, Artificial Sequence
  Synthetic Polypeptide
MALPVTALLLPLALLLHAARPACEVQLLESGGGLIQPGGSLRLSCAASGFTFSSHAMTWVRQAPGKGLEWVSAISGSGDYTHYADSVKGRFTISRDNSKNTVYLQMNSLRAEDSAVYYCAKDEDGGSLLGHRGQGTLVTVSSGTGGGGSGGGGSGGGGSEFGSLEQVVDTTKAVITLQPPWVSVFQEETVTLHCEVLHLPGSSSTQWFLNGTATQTSTPSYRITSASVNDSGEYRCQRGLSGRSDPIQLEIHRGWLLLQVSSRVFTEGEPLALRCHAWKDKLVYNVLYYRNGKAFKFFHWNSNLTILKTNISHNGTYHCSGMGKHRYTSAGISVTVKELFPAPVLNASVTSPLLEGNLVTLSCETKLLLQRPGLQLYFSFYMGSKTLRGRNTSSEYQILTARREDSGLYWCEAATEDGNVLKRSPELELQVLGLQLPTPVWFHVLFYLAVGIMFLVNTVLWVTIRKELKRKKKWDLEISLDSGHEKKVISSLQEDRHLEEELKCQEQKEEQLQEGVHRKEPQGATRAKRSGSGATNFSLLKQAGDVEENPGPTRGHMTEYKPTVRLATRDDVPRAVRTLAAAFADYPATRHTVDPDRHIERVTELQELFLTRVGLDIGKVWVADDGAAVAVWTTPESVEAGAVFAEIGPRMAELSGSRLAAQQQMEGLLAPHRPKEPAWFLATVGVSPDHQGKGLGSAVVLPGVEAAERAGVPAFLETSAPRNLPFYERLGFTVTADVEVPEGPRTWCMTRKPGA

SEQ ID NO: 6680 - protein, 627 aa, Artificial Sequence; identical to SEQ ID NO: 6648
  Synthetic Polypeptide

SEQ ID NO: 6681 - protein, 627 aa, Artificial Sequence; identical to SEQ ID NO: 6649
  Synthetic Polypeptide

SEQ ID NO: 6682 - protein, 501 aa, Artificial Sequence; identical to SEQ ID NO: 6650
  Synthetic Polypeptide

SEQ ID NO: 6683 - protein, 501 aa, Artificial Sequence; identical to SEQ ID NO: 6651
  Synthetic Polypeptide

SEQ ID NO: 6684 - protein, 501 aa, Artificial Sequence; identical to SEQ ID NO: 6652
  Synthetic Polypeptide

SEQ ID NO: 6685 - protein, 503 aa, Artificial Sequence; identical to SEQ ID NO: 6653
  Synthetic Polypeptide

SEQ ID NO: 6686 - protein, 511 aa, Artificial Sequence; identical to SEQ ID NO: 6654
  Synthetic Polypeptide

SEQ ID NO: 6687 - protein, 507 aa, Artificial Sequence; identical to SEQ ID NO: 6655
  Synthetic Polypeptide

SEQ ID NO: 6688 - protein, 502 aa, Artificial Sequence; identical to SEQ ID NO: 6656
  Synthetic Polypeptide

SEQ ID NO: 6689 - protein, 507 aa, Artificial Sequence; identical to SEQ ID NO: 6657
  Synthetic Polypeptide

SEQ ID NO: 6690 - protein, 441 aa, Artificial Sequence; identical to SEQ ID NO: 6658
  Synthetic Polypeptide

SEQ ID NO: 6691 - protein, 472 aa, Artificial Sequence; identical to SEQ ID NO: 6659
  Synthetic Polypeptide

SEQ ID NO: 6692 - protein, 473 aa, Artificial Sequence; identical to SEQ ID NO: 6660
  Synthetic Polypeptide

SEQ ID NO: 6693 - protein, 690 aa, Artificial Sequence; identical to SEQ ID NO: 6661
  Synthetic Polypeptide

SEQ ID NO: 6694 - protein, 570 aa, Artificial Sequence; identical to SEQ ID NO: 6662
  Synthetic Polypeptide

SEQ ID NO: 6695 - protein, 436 aa, Artificial Sequence; identical to SEQ ID NO: 6663
  Synthetic Polypeptide

SEQ ID NO: 6696 - protein, 411 aa, Artificial Sequence; identical to SEQ ID NO: 6664
  Synthetic Polypeptide

SEQ ID NO: 6697 - protein, 669 aa, Artificial Sequence; identical to SEQ ID NO: 6665
  Synthetic Polypeptide

SEQ ID NO: 6698 - protein, 669 aa, Artificial Sequence; identical to SEQ ID NO: 6666
  Synthetic Polypeptide

SEQ ID NO: 6699 - protein, 913 aa, Artificial Sequence; identical to SEQ ID NO: 4419
  Synthetic Polypeptide

SEQ ID NO: 6700 - protein, 965 aa, Artificial Sequence; identical to SEQ ID NO: 4420
  Synthetic Polypeptide

SEQ ID NO: 6701 - protein, 1115 aa, Artificial Sequence; identical to SEQ ID NO: 4421
  Synthetic Polypeptide

SEQ ID NO: 6702 - protein, 1168 aa, Artificial Sequence; identical to SEQ ID NO: 4422
  Synthetic Polypeptide

SEQ ID NO: 6703 - protein, 1126 aa, Artificial Sequence; identical to SEQ ID NO: 4423
  Synthetic Polypeptide

SEQ ID NO: 6704 - protein, 1263 aa, Artificial Sequence; identical to SEQ ID NO: 4424
  Synthetic Polypeptide

SEQ ID NO: 6705 - protein, 1400 aa, Artificial Sequence; identical to SEQ ID NO: 4425
  Synthetic Polypeptide

SEQ ID NO: 6706 - protein, 1133 aa, Artificial Sequence; identical to SEQ ID NO: 4426
  Synthetic Polypeptide

SEQ ID NO: 6707 - protein, 1141 aa, Artificial Sequence; identical to SEQ ID NO: 4427
  Synthetic Polypeptide

SEQ ID NO: 6708 - protein, 1278 aa, Artificial Sequence; identical to SEQ ID NO: 4428
  Synthetic Polypeptide

SEQ ID NO: 6709 - protein, 1415 aa, Artificial Sequence; identical to SEQ ID NO: 4429
  Synthetic Polypeptide

SEQ ID NO: 6710 - protein, 1148 aa, Artificial Sequence; identical to SEQ ID NO: 4430
  Synthetic Polypeptide

SEQ ID NO: 6711 - protein, 585 aa, Artificial Sequence; identical to SEQ ID NO: 4431
  Synthetic Polypeptide

SEQ ID NO: 6712 - protein, 457 aa, Artificial Sequence
  Synthetic Polypeptide
MALPVTALLLPLALLLHAARPDIQMTQSPSSLSASVGDRVTITCKASDHINNWLAWYQQKPGQAPKLLIYGATTLETGVPSRFSGSGSGTDYTLTISSLQPEDFATYYCQQSWNTPWTFGQGTKLEIKRGGGGSGGGGSGGGGSQVQLQQPGAELVKPGASVKMSCKASGYAFSSYWINWMKQKPGQGLEWIGQIYPGDGDTNYNGKFKGRATLTADTSSSTAYMQLSSLTSEDSAVYFCARSITTVVGCAMDYWGQGTSVTVSSTRTTPGERSSLPAFYPGTSGSCSGCGSLSLPLLAGLVAADAVASLLIVGAVFLCARPRRSPAQEDGKVYINMPGRGSTSRVKFSRSADAPAYQQGQNQLYNELNLGRREEYDVLDKRRGRDPEMGGKPQRRKNPQEGLYNELQKDKMAEAYSEIGMKGERRRGKGHDGLYQGLSTATKDTYDALHMQALPPR

SEQ ID NO: 6713 - protein, 457 aa, Artificial Sequence
  Synthetic Polypeptide
MALPVTALLLPLALLLHAARPEIVLTQSPATLSLSPGERATLSCRASQSVSSYLAWYQQKPGQAPRLLIYDASNRATGIPARFSGSGSGTDFTLTISSLEPEDFAVYYCQQRSNWPITFGQGTRLEIKGGGGSGGGGSGGGGSEVQLVESGGGLVQPGRSLRLSCAASGFTFNDYAMHWVRQAPGKGLEWVSTISWNSGSIGYADSVKGRFTISRDNAKKSLYLQMNSLRAEDTALYYCAKDIQYGNYYYGMDVWGQGTTVTVSSTRTTPGERSSLPAFYPGTSGSCSGCGSLSLPLLAGLVAADAVASLLIVGAVFLCARPRRSPAQEDGKVYINMPGRGSTSRVKFSRSADAPAYQQGQNQLYNELNLGRREEYDVLDKRRGRDPEMGGKPQRRKNPQEGLYNELQKDKMAEAYSEIGMKGERRRGKGHDGLYQGLSTATKDTYDALHMQALPPR

SEQ ID NO: 6714 - protein, 331 aa, Artificial Sequence
  Synthetic Polypeptide
MALPVTALLLPLALLLHAARPEVQLVESGGGLVQAGGSLRLSCAASGRTFSMGWFRQAPGKEREFVAAITYSGGSPYYADSVKGRFTISRDNAKNTVYLQMNSLKPEDTAVYYCAANPTYGSDWNAENWGQGTQVTVSSTRTTPGERSSLPAFYPGTSGSCSGCGSLSLPLLAGLVAADAVASLLIVGAVFLCARPRRSPAQEDGKVYINMPGRGSTSRVKFSRSADAPAYQQGQNQLYNELNLGRREEYDVLDKRRGRDPEMGGKPQRRKNPQEGLYNELQKDKMAEAYSEIGMKGERRRGKGHDGLYQGLSTATKDTYDALHMQALPPR

SEQ ID NO: 6715 - protein, 331 aa, Artificial Sequence
  Synthetic Polypeptide
MALPVTALLLPLALLLHAARPQLQLQESGPGLVKPSETLSLTCTVSGGSISSGDYYWGWIRQPPGKGLEWIGHIYYSGATYYNPSLKSRVTISVDTSRNQFSLKLSSVTAADTAVYYCTRDDSSNWRSRGQGTLVTVSSTRTTPGERSSLPAFYPGTSGSCSGCGSLSLPLLAGLVAADAVASLLIVGAVFLCARPRRSPAQEDGKVYINMPGRGSTSRVKFSRSADAPAYQQGQNQLYNELNLGRREEYDVLDKRRGRDPEMGGKPQRRKNPQEGLYNELQKDKMAEAYSEIGMKGERRRGKGHDGLYQGLSTATKDTYDALHMQALPPR

SEQ ID NO: 6716 - protein, 331 aa, Artificial Sequence
  Synthetic Polypeptide
MALPVTALLLPLALLLHAARPQLQLQESGPGLVKPSETLSLTCTVSGDSISSGDYYWGWIRQPPGKGLEWIGHIYYSGVTYYNPSLKSRVTISVDTSRNQFSLKLSSVTAADTAVYYCTREDSSNWRSRGQGTLVTVSSTRTTPGERSSLPAFYPGTSGSCSGCGSLSLPLLAGLVAADAVASLLIVGAVFLCARPRRSPAQEDGKVYINMPGRGSTSRVKFSRSADAPAYQQGQNQLYNELNLGRREEYDVLDKRRGRDPEMGGKPQRRKNPQEGLYNELQKDKMAEAYSEIGMKGERRRGKGHDGLYQGLSTATKDTYDALHMQALPPR

SEQ ID NO: 6717 - protein, 333 aa, Artificial Sequence
  Synthetic Polypeptide
MALPVTALLLPLALLLHAARPEVQLQESGGGLVQPGGSLRLSCAASGRTFSSLFMGWFRQAPGKERELVAAISRYSLYTYYADSVKGRFTISADNAKNAVYLQMNSLKPEDTAVYYCASKLEYTSNDYDSWGQGTQVTVSSTRTTPGERSSLPAFYPGTSGSCSGCGSLSLPLLAGLVAADAVASLLIVGAVFLCARPRRSPAQEDGKVYINMPGRGSTSRVKFSRSADAPAYQQGQNQLYNELNLGRREEYDVLDKRRGRDPEMGGKPQRRKNPQEGLYNELQKDKMAEAYSEIGMKGERRRGKGHDGLYQGLSTATKDTYDALHMQALPPR

SEQ ID NO: 6718 - protein, 341 aa, Artificial Sequence
  Synthetic Polypeptide
MALPVTALLLPLALLLHAARPEVQLVESGGGLVQPGGSLRLSCAASGFASDYYIIGWFRQAPGKEREGVSCISSRYANTNYADSVKGRFTISRDNAKNTVYLQMNSLKPEDTAVYYCAADTRRYTCPDIATMHRNFDSWGQGTLVTVSSTRTTPGERSSLPAFYPGTSGSCSGCGSLSLPLLAGLVAADAVASLLIVGAVFLCARPRRSPAQEDGKVYINMPGRGSTSRVKFSRSADAPAYQQGQNQLYNELNLGRREEYDVLDKRRGRDPEMGGKPQRRKNPQEGLYNELQKDKMAEAYSEIGMKGERRRGKGHDGLYQGLSTATKDTYDALHMQALPPR

SEQ ID NO: 6719 - protein, 337 aa, Artificial Sequence
  Synthetic Polypeptide
MALPVTALLLPLALLLHAARPEVQLVESGGSLVQPGGSLRLSCAASGFTFDDYAMSWVRQVPGKGLEWVSSINWSGTHTDYADSVKGRFTISRNNANNTLYLQMNSLKSEDTAVYYCAKNWRDAGTTWFEKSGSAGQGTQVTVSSTRTTPGERSSLPAFYPGTSGSCSGCGSLSLPLLAGLVAADAVASLLIVGAVFLCARPRRSPAQEDGKVYINMPGRGSTSRVKFSRSADAPAYQQGQNQLYNELNLGRREEYDVLDKRRGRDPEMGGKPQRRKNPQEGLYNELQKDKMAEAYSEIGMKGERRRGKGHDGLYQGLSTATKDTYDALHMQALPPR

SEQ ID NO: 6720 - protein, 332 aa, Artificial Sequence
  Synthetic Polypeptide
MALPVTALLLPLALLLHAARPEVQLVESGGGLVQPGGSLRLSCAASGFNIKDTCIGWVRRAPGKEEELVAKICKYSGHTRYADSVKGRFTISADTSKNTAYLQMNSLRAEDTAVYYCAAVSVRDGHYNYWGQGTTVTVSSTRTTPGERSSLPAFYPGTSGSCSGCGSLSLPLLAGLVAADAVASLLIVGAVFLCARPRRSPAQEDGKVYINMPGRGSTSRVKFSRSADAPAYQQGQNQLYNELNLGRREEYDVLDKRRGRDPEMGGKPQRRKNPQEGLYNELQKDKMAEAYSEIGMKGERRRGKGHDGLYQGLSTATKDTYDALHMQALPPR

SEQ ID NO: 6721 - protein, 337 aa, Artificial Sequence
  Synthetic Polypeptide
MALPVTALLLPLALLLHAARPGSDLGIKLLFAAAKGQDDEVRILLAAGADVNAKDFEGYTPLHVAAYDGHLEIVEVLLKAGADVNAKDSQGRTPLHEAAYSGHLEIVEVLLKAGADVNAQDDAGETPADLAAAWGHEDIAEVLQKTRTTPGERSSLPAFYPGTSGSCSGCGSLSLPLLAGLVAADAVASLLIVGAVFLCARPRRSPAQEDGKVYINMPGRGSTSRVKFSRSADAPAYQQGQNQLYNELNLGRREEYDVLDKRRGRDPEMGGKPQRRKNPQEGLYNELQKDKMAEAYSEIGMKGERRRGKGHDGLYQGLSTATKDTYDALHMQALPPR

SEQ ID NO: 6722 - protein, 271 aa, Artificial Sequence
  Synthetic Polypeptide
MALPVTALLLPLALLLHAARPVDNKFNKERYSAYYEIWQLPNLNVRQKAAFIGSLQDDPSQSANLLAEAKKLNDAQAPKTRTTPGERSSLPAFYPGTSGSCSGCGSLSLPLLAGLVAADAVASLLIVGAVFLCARPRRSPAQEDGKVYINMPGRGSTSRVKFSRSADAPAYQQGQNQLYNELNLGRREEYDVLDKRRGRDPEMGGKPQRRKNPQEGLYNELQKDKMAEAYSEIGMKGERRRGKGHDGLYQGLSTATKDTYDALHMQALPPR

SEQ ID NO: 6723 - protein, 302 aa, Artificial Sequence
  Synthetic Polypeptide
MALPVTALLLPLALLLHAARPLPAPKNLVVSRVTEDSARLSWTAPDAAFDSFAIGYWEWDDDGEAIVLTVPGSERSYDLTGLKPGTEYPVYIAGVKGGQWSFPLSAIFTTTRTTPGERSSLPAFYPGTSGSCSGCGSLSLPLLAGLVAADAVASLLIVGAVFLCARPRRSPAQEDGKVYINMPGRGSTSRVKFSRSADAPAYQQGQNQLYNELNLGRREEYDVLDKRRGRDPEMGGKPQRRKNPQEGLYNELQKDKMAEAYSEIGMKGERRRGKGHDGLYQGLSTATKDTYDALHMQALPPR

SEQ ID NO: 6724 - protein, 303 aa, Artificial Sequence
  Synthetic Polypeptide
MALPVTALLLPLALLLHAARPMLPAPKNLVVSRITEDSARLSWTAPDAAFDSFPIRYIETLIWGEAIWLDVPGSERSYDLTGLKPGTEYAVVITGVKGGRFSSPLVASFTTTRTTPGERSSLPAFYPGTSGSCSGCGSLSLPLLAGLVAADAVASLLIVGAVFLCARPRRSPAQEDGKVYINMPGRGSTSRVKFSRSADAPAYQQGQNQLYNELNLGRREEYDVLDKRRGRDPEMGGKPQRRKNPQEGLYNELQKDKMAEAYSEIGMKGERRRGKGHDGLYQGLSTATKDTYDALHMQALPPR

SEQ ID NO: 6725 - protein, 520 aa, Artificial Sequence
  Synthetic Polypeptide
MALPVTALLLPLALLLHAARPMALPVTALLLPLALLLHAARPLFNQEVQIPLTESYCGPCPKNWICYKNNCYQFFDESKNWYESQASCMSQNASLLKVYSKEDQDLLKLVKSYHWMGLVHIPTNGSWQWEDGSILSPNLLTIIEMQKGDCALYASSFKGYIENCSTPNTYICMQRTVGGGGSGGGGSGGGGSDLFNQEVQIPLTESYCGPCPKNWICYKNNCYQFFDESKNWYESQASCMSQNASLLKVYSKEDQDLLKLVKSYHWMGLVHIPTNGSWQWEDGSILSPNLLTIIEMQKGDCALYASSFKGYIENCSTPNTYICMQRTVTRTTPGERSSLPAFYPGTSGSCSGCGSLSLPLLAGLVAADAVASLLIVGAVFLCARPRRSPAQEDGKVYINMPGRGSTSRVKFSRSADAPAYQQGQNQLYNELNLGRREEYDVLDKRRGRDPEMGGKPQRRKNPQEGLYNELQKDKMAEAYSEIGMKGERRRGKGHDGLYQGLSTATKDTYDALHMQALPPR

SEQ ID NO: 6726 - protein, 400 aa, Artificial Sequence
  Synthetic Polypeptide
MALPVTALLLPLALLLHAARPMELTDLLLAAMLLAVARLTLSSPVAPACDPRLLNKLLRDSHLLHSRLSQCPDVDPLSIPVLLPAVDFSLGEWKTQTEQSKAQDILGAVSLLLEGVMAARGQLEPSCLSSLLGQLSGQVRLLLGALQGLLGTQLPLQGRTTAHKDPNALFLSLQQLLRGKVRFLLLVEGPTLCVRRTLPTTAVPSSTSTRTTPGERSSLPAFYPGTSGSCSGCGSLSLPLLAGLVAADAVASLLIVGAVFLCARPRRSPAQEDGKVYINMPGRGSTSRVKFSRSADAPAYQQGQNQLYNELNLGRREEYDVLDKRRGRDPEMGGKPQRRKNPQEGLYNELQKDKMAEAYSEIGMKGERRRGKGHDGLYQGLSTATKDTYDALHMQALPPR

SEQ ID NO: 6727 - protein, 266 aa, Artificial Sequence
  Synthetic Polypeptide
MALPVTALLLPLALLLHAARPMDPDLEIRAAFLRQRNTALRTEVAELEQEVQRLENEVSQYETRYGPLGGGKTRTRTTPGERSSLPAFYPGTSGSCSGCGSLSLPLLAGLVAADAVASLLIVGAVFLCARPRRSPAQEDGKVYINMPGRGSTSRVKFSRSADAPAYQQGQNQLYNELNLGRREEYDVLDKRRGRDPEMGGKPQRRKNPQEGLYNELQKDKMAEAYSEIGMKGERRRGKGHDGLYQGLSTATKDTYDALHMQALPPR

SEQ ID NO: 6728 - protein, 241 aa, Artificial Sequence
  Synthetic Polypeptide
MALPVTALLLPLALLLHAARPEVAALEKEVAALEKEVAALEKEVAALEKTRTTPGERSSLPAFYPGTSGSCSGCGSLSLPLLAGLVAADAVASLLIVGAVFLCARPRRSPAQEDGKVYINMPGRGSTSRVKFSRSADAPAYQQGQNQLYNELNLGRREEYDVLDKRRGRDPEMGGKPQRRKNPQEGLYNELQKDKMAEAYSEIGMKGERRRGKGHDGLYQGLSTATKDTYDALHMQALPPR

SEQ ID NO: 6729 - protein, 499 aa, Artificial Sequence
  Synthetic Polypeptide
MALPVTALLLPLALLLHAARPLFNQEVQIPLTESYCGPCPKNWICYKNNCYQFFDESKNWYESQASCMSQNASLLKVYSKEDQDLLKLVKSAHWMGLVHIPTNGSWQWEDGSILSPNLLTIIEMQKGDCALYASSFKGFIENCSTPNTYICMQRTVGGGGSGGGGSGGGGSDLFNQEVQIPLTESYCGPCPKNWICYKNNCYQFFDESKNWYESQASCMSQNASLLKVYSKEDQDLLKLVKSAHWMGLVHIPTNGSWQWEDGSILSPNLLTIIEMQKGDCALYASSFKGFIENCSTPNTYICMQRTVTRTTPGERSSLPAFYPGTSGSCSGCGSLSLPLLAGLVAADAVASLLIVGAVFLCARPRRSPAQEDGKVYINMPGRGSTSRVKFSRSADAPAYQQGQNQLYNELNLGRREEYDVLDKRRGRDPEMGGKPQRRKNPQEGLYNELQKDKMAEAYSEIGMKGERRRGKGHDGLYQGLSTATKDTYDALHMQALPPR

SEQ ID NO: 6730 - protein, 499 aa, Artificial Sequence
  Synthetic Polypeptide
MALPVTALLLPLALLLHAARPLFNQEVQIPLTESYCGPCPKNWICYKNNCYQFFDESKNWYESQASCMSQNASLLKVYSKEDQDLLKLVKSAHWMGLVHIPTNGSWQWEDGSILSPNLLTIIEMQKGDCALYASSFKGYIENCSTPNTYICMQRTVSGGGGSGGGGSGGGGDLFNQEVQIPLTESYCGPCPKNWICYKNNCYQFFDESKNWYESQASCMSQNASLLKVYSKEDQDLLKLVKSAHWMGLVHIPTNGSWQWEDGSILSPNLLTIIEMQKGDCALYASSFKGYIENCSTPNTYICMQRTVTRTTPGERSSLPAFYPGTSGSCSGCGSLSLPLLAGLVAADAVASLLIVGAVFLCARPRRSPAQEDGKVYINMPGRGSTSRVKFSRSADAPAYQQGQNQLYNELNLGRREEYDVLDKRRGRDPEMGGKPQRRKNPQEGLYNELQKDKMAEAYSEIGMKGERRRGKGHDGLYQGLSTATKDTYDALHMQALPPR

SEQ ID NO: 6731 - protein, 1071 aa, Artificial Sequence
  Synthetic Polypeptide
MALPVTALLLPLALLLHAARPDIQMTQSPSSLSASVGDRVTITCKASDHINNWLAWYQQKPGQAPKLLIYGATTLETGVPSRFSGSGSGTDYTLTISSLQPEDFATYYCQQSWNTPWTFGQGTKLEIKRLETTPGERSSLPAFYPGTSGSCSGCGSLSLPLLAGLVAADAVASLLIVGAVFLCARPRRSPAQEDGKVYINMPGRGSTSRVKFSRSADAPAYQQGQNQLYNELNLGRREEYDVLDKRRGRDPEMGGKPQRRKNPQEGLYNELQKDKMAEAYSEIGMKGERRRGKGHDGLYQGLSTATKDTYDALHMQALPPRRAKRSGSGATNFSLLKQAGDVEENPGPMDWIWRILFLVGAATGAHSFEQVQLQQPGAELVKPGASVKMSCKASGYAFSSYWINWMKQKPGQGLEWIGQIYPGDGDTNYNGKFKGRATLTADTSSSTAYMQLSSLTSEDSAVYFCARSITTVVGCAMDYWGQGTSVTVSSTRLQDPCSNCPAGTFCDNNRNQICSPCPPNSFSSAGGQRTCDICRQCKGVFRTRKECSSTSNAECDCTPGFHCLGAGCSMCEQDCKQGQELTKKGCKDCCFGTFNDQKRGICRPWTNCSLDGKSVLVNGTKERDVVCGPSPADLSPGASSVTPPAPAREPGHSPQIISFFLALTSTALLFLLFFLTLRFSVVKRGRKKLLYIFKQPFMRPVQTTQEEDGCSCRFPEEEEGGCELSSRRVKFSRSADAPAYQQGQNQLYNELNLGRREEYDVLDKRRGRDPEMGGKPQRRKNPQEGLYNELQKDKMAEAYSEIGMKGERRRGKGHDGLYQGLSTATKDTYDALHMQALPPRRAKRSGSGVKQTLNFDLLKLAGDVESNPGPGHMTEYKPTVRLATRDDVPRAVRTLAAAFADYPATRHTVDPDRHIERVTELQELFLTRVGLDIGKVWVADDGAAVAVWTTPESVEAGAVFAEIGPRMAELSGSRLAAQQQMEGLLAPHRPKEPAWFLATVGVSPDHQGKGLGSAVVLPGVEAAERAGVPAFLETSAPRNLPFYERLGFTVTADVEVPEGPRTWCMTRKPGA

SEQ ID NO: 6732 - protein, 1123 aa, Artificial Sequence
  Synthetic Polypeptide
MALPVTALLLPLALLLHAARPACEVQLLESGGGLIQPGGSLRLSCAASGFTFSSHAMTWVRQAPGKGLEWVSAISGSGDYTHYADSVKGRFTISRDNSKNTVYLQMNSLRAEDSAVYYCAKDEDGGSLLGHRGQGTLVTVSSGTGGGGSGGGGSGGGGSEFGSLETTPGERSSLPAFYPGTSGSCSGCGSLSLPLLAGLVAADAVASLLIVGAVFLCARPRRSPAQEDGKVYINMPGRGSTSRVKFSRSADAPAYQQGQNQLYNELNLGRREEYDVLDKRRGRDPEMGGKPQRRKNPQEGLYNELQKDKMAEAYSEIGMKGERRRGKGHDGLYQGLSTATKDTYDALHMQALPPRRAKRSGSGATNFSLLKQAGDVEENPGPMDWIWRILFLVGAATGAHSGPEVQLVESGGGLVQAGGSLRLSCAASGRTFSMGWFRQAPGKEREFVAAITYSGGSPYYADSVKGRFTISRDNAKNTVYLQMNSLKPEDTAVYYCAANPTYGSDWNAENWGQGTQVTVSSGSGGGGSGGGGSGGGGSFEGSTRLQDPCSNCPAGTFCDNNRNQICSPCPPNSFSSAGGQRTCDICRQCKGVFRTRKECSSTSNAECDCTPGFHCLGAGCSMCEQDCKQGQELTKKGCKDCCFGTFNDQKRGICRPWTNCSLDGKSVLVNGTKERDVVCGPSPADLSPGASSVTPPAPAREPGHSPQIISFFLALTSTALLFLLFFLTLRFSVVKRGRKKLLYIFKQPFMRPVQTTQEEDGCSCRFPEEEEGGCELSSRRVKFSRSADAPAYQQGQNQLYNELNLGRREEYDVLDKRRGRDPEMGGKPQRRKNPQEGLYNELQKDKMAEAYSEIGMKGERRRGKGHDGLYQGLSTATKDTYDALHMQALPPRRAKRSGSGVKQTLNFDLLKLAGDVESNPGPGHMTEYKPTVRLATRDDVPRAVRTLAAAFADYPATRHTVDPDRHIERVTELQELFLTRVGLDIGKVWVADDGAAVAVWTTPESVEAGAVFAEIGPRMAELSGSRLAAQQQMEGLLAPHRPKEPAWFLATVGVSPDHQGKGLGSAVVLPGVEAAERAGVPAFLETSAPRNLPFYERLGFTVTADVEVPEGPRTWCMTRKPGA

SEQ ID NO: 6733 - protein, 1273 aa, Artificial Sequence
  Synthetic Polypeptide
MALPVTALLLPLALLLHAARPDIQMTQSPSSLSASVGDRVTITCKASDHINNWLAWYQQKPGQAPKLLIYGATTLETGVPSRFSGSGSGTDYTLTISSLQPEDFATYYCQQSWNTPWTFGQGTKLEIKRLEGQPKANPTVTLFPPSSEELQANKATLVCLISDFYPGAVTVAWKADGSPVKAGVETTKPSKQSNNKYAASSYLSLTPEQWKSHRSYSCQVTHEGSTVEKTVAPTECSGSTTPGERSSLPAFYPGTSGSCSGCGSLSLPLLAGLVAADAVASLLIVGAVFLCARPRRSPAQEDGKVYINMPGRGSTSRVKFSRSADAPAYQQGQNQLYNELNLGRREEYDVLDKRRGRDPEMGGKPQRRKNPQEGLYNELQKDKMAEAYSEIGMKGERRRGKGHDGLYQGLSTATKDTYDALHMQALPPRRAKRSGSGATNFSLLKQAGDVEENPGPMDWIWRILFLVGAATGAHSFEQVQLQQPGAELVKPGASVKMSCKASGYAFSSYWINWMKQKPGQGLEWIGQIYPGDGDTNYNGKFKGRATLTADTSSSTAYMQLSSLTSEDSAVYFCARSITTVVGCAMDYWGQGTSVTVSSTRASTKGPSVFPLAPSSKSTSGGTAALGCLVKDYFPEPVTVSWNSGALTSGVHTFPAVLQSSGLYSLSSVVTVPSSSLGTQTYICNVNHKPSNTKVDKRVEPKSCGTLQDPCSNCPAGTFCDNNRNQICSPCPPNSFSSAGGQRTCDICRQCKGVFRTRKECSSTSNAECDCTPGFHCLGAGCSMCEQDCKQGQELTKKGCKDCCFGTFNDQKRGICRPWTNCSLDGKSVLVNGTKERDVVCGPSPADLSPGASSVTPPAPAREPGHSPQIISFFLALTSTALLFLLFFLTLRFSVVKRGRKKLLYIFKQPFMRPVQTTQEEDGCSCRFPEEEEGGCELSSRRVKFSRSADAPAYQQGQNQLYNELNLGRREEYDVLDKRRGRDPEMGGKPQRRKNPQEGLYNELQKDKMAEAYSEIGMKGERRRGKGHDGLYQGLSTATKDTYDALHMQALPPRRAKRSGSGVKQTLNFDLLKLAGDVESNPGPGHMATYEVLCEVARKLGTDDREVVLFLLNVFIPQPTLAQLIGALRALKEEGRLTFPLLAECLFRAGRRDLLRDLLHLDPRFLERHLAGTMSYFSPYQLTVLHVDGELCARDIRSLIFLSKDTIGSRSTPQTFLHWVYCMENLDLLGPTDVDALMSMLRSLSRVDLQRQVQTLMGLHLSGPSHSQHYRHTP

SEQ ID NO: 6734 - protein, 1326 aa, Artificial Sequence
  Synthetic Polypeptide
MALPVTALLLPLALLLHAARPDIQMTQSPSSLSASVGDRVTITCKASDHINNWLAWYQQKPGQAPKLLIYGATTLETGVPSRFSGSGSGTDYTLTISSLQPEDFATYYCQQSWNTPWTFGQGTKLEIKRLEGQPKANPTVTLFPPSSEELQANKATLVCLISDFYPGAVTVAWKADGSPVKAGVETTKPSKQSNNKYAASSYLSLTPEQWKSHRSYSCQVTHEGSTVEKTVAPTECSGSTTPGERSSLPAFYPGTSGSCSGCGSLSLPLLAGLVAADAVASLLIVGAVFLCARPRRSPAQEDGKVYINMPGRGSTSRVKFSRSADAPAYQQGQNQLYNELNLGRREEYDVLDKRRGRDPEMGGKPQRRKNPQEGLYNELQKDKMAEAYSEIGMKGERRRGKGHDGLYQGLSTATKDTYDALHMQALPPRRAKRSGSGATNFSLLKQAGDVEENPGPMDWIWRILFLVGAATGAHSFEQVQLQQPGAELVKPGASVKMSCKASGYAFSSYWINWMKQKPGQGLEWIGQIYPGDGDTNYNGKFKGRATLTADTSSSTAYMQLSSLTSEDSAVYFCARSITTVVGCAMDYWGQGTSVTVSSTRASTKGPSVFPLAPSSKSTSGGTAALGCLVKDYFPEPVTVSWNSGALTSGVHTFPAVLQSSGLYSLSSVVTVPSSSLGTQTYICNVNHKPSNTKVDKRVEPKSCGTLQDPCSNCPAGTFCDNNRNQICSPCPPNSFSSAGGQRTCDICRQCKGVFRTRKECSSTSNAECDCTPGFHCLGAGCSMCEQDCKQGQELTKKGCKDCCFGTFNDQKRGICRPWTNCSLDGKSVLVNGTKERDVVCGPSPADLSPGASSVTPPAPAREPGHSPQIISFFLALTSTALLFLLFFLTLRFSVVKRGRKKLLYIFKQPFMRPVQTTQEEDGCSCRFPEEEEGGCELSSRRVKFSRSADAPAYQQGQNQLYNELNLGRREEYDVLDKRRGRDPEMGGKPQRRKNPQEGLYNELQKDKMAEAYSEIGMKGERRRGKGHDGLYQGLSTATKDTYDALHMQALPPRRAKRSGSGVKQTLNFDLLKLAGDVESNPGPGHMSDSKEVPSLPFLRHLLEELDSHEDSLLLFLCHDAAPGCTTVTQALCSLSQQRKLTLAALVEMLYVLQRMDLLKSRFGLSKEGAEQLLGTSFLTRYRKLMVCVGEELDSSELRALRLFACNLNPSLSTALSESSRFVELVLALENVGLVSPSSVSVLADMLRTLRRLDLCQQLVEYEQQEQARYRYCYAASPSLPVRTLRRGHGASEHEQLCMPVQESSDSPELLRTPVQESSSDSPEQTT

SEQ ID NO: 6735 - protein, 1284 aa, Artificial Sequence
  Synthetic Polypeptide
MALPVTALLLPLALLLHAARPDIQMTQSPSSLSASVGDRVTITCKASDHINNWLAWYQQKPGQAPKLLIYGATTLETGVPSRFSGSGSGTDYTLTISSLQPEDFATYYCQQSWNTPWTFGQGTKLEIKRLEGQPKANPTVTLFPPSSEELQANKATLVCLISDFYPGAVTVAWKADGSPVKAGVETTKPSKQSNNKYAASSYLSLTPEQWKSHRSYSCQVTHEGSTVEKTVAPTECSGSTTPGERSSLPAFYPGTSGSCSGCGSLSLPLLAGLVAADAVASLLIVGAVFLCARPRRSPAQEDGKVYINMPGRGSTSRVKFSRSADAPAYQQGQNQLYNELNLGRREEYDVLDKRRGRDPEMGGKPQRRKNPQEGLYNELQKDKMAEAYSEIGMKGERRRGKGHDGLYQGLSTATKDTYDALHMQALPPRRAKRSGSGATNFSLLKQAGDVEENPGPMDWIWRILFLVGAATGAHSFEQVQLQQPGAELVKPGASVKMSCKASGYAFSSYWINWMKQKPGQGLEWIGQIYPGDGDTNYNGKFKGRATLTADTSSSTAYMQLSSLTSEDSAVYFCARSITTVVGCAMDYWGQGTSVTVSSTRASTKGPSVFPLAPSSKSTSGGTAALGCLVKDYFPEPVTVSWNSGALTSGVHTFPAVLQSSGLYSLSSVVTVPSSSLGTQTYICNVNHKPSNTKVDKRVEPKSCGTLQDPCSNCPAGTFCDNNRNQICSPCPPNSFSSAGGQRTCDICRQCKGVFRTRKECSSTSNAECDCTPGFHCLGAGCSMCEQDCKQGQELTKKGCKDCCFGTFNDQKRGICRPWTNCSLDGKSVLVNGTKERDVVCGPSPADLSPGASSVTPPAPAREPGHSPQIISFFLALTSTALLFLLFFLTLRFSVVKRGRKKLLYIFKQPFMRPVQTTQEEDGCSCRFPEEEEGGCELSSRRVKFSRSADAPAYQQGQNQLYNELNLGRREEYDVLDKRRGRDPEMGGKPQRRKNPQEGLYNELQKDKMAEAYSEIGMKGERRRGKGHDGLYQGLSTATKDTYDALHMQALPPRRAKRSGSGVKQTLNFDLLKLAGDVESNPGPGHMTEYKPTVRLATRDDVPRAVRTLAAAFADYPATRHTVDPDRHIERVTELQELFLTRVGLDIGKVWVADDGAAVAVWTTPESVEAGAVFAEIGPRMAELSGSRLAAQQQMEGLLAPHRPKEPAWFLATVGVSPDHQGKGLGSAVVLPGVEAAERAGVPAFLETSAPRNLPFYERLGFTVTADVEVPEGPRTWCMTRKPGA

SEQ ID NO: 6736 - protein, 1421 aa, Artificial Sequence
  Synthetic Polypeptide
MALPVTALLLPLALLLHAARPEVQLVESGGGLVQAGGSLRLSCAASGRTFSMGWFRQAPGKEREFVAAITYSGGSPYYADSVKGRFTISRDNAKNTVYLQMNSLKPEDTAVYYCAANPTYGSDWNAENWGQGTQVTVSSGTGGGGSGGGGSGGGGSEFDIQMTQSPSSLSASVGDRVTITCKASDHINNWLAWYQQKPGQAPKLLIYGATTLETGVPSRFSGSGSGTDYTLTISSLQPEDFATYYCQQSWNTPWTFGQGTKLEIKRLEGQPKANPTVTLFPPSSEELQANKATLVCLISDFYPGAVTVAWKADGSPVKAGVETTKPSKQSNNKYAASSYLSLTPEQWKSHRSYSCQVTHEGSTVEKTVAPTECSGSTTPGERSSLPAFYPGTSGSCSGCGSLSLPLLAGLVAADAVASLLIVGAVFLCARPRRSPAQEDGKVYINMPGRGSTSRVKFSRSADAPAYQQGQNQLYNELNLGRREEYDVLDKRRGRDPEMGGKPQRRKNPQEGLYNELQKDKMAEAYSEIGMKGERRRGKGHDGLYQGLSTATKDTYDALHMQALPPRRAKRSGSGATNFSLLKQAGDVEENPGPMDWIWRILFLVGAATGAHSFEQVQLQQPGAELVKPGASVKMSCKASGYAFSSYWINWMKQKPGQGLEWIGQIYPGDGDTNYNGKFKGRATLTADTSSSTAYMQLSSLTSEDSAVYFCARSITTVVGCAMDYWGQGTSVTVSSTRASTKGPSVFPLAPSSKSTSGGTAALGCLVKDYFPEPVTVSWNSGALTSGVHTFPAVLQSSGLYSLSSVVTVPSSSLGTQTYICNVNHKPSNTKVDKRVEPKSCGTLQDPCSNCPAGTFCDNNRNQICSPCPPNSFSSAGGQRTCDICRQCKGVFRTRKECSSTSNAECDCTPGFHCLGAGCSMCEQDCKQGQELTKKGCKDCCFGTFNDQKRGICRPWTNCSLDGKSVLVNGTKERDVVCGPSPADLSPGASSVTPPAPAREPGHSPQIISFFLALTSTALLFLLFFLTLRFSVVKRGRKKLLYIFKQPFMRPVQTTQEEDGCSCRFPEEEEGGCELSSRRVKFSRSADAPAYQQGQNQLYNELNLGRREEYDVLDKRRGRDPEMGGKPQRRKNPQEGLYNELQKDKMAEAYSEIGMKGERRRGKGHDGLYQGLSTATKDTYDALHMQALPPRRAKRSGSGVKQTLNFDLLKLAGDVESNPGPGHMTEYKPTVRLATRDDVPRAVRTLAAAFADYPATRHTVDPDRHIERVTELQELFLTRVGLDIGKVWVADDGAAVAVWTTPESVEAGAVFAEIGPRMAELSGSRLAAQQQMEGLLAPHRPKEPAWFLATVGVSPDHQGKGLGSAVVLPGVEAAERAGVPAFLETSAPRNLPFYERLGFTVTADVEVPEGPRTWCMTRKPGA

SEQ ID NO: 6737 - protein, 1558 aa, Artificial Sequence
  Synthetic Polypeptide
MALPVTALLLPLALLLHAARPEVQLVESGGGLVQAGGSLRLSCAASGRTFSMGWFRQAPGKEREFVAAITYSGGSPYYADSVKGRFTISRDNAKNTVYLQMNSLKPEDTAVYYCAANPTYGSDWNAENWGQGTQVTVSSGTGGGGSGGGGSGGGGSEFDIQMTQSPSSLSASVGDRVTITCKASDHINNWLAWYQQKPGQAPKLLIYGATTLETGVPSRFSGSGSGTDYTLTISSLQPEDFATYYCQQSWNTPWTFGQGTKLEIKRLEGQPKANPTVTLFPPSSEELQANKATLVCLISDFYPGAVTVAWKADGSPVKAGVETTKPSKQSNNKYAASSYLSLTPEQWKSHRSYSCQVTHEGSTVEKTVAPTECSGSTTPGERSSLPAFYPGTSGSCSGCGSLSLPLLAGLVAADAVASLLIVGAVFLCARPRRSPAQEDGKVYINMPGRGSTSRVKFSRSADAPAYQQGQNQLYNELNLGRREEYDVLDKRRGRDPEMGGKPQRRKNPQEGLYNELQKDKMAEAYSEIGMKGERRRGKGHDGLYQGLSTATKDTYDALHMQALPPRRAKRSGSGATNFSLLKQAGDVEENPGPMDWIWRILFLVGAATGAHSGPEVQLVESGGGLVQAGGSLRLSCAASGRTFTMGWFRQAPGKEREFVAAISLSPTLAYYADSVKGRFTISRDNAKNTVVLQMNSLKPEDTALYYCAADRKSVMSIRPDYWGQGTQVTVSSGSGGGGSGGGGSGGGGSFEQVQLQQPGAELVKPGASVKMSCKASGYAFSSYWINWMKQKPGQGLEWIGQIYPGDGDTNYNGKFKGRATLTADTSSSTAYMQLSSLTSEDSAVYFCARSITTVVGCAMDYWGQGTSVTVSSTRASTKGPSVFPLAPSSKSTSGGTAALGCLVKDYFPEPVTVSWNSGALTSGVHTFPAVLQSSGLYSLSSVVTVPSSSLGTQTYICNVNHKPSNTKVDKRVEPKSCGTLQDPCSNCPAGTFCDNNRNQICSPCPPNSFSSAGGQRTCDICRQCKGVFRTRKECSSTSNAECDCTPGFHCLGAGCSMCEQDCKQGQELTKKGCKDCCFGTFNDQKRGICRPWTNCSLDGKSVLVNGTKERDVVCGPSPADLSPGASSVTPPAPAREPGHSPQIISFFLALTSTALLFLLFFLTLRFSVVKRGRKKLLYIFKQPFMRPVQTTQEEDGCSCRFPEEEEGGCELSSRRVKFSRSADAPAYQQGQNQLYNELNLGRREEYDVLDKRRGRDPEMGGKPQRRKNPQEGLYNELQKDKMAEAYSEIGMKGERRRGKGHDGLYQGLSTATKDTYDALHMQALPPRRAKRSGSGVKQTLNFDLLKLAGDVESNPGPGHMTEYKPTVRLATRDDVPRAVRTLAAAFADYPATRHTVDPDRHIERVTELQELFLTRVGLDIGKVWVADDGAAVAVWTTPESVEAGAVFAEIGPRMAELSGSRLAAQQQMEGLLAPHRPKEPAWFLATVGVSPDHQGKGLGSAVVLPGVEAAERAGVPAFLETSAPRNLPFYERLGFTVTADVEVPEGPRTWCMTRKPGA

SEQ ID NO: 6738 - protein, 1291 aa, Artificial Sequence
  Synthetic Polypeptide
MALPVTALLLPLALLLHAARPEVQLVESGGGLVQAGGSLRLSCAASGRTFSMGWFRQAPGKEREFVAAITYSGGSPYYADSVKGRFTISRDNAKNTVYLQMNSLKPEDTAVYYCAANPTYGSDWNAENWGQGTQVTVSSLEGQPKANPTVTLFPPSSEELQANKATLVCLISDFYPGAVTVAWKADGSPVKAGVETTKPSKQSNNKYAASSYLSLTPEQWKSHRSYSCQVTHEGSTVEKTVAPTECSGSTTPGERSSLPAFYPGTSGSCSGCGSLSLPLLAGLVAADAVASLLIVGAVFLCARPRRSPAQEDGKVYINMPGRGSTSRVKFSRSADAPAYQQGQNQLYNELNLGRREEYDVLDKRRGRDPEMGGKPQRRKNPQEGLYNELQKDKMAEAYSEIGMKGERRRGKGHDGLYQGLSTATKDTYDALHMQALPPRRAKRSGSGATNFSLLKQAGDVEENPGPMDWIWRILFLVGAATGAHSGPEVQLVESGGGLVQAGGSLRLSCAASGRTFTMGWFRQAPGKEREFVAAISLSPTLAYYADSVKGRFTISRDNAKNTVVLQMNSLKPEDTALYYCAADRKSVMSIRPDYWGQGTQVTVSSTRASTKGPSVFPLAPSSKSTSGGTAALGCLVKDYFPEPVTVSWNSGALTSGVHTFPAVLQSSGLYSLSSVVTVPSSSLGTQTYICNVNHKPSNTKVDKRVEPKSCGTLQDPCSNCPAGTFCDNNRNQICSPCPPNSFSSAGGQRTCDICRQCKGVFRTRKECSSTSNAECDCTPGFHCLGAGCSMCEQDCKQGQELTKKGCKDCCFGTFNDQKRGICRPWTNCSLDGKSVLVNGTKERDVVCGPSPADLSPGASSVTPPAPAREPGHSPQIISFFLALTSTALLFLLFFLTLRFSVVKRGRKKLLYIFKQPFMRPVQTTQEEDGCSCRFPEEEEGGCELSSRRVKFSRSADAPAYQQGQNQLYNELNLGRREEYDVLDKRRGRDPEMGGKPQRRKNPQEGLYNELQKDKMAEAYSEIGMKGERRRGKGHDGLYQGLSTATKDTYDALHMQALPPRRAKRSGSGVKQTLNFDLLKLAGDVESNPGPGHMTEYKPTVRLATRDDVPRAVRTLAAAFADYPATRHTVDPDRHIERVTELQELFLTRVGLDIGKVWVADDGAAVAVWTTPESVEAGAVFAEIGPRMAELSGSRLAAQQQMEGLLAPHRPKEPAWFLATVGVSPDHQGKGLGSAVVLPGVEAAERAGVPAFLETSAPRNLPFYERLGFTVTADVEVPEGPRTWCMTRKPGA

SEQ ID NO: 6739 - protein, 1299 aa, Artificial Sequence
  Synthetic Polypeptide
MALPVTALLLPLALLLHAARPDIQMTQSPSSLSASVGDRVTITCKASDHINNWLAWYQQKPGQAPKLLIYGATTLETGVPSRFSGSGSGTDYTLTISSLQPEDFATYYCQQSWNTPWTFGQGTKLEIKRLEDLKNVFPPEVAVFEPSEAEISHTQKATLVCLATGFYPDHVELSWWVNGKEVHSGVSTDPQPLKEQPALNDSRYCLSSRLRVSATFWQNPRNHFRCQVQFYGLSENDEWTQDRAKPVTQIVSAEAWGRADCGSTTPGERSSLPAFYPGTSGSCSGCGSLSLPLLAGLVAADAVASLLIVGAVFLCARPRRSPAQEDGKVYINMPGRGSTSRVKFSRSADAPAYQQGQNQLYNELNLGRREEYDVLDKRRGRDPEMGGKPQRRKNPQEGLYNELQKDKMAEAYSEIGMKGERRRGKGHDGLYQGLSTATKDTYDALHMQALPPRRAKRSGSGATNFSLLKQAGDVEENPGPMDWIWRILFLVGAATGAHSFEQVQLQQPGAELVKPGASVKMSCKASGYAFSSYWINWMKQKPGQGLEWIGQIYPGDGDTNYNGKFKGRATLTADTSSSTAYMQLSSLTSEDSAVYFCARSITTVVGCAMDYWGQGTSVTVSSTRIQNPDPAVYQLRDSKSSDKSVCLFTDFDSQTNVSQSKDSDVYITDKTVLDMRSMDFKSNSAVAWSNKSDFACANAFNNSIIPEDTFFPSPESSCGTLQDPCSNCPAGTFCDNNRNQICSPCPPNSFSSAGGQRTCDICRQCKGVFRTRKECSSTSNAECDCTPGFHCLGAGCSMCEQDCKQGQELTKKGCKDCCFGTFNDQKRGICRPWTNCSLDGKSVLVNGTKERDVVCGPSPADLSPGASSVTPPAPAREPGHSPQIISFFLALTSTALLFLLFFLTLRFSVVKRGRKKLLYIFKQPFMRPVQTTQEEDGCSCRFPEEEEGGCELSSRRVKFSRSADAPAYQQGQNQLYNELNLGRREEYDVLDKRRGRDPEMGGKPQRRKNPQEGLYNELQKDKMAEAYSEIGMKGERRRGKGHDGLYQGLSTATKDTYDALHMQALPPRRAKRSGSGVKQTLNFDLLKLAGDVESNPGPGHMTEYKPTVRLATRDDVPRAVRTLAAAFADYPATRHTVDPDRHIERVTELQELFLTRVGLDIGKVWVADDGAAVAVWTTPESVEAGAVFAEIGPRMAELSGSRLAAQQQMEGLLAPHRPKEPAWFLATVGVSPDHQGKGLGSAVVLPGVEAAERAGVPAFLETSAPRNLPFYERLGFTVTADVEVPEGPRTWCMTRKPGA

SEQ ID NO: 6740 - protein, 1436 aa, Artificial Sequence
  Synthetic Polypeptide
MALPVTALLLPLALLLHAARPEVQLVESGGGLVQAGGSLRLSCAASGRTFSMGWFRQAPGKEREFVAAITYSGGSPYYADSVKGRFTISRDNAKNTVYLQMNSLKPEDTAVYYCAANPTYGSDWNAENWGQGTQVTVSSGTGGGGSGGGGSGGGGSEFDIQMTQSPSSLSASVGDRVTITCKASDHINNWLAWYQQKPGQAPKLLIYGATTLETGVPSRFSGSGSGTDYTLTISSLQPEDFATYYCQQSWNTPWTFGQGTKLEIKRLEDLKNVFPPEVAVFEPSEAEISHTQKATLVCLATGFYPDHVELSWWVNGKEVHSGVSTDPQPLKEQPALNDSRYCLSSRLRVSATFWQNPRNHFRCQVQFYGLSENDEWTQDRAKPVTQIVSAEAWGRADCGSTTPGERSSLPAFYPGTSGSCSGCGSLSLPLLAGLVAADAVASLLIVGAVFLCARPRRSPAQEDGKVYINMPGRGSTSRVKFSRSADAPAYQQGQNQLYNELNLGRREEYDVLDKRRGRDPEMGGKPQRRKNPQEGLYNELQKDKMAEAYSEIGMKGERRRGKGHDGLYQGLSTATKDTYDALHMQALPPRRAKRSGSGATNFSLLKQAGDVEENPGPMDWIWRILFLVGAATGAHSFEQVQLQQPGAELVKPGASVKMSCKASGYAFSSYWINWMKQKPGQGLEWIGQIYPGDGDTNYNGKFKGRATLTADTSSSTAYMQLSSLTSEDSAVYFCARSITTVVGCAMDYWGQGTSVTVSSTRIQNPDPAVYQLRDSKSSDKSVCLFTDFDSQTNVSQSKDSDVYITDKTVLDMRSMDFKSNSAVAWSNKSDFACANAFNNSIIPEDTFFPSPESSCGTLQDPCSNCPAGTFCDNNRNQICSPCPPNSFSSAGGQRTCDICRQCKGVFRTRKECSSTSNAECDCTPGFHCLGAGCSMCEQDCKQGQELTKKGCKDCCFGTFNDQKRGICRPWTNCSLDGKSVLVNGTKERDVVCGPSPADLSPGASSVTPPAPAREPGHSPQIISFFLALTSTALLFLLFFLTLRFSVVKRGRKKLLYIFKQPFMRPVQTTQEEDGCSCRFPEEEEGGCELSSRRVKFSRSADAPAYQQGQNQLYNELNLGRREEYDVLDKRRGRDPEMGGKPQRRKNPQEGLYNELQKDKMAEAYSEIGMKGERRRGKGHDGLYQGLSTATKDTYDALHMQALPPRRAKRSGSGVKQTLNFDLLKLAGDVESNPGPGHMTEYKPTVRLATRDDVPRAVRTLAAAFADYPATRHTVDPDRHIERVTELQELFLTRVGLDIGKVWVADDGAAVAVWTTPESVEAGAVFAEIGPRMAELSGSRLAAQQQMEGLLAPHRPKEPAWFLATVGVSPDHQGKGLGSAVVLPGVEAAERAGVPAFLETSAPRNLPFYERLGFTVTADVEVPEGPRTWCMTRKPGA

SEQ ID NO: 6741 - protein, 1573 aa, Artificial Sequence
  Synthetic Polypeptide
MALPVTALLLPLALLLHAARPEVQLVESGGGLVQAGGSLRLSCAASGRTFSMGWFRQAPGKEREFVAAITYSGGSPYYADSVKGRFTISRDNAKNTVYLQMNSLKPEDTAVYYCAANPTYGSDWNAENWGQGTQVTVSSGTGGGGSGGGGSGGGGSEFDIQMTQSPSSLSASVGDRVTITCKASDHINNWLAWYQQKPGQAPKLLIYGATTLETGVPSRFSGSGSGTDYTLTISSLQPEDFATYYCQQSWNTPWTFGQGTKLEIKRLEDLKNVFPPEVAVFEPSEAEISHTQKATLVCLATGFYPDHVELSWWVNGKEVHSGVSTDPQPLKEQPALNDSRYCLSSRLRVSATFWQNPRNHFRCQVQFYGLSENDEWTQDRAKPVTQIVSAEAWGRADCGSTTPGERSSLPAFYPGTSGSCSGCGSLSLPLLAGLVAADAVASLLIVGAVFLCARPRRSPAQEDGKVYINMPGRGSTSRVKFSRSADAPAYQQGQNQLYNELNLGRREEYDVLDKRRGRDPEMGGKPQRRKNPQEGLYNELQKDKMAEAYSEIGMKGERRRGKGHDGLYQGLSTATKDTYDALHMQALPPRRAKRSGSGATNFSLLKQAGDVEENPGPMDWIWRILFLVGAATGAHSGPEVQLVESGGGLVQAGGSLRLSCAASGRTFTMGWFRQAPGKEREFVAAISLSPTLAYYADSVKGRFTISRDNAKNTVVLQMNSLKPEDTALYYCAADRKSVMSIRPDYWGQGTQVTVSSGSGGGGSGGGGSGGGGSFEQVQLQQPGAELVKPGASVKMSCKASGYAFSSYWINWMKQKPGQGLEWIGQIYPGDGDTNYNGKFKGRATLTADTSSSTAYMQLSSLTSEDSAVYFCARSITTVVGCAMDYWGQGTSVTVSSTRIQNPDPAVYQLRDSKSSDKSVCLFTDFDSQTNVSQSKDSDVYITDKTVLDMRSMDFKSNSAVAWSNKSDFACANAFNNSIIPEDTFFPSPESSCGTLQDPCSNCPAGTFCDNNRNQICSPCPPNSFSSAGGQRTCDICRQCKGVFRTRKECSSTSNAECDCTPGFHCLGAGCSMCEQDCKQGQELTKKGCKDCCFGTFNDQKRGICRPWTNCSLDGKSVLVNGTKERDVVCGPSPADLSPGASSVTPPAPAREPGHSPQIISFFLALTSTALLFLLFFLTLRFSVVKRGRKKLLYIFKQPFMRPVQTTQEEDGCSCRFPEEEEGGCELSSRRVKFSRSADAPAYQQGQNQLYNELNLGRREEYDVLDKRRGRDPEMGGKPQRRKNPQEGLYNELQKDKMAEAYSEIGMKGERRRGKGHDGLYQGLSTATKDTYDALHMQALPPRRAKRSGSGVKQTLNFDLLKLAGDVESNPGPGHMTEYKPTVRLATRDDVPRAVRTLAAAFADYPATRHTVDPDRHIERVTELQELFLTRVGLDIGKVWVADDGAAVAVWTTPESVEAGAVFAEIGPRMAELSGSRLAAQQQMEGLLAPHRPKEPAWFLATVGVSPDHQGKGLGSAVVLPGVEAAERAGVPAFLETSAPRNLPFYERLGFTVTADVEVPEGPRTWCMTRKPGA

SEQ ID NO: 6742 - protein, 1306 aa, Artificial Sequence
  Synthetic Polypeptide
MALPVTALLLPLALLLHAARPEVQLVESGGGLVQAGGSLRLSCAASGRTFSMGWFRQAPGKEREFVAAITYSGGSPYYADSVKGRFTISRDNAKNTVYLQMNSLKPEDTAVYYCAANPTYGSDWNAENWGQGTQVTVSSLEDLKNVFPPEVAVFEPSEAEISHTQKATLVCLATGFYPDHVELSWWVNGKEVHSGVSTDPQPLKEQPALNDSRYCLSSRLRVSATFWQNPRNHFRCQVQFYGLSENDEWTQDRAKPVTQIVSAEAWGRADCGSTTPGERSSLPAFYPGTSGSCSGCGSLSLPLLAGLVAADAVASLLIVGAVFLCARPRRSPAQEDGKVYINMPGRGSTSRVKFSRSADAPAYQQGQNQLYNELNLGRREEYDVLDKRRGRDPEMGGKPQRRKNPQEGLYNELQKDKMAEAYSEIGMKGERRRGKGHDGLYQGLSTATKDTYDALHMQALPPRRAKRSGSGATNFSLLKQAGDVEENPGPMDWIWRILFLVGAATGAHSGPEVQLVESGGGLVQAGGSLRLSCAASGRTFTMGWFRQAPGKEREFVAAISLSPTLAYYADSVKGRFTISRDNAKNTVVLQMNSLKPEDTALYYCAADRKSVMSIRPDYWGQGTQVTVSSTRIQNPDPAVYQLRDSKSSDKSVCLFTDFDSQTNVSQSKDSDVYITDKTVLDMRSMDFKSNSAVAWSNKSDFACANAFNNSIIPEDTFFPSPESSCGTLQDPCSNCPAGTFCDNNRNQICSPCPPNSFSSAGGQRTCDICRQCKGVFRTRKECSSTSNAECDCTPGFHCLGAGCSMCEQDCKQGQELTKKGCKDCCFGTFNDQKRGICRPWTNCSLDGKSVLVNGTKERDVVCGPSPADLSPGASSVTPPAPAREPGHSPQIISFFLALTSTALLFLLFFLTLRFSVVKRGRKKLLYIFKQPFMRPVQTTQEEDGCSCRFPEEEEGGCELSSRRVKFSRSADAPAYQQGQNQLYNELNLGRREEYDVLDKRRGRDPEMGGKPQRRKNPQEGLYNELQKDKMAEAYSEIGMKGERRRGKGHDGLYQGLSTATKDTYDALHMQALPPRRAKRSGSGVKQTLNFDLLKLAGDVESNPGPGHMTEYKPTVRLATRDDVPRAVRTLAAAFADYPATRHTVDPDRHIERVTELQELFLTRVGLDIGKVWVADDGAAVAVWTTPESVEAGAVFAEIGPRMAELSGSRLAAQQQMEGLLAPHRPKEPAWFLATVGVSPDHQGKGLGSAVVLPGVEAAERAGVPAFLETSAPRNLPFYERLGFTVTADVEVPEGPRTWCMTRKPGA

SEQ ID NO: 6743 - protein, 585 aa, Artificial Sequence; identical to SEQ ID NO: 4431
  Synthetic Polypeptide

SEQ ID NO: 6744 - protein, 457 aa, Artificial Sequence; identical to SEQ ID NO: 6712
  Synthetic Polypeptide

SEQ ID NO: 6745 - protein, 457 aa, Artificial Sequence; identical to SEQ ID NO: 6713
  Synthetic Polypeptide

SEQ ID NO: 6746 - protein, 331 aa, Artificial Sequence; identical to SEQ ID NO: 6714
  Synthetic Polypeptide

SEQ ID NO: 6747 - protein, 331 aa, Artificial Sequence; identical to SEQ ID NO: 6715
  Synthetic Polypeptide

SEQ ID NO: 6748 - protein, 331 aa, Artificial Sequence; identical to SEQ ID NO: 6716
  Synthetic Polypeptide

SEQ ID NO: 6749 - protein, 333 aa, Artificial Sequence; identical to SEQ ID NO: 6717
  Synthetic Polypeptide

SEQ ID NO: 6750 - protein, 341 aa, Artificial Sequence; identical to SEQ ID NO: 6718
  Synthetic Polypeptide

SEQ ID NO: 6751 - protein, 337 aa, Artificial Sequence; identical to SEQ ID NO: 6719
  Synthetic Polypeptide

SEQ ID NO: 6752 - protein, 332 aa, Artificial Sequence; identical to SEQ ID NO: 6720
  Synthetic Polypeptide

SEQ ID NO: 6753 - protein, 337 aa, Artificial Sequence; identical to SEQ ID NO: 6721
  Synthetic Polypeptide

SEQ ID NO: 6754 - protein, 271 aa, Artificial Sequence; identical to SEQ ID NO: 6722
  Synthetic Polypeptide

SEQ ID NO: 6755 - protein, 302 aa, Artificial Sequence; identical to SEQ ID NO: 6723
  Synthetic Polypeptide

SEQ ID NO: 6756 - protein, 303 aa, Artificial Sequence; identical to SEQ ID NO: 6724
  Synthetic Polypeptide

SEQ ID NO: 6757 - protein, 520 aa, Artificial Sequence; identical to SEQ ID NO: 6725
  Synthetic Polypeptide

SEQ ID NO: 6758 - protein, 400 aa, Artificial Sequence; identical to SEQ ID NO: 6726
  Synthetic Polypeptide

SEQ ID NO: 6759 - protein, 266 aa, Artificial Sequence; identical to SEQ ID NO: 6727
  Synthetic Polypeptide

SEQ ID NO: 6760 - protein, 241 aa, Artificial Sequence; identical to SEQ ID NO: 6728
  Synthetic Polypeptide

SEQ ID NO: 6761 - protein, 499 aa, Artificial Sequence; identical to SEQ ID NO: 6729
  Synthetic Polypeptide

SEQ ID NO: 6762 - protein, 499 aa, Artificial Sequence; identical to SEQ ID NO: 6730
  Synthetic Polypeptide

SEQ ID NO: 6763 - protein, 1229 aa, Artificial Sequence
  Synthetic Polypeptide
MALPVTALLLPLALLLHAARPDIQMTQSPSSLSASVGDRVTITCKASDHINNWLAWYQQKPGQAPKLLIYGATTLETGVPSRFSGSGSGTDYTLTISSLQPEDFATYYCQQSWNTPWTFGQGTKLEIKRLELQDPCSNCPAGTFCDNNRNQICSPCPPNSFSSAGGQRTCDICRQCKGVFRTRKECSSTSNAECDCTPGFHCLGAGCSMCEQDCKQGQELTKKGCKDCCFGTFNDQKRGICRPWTNCSLDGKSVLVNGTKERDVVCGPSPADLSPGASSVTPPAPAREPGHSPQIISFFLALTSTALLFLLFFLTLRFSVVKRGRKKLLYIFKQPFMRPVQTTQEEDGCSCRFPEEEEGGCELSTSRVKFSRSADAPAYQQGQNQLYNELNLGRREEYDVLDKRRGRDPEMGGKPQRRKNPQEGLYNELQKDKMAEAYSEIGMKGERRRGKGHDGLYQGLSTATKDTYDALHMQALPPRRAKRSGSGATNFSLLKQAGDVEENPGPMDWIWRILFLVGAATGAHSFEQVQLQQPGAELVKPGASVKMSCKASGYAFSSYWINWMKQKPGQGLEWIGQIYPGDGDTNYNGKFKGRATLTADTSSSTAYMQLSSLTSEDSAVYFCARSITTVVGCAMDYWGQGTSVTVSSTRLQDPCSNCPAGTFCDNNRNQICSPCPPNSFSSAGGQRTCDICRQCKGVFRTRKECSSTSNAECDCTPGFHCLGAGCSMCEQDCKQGQELTKKGCKDCCFGTFNDQKRGICRPWTNCSLDGKSVLVNGTKERDVVCGPSPADLSPGASSVTPPAPAREPGHSPQIISFFLALTSTALLFLLFFLTLRFSVVKRGRKKLLYIFKQPFMRPVQTTQEEDGCSCRFPEEEEGGCELSSRRVKFSRSADAPAYQQGQNQLYNELNLGRREEYDVLDKRRGRDPEMGGKPQRRKNPQEGLYNELQKDKMAEAYSEIGMKGERRRGKGHDGLYQGLSTATKDTYDALHMQALPPRRAKRSGSGVKQTLNFDLLKLAGDVESNPGPGHMTEYKPTVRLATRDDVPRAVRTLAAAFADYPATRHTVDPDRHIERVTELQELFLTRVGLDIGKVWVADDGAAVAVWTTPESVEAGAVFAEIGPRMAELSGSRLAAQQQMEGLLAPHRPKEPAWFLATVGVSPDHQGKGLGSAVVLPGVEAAERAGVPAFLETSAPRNLPFYERLGFTVTADVEVPEGPRTWCMTRKPGA

SEQ ID NO: 6764 - protein, 1281 aa, Artificial Sequence
  Synthetic Polypeptide
MALPVTALLLPLALLLHAARPACEVQLLESGGGLIQPGGSLRLSCAASGFTFSSHAMTWVRQAPGKGLEWVSAISGSGDYTHYADSVKGRFTISRDNSKNTVYLQMNSLRAEDSAVYYCAKDEDGGSLLGHRGQGTLVTVSSGTGGGGSGGGGSGGGGSEFGSLELQDPCSNCPAGTFCDNNRNQICSPCPPNSFSSAGGQRTCDICRQCKGVFRTRKECSSTSNAECDCTPGFHCLGAGCSMCEQDCKQGQELTKKGCKDCCFGTFNDQKRGICRPWTNCSLDGKSVLVNGTKERDVVCGPSPADLSPGASSVTPPAPAREPGHSPQIISFFLALTSTALLFLLFFLTLRFSVVKRGRKKLLYIFKQPFMRPVQTTQEEDGCSCRFPEEEEGGCELSTSRVKFSRSADAPAYQQGQNQLYNELNLGRREEYDVLDKRRGRDPEMGGKPQRRKNPQEGLYNELQKDKMAEAYSEIGMKGERRRGKGHDGLYQGLSTATKDTYDALHMQALPPRRAKRSGSGATNFSLLKQAGDVEENPGPMDWIWRILFLVGAATGAHSGPEVQLVESGGGLVQAGGSLRLSCAASGRTFSMGWFRQAPGKEREFVAAITYSGGSPYYADSVKGRFTISRDNAKNTVYLQMNSLKPEDTAVYYCAANPTYGSDWNAENWGQGTQVTVSSGSGGGGSGGGGSGGGGSFEGSTRLQDPCSNCPAGTFCDNNRNQICSPCPPNSFSSAGGQRTCDICRQCKGVFRTRKECSSTSNAECDCTPGFHCLGAGCSMCEQDCKQGQELTKKGCKDCCFGTFNDQKRGICRPWTNCSLDGKSVLVNGTKERDVVCGPSPADLSPGASSVTPPAPAREPGHSPQIISFFLALTSTALLFLLFFLTLRFSVVKRGRKKLLYIFKQPFMRPVQTTQEEDGCSCRFPEEEEGGCELSSRRVKFSRSADAPAYQQGQNQLYNELNLGRREEYDVLDKRRGRDPEMGGKPQRRKNPQEGLYNELQKDKMAEAYSEIGMKGERRRGKGHDGLYQGLSTATKDTYDALHMQALPPRRAKRSGSGVKQTLNFDLLKLAGDVESNPGPGHMTEYKPTVRLATRDDVPRAVRTLAAAFADYPATRHTVDPDRHIERVTELQELFLTRVGLDIGKVWVADDGAAVAVWTTPESVEAGAVFAEIGPRMAELSGSRLAAQQQMEGLLAPHRPKEPAWFLATVGVSPDHQGKGLGSAVVLPGVEAAERAGVPAFLETSAPRNLPFYERLGFTVTADVEVPEGPRTWCMTRKPGA

SEQ ID NO: 6765 - protein, 1431 aa, Artificial Sequence
  Synthetic Polypeptide
MALPVTALLLPLALLLHAARPDIQMTQSPSSLSASVGDRVTITCKASDHINNWLAWYQQKPGQAPKLLIYGATTLETGVPSRFSGSGSGTDYTLTISSLQPEDFATYYCQQSWNTPWTFGQGTKLEIKRLEGQPKANPTVTLFPPSSEELQANKATLVCLISDFYPGAVTVAWKADGSPVKAGVETTKPSKQSNNKYAASSYLSLTPEQWKSHRSYSCQVTHEGSTVEKTVAPTECSGSLQDPCSNCPAGTFCDNNRNQICSPCPPNSFSSAGGQRTCDICRQCKGVFRTRKECSSTSNAECDCTPGFHCLGAGCSMCEQDCKQGQELTKKGCKDCCFGTFNDQKRGICRPWTNCSLDGKSVLVNGTKERDVVCGPSPADLSPGASSVTPPAPAREPGHSPQIISFFLALTSTALLFLLFFLTLRFSVVKRGRKKLLYIFKQPFMRPVQTTQEEDGCSCRFPEEEEGGCELSTSRVKFSRSADAPAYQQGQNQLYNELNLGRREEYDVLDKRRGRDPEMGGKPQRRKNPQEGLYNELQKDKMAEAYSEIGMKGERRRGKGHDGLYQGLSTATKDTYDALHMQALPPRRAKRSGSGATNFSLLKQAGDVEENPGPMDWIWRILFLVGAATGAHSFEQVQLQQPGAELVKPGASVKMSCKASGYAFSSYWINWMKQKPGQGLEWIGQIYPGDGDTNYNGKFKGRATLTADTSSSTAYMQLSSLTSEDSAVYFCARSITTVVGCAMDYWGQGTSVTVSSTRASTKGPSVFPLAPSSKSTSGGTAALGCLVKDYFPEPVTVSWNSGALTSGVHTFPAVLQSSGLYSLSSVVTVPSSSLGTQTYICNVNHKPSNTKVDKRVEPKSCGTLQDPCSNCPAGTFCDNNRNQICSPCPPNSFSSAGGQRTCDICRQCKGVFRTRKECSSTSNAECDCTPGFHCLGAGCSMCEQDCKQGQELTKKGCKDCCFGTFNDQKRGICRPWTNCSLDGKSVLVNGTKERDVVCGPSPADLSPGASSVTPPAPAREPGHSPQIISFFLALTSTALLFLLFFLTLRFSVVKRGRKKLLYIFKQPFMRPVQTTQEEDGCSCRFPEEEEGGCELSSRRVKFSRSADAPAYQQGQNQLYNELNLGRREEYDVLDKRRGRDPEMGGKPQRRKNPQEGLYNELQKDKMAEAYSEIGMKGERRRGKGHDGLYQGLSTATKDTYDALHMQALPPRRAKRSGSGVKQTLNFDLLKLAGDVESNPGPGHMATYEVLCEVARKLGTDDREVVLFLLNVFIPQPTLAQLIGALRALKEEGRLTFPLLAECLFRAGRRDLLRDLLHLDPRFLERHLAGTMSYFSPYQLTVLHVDGELCARDIRSLIFLSKDTIGSRSTPQTFLHWVYCMENLDLLGPTDVDALMSMLRSLSRVDLQRQVQTLMGLHLSGPSHSQHYRHTP

SEQ ID NO: 6766 - protein, 1484 aa, Artificial Sequence
  Synthetic Polypeptide
MALPVTALLLPLALLLHAARPDIQMTQSPSSLSASVGDRVTITCKASDHINNWLAWYQQKPGQAPKLLIYGATTLETGVPSRFSGSGSGTDYTLTISSLQPEDFATYYCQQSWNTPWTFGQGTKLEIKRLEGQPKANPTVTLFPPSSEELQANKATLVCLISDFYPGAVTVAWKADGSPVKAGVETTKPSKQSNNKYAASSYLSLTPEQWKSHRSYSCQVTHEGSTVEKTVAPTECSGSLQDPCSNCPAGTFCDNNRNQICSPCPPNSFSSAGGQRTCDICRQCKGVFRTRKECSSTSNAECDCTPGFHCLGAGCSMCEQDCKQGQELTKKGCKDCCFGTFNDQKRGICRPWTNCSLDGKSVLVNGTKERDVVCGPSPADLSPGASSVTPPAPAREPGHSPQIISFFLALTSTALLFLLFFLTLRFSVVKRGRKKLLYIFKQPFMRPVQTTQEEDGCSCRFPEEEEGGCELSTSRVKFSRSADAPAYQQGQNQLYNELNLGRREEYDVLDKRRGRDPEMGGKPQRRKNPQEGLYNELQKDKMAEAYSEIGMKGERRRGKGHDGLYQGLSTATKDTYDALHMQALPPRRAKRSGSGATNFSLLKQAGDVEENPGPMDWIWRILFLVGAATGAHSFEQVQLQQPGAELVKPGASVKMSCKASGYAFSSYWINWMKQKPGQGLEWIGQIYPGDGDTNYNGKFKGRATLTADTSSSTAYMQLSSLTSEDSAVYFCARSITTVVGCAMDYWGQGTSVTVSSTRASTKGPSVFPLAPSSKSTSGGTAALGCLVKDYFPEPVTVSWNSGALTSGVHTFPAVLQSSGLYSLSSVVTVPSSSLGTQTYICNVNHKPSNTKVDKRVEPKSCGTLQDPCSNCPAGTFCDNNRNQICSPCPPNSFSSAGGQRTCDICRQCKGVFRTRKECSSTSNAECDCTPGFHCLGAGCSMCEQDCKQGQELTKKGCKDCCFGTFNDQKRGICRPWTNCSLDGKSVLVNGTKERDVVCGPSPADLSPGASSVTPPAPAREPGHSPQIISFFLALTSTALLFLLFFLTLRFSVVKRGRKKLLYIFKQPFMRPVQTTQEEDGCSCRFPEEEEGGCELSSRRVKFSRSADAPAYQQGQNQLYNELNLGRREEYDVLDKRRGRDPEMGGKPQRRKNPQEGLYNELQKDKMAEAYSEIGMKGERRRGKGHDGLYQGLSTATKDTYDALHMQALPPRRAKRSGSGVKQTLNFDLLKLAGDVESNPGPGHMSDSKEVPSLPFLRHLLEELDSHEDSLLLFLCHDAAPGCTTVTQALCSLSQQRKLTLAALVEMLYVLQRMDLLKSRFGLSKEGAEQLLGTSFLTRYRKLMVCVGEELDSSELRALRLFACNLNPSLSTALSESSRFVELVLALENVGLVSPSSVSVLADMLRTLRRLDLCQQLVEYEQQEQARYRYCYAASPSLPVRTLRRGHGASEHEQLCMPVQESSDSPELLRTPVQESSSDSPEQTT

SEQ ID NO: 6767 - protein, 1442 aa, Artificial Sequence
  Synthetic Polypeptide
MALPVTALLLPLALLLHAARPDIQMTQSPSSLSASVGDRVTITCKASDHINNWLAWYQQKPGQAPKLLIYGATTLETGVPSRFSGSGSGTDYTLTISSLQPEDFATYYCQQSWNTPWTFGQGTKLEIKRLEGQPKANPTVTLFPPSSEELQANKATLVCLISDFYPGAVTVAWKADGSPVKAGVETTKPSKQSNNKYAASSYLSLTPEQWKSHRSYSCQVTHEGSTVEKTVAPTECSGSLQDPCSNCPAGTFCDNNRNQICSPCPPNSFSSAGGQRTCDICRQCKGVFRTRKECSSTSNAECDCTPGFHCLGAGCSMCEQDCKQGQELTKKGCKDCCFGTFNDQKRGICRPWTNCSLDGKSVLVNGTKERDVVCGPSPADLSPGASSVTPPAPAREPGHSPQIISFFLALTSTALLFLLFFLTLRFSVVKRGRKKLLYIFKQPFMRPVQTTQEEDGCSCRFPEEEEGGCELSTSRVKFSRSADAPAYQQGQNQLYNELNLGRREEYDVLDKRRGRDPEMGGKPQRRKNPQEGLYNELQKDKMAEAYSEIGMKGERRRGKGHDGLYQGLSTATKDTYDALHMQALPPRRAKRSGSGATNFSLLKQAGDVEENPGPMDWIWRILFLVGAATGAHSFEQVQLQQPGAELVKPGASVKMSCKASGYAFSSYWINWMKQKPGQGLEWIGQIYPGDGDTNYNGKFKGRATLTADTSSSTAYMQLSSLTSEDSAVYFCARSITTVVGCAMDYWGQGTSVTVSSTRASTKGPSVFPLAPSSKSTSGGTAALGCLVKDYFPEPVTVSWNSGALTSGVHTFPAVLQSSGLYSLSSVVTVPSSSLGTQTYICNVNHKPSNTKVDKRVEPKSCGTLQDPCSNCPAGTFCDNNRNQICSPCPPNSFSSAGGQRTCDICRQCKGVFRTRKECSSTSNAECDCTPGFHCLGAGCSMCEQDCKQGQELTKKGCKDCCFGTFNDQKRGICRPWTNCSLDGKSVLVNGTKERDVVCGPSPADLSPGASSVTPPAPAREPGHSPQIISFFLALTSTALLFLLFFLTLRFSVVKRGRKKLLYIFKQPFMRPVQTTQEEDGCSCRFPEEEEGGCELSSRRVKFSRSADAPAYQQGQNQLYNELNLGRREEYDVLDKRRGRDPEMGGKPQRRKNPQEGLYNELQKDKMAEAYSEIGMKGERRRGKGHDGLYQGLSTATKDTYDALHMQALPPRRAKRSGSGVKQTLNFDLLKLAGDVESNPGPGHMTEYKPTVRLATRDDVPRAVRTLAAAFADYPATRHTVDPDRHIERVTELQELFLTRVGLDIGKVWVADDGAAVAVWTTPESVEAGAVFAEIGPRMAELSGSRLAAQQQMEGLLAPHRPKEPAWFLATVGVSPDHQGKGLGSAVVLPGVEAAERAGVPAFLETSAPRNLPFYERLGFTVTADVEVPEGPRTWCMTRKPGA

SEQ ID NO: 6768 - protein, 1579 aa, Artificial Sequence
  Synthetic Polypeptide
MALPVTALLLPLALLLHAARPEVQLVESGGGLVQAGGSLRLSCAASGRTFSMGWFRQAPGKEREFVAAITYSGGSPYYADSVKGRFTISRDNAKNTVYLQMNSLKPEDTAVYYCAANPTYGSDWNAENWGQGTQVTVSSGTGGGGSGGGGSGGGGSEFDIQMTQSPSSLSASVGDRVTITCKASDHINNWLAWYQQKPGQAPKLLIYGATTLETGVPSRFSGSGSGTDYTLTISSLQPEDFATYYCQQSWNTPWTFGQGTKLEIKRLEGQPKANPTVTLFPPSSEELQANKATLVCLISDFYPGAVTVAWKADGSPVKAGVETTKPSKQSNNKYAASSYLSLTPEQWKSHRSYSCQVTHEGSTVEKTVAPTECSGSLQDPCSNCPAGTFCDNNRNQICSPCPPNSFSSAGGQRTCDICRQCKGVFRTRKECSSTSNAECDCTPGFHCLGAGCSMCEQDCKQGQELTKKGCKDCCFGTFNDQKRGICRPWTNCSLDGKSVLVNGTKERDVVCGPSPADLSPGASSVTPPAPAREPGHSPQIISFFLALTSTALLFLLFFLTLRFSVVKRGRKKLLYIFKQPFMRPVQTTQEEDGCSCRFPEEEEGGCELSTSRVKFSRSADAPAYQQGQNQLYNELNLGRREEYDVLDKRRGRDPEMGGKPQRRKNPQEGLYNELQKDKMAEAYSEIGMKGERRRGKGHDGLYQGLSTATKDTYDALHMQALPPRRAKRSGSGATNFSLLKQAGDVEENPGPMDWIWRILFLVGAATGAHSFEQVQLQQPGAELVKPGASVKMSCKASGYAFSSYWINWMKQKPGQGLEWIGQIYPGDGDTNYNGKFKGRATLTADTSSSTAYMQLSSLTSEDSAVYFCARSITTVVGCAMDYWGQGTSVTVSSTRASTKGPSVFPLAPSSKSTSGGTAALGCLVKDYFPEPVTVSWNSGALTSGVHTFPAVLQSSGLYSLSSVVTVPSSSLGTQTYICNVNHKPSNTKVDKRVEPKSCGTLQDPCSNCPAGTFCDNNRNQICSPCPPNSFSSAGGQRTCDICRQCKGVFRTRKECSSTSNAECDCTPGFHCLGAGCSMCEQDCKQGQELTKKGCKDCCFGTFNDQKRGICRPWTNCSLDGKSVLVNGTKERDVVCGPSPADLSPGASSVTPPAPAREPGHSPQIISFFLALTSTALLFLLFFLTLRFSVVKRGRKKLLYIFKQPFMRPVQTTQEEDGCSCRFPEEEEGGCELSSRRVKFSRSADAPAYQQGQNQLYNELNLGRREEYDVLDKRRGRDPEMGGKPQRRKNPQEGLYNELQKDKMAEAYSEIGMKGERRRGKGHDGLYQGLSTATKDTYDALHMQALPPRRAKRSGSGVKQTLNFDLLKLAGDVESNPGPGHMTEYKPTVRLATRDDVPRAVRTLAAAFADYPATRHTVDPDRHIERVTELQELFLTRVGLDIGKVWVADDGAAVAVWTTPESVEAGAVFAEIGPRMAELSGSRLAAQQQMEGLLAPHRPKEPAWFLATVGVSPDHQGKGLGSAVVLPGVEAAERAGVPAFLETSAPRNLPFYERLGFTVTADVEVPEGPRTWCMTRKPGA

SEQ ID NO: 6769 - protein, 1716 aa, Artificial Sequence
  Synthetic Polypeptide
MALPVTALLLPLALLLHAARPEVQLVESGGGLVQAGGSLRLSCAASGRTFSMGWFRQAPGKEREFVAAITYSGGSPYYADSVKGRFTISRDNAKNTVYLQMNSLKPEDTAVYYCAANPTYGSDWNAENWGQGTQVTVSSGTGGGGSGGGGSGGGGSEFDIQMTQSPSSLSASVGDRVTITCKASDHINNWLAWYQQKPGQAPKLLIYGATTLETGVPSRFSGSGSGTDYTLTISSLQPEDFATYYCQQSWNTPWTFGQGTKLEIKRLEGQPKANPTVTLFPPSSEELQANKATLVCLISDFYPGAVTVAWKADGSPVKAGVETTKPSKQSNNKYAASSYLSLTPEQWKSHRSYSCQVTHEGSTVEKTVAPTECSGSLQDPCSNCPAGTFCDNNRNQICSPCPPNSFSSAGGQRTCDICRQCKGVFRTRKECSSTSNAECDCTPGFHCLGAGCSMCEQDCKQGQELTKKGCKDCCFGTFNDQKRGICRPWTNCSLDGKSVLVNGTKERDVVCGPSPADLSPGASSVTPPAPAREPGHSPQIISFFLALTSTALLFLLFFLTLRFSVVKRGRKKLLYIFKQPFMRPVQTTQEEDGCSCRFPEEEEGGCELSTSRVKFSRSADAPAYQQGQNQLYNELNLGRREEYDVLDKRRGRDPEMGGKPQRRKNPQEGLYNELQKDKMAEAYSEIGMKGERRRGKGHDGLYQGLSTATKDTYDALHMQALPPRRAKRSGSGATNFSLLKQAGDVEENPGPMDWIWRILFLVGAATGAHSGPEVQLVESGGGLVQAGGSLRLSCAASGRTFTMGWFRQAPGKEREFVAAISLSPTLAYYADSVKGRFTISRDNAKNTVVLQMNSLKPEDTALYYCAADRKSVMSIRPDYWGQGTQVTVSSGSGGGGSGGGGSGGGGSFEQVQLQQPGAELVKPGASVKMSCKASGYAFSSYWINWMKQKPGQGLEWIGQIYPGDGDTNYNGKFKGRATLTADTSSSTAYMQLSSLTSEDSAVYFCARSITTVVGCAMDYWGQGTSVTVSSTRASTKGPSVFPLAPSSKSTSGGTAALGCLVKDYFPEPVTVSWNSGALTSGVHTFPAVLQSSGLYSLSSVVTVPSSSLGTQTYICNVNHKPSNTKVDKRVEPKSCGTLQDPCSNCPAGTFCDNNRNQICSPCPPNSFSSAGGQRTCDICRQCKGVFRTRKECSSTSNAECDCTPGFHCLGAGCSMCEQDCKQGQELTKKGCKDCCFGTFNDQKRGICRPWTNCSLDGKSVLVNGTKERDVVCGPSPADLSPGASSVTPPAPAREPGHSPQIISFFLALTSTALLFLLFFLTLRFSVVKRGRKKLLYIFKQPFMRPVQTTQEEDGCSCRFPEEEEGGCELSSRRVKFSRSADAPAYQQGQNQLYNELNLGRREEYDVLDKRRGRDPEMGGKPQRRKNPQEGLYNELQKDKMAEAYSEIGMKGERRRGKGHDGLYQGLSTATKDTYDALHMQALPPRRAKRSGSGVKQTLNFDLLKLAGDVESNPGPGHMTEYKPTVRLATRDDVPRAVRTLAAAFADYPATRHTVDPDRHIERVTELQELFLTRVGLDIGKVWVADDGAAVAVWTTPESVEAGAVFAEIGPRMAELSGSRLAAQQQMEGLLAPHRPKEPAWFLATVGVSPDHQGKGLGSAVVLPGVEAAERAGVPAFLETSAPRNLPFYERLGFTVTADVEVPEGPRTWCMTRKPGA

SEQ ID NO: 6770 - protein, 1449 aa, Artificial Sequence
  Synthetic Polypeptide
MALPVTALLLPLALLLHAARPEVQLVESGGGLVQAGGSLRLSCAASGRTFSMGWFRQAPGKEREFVAAITYSGGSPYYADSVKGRFTISRDNAKNTVYLQMNSLKPEDTAVYYCAANPTYGSDWNAENWGQGTQVTVSSLEGQPKANPTVTLFPPSSEELQANKATLVCLISDFYPGAVTVAWKADGSPVKAGVETTKPSKQSNNKYAASSYLSLTPEQWKSHRSYSCQVTHEGSTVEKTVAPTECSGSLQDPCSNCPAGTFCDNNRNQICSPCPPNSFSSAGGQRTCDICRQCKGVFRTRKECSSTSNAECDCTPGFHCLGAGCSMCEQDCKQGQELTKKGCKDCCFGTFNDQKRGICRPWTNCSLDGKSVLVNGTKERDVVCGPSPADLSPGASSVTPPAPAREPGHSPQIISFFLALTSTALLFLLFFLTLRFSVVKRGRKKLLYIFKQPFMRPVQTTQEEDGCSCRFPEEEEGGCELSTSRVKFSRSADAPAYQQGQNQLYNELNLGRREEYDVLDKRRGRDPEMGGKPQRRKNPQEGLYNELQKDKMAEAYSEIGMKGERRRGKGHDGLYQGLSTATKDTYDALHMQALPPRRAKRSGSGATNFSLLKQAGDVEENPGPMDWIWRILFLVGAATGAHSGPEVQLVESGGGLVQAGGSLRLSCAASGRTFTMGWFRQAPGKEREFVAAISLSPTLAYYADSVKGRFTISRDNAKNTVVLQMNSLKPEDTALYYCAADRKSVMSIRPDYWGQGTQVTVSSTRASTKGPSVFPLAPSSKSTSGGTAALGCLVKDYFPEPVTVSWNSGALTSGVHTFPAVLQSSGLYSLSSVVTVPSSSLGTQTYICNVNHKPSNTKVDKRVEPKSCGTLQDPCSNCPAGTFCDNNRNQICSPCPPNSFSSAGGQRTCDICRQCKGVFRTRKECSSTSNAECDCTPGFHCLGAGCSMCEQDCKQGQELTKKGCKDCCFGTFNDQKRGICRPWTNCSLDGKSVLVNGTKERDVVCGPSPADLSPGASSVTPPAPAREPGHSPQIISFFLALTSTALLFLLFFLTLRFSVVKRGRKKLLYIFKQPFMRPVQTTQEEDGCSCRFPEEEEGGCELSSRRVKFSRSADAPAYQQGQNQLYNELNLGRREEYDVLDKRRGRDPEMGGKPQRRKNPQEGLYNELQKDKMAEAYSEIGMKGERRRGKGHDGLYQGLSTATKDTYDALHMQALPPRRAKRSGSGVKQTLNFDLLKLAGDVESNPGPGHMTEYKPTVRLATRDDVPRAVRTLAAAFADYPATRHTVDPDRHIERVTELQELFLTRVGLDIGKVWVADDGAAVAVWTTPESVEAGAVFAEIGPRMAELSGSRLAAQQQMEGLLAPHRPKEPAWFLATVGVSPDHQGKGLGSAVVLPGVEAAERAGVPAFLETSAPRNLPFYERLGFTVTADVEVPEGPRTWCMTRKPGA

SEQ ID NO: 6771 - protein, 1457 aa, Artificial Sequence
  Synthetic Polypeptide
MALPVTALLLPLALLLHAARPDIQMTQSPSSLSASVGDRVTITCKASDHINNWLAWYQQKPGQAPKLLIYGATTLETGVPSRFSGSGSGTDYTLTISSLQPEDFATYYCQQSWNTPWTFGQGTKLEIKRLEDLKNVFPPEVAVFEPSEAEISHTQKATLVCLATGFYPDHVELSWWVNGKEVHSGVSTDPQPLKEQPALNDSRYCLSSRLRVSATFWQNPRNHFRCQVQFYGLSENDEWTQDRAKPVTQIVSAEAWGRADCGSLQDPCSNCPAGTFCDNNRNQICSPCPPNSFSSAGGQRTCDICRQCKGVFRTRKECSSTSNAECDCTPGFHCLGAGCSMCEQDCKQGQELTKKGCKDCCFGTFNDQKRGICRPWTNCSLDGKSVLVNGTKERDVVCGPSPADLSPGASSVTPPAPAREPGHSPQIISFFLALTSTALLFLLFFLTLRFSVVKRGRKKLLYIFKQPFMRPVQTTQEEDGCSCRFPEEEEGGCELSTSRVKFSRSADAPAYQQGQNQLYNELNLGRREEYDVLDKRRGRDPEMGGKPQRRKNPQEGLYNELQKDKMAEAYSEIGMKGERRRGKGHDGLYQGLSTATKDTYDALHMQALPPRRAKRSGSGATNFSLLKQAGDVEENPGPMDWIWRILFLVGAATGAHSFEQVQLQQPGAELVKPGASVKMSCKASGYAFSSYWINWMKQKPGQGLEWIGQIYPGDGDTNYNGKFKGRATLTADTSSSTAYMQLSSLTSEDSAVYFCARSITTVVGCAMDYWGQGTSVTVSSTRIQNPDPAVYQLRDSKSSDKSVCLFTDFDSQTNVSQSKDSDVYITDKTVLDMRSMDFKSNSAVAWSNKSDFACANAFNNSIIPEDTFFPSPESSCGTLQDPCSNCPAGTFCDNNRNQICSPCPPNSFSSAGGQRTCDICRQCKGVFRTRKECSSTSNAECDCTPGFHCLGAGCSMCEQDCKQGQELTKKGCKDCCFGTFNDQKRGICRPWTNCSLDGKSVLVNGTKERDVVCGPSPADLSPGASSVTPPAPAREPGHSPQIISFFLALTSTALLFLLFFLTLRFSVVKRGRKKLLYIFKQPFMRPVQTTQEEDGCSCRFPEEEEGGCELSSRRVKFSRSADAPAYQQGQNQLYNELNLGRREEYDVLDKRRGRDPEMGGKPQRRKNPQEGLYNELQKDKMAEAYSEIGMKGERRRGKGHDGLYQGLSTATKDTYDALHMQALPPRRAKRSGSGVKQTLNFDLLKLAGDVESNPGPGHMTEYKPTVRLATRDDVPRAVRTLAAAFADYPATRHTVDPDRHIERVTELQELFLTRVGLDIGKVWVADDGAAVAVWTTPESVEAGAVFAEIGPRMAELSGSRLAAQQQMEGLLAPHRPKEPAWFLATVGVSPDHQGKGLGSAVVLPGVEAAERAGVPAFLETSAPRNLPFYERLGFTVTADVEVPEGPRTWCMTRKPGA

SEQ ID NO: 6772 - protein, 1594 aa, Artificial Sequence
  Synthetic Polypeptide
MALPVTALLLPLALLLHAARPEVQLVESGGGLVQAGGSLRLSCAASGRTFSMGWFRQAPGKEREFVAAITYSGGSPYYADSVKGRFTISRDNAKNTVYLQMNSLKPEDTAVYYCAANPTYGSDWNAENWGQGTQVTVSSGTGGGGSGGGGSGGGGSEFDIQMTQSPSSLSASVGDRVTITCKASDHINNWLAWYQQKPGQAPKLLIYGATTLETGVPSRFSGSGSGTDYTLTISSLQPEDFATYYCQQSWNTPWTFGQGTKLEIKRLEDLKNVFPPEVAVFEPSEAEISHTQKATLVCLATGFYPDHVELSWWVNGKEVHSGVSTDPQPLKEQPALNDSRYCLSSRLRVSATFWQNPRNHFRCQVQFYGLSENDEWTQDRAKPVTQIVSAEAWGRADCGSLQDPCSNCPAGTFCDNNRNQICSPCPPNSFSSAGGQRTCDICRQCKGVFRTRKECSSTSNAECDCTPGFHCLGAGCSMCEQDCKQGQELTKKGCKDCCFGTFNDQKRGICRPWTNCSLDGKSVLVNGTKERDVVCGPSPADLSPGASSVTPPAPAREPGHSPQIISFFLALTSTALLFLLFFLTLRFSVVKRGRKKLLYIFKQPFMRPVQTTQEEDGCSCRFPEEEEGGCELSTSRVKFSRSADAPAYQQGQNQLYNELNLGRREEYDVLDKRRGRDPEMGGKPQRRKNPQEGLYNELQKDKMAEAYSEIGMKGERRRGKGHDGLYQGLSTATKDTYDALHMQALPPRRAKRSGSGATNFSLLKQAGDVEENPGPMDWIWRILFLVGAATGAHSFEQVQLQQPGAELVKPGASVKMSCKASGYAFSSYWINWMKQKPGQGLEWIGQIYPGDGDTNYNGKFKGRATLTADTSSSTAYMQLSSLTSEDSAVYFCARSITTVVGCAMDYWGQGTSVTVSSTRIQNPDPAVYQLRDSKSSDKSVCLFTDFDSQTNVSQSKDSDVYITDKTVLDMRSMDFKSNSAVAWSNKSDFACANAFNNSIIPEDTFFPSPESSCGTLQDPCSNCPAGTFCDNNRNQICSPCPPNSFSSAGGQRTCDICRQCKGVFRTRKECSSTSNAECDCTPGFHCLGAGCSMCEQDCKQGQELTKKGCKDCCFGTFNDQKRGICRPWTNCSLDGKSVLVNGTKERDVVCGPSPADLSPGASSVTPPAPAREPGHSPQIISFFLALTSTALLFLLFFLTLRFSVVKRGRKKLLYIFKQPFMRPVQTTQEEDGCSCRFPEEEEGGCELSSRRVKFSRSADAPAYQQGQNQLYNELNLGRREEYDVLDKRRGRDPEMGGKPQRRKNPQEGLYNELQKDKMAEAYSEIGMKGERRRGKGHDGLYQGLSTATKDTYDALHMQALPPRRAKRSGSGVKQTLNFDLLKLAGDVESNPGPGHMTEYKPTVRLATRDDVPRAVRTLAAAFADYPATRHTVDPDRHIERVTELQELFLTRVGLDIGKVWVADDGAAVAVWTTPESVEAGAVFAEIGPRMAELSGSRLAAQQQMEGLLAPHRPKEPAWFLATVGVSPDHQGKGLGSAVVLPGVEAAERAGVPAFLETSAPRNLPFYERLGFTVTADVEVPEGPRTWCMTRKPGA

SEQ ID NO: 6773 - protein, 1731 aa, Artificial Sequence
  Synthetic Polypeptide
MALPVTALLLPLALLLHAARPEVQLVESGGGLVQAGGSLRLSCAASGRTFSMGWFRQAPGKEREFVAAITYSGGSPYYADSVKGRFTISRDNAKNTVYLQMNSLKPEDTAVYYCAANPTYGSDWNAENWGQGTQVTVSSGTGGGGSGGGGSGGGGSEFDIQMTQSPSSLSASVGDRVTITCKASDHINNWLAWYQQKPGQAPKLLIYGATTLETGVPSRFSGSGSGTDYTLTISSLQPEDFATYYCQQSWNTPWTFGQGTKLEIKRLEDLKNVFPPEVAVFEPSEAEISHTQKATLVCLATGFYPDHVELSWWVNGKEVHSGVSTDPQPLKEQPALNDSRYCLSSRLRVSATFWQNPRNHFRCQVQFYGLSENDEWTQDRAKPVTQIVSAEAWGRADCGSLQDPCSNCPAGTFCDNNRNQICSPCPPNSFSSAGGQRTCDICRQCKGVFRTRKECSSTSNAECDCTPGFHCLGAGCSMCEQDCKQGQELTKKGCKDCCFGTFNDQKRGICRPWTNCSLDGKSVLVNGTKERDVVCGPSPADLSPGASSVTPPAPAREPGHSPQIISFFLALTSTALLFLLFFLTLRFSVVKRGRKKLLYIFKQPFMRPVQTTQEEDGCSCRFPEEEEGGCELSTSRVKFSRSADAPAYQQGQNQLYNELNLGRREEYDVLDKRRGRDPEMGGKPQRRKNPQEGLYNELQKDKMAEAYSEIGMKGERRRGKGHDGLYQGLSTATKDTYDALHMQALPPRRAKRSGSGATNFSLLKQAGDVEENPGPMDWIWRILFLVGAATGAHSGPEVQLVESGGGLVQAGGSLRLSCAASGRTFTMGWFRQAPGKEREFVAAISLSPTLAYYADSVKGRFTISRDNAKNTVVLQMNSLKPEDTALYYCAADRKSVMSIRPDYWGQGTQVTVSSGSGGGGSGGGGSGGGGSFEQVQLQQPGAELVKPGASVKMSCKASGYAFSSYWINWMKQKPGQGLEWIGQIYPGDGDTNYNGKFKGRATLTADTSSSTAYMQLSSLTSEDSAVYFCARSITTVVGCAMDYWGQGTSVTVSSTRIQNPDPAVYQLRDSKSSDKSVCLFTDFDSQTNVSQSKDSDVYITDKTVLDMRSMDFKSNSAVAWSNKSDFACANAFNNSIIPEDTFFPSPESSCGTLQDPCSNCPAGTFCDNNRNQICSPCPPNSFSSAGGQRTCDICRQCKGVFRTRKECSSTSNAECDCTPGFHCLGAGCSMCEQDCKQGQELTKKGCKDCCFGTFNDQKRGICRPWTNCSLDGKSVLVNGTKERDVVCGPSPADLSPGASSVTPPAPAREPGHSPQIISFFLALTSTALLFLLFFLTLRFSVVKRGRKKLLYIFKQPFMRPVQTTQEEDGCSCRFPEEEEGGCELSSRRVKFSRSADAPAYQQGQNQLYNELNLGRREEYDVLDKRRGRDPEMGGKPQRRKNPQEGLYNELQKDKMAEAYSEIGMKGERRRGKGHDGLYQGLSTATKDTYDALHMQALPPRRAKRSGSGVKQTLNFDLLKLAGDVESNPGPGHMTEYKPTVRLATRDDVPRAVRTLAAAFADYPATRHTVDPDRHIERVTELQELFLTRVGLDIGKVWVADDGAAVAVWTTPESVEAGAVFAEIGPRMAELSGSRLAAQQQMEGLLAPHRPKEPAWFLATVGVSPDHQGKGLGSAVVLPGVEAAERAGVPAFLETSAPRNLPFYERLGFTVTADVEVPEGPRTWCMTRKPGA

SEQ ID NO: 6774 - protein, 1464 aa, Artificial Sequence
  Synthetic Polypeptide
MALPVTALLLPLALLLHAARPEVQLVESGGGLVQAGGSLRLSCAASGRTFSMGWFRQAPGKEREFVAAITYSGGSPYYADSVKGRFTISRDNAKNTVYLQMNSLKPEDTAVYYCAANPTYGSDWNAENWGQGTQVTVSSLEDLKNVFPPEVAVFEPSEAEISHTQKATLVCLATGFYPDHVELSWWVNGKEVHSGVSTDPQPLKEQPALNDSRYCLSSRLRVSATFWQNPRNHFRCQVQFYGLSENDEWTQDRAKPVTQIVSAEAWGRADCGSLQDPCSNCPAGTFCDNNRNQICSPCPPNSFSSAGGQRTCDICRQCKGVFRTRKECSSTSNAECDCTPGFHCLGAGCSMCEQDCKQGQELTKKGCKDCCFGTFNDQKRGICRPWTNCSLDGKSVLVNGTKERDVVCGPSPADLSPGASSVTPPAPAREPGHSPQIISFFLALTSTALLFLLFFLTLRFSVVKRGRKKLLYIFKQPFMRPVQTTQEEDGCSCRFPEEEEGGCELSTSRVKFSRSADAPAYQQGQNQLYNELNLGRREEYDVLDKRRGRDPEMGGKPQRRKNPQEGLYNELQKDKMAEAYSEIGMKGERRRGKGHDGLYQGLSTATKDTYDALHMQALPPRRAKRSGSGATNFSLLKQAGDVEENPGPMDWIWRILFLVGAATGAHSGPEVQLVESGGGLVQAGGSLRLSCAASGRTFTMGWFRQAPGKEREFVAAISLSPTLAYYADSVKGRFTISRDNAKNTVVLQMNSLKPEDTALYYCAADRKSVMSIRPDYWGQGTQVTVSSTRIQNPDPAVYQLRDSKSSDKSVCLFTDFDSQTNVSQSKDSDVYITDKTVLDMRSMDFKSNSAVAWSNKSDFACANAFNNSIIPEDTFFPSPESSCGTLQDPCSNCPAGTFCDNNRNQICSPCPPNSFSSAGGQRTCDICRQCKGVFRTRKECSSTSNAECDCTPGFHCLGAGCSMCEQDCKQGQELTKKGCKDCCFGTFNDQKRGICRPWTNCSLDGKSVLVNGTKERDVVCGPSPADLSPGASSVTPPAPAREPGHSPQIISFFLALTSTALLFLLFFLTLRFSVVKRGRKKLLYIFKQPFMRPVQTTQEEDGCSCRFPEEEEGGCELSSRRVKFSRSADAPAYQQGQNQLYNELNLGRREEYDVLDKRRGRDPEMGGKPQRRKNPQEGLYNELQKDKMAEAYSEIGMKGERRRGKGHDGLYQGLSTATKDTYDALHMQALPPRRAKRSGSGVKQTLNFDLLKLAGDVESNPGPGHMTEYKPTVRLATRDDVPRAVRTLAAAFADYPATRHTVDPDRHIERVTELQELFLTRVGLDIGKVWVADDGAAVAVWTTPESVEAGAVFAEIGPRMAELSGSRLAAQQQMEGLLAPHRPKEPAWFLATVGVSPDHQGKGLGSAVVLPGVEAAERAGVPAFLETSAPRNLPFYERLGFTVTADVEVPEGPRTWCMTRKPGA

SEQ ID NO: 6775 - protein, 743 aa, Artificial Sequence
  Synthetic Polypeptide
MALPVTALLLPLALLLHAARPACEVQLLESGGGLIQPGGSLRLSCAASGFTFSSHAMTWVRQAPGKGLEWVSAISGSGDYTHYADSVKGRFTISRDNSKNTVYLQMNSLRAEDSAVYYCAKDEDGGSLLGHRGQGTLVTVSSGTGGGGSGGGGSGGGGSEFGSLELQDPCSNCPAGTFCDNNRNQICSPCPPNSFSSAGGQRTCDICRQCKGVFRTRKECSSTSNAECDCTPGFHCLGAGCSMCEQDCKQGQELTKKGCKDCCFGTFNDQKRGICRPWTNCSLDGKSVLVNGTKERDVVCGPSPADLSPGASSVTPPAPAREPGHSPQIISFFLALTSTALLFLLFFLTLRFSVVKRGRKKLLYIFKQPFMRPVQTTQEEDGCSCRFPEEEEGGCELSTSRVKFSRSADAPAYQQGQNQLYNELNLGRREEYDVLDKRRGRDPEMGGKPQRRKNPQEGLYNELQKDKMAEAYSEIGMKGERRRGKGHDGLYQGLSTATKDTYDALHMQALPPRRAKRSGSGATNFSLLKQAGDVEENPGPTRGHMTEYKPTVRLATRDDVPRAVRTLAAAFADYPATRHTVDPDRHIERVTELQELFLTRVGLDIGKVWVADDGAAVAVWTTPESVEAGAVFAEIGPRMAELSGSRLAAQQQMEGLLAPHRPKEPAWFLATVGVSPDHQGKGLGSAVVLPGVEAAERAGVPAFLETSAPRNLPFYERLGFTVTADVEVPEGPRTWCMTRKPGA

SEQ ID NO: 6776 - protein, 615 aa, Artificial Sequence
  Synthetic Polypeptide
MALPVTALLLPLALLLHAARPDIQMTQSPSSLSASVGDRVTITCKASDHINNWLAWYQQKPGQAPKLLIYGATTLETGVPSRFSGSGSGTDYTLTISSLQPEDFATYYCQQSWNTPWTFGQGTKLEIKRGGGGSGGGGSGGGGSQVQLQQPGAELVKPGASVKMSCKASGYAFSSYWINWMKQKPGQGLEWIGQIYPGDGDTNYNGKFKGRATLTADTSSSTAYMQLSSLTSEDSAVYFCARSITTVVGCAMDYWGQGTSVTVSSTRLQDPCSNCPAGTFCDNNRNQICSPCPPNSFSSAGGQRTCDICRQCKGVFRTRKECSSTSNAECDCTPGFHCLGAGCSMCEQDCKQGQELTKKGCKDCCFGTFNDQKRGICRPWTNCSLDGKSVLVNGTKERDVVCGPSPADLSPGASSVTPPAPAREPGHSPQIISFFLALTSTALLFLLFFLTLRFSVVKRGRKKLLYIFKQPFMRPVQTTQEEDGCSCRFPEEEEGGCELSTSRVKFSRSADAPAYQQGQNQLYNELNLGRREEYDVLDKRRGRDPEMGGKPQRRKNPQEGLYNELQKDKMAEAYSEIGMKGERRRGKGHDGLYQGLSTATKDTYDALHMQALPPR

SEQ ID NO: 6777 - protein, 615 aa, Artificial Sequence
  Synthetic Polypeptide
MALPVTALLLPLALLLHAARPEIVLTQSPATLSLSPGERATLSCRASQSVSSYLAWYQQKPGQAPRLLIYDASNRATGIPARFSGSGSGTDFTLTISSLEPEDFAVYYCQQRSNWPITFGQGTRLEIKGGGGSGGGGSGGGGSEVQLVESGGGLVQPGRSLRLSCAASGFTFNDYAMHWVRQAPGKGLEWVSTISWNSGSIGYADSVKGRFTISRDNAKKSLYLQMNSLRAEDTALYYCAKDIQYGNYYYGMDVWGQGTTVTVSSTRLQDPCSNCPAGTFCDNNRNQICSPCPPNSFSSAGGQRTCDICRQCKGVFRTRKECSSTSNAECDCTPGFHCLGAGCSMCEQDCKQGQELTKKGCKDCCFGTFNDQKRGICRPWTNCSLDGKSVLVNGTKERDVVCGPSPADLSPGASSVTPPAPAREPGHSPQIISFFLALTSTALLFLLFFLTLRFSVVKRGRKKLLYIFKQPFMRPVQTTQEEDGCSCRFPEEEEGGCELSTSRVKFSRSADAPAYQQGQNQLYNELNLGRREEYDVLDKRRGRDPEMGGKPQRRKNPQEGLYNELQKDKMAEAYSEIGMKGERRRGKGHDGLYQGLSTATKDTYDALHMQALPPR

SEQ ID NO: 6778 - protein, 489 aa, Artificial Sequence
  Synthetic Polypeptide
MALPVTALLLPLALLLHAARPEVQLVESGGGLVQAGGSLRLSCAASGRTFSMGWFRQAPGKEREFVAAITYSGGSPYYADSVKGRFTISRDNAKNTVYLQMNSLKPEDTAVYYCAANPTYGSDWNAENWGQGTQVTVSSTRLQDPCSNCPAGTFCDNNRNQICSPCPPNSFSSAGGQRTCDICRQCKGVFRTRKECSSTSNAECDCTPGFHCLGAGCSMCEQDCKQGQELTKKGCKDCCFGTFNDQKRGICRPWTNCSLDGKSVLVNGTKERDVVCGPSPADLSPGASSVTPPAPAREPGHSPQIISFFLALTSTALLFLLFFLTLRFSVVKRGRKKLLYIFKQPFMRPVQTTQEEDGCSCRFPEEEEGGCELSTSRVKFSRSADAPAYQQGQNQLYNELNLGRREEYDVLDKRRGRDPEMGGKPQRRKNPQEGLYNELQKDKMAEAYSEIGMKGERRRGKGHDGLYQGLSTATKDTYDALHMQALPPR

SEQ ID NO: 6779 - protein, 489 aa, Artificial Sequence
  Synthetic Polypeptide
MALPVTALLLPLALLLHAARPQLQLQESGPGLVKPSETLSLTCTVSGGSISSGDYYWGWIRQPPGKGLEWIGHIYYSGATYYNPSLKSRVTISVDTSRNQFSLKLSSVTAADTAVYYCTRDDSSNWRSRGQGTLVTVSSTRLQDPCSNCPAGTFCDNNRNQICSPCPPNSFSSAGGQRTCDICRQCKGVFRTRKECSSTSNAECDCTPGFHCLGAGCSMCEQDCKQGQELTKKGCKDCCFGTFNDQKRGICRPWTNCSLDGKSVLVNGTKERDVVCGPSPADLSPGASSVTPPAPAREPGHSPQIISFFLALTSTALLFLLFFLTLRFSVVKRGRKKLLYIFKQPFMRPVQTTQEEDGCSCRFPEEEEGGCELSTSRVKFSRSADAPAYQQGQNQLYNELNLGRREEYDVLDKRRGRDPEMGGKPQRRKNPQEGLYNELQKDKMAEAYSEIGMKGERRRGKGHDGLYQGLSTATKDTYDALHMQALPPR

SEQ ID NO: 6780 - protein, 489 aa, Artificial Sequence
  Synthetic Polypeptide
MALPVTALLLPLALLLHAARPQLQLQESGPGLVKPSETLSLTCTVSGDSISSGDYYWGWIRQPPGKGLEWIGHIYYSGVTYYNPSLKSRVTISVDTSRNQFSLKLSSVTAADTAVYYCTREDSSNWRSRGQGTLVTVSSTRLQDPCSNCPAGTFCDNNRNQICSPCPPNSFSSAGGQRTCDICRQCKGVFRTRKECSSTSNAECDCTPGFHCLGAGCSMCEQDCKQGQELTKKGCKDCCFGTFNDQKRGICRPWTNCSLDGKSVLVNGTKERDVVCGPSPADLSPGASSVTPPAPAREPGHSPQIISFFLALTSTALLFLLFFLTLRFSVVKRGRKKLLYIFKQPFMRPVQTTQEEDGCSCRFPEEEEGGCELSTSRVKFSRSADAPAYQQGQNQLYNELNLGRREEYDVLDKRRGRDPEMGGKPQRRKNPQEGLYNELQKDKMAEAYSEIGMKGERRRGKGHDGLYQGLSTATKDTYDALHMQALPPR

SEQ ID NO: 6781 - protein, 491 aa, Artificial Sequence
  Synthetic Polypeptide
MALPVTALLLPLALLLHAARPEVQLQESGGGLVQPGGSLRLSCAASGRTFSSLFMGWFRQAPGKERELVAAISRYSLYTYYADSVKGRFTISADNAKNAVYLQMNSLKPEDTAVYYCASKLEYTSNDYDSWGQGTQVTVSSTRLQDPCSNCPAGTFCDNNRNQICSPCPPNSFSSAGGQRTCDICRQCKGVFRTRKECSSTSNAECDCTPGFHCLGAGCSMCEQDCKQGQELTKKGCKDCCFGTFNDQKRGICRPWTNCSLDGKSVLVNGTKERDVVCGPSPADLSPGASSVTPPAPAREPGHSPQIISFFLALTSTALLFLLFFLTLRFSVVKRGRKKLLYIFKQPFMRPVQTTQEEDGCSCRFPEEEEGGCELSTSRVKFSRSADAPAYQQGQNQLYNELNLGRREEYDVLDKRRGRDPEMGGKPQRRKNPQEGLYNELQKDKMAEAYSEIGMKGERRRGKGHDGLYQGLSTATKDTYDALHMQALPPR

SEQ ID NO: 6782 - protein, 499 aa, Artificial Sequence
  Synthetic Polypeptide
MALPVTALLLPLALLLHAARPEVQLVESGGGLVQPGGSLRLSCAASGFASDYYIIGWFRQAPGKEREGVSCISSRYANTNYADSVKGRFTISRDNAKNTVYLQMNSLKPEDTAVYYCAADTRRYTCPDIATMHRNFDSWGQGTLVTVSSTRLQDPCSNCPAGTFCDNNRNQICSPCPPNSFSSAGGQRTCDICRQCKGVFRTRKECSSTSNAECDCTPGFHCLGAGCSMCEQDCKQGQELTKKGCKDCCFGTFNDQKRGICRPWTNCSLDGKSVLVNGTKERDVVCGPSPADLSPGASSVTPPAPAREPGHSPQIISFFLALTSTALLFLLFFLTLRFSVVKRGRKKLLYIFKQPFMRPVQTTQEEDGCSCRFPEEEEGGCELSTSRVKFSRSADAPAYQQGQNQLYNELNLGRREEYDVLDKRRGRDPEMGGKPQRRKNPQEGLYNELQKDKMAEAYSEIGMKGERRRGKGHDGLYQGLSTATKDTYDALHMQALPPR

SEQ ID NO: 6783 - protein, 495 aa, Artificial Sequence
  Synthetic Polypeptide
MALPVTALLLPLALLLHAARPEVQLVESGGSLVQPGGSLRLSCAASGFTFDDYAMSWVRQVPGKGLEWVSSINWSGTHTDYADSVKGRFTISRNNANNTLYLQMNSLKSEDTAVYYCAKNWRDAGTTWFEKSGSAGQGTQVTVSSTRLQDPCSNCPAGTFCDNNRNQICSPCPPNSFSSAGGQRTCDICRQCKGVFRTRKECSSTSNAECDCTPGFHCLGAGCSMCEQDCKQGQELTKKGCKDCCFGTFNDQKRGICRPWTNCSLDGKSVLVNGTKERDVVCGPSPADLSPGASSVTPPAPAREPGHSPQIISFFLALTSTALLFLLFFLTLRFSVVKRGRKKLLYIFKQPFMRPVQTTQEEDGCSCRFPEEEEGGCELSTSRVKFSRSADAPAYQQGQNQLYNELNLGRREEYDVLDKRRGRDPEMGGKPQRRKNPQEGLYNELQKDKMAEAYSEIGMKGERRRGKGHDGLYQGLSTATKDTYDALHMQALPPR

SEQ ID NO: 6784 - protein, 490 aa, Artificial Sequence
  Synthetic Polypeptide
MALPVTALLLPLALLLHAARPEVQLVESGGGLVQPGGSLRLSCAASGFNIKDTCIGWVRRAPGKEEELVAKICKYSGHTRYADSVKGRFTISADTSKNTAYLQMNSLRAEDTAVYYCAAVSVRDGHYNYWGQGTTVTVSSTRLQDPCSNCPAGTFCDNNRNQICSPCPPNSFSSAGGQRTCDICRQCKGVFRTRKECSSTSNAECDCTPGFHCLGAGCSMCEQDCKQGQELTKKGCKDCCFGTFNDQKRGICRPWTNCSLDGKSVLVNGTKERDVVCGPSPADLSPGASSVTPPAPAREPGHSPQIISFFLALTSTALLFLLFFLTLRFSVVKRGRKKLLYIFKQPFMRPVQTTQEEDGCSCRFPEEEEGGCELSTSRVKFSRSADAPAYQQGQNQLYNELNLGRREEYDVLDKRRGRDPEMGGKPQRRKNPQEGLYNELQKDKMAEAYSEIGMKGERRRGKGHDGLYQGLSTATKDTYDALHMQALPPR

SEQ ID NO: 6785 - protein, 495 aa, Artificial Sequence
  Synthetic Polypeptide
MALPVTALLLPLALLLHAARPGSDLGIKLLFAAAKGQDDEVRILLAAGADVNAKDFEGYTPLHVAAYDGHLEIVEVLLKAGADVNAKDSQGRTPLHEAAYSGHLEIVEVLLKAGADVNAQDDAGETPADLAAAWGHEDIAEVLQKTRLQDPCSNCPAGTFCDNNRNQICSPCPPNSFSSAGGQRTCDICRQCKGVFRTRKECSSTSNAECDCTPGFHCLGAGCSMCEQDCKQGQELTKKGCKDCCFGTFNDQKRGICRPWTNCSLDGKSVLVNGTKERDVVCGPSPADLSPGASSVTPPAPAREPGHSPQIISFFLALTSTALLFLLFFLTLRFSVVKRGRKKLLYIFKQPFMRPVQTTQEEDGCSCRFPEEEEGGCELSTSRVKFSRSADAPAYQQGQNQLYNELNLGRREEYDVLDKRRGRDPEMGGKPQRRKNPQEGLYNELQKDKMAEAYSEIGMKGERRRGKGHDGLYQGLSTATKDTYDALHMQALPPR

SEQ ID NO: 6786 - protein, 429 aa, Artificial Sequence
  Synthetic Polypeptide
MALPVTALLLPLALLLHAARPVDNKFNKERYSAYYEIWQLPNLNVRQKAAFIGSLQDDPSQSANLLAEAKKLNDAQAPKTRLQDPCSNCPAGTFCDNNRNQICSPCPPNSFSSAGGQRTCDICRQCKGVFRTRKECSSTSNAECDCTPGFHCLGAGCSMCEQDCKQGQELTKKGCKDCCFGTFNDQKRGICRPWTNCSLDGKSVLVNGTKERDVVCGPSPADLSPGASSVTPPAPAREPGHSPQIISFFLALTSTALLFLLFFLTLRFSVVKRGRKKLLYIFKQPFMRPVQTTQEEDGCSCRFPEEEEGGCELSTSRVKFSRSADAPAYQQGQNQLYNELNLGRREEYDVLDKRRGRDPEMGGKPQRRKNPQEGLYNELQKDKMAEAYSEIGMKGERRRGKGHDGLYQGLSTATKDTYDALHMQALPPR

SEQ ID NO: 6787 - protein, 460 aa, Artificial Sequence
  Synthetic Polypeptide
MALPVTALLLPLALLLHAARPLPAPKNLVVSRVTEDSARLSWTAPDAAFDSFAIGYWEWDDDGEAIVLTVPGSERSYDLTGLKPGTEYPVYIAGVKGGQWSFPLSAIFTTTRLQDPCSNCPAGTFCDNNRNQICSPCPPNSFSSAGGQRTCDICRQCKGVFRTRKECSSTSNAECDCTPGFHCLGAGCSMCEQDCKQGQELTKKGCKDCCFGTFNDQKRGICRPWTNCSLDGKSVLVNGTKERDVVCGPSPADLSPGASSVTPPAPAREPGHSPQIISFFLALTSTALLFLLFFLTLRFSVVKRGRKKLLYIFKQPFMRPVQTTQEEDGCSCRFPEEEEGGCELSTSRVKFSRSADAPAYQQGQNQLYNELNLGRREEYDVLDKRRGRDPEMGGKPQRRKNPQEGLYNELQKDKMAEAYSEIGMKGERRRGKGHDGLYQGLSTATKDTYDALHMQALPPR

SEQ ID NO: 6788 - protein, 461 aa, Artificial Sequence
  Synthetic Polypeptide
MALPVTALLLPLALLLHAARPMLPAPKNLVVSRITEDSARLSWTAPDAAFDSFPIRYIETLIWGEAIWLDVPGSERSYDLTGLKPGTEYAVVITGVKGGRFSSPLVASFTTTRLQDPCSNCPAGTFCDNNRNQICSPCPPNSFSSAGGQRTCDICRQCKGVFRTRKECSSTSNAECDCTPGFHCLGAGCSMCEQDCKQGQELTKKGCKDCCFGTFNDQKRGICRPWTNCSLDGKSVLVNGTKERDVVCGPSPADLSPGASSVTPPAPAREPGHSPQIISFFLALTSTALLFLLFFLTLRFSVVKRGRKKLLYIFKQPFMRPVQTTQEEDGCSCRFPEEEEGGCELSTSRVKFSRSADAPAYQQGQNQLYNELNLGRREEYDVLDKRRGRDPEMGGKPQRRKNPQEGLYNELQKDKMAEAYSEIGMKGERRRGKGHDGLYQGLSTATKDTYDALHMQALPPR

SEQ ID NO: 6789 - protein, 678 aa, Artificial Sequence
  Synthetic Polypeptide
MALPVTALLLPLALLLHAARPMALPVTALLLPLALLLHAARPLFNQEVQIPLTESYCGPCPKNWICYKNNCYQFFDESKNWYESQASCMSQNASLLKVYSKEDQDLLKLVKSYHWMGLVHIPTNGSWQWEDGSILSPNLLTIIEMQKGDCALYASSFKGYIENCSTPNTYICMQRTVGGGGSGGGGSGGGGSDLFNQEVQIPLTESYCGPCPKNWICYKNNCYQFFDESKNWYESQASCMSQNASLLKVYSKEDQDLLKLVKSYHWMGLVHIPTNGSWQWEDGSILSPNLLTIIEMQKGDCALYASSFKGYIENCSTPNTYICMQRTVTRLQDPCSNCPAGTFCDNNRNQICSPCPPNSFSSAGGQRTCDICRQCKGVFRTRKECSSTSNAECDCTPGFHCLGAGCSMCEQDCKQGQELTKKGCKDCCFGTFNDQKRGICRPWTNCSLDGKSVLVNGTKERDVVCGPSPADLSPGASSVTPPAPAREPGHSPQIISFFLALTSTALLFLLFFLTLRFSVVKRGRKKLLYIFKQPFMRPVQTTQEEDGCSCRFPEEEEGGCELSTSRVKFSRSADAPAYQQGQNQLYNELNLGRREEYDVLDKRRGRDPEMGGKPQRRKNPQEGLYNELQKDKMAEAYSEIGMKGERRRGKGHDGLYQGLSTATKDTYDALHMQALPPR

SEQ ID NO: 6790 - protein, 558 aa, Artificial Sequence
  Synthetic Polypeptide
MALPVTALLLPLALLLHAARPMELTDLLLAAMLLAVARLTLSSPVAPACDPRLLNKLLRDSHLLHSRLSQCPDVDPLSIPVLLPAVDFSLGEWKTQTEQSKAQDILGAVSLLLEGVMAARGQLEPSCLSSLLGQLSGQVRLLLGALQGLLGTQLPLQGRTTAHKDPNALFLSLQQLLRGKVRFLLLVEGPTLCVRRTLPTTAVPSSTSTRLQDPCSNCPAGTFCDNNRNQICSPCPPNSFSSAGGQRTCDICRQCKGVFRTRKECSSTSNAECDCTPGFHCLGAGCSMCEQDCKQGQELTKKGCKDCCFGTFNDQKRGICRPWTNCSLDGKSVLVNGTKERDVVCGPSPADLSPGASSVTPPAPAREPGHSPQIISFFLALTSTALLFLLFFLTLRFSVVKRGRKKLLYIFKQPFMRPVQTTQEEDGCSCRFPEEEEGGCELSTSRVKFSRSADAPAYQQGQNQLYNELNLGRREEYDVLDKRRGRDPEMGGKPQRRKNPQEGLYNELQKDKMAEAYSEIGMKGERRRGKGHDGLYQGLSTATKDTYDALHMQALPPR

SEQ ID NO: 6791 - protein, 424 aa, Artificial Sequence
  Synthetic Polypeptide
MALPVTALLLPLALLLHAARPMDPDLEIRAAFLRQRNTALRTEVAELEQEVQRLENEVSQYETRYGPLGGGKTRTRLQDPCSNCPAGTFCDNNRNQICSPCPPNSFSSAGGQRTCDICRQCKGVFRTRKECSSTSNAECDCTPGFHCLGAGCSMCEQDCKQGQELTKKGCKDCCFGTFNDQKRGICRPWTNCSLDGKSVLVNGTKERDVVCGPSPADLSPGASSVTPPAPAREPGHSPQIISFFLALTSTALLFLLFFLTLRFSVVKRGRKKLLYIFKQPFMRPVQTTQEEDGCSCRFPEEEEGGCELSTSRVKFSRSADAPAYQQGQNQLYNELNLGRREEYDVLDKRRGRDPEMGGKPQRRKNPQEGLYNELQKDKMAEAYSEIGMKGERRRGKGHDGLYQGLSTATKDTYDALHMQALPPR

SEQ ID NO: 6792 - protein, 399 aa, Artificial Sequence
  Synthetic Polypeptide
MALPVTALLLPLALLLHAARPEVAALEKEVAALEKEVAALEKEVAALEKTRLQDPCSNCPAGTFCDNNRNQICSPCPPNSFSSAGGQRTCDICRQCKGVFRTRKECSSTSNAECDCTPGFHCLGAGCSMCEQDCKQGQELTKKGCKDCCFGTFNDQKRGICRPWTNCSLDGKSVLVNGTKERDVVCGPSPADLSPGASSVTPPAPAREPGHSPQIISFFLALTSTALLFLLFFLTLRFSVVKRGRKKLLYIFKQPFMRPVQTTQEEDGCSCRFPEEEEGGCELSTSRVKFSRSADAPAYQQGQNQLYNELNLGRREEYDVLDKRRGRDPEMGGKPQRRKNPQEGLYNELQKDKMAEAYSEIGMKGERRRGKGHDGLYQGLSTATKDTYDALHMQALPPR

SEQ ID NO: 6793 - protein, 657 aa, Artificial Sequence
  Synthetic Polypeptide
MALPVTALLLPLALLLHAARPLFNQEVQIPLTESYCGPCPKNWICYKNNCYQFFDESKNWYESQASCMSQNASLLKVYSKEDQDLLKLVKSAHWMGLVHIPTNGSWQWEDGSILSPNLLTIIEMQKGDCALYASSFKGFIENCSTPNTYICMQRTVGGGGSGGGGSGGGGSDLFNQEVQIPLTESYCGPCPKNWICYKNNCYQFFDESKNWYESQASCMSQNASLLKVYSKEDQDLLKLVKSAHWMGLVHIPTNGSWQWEDGSILSPNLLTIIEMQKGDCALYASSFKGFIENCSTPNTYICMQRTVTRLQDPCSNCPAGTFCDNNRNQICSPCPPNSFSSAGGQRTCDICRQCKGVFRTRKECSSTSNAECDCTPGFHCLGAGCSMCEQDCKQGQELTKKGCKDCCFGTFNDQKRGICRPWTNCSLDGKSVLVNGTKERDVVCGPSPADLSPGASSVTPPAPAREPGHSPQIISFFLALTSTALLFLLFFLTLRFSVVKRGRKKLLYIFKQPFMRPVQTTQEEDGCSCRFPEEEEGGCELSTSRVKFSRSADAPAYQQGQNQLYNELNLGRREEYDVLDKRRGRDPEMGGKPQRRKNPQEGLYNELQKDKMAEAYSEIGMKGERRRGKGHDGLYQGLSTATKDTYDALHMQALPPR

SEQ ID NO: 6794 - protein, 657 aa, Artificial Sequence
  Synthetic Polypeptide
MALPVTALLLPLALLLHAARPLFNQEVQIPLTESYCGPCPKNWICYKNNCYQFFDESKNWYESQASCMSQNASLLKVYSKEDQDLLKLVKSAHWMGLVHIPTNGSWQWEDGSILSPNLLTIIEMQKGDCALYASSFKGYIENCSTPNTYICMQRTVSGGGGSGGGGSGGGGDLFNQEVQIPLTESYCGPCPKNWICYKNNCYQFFDESKNWYESQASCMSQNASLLKVYSKEDQDLLKLVKSAHWMGLVHIPTNGSWQWEDGSILSPNLLTIIEMQKGDCALYASSFKGYIENCSTPNTYICMQRTVTRLQDPCSNCPAGTFCDNNRNQICSPCPPNSFSSAGGQRTCDICRQCKGVFRTRKECSSTSNAECDCTPGFHCLGAGCSMCEQDCKQGQELTKKGCKDCCFGTFNDQKRGICRPWTNCSLDGKSVLVNGTKERDVVCGPSPADLSPGASSVTPPAPAREPGHSPQIISFFLALTSTALLFLLFFLTLRFSVVKRGRKKLLYIFKQPFMRPVQTTQEEDGCSCRFPEEEEGGCELSTSRVKFSRSADAPAYQQGQNQLYNELNLGRREEYDVLDKRRGRDPEMGGKPQRRKNPQEGLYNELQKDKMAEAYSEIGMKGERRRGKGHDGLYQGLSTATKDTYDALHMQALPPR

SEQ ID NO: 6795 - protein, 1041 aa, Artificial Sequence
  Synthetic Polypeptide
MALPVTALLLPLALLLHAARPDIQMTQSPSSLSASVGDRVTITCKASDHINNWLAWYQQKPGQAPKLLIYGATTLETGVPSRFSGSGSGTDYTLTISSLQPEDFATYYCQQSWNTPWTFGQGTKLEIKRLETTPGERSSLPAFYPGTSGSCSGCGSLSLPLLAGLVAADAVASLLIVGAVFLCARPRRSPAQEDGKVYINMPGRGSTSRVKFSRSADAPAYQQGQNQLYNELNLGRREEYDVLDKRRGRDPEMGGKPQRRKNPQEGLYNELQKDKMAEAYSEIGMKGERRRGKGHDGLYQGLSTATKDTYDALHMQALPPRRAKRSGSGATNFSLLKQAGDVEENPGPMDWIWRILFLVGAATGAHSFEQVQLQQPGAELVKPGASVKMSCKASGYAFSSYWINWMKQKPGQGLEWIGQIYPGDGDTNYNGKFKGRATLTADTSSSTAYMQLSSLTSEDSAVYFCARSITTVVGCAMDYWGQGTSVTVSSTRNKILVKQSPMLVAYDNAVNLSCKYSYNLFSREFRASLHKGLDSAVEVCVVYGNYSQQLQVYSKTGFNCDGKLGNESVTFYLQNLYVNQTDIYFCKIEVMYPPPYLDNEKSNGTIIHVKGKHLCPSPLFPGPSKPFWVLVVVGGVLACYSLLVTVAFIIFWVRSKRSRLLHSDYMNMTPRRPGPTRKHYQPYAPPRDFAAYRSSSRRVKFSRSADAPAYQQGQNQLYNELNLGRREEYDVLDKRRGRDPEMGGKPQRRKNPQEGLYNELQKDKMAEAYSEIGMKGERRRGKGHDGLYQGLSTATKDTYDALHMQALPPRRAKRSGSGVKQTLNFDLLKLAGDVESNPGPGHMTEYKPTVRLATRDDVPRAVRTLAAAFADYPATRHTVDPDRHIERVTELQELFLTRVGLDIGKVWVADDGAAVAVWTTPESVEAGAVFAEIGPRMAELSGSRLAAQQQMEGLLAPHRPKEPAWFLATVGVSPDHQGKGLGSAVVLPGVEAAERAGVPAFLETSAPRNLPFYERLGFTVTADVEVPEGPRTWCMTRKPGA

SEQ ID NO: 6796 - protein, 1093 aa, Artificial Sequence
  Synthetic Polypeptide
MALPVTALLLPLALLLHAARPACEVQLLESGGGLIQPGGSLRLSCAASGFTFSSHAMTWVRQAPGKGLEWVSAISGSGDYTHYADSVKGRFTISRDNSKNTVYLQMNSLRAEDSAVYYCAKDEDGGSLLGHRGQGTLVTVSSGTGGGGSGGGGSGGGGSEFGSLETTPGERSSLPAFYPGTSGSCSGCGSLSLPLLAGLVAADAVASLLIVGAVFLCARPRRSPAQEDGKVYINMPGRGSTSRVKFSRSADAPAYQQGQNQLYNELNLGRREEYDVLDKRRGRDPEMGGKPQRRKNPQEGLYNELQKDKMAEAYSEIGMKGERRRGKGHDGLYQGLSTATKDTYDALHMQALPPRRAKRSGSGATNFSLLKQAGDVEENPGPMDWIWRILFLVGAATGAHSGPEVQLVESGGGLVQAGGSLRLSCAASGRTFSMGWFRQAPGKEREFVAAITYSGGSPYYADSVKGRFTISRDNAKNTVYLQMNSLKPEDTAVYYCAANPTYGSDWNAENWGQGTQVTVSSGSGGGGSGGGGSGGGGSFEGSTRNKILVKQSPMLVAYDNAVNLSCKYSYNLFSREFRASLHKGLDSAVEVCVVYGNYSQQLQVYSKTGFNCDGKLGNESVTFYLQNLYVNQTDIYFCKIEVMYPPPYLDNEKSNGTIIHVKGKHLCPSPLFPGPSKPFWVLVVVGGVLACYSLLVTVAFIIFWVRSKRSRLLHSDYMNMTPRRPGPTRKHYQPYAPPRDFAAYRSSSRRVKFSRSADAPAYQQGQNQLYNELNLGRREEYDVLDKRRGRDPEMGGKPQRRKNPQEGLYNELQKDKMAEAYSEIGMKGERRRGKGHDGLYQGLSTATKDTYDALHMQALPPRRAKRSGSGVKQTLNFDLLKLAGDVESNPGPGHMTEYKPTVRLATRDDVPRAVRTLAAAFADYPATRHTVDPDRHIERVTELQELFLTRVGLDIGKVWVADDGAAVAVWTTPESVEAGAVFAEIGPRMAELSGSRLAAQQQMEGLLAPHRPKEPAWFLATVGVSPDHQGKGLGSAVVLPGVEAAERAGVPAFLETSAPRNLPFYERLGFTVTADVEVPEGPRTWCMTRKPGA

SEQ ID NO: 6797 - protein, 1243 aa, Artificial Sequence
  Synthetic Polypeptide
MALPVTALLLPLALLLHAARPDIQMTQSPSSLSASVGDRVTITCKASDHINNWLAWYQQKPGQAPKLLIYGATTLETGVPSRFSGSGSGTDYTLTISSLQPEDFATYYCQQSWNTPWTFGQGTKLEIKRLEGQPKANPTVTLFPPSSEELQANKATLVCLISDFYPGAVTVAWKADGSPVKAGVETTKPSKQSNNKYAASSYLSLTPEQWKSHRSYSCQVTHEGSTVEKTVAPTECSGSTTPGERSSLPAFYPGTSGSCSGCGSLSLPLLAGLVAADAVASLLIVGAVFLCARPRRSPAQEDGKVYINMPGRGSTSRVKFSRSADAPAYQQGQNQLYNELNLGRREEYDVLDKRRGRDPEMGGKPQRRKNPQEGLYNELQKDKMAEAYSEIGMKGERRRGKGHDGLYQGLSTATKDTYDALHMQALPPRRAKRSGSGATNFSLLKQAGDVEENPGPMDWIWRILFLVGAATGAHSFEQVQLQQPGAELVKPGASVKMSCKASGYAFSSYWINWMKQKPGQGLEWIGQIYPGDGDTNYNGKFKGRATLTADTSSSTAYMQLSSLTSEDSAVYFCARSITTVVGCAMDYWGQGTSVTVSSTRASTKGPSVFPLAPSSKSTSGGTAALGCLVKDYFPEPVTVSWNSGALTSGVHTFPAVLQSSGLYSLSSVVTVPSSSLGTQTYICNVNHKPSNTKVDKRVEPKSCGTNKILVKQSPMLVAYDNAVNLSCKYSYNLFSREFRASLHKGLDSAVEVCVVYGNYSQQLQVYSKTGFNCDGKLGNESVTFYLQNLYVNQTDIYFCKIEVMYPPPYLDNEKSNGTIIHVKGKHLCPSPLFPGPSKPFWVLVVVGGVLACYSLLVTVAFIIFWVRSKRSRLLHSDYMNMTPRRPGPTRKHYQPYAPPRDFAAYRSSSRRVKFSRSADAPAYQQGQNQLYNELNLGRREEYDVLDKRRGRDPEMGGKPQRRKNPQEGLYNELQKDKMAEAYSEIGMKGERRRGKGHDGLYQGLSTATKDTYDALHMQALPPRRAKRSGSGVKQTLNFDLLKLAGDVESNPGPGHMATYEVLCEVARKLGTDDREVVLFLLNVFIPQPTLAQLIGALRALKEEGRLTFPLLAECLFRAGRRDLLRDLLHLDPRFLERHLAGTMSYFSPYQLTVLHVDGELCARDIRSLIFLSKDTIGSRSTPQTFLHWVYCMENLDLLGPTDVDALMSMLRSLSRVDLQRQVQTLMGLHLSGPSHSQHYRHTP

SEQ ID NO: 6798 - protein, 1296 aa, Artificial Sequence
  Synthetic Polypeptide
MALPVTALLLPLALLLHAARPDIQMTQSPSSLSASVGDRVTITCKASDHINNWLAWYQQKPGQAPKLLIYGATTLETGVPSRFSGSGSGTDYTLTISSLQPEDFATYYCQQSWNTPWTFGQGTKLEIKRLEGQPKANPTVTLFPPSSEELQANKATLVCLISDFYPGAVTVAWKADGSPVKAGVETTKPSKQSNNKYAASSYLSLTPEQWKSHRSYSCQVTHEGSTVEKTVAPTECSGSTTPGERSSLPAFYPGTSGSCSGCGSLSLPLLAGLVAADAVASLLIVGAVFLCARPRRSPAQEDGKVYINMPGRGSTSRVKFSRSADAPAYQQGQNQLYNELNLGRREEYDVLDKRRGRDPEMGGKPQRRKNPQEGLYNELQKDKMAEAYSEIGMKGERRRGKGHDGLYQGLSTATKDTYDALHMQALPPRRAKRSGSGATNFSLLKQAGDVEENPGPMDWIWRILFLVGAATGAHSFEQVQLQQPGAELVKPGASVKMSCKASGYAFSSYWINWMKQKPGQGLEWIGQIYPGDGDTNYNGKFKGRATLTADTSSSTAYMQLSSLTSEDSAVYFCARSITTVVGCAMDYWGQGTSVTVSSTRASTKGPSVFPLAPSSKSTSGGTAALGCLVKDYFPEPVTVSWNSGALTSGVHTFPAVLQSSGLYSLSSVVTVPSSSLGTQTYICNVNHKPSNTKVDKRVEPKSCGTNKILVKQSPMLVAYDNAVNLSCKYSYNLFSREFRASLHKGLDSAVEVCVVYGNYSQQLQVYSKTGFNCDGKLGNESVTFYLQNLYVNQTDIYFCKIEVMYPPPYLDNEKSNGTIIHVKGKHLCPSPLFPGPSKPFWVLVVVGGVLACYSLLVTVAFIIFWVRSKRSRLLHSDYMNMTPRRPGPTRKHYQPYAPPRDFAAYRSSSRRVKFSRSADAPAYQQGQNQLYNELNLGRREEYDVLDKRRGRDPEMGGKPQRRKNPQEGLYNELQKDKMAEAYSEIGMKGERRRGKGHDGLYQGLSTATKDTYDALHMQALPPRRAKRSGSGVKQTLNFDLLKLAGDVESNPGPGHMSDSKEVPSLPFLRHLLEELDSHEDSLLLFLCHDAAPGCTTVTQALCSLSQQRKLTLAALVEMLYVLQRMDLLKSRFGLSKEGAEQLLGTSFLTRYRKLMVCVGEELDSSELRALRLFACNLNPSLSTALSESSRFVELVLALENVGLVSPSSVSVLADMLRTLRRLDLCQQLVEYEQQEQARYRYCYAASPSLPVRTLRRGHGASEHEQLCMPVQESSDSPELLRTPVQESSSDSPEQTT

SEQ ID NO: 6799 - protein, 1254 aa, Artificial Sequence
  Synthetic Polypeptide
MALPVTALLLPLALLLHAARPDIQMTQSPSSLSASVGDRVTITCKASDHINNWLAWYQQKPGQAPKLLIYGATTLETGVPSRFSGSGSGTDYTLTISSLQPEDFATYYCQQSWNTPWTFGQGTKLEIKRLEGQPKANPTVTLFPPSSEELQANKATLVCLISDFYPGAVTVAWKADGSPVKAGVETTKPSKQSNNKYAASSYLSLTPEQWKSHRSYSCQVTHEGSTVEKTVAPTECSGSTTPGERSSLPAFYPGTSGSCSGCGSLSLPLLAGLVAADAVASLLIVGAVFLCARPRRSPAQEDGKVYINMPGRGSTSRVKFSRSADAPAYQQGQNQLYNELNLGRREEYDVLDKRRGRDPEMGGKPQRRKNPQEGLYNELQKDKMAEAYSEIGMKGERRRGKGHDGLYQGLSTATKDTYDALHMQALPPRRAKRSGSGATNFSLLKQAGDVEENPGPMDWIWRILFLVGAATGAHSFEQVQLQQPGAELVKPGASVKMSCKASGYAFSSYWINWMKQKPGQGLEWIGQIYPGDGDTNYNGKFKGRATLTADTSSSTAYMQLSSLTSEDSAVYFCARSITTVVGCAMDYWGQGTSVTVSSTRASTKGPSVFPLAPSSKSTSGGTAALGCLVKDYFPEPVTVSWNSGALTSGVHTFPAVLQSSGLYSLSSVVTVPSSSLGTQTYICNVNHKPSNTKVDKRVEPKSCGTNKILVKQSPMLVAYDNAVNLSCKYSYNLFSREFRASLHKGLDSAVEVCVVYGNYSQQLQVYSKTGFNCDGKLGNESVTFYLQNLYVNQTDIYFCKIEVMYPPPYLDNEKSNGTIIHVKGKHLCPSPLFPGPSKPFWVLVVVGGVLACYSLLVTVAFIIFWVRSKRSRLLHSDYMNMTPRRPGPTRKHYQPYAPPRDFAAYRSSSRRVKFSRSADAPAYQQGQNQLYNELNLGRREEYDVLDKRRGRDPEMGGKPQRRKNPQEGLYNELQKDKMAEAYSEIGMKGERRRGKGHDGLYQGLSTATKDTYDALHMQALPPRRAKRSGSGVKQTLNFDLLKLAGDVESNPGPGHMTEYKPTVRLATRDDVPRAVRTLAAAFADYPATRHTVDPDRHIERVTELQELFLTRVGLDIGKVWVADDGAAVAVWTTPESVEAGAVFAEIGPRMAELSGSRLAAQQQMEGLLAPHRPKEPAWFLATVGVSPDHQGKGLGSAVVLPGVEAAERAGVPAFLETSAPRNLPFYERLGFTVTADVEVPEGPRTWCMTRKPGA

SEQ ID NO: 6800 - protein, 1391 aa, Artificial Sequence
  Synthetic Polypeptide
MALPVTALLLPLALLLHAARPEVQLVESGGGLVQAGGSLRLSCAASGRTFSMGWFRQAPGKEREFVAAITYSGGSPYYADSVKGRFTISRDNAKNTVYLQMNSLKPEDTAVYYCAANPTYGSDWNAENWGQGTQVTVSSGTGGGGSGGGGSGGGGSEFDIQMTQSPSSLSASVGDRVTITCKASDHINNWLAWYQQKPGQAPKLLIYGATTLETGVPSRFSGSGSGTDYTLTISSLQPEDFATYYCQQSWNTPWTFGQGTKLEIKRLEGQPKANPTVTLFPPSSEELQANKATLVCLISDFYPGAVTVAWKADGSPVKAGVETTKPSKQSNNKYAASSYLSLTPEQWKSHRSYSCQVTHEGSTVEKTVAPTECSGSTTPGERSSLPAFYPGTSGSCSGCGSLSLPLLAGLVAADAVASLLIVGAVFLCARPRRSPAQEDGKVYINMPGRGSTSRVKFSRSADAPAYQQGQNQLYNELNLGRREEYDVLDKRRGRDPEMGGKPQRRKNPQEGLYNELQKDKMAEAYSEIGMKGERRRGKGHDGLYQGLSTATKDTYDALHMQALPPRRAKRSGSGATNFSLLKQAGDVEENPGPMDWIWRILFLVGAATGAHSFEQVQLQQPGAELVKPGASVKMSCKASGYAFSSYWINWMKQKPGQGLEWIGQIYPGDGDTNYNGKFKGRATLTADTSSSTAYMQLSSLTSEDSAVYFCARSITTVVGCAMDYWGQGTSVTVSSTRASTKGPSVFPLAPSSKSTSGGTAALGCLVKDYFPEPVTVSWNSGALTSGVHTFPAVLQSSGLYSLSSVVTVPSSSLGTQTYICNVNHKPSNTKVDKRVEPKSCGTNKILVKQSPMLVAYDNAVNLSCKYSYNLFSREFRASLHKGLDSAVEVCVVYGNYSQQLQVYSKTGFNCDGKLGNESVTFYLQNLYVNQTDIYFCKIEVMYPPPYLDNEKSNGTIIHVKGKHLCPSPLFPGPSKPFWVLVVVGGVLACYSLLVTVAFIIFWVRSKRSRLLHSDYMNMTPRRPGPTRKHYQPYAPPRDFAAYRSSSRRVKFSRSADAPAYQQGQNQLYNELNLGRREEYDVLDKRRGRDPEMGGKPQRRKNPQEGLYNELQKDKMAEAYSEIGMKGERRRGKGHDGLYQGLSTATKDTYDALHMQALPPRRAKRSGSGVKQTLNFDLLKLAGDVESNPGPGHMTEYKPTVRLATRDDVPRAVRTLAAAFADYPATRHTVDPDRHIERVTELQELFLTRVGLDIGKVWVADDGAAVAVWTTPESVEAGAVFAEIGPRMAELSGSRLAAQQQMEGLLAPHRPKEPAWFLATVGVSPDHQGKGLGSAVVLPGVEAAERAGVPAFLETSAPRNLPFYERLGFTVTADVEVPEGPRTWCMTRKPGA

SEQ ID NO: 6801 - protein, 1528 aa, Artificial Sequence
  Synthetic Polypeptide
MALPVTALLLPLALLLHAARPEVQLVESGGGLVQAGGSLRLSCAASGRTFSMGWFRQAPGKEREFVAAITYSGGSPYYADSVKGRFTISRDNAKNTVYLQMNSLKPEDTAVYYCAANPTYGSDWNAENWGQGTQVTVSSGTGGGGSGGGGSGGGGSEFDIQMTQSPSSLSASVGDRVTITCKASDHINNWLAWYQQKPGQAPKLLIYGATTLETGVPSRFSGSGSGTDYTLTISSLQPEDFATYYCQQSWNTPWTFGQGTKLEIKRLEGQPKANPTVTLFPPSSEELQANKATLVCLISDFYPGAVTVAWKADGSPVKAGVETTKPSKQSNNKYAASSYLSLTPEQWKSHRSYSCQVTHEGSTVEKTVAPTECSGSTTPGERSSLPAFYPGTSGSCSGCGSLSLPLLAGLVAADAVASLLIVGAVFLCARPRRSPAQEDGKVYINMPGRGSTSRVKFSRSADAPAYQQGQNQLYNELNLGRREEYDVLDKRRGRDPEMGGKPQRRKNPQEGLYNELQKDKMAEAYSEIGMKGERRRGKGHDGLYQGLSTATKDTYDALHMQALPPRRAKRSGSGATNFSLLKQAGDVEENPGPMDWIWRILFLVGAATGAHSGPEVQLVESGGGLVQAGGSLRLSCAASGRTFTMGWFRQAPGKEREFVAAISLSPTLAYYADSVKGRFTISRDNAKNTVVLQMNSLKPEDTALYYCAADRKSVMSIRPDYWGQGTQVTVSSGSGGGGSGGGGSGGGGSFEQVQLQQPGAELVKPGASVKMSCKASGYAFSSYWINWMKQKPGQGLEWIGQIYPGDGDTNYNGKFKGRATLTADTSSSTAYMQLSSLTSEDSAVYFCARSITTVVGCAMDYWGQGTSVTVSSTRASTKGPSVFPLAPSSKSTSGGTAALGCLVKDYFPEPVTVSWNSGALTSGVHTFPAVLQSSGLYSLSSVVTVPSSSLGTQTYICNVNHKPSNTKVDKRVEPKSCGTNKILVKQSPMLVAYDNAVNLSCKYSYNLFSREFRASLHKGLDSAVEVCVVYGNYSQQLQVYSKTGFNCDGKLGNESVTFYLQNLYVNQTDIYFCKIEVMYPPPYLDNEKSNGTIIHVKGKHLCPSPLFPGPSKPFWVLVVVGGVLACYSLLVTVAFIIFWVRSKRSRLLHSDYMNMTPRRPGPTRKHYQPYAPPRDFAAYRSSSRRVKFSRSADAPAYQQGQNQLYNELNLGRREEYDVLDKRRGRDPEMGGKPQRRKNPQEGLYNELQKDKMAEAYSEIGMKGERRRGKGHDGLYQGLSTATKDTYDALHMQALPPRRAKRSGSGVKQTLNFDLLKLAGDVESNPGPGHMTEYKPTVRLATRDDVPRAVRTLAAAFADYPATRHTVDPDRHIERVTELQELFLTRVGLDIGKVWVADDGAAVAVWTTPESVEAGAVFAEIGPRMAELSGSRLAAQQQMEGLLAPHRPKEPAWFLATVGVSPDHQGKGLGSAVVLPGVEAAERAGVPAFLETSAPRNLPFYERLGFTVTADVEVPEGPRTWCMTRKPGA

SEQ ID NO: 6802 - protein, 1261 aa, Artificial Sequence
  Synthetic Polypeptide
MALPVTALLLPLALLLHAARPEVQLVESGGGLVQAGGSLRLSCAASGRTFSMGWFRQAPGKEREFVAAITYSGGSPYYADSVKGRFTISRDNAKNTVYLQMNSLKPEDTAVYYCAANPTYGSDWNAENWGQGTQVTVSSLEGQPKANPTVTLFPPSSEELQANKATLVCLISDFYPGAVTVAWKADGSPVKAGVETTKPSKQSNNKYAASSYLSLTPEQWKSHRSYSCQVTHEGSTVEKTVAPTECSGSTTPGERSSLPAFYPGTSGSCSGCGSLSLPLLAGLVAADAVASLLIVGAVFLCARPRRSPAQEDGKVYINMPGRGSTSRVKFSRSADAPAYQQGQNQLYNELNLGRREEYDVLDKRRGRDPEMGGKPQRRKNPQEGLYNELQKDKMAEAYSEIGMKGERRRGKGHDGLYQGLSTATKDTYDALHMQALPPRRAKRSGSGATNFSLLKQAGDVEENPGPMDWIWRILFLVGAATGAHSGPEVQLVESGGGLVQAGGSLRLSCAASGRTFTMGWFRQAPGKEREFVAAISLSPTLAYYADSVKGRFTISRDNAKNTVVLQMNSLKPEDTALYYCAADRKSVMSIRPDYWGQGTQVTVSSTRASTKGPSVFPLAPSSKSTSGGTAALGCLVKDYFPEPVTVSWNSGALTSGVHTFPAVLQSSGLYSLSSVVTVPSSSLGTQTYICNVNHKPSNTKVDKRVEPKSCGTNKILVKQSPMLVAYDNAVNLSCKYSYNLFSREFRASLHKGLDSAVEVCVVYGNYSQQLQVYSKTGFNCDGKLGNESVTFYLQNLYVNQTDIYFCKIEVMYPPPYLDNEKSNGTIIHVKGKHLCPSPLFPGPSKPFWVLVVVGGVLACYSLLVTVAFIIFWVRSKRSRLLHSDYMNMTPRRPGPTRKHYQPYAPPRDFAAYRSSSRRVKFSRSADAPAYQQGQNQLYNELNLGRREEYDVLDKRRGRDPEMGGKPQRRKNPQEGLYNELQKDKMAEAYSEIGMKGERRRGKGHDGLYQGLSTATKDTYDALHMQALPPRRAKRSGSGVKQTLNFDLLKLAGDVESNPGPGHMTEYKPTVRLATRDDVPRAVRTLAAAFADYPATRHTVDPDRHIERVTELQELFLTRVGLDIGKVWVADDGAAVAVWTTPESVEAGAVFAEIGPRMAELSGSRLAAQQQMEGLLAPHRPKEPAWFLATVGVSPDHQGKGLGSAVVLPGVEAAERAGVPAFLETSAPRNLPFYERLGFTVTADVEVPEGPRTWCMTRKPGA

SEQ ID NO: 6803 - protein, 1269 aa, Artificial Sequence
  Synthetic Polypeptide
MALPVTALLLPLALLLHAARPDIQMTQSPSSLSASVGDRVTITCKASDHINNWLAWYQQKPGQAPKLLIYGATTLETGVPSRFSGSGSGTDYTLTISSLQPEDFATYYCQQSWNTPWTFGQGTKLEIKRLEDLKNVFPPEVAVFEPSEAEISHTQKATLVCLATGFYPDHVELSWWVNGKEVHSGVSTDPQPLKEQPALNDSRYCLSSRLRVSATFWQNPRNHFRCQVQFYGLSENDEWTQDRAKPVTQIVSAEAWGRADCGSTTPGERSSLPAFYPGTSGSCSGCGSLSLPLLAGLVAADAVASLLIVGAVFLCARPRRSPAQEDGKVYINMPGRGSTSRVKFSRSADAPAYQQGQNQLYNELNLGRREEYDVLDKRRGRDPEMGGKPQRRKNPQEGLYNELQKDKMAEAYSEIGMKGERRRGKGHDGLYQGLSTATKDTYDALHMQALPPRRAKRSGSGATNFSLLKQAGDVEENPGPMDWIWRILFLVGAATGAHSFEQVQLQQPGAELVKPGASVKMSCKASGYAFSSYWINWMKQKPGQGLEWIGQIYPGDGDTNYNGKFKGRATLTADTSSSTAYMQLSSLTSEDSAVYFCARSITTVVGCAMDYWGQGTSVTVSSTRIQNPDPAVYQLRDSKSSDKSVCLFTDFDSQTNVSQSKDSDVYITDKTVLDMRSMDFKSNSAVAWSNKSDFACANAFNNSIIPEDTFFPSPESSCGTNKILVKQSPMLVAYDNAVNLSCKYSYNLFSREFRASLHKGLDSAVEVCVVYGNYSQQLQVYSKTGFNCDGKLGNESVTFYLQNLYVNQTDIYFCKIEVMYPPPYLDNEKSNGTIIHVKGKHLCPSPLFPGPSKPFWVLVVVGGVLACYSLLVTVAFIIFWVRSKRSRLLHSDYMNMTPRRPGPTRKHYQPYAPPRDFAAYRSSSRRVKFSRSADAPAYQQGQNQLYNELNLGRREEYDVLDKRRGRDPEMGGKPQRRKNPQEGLYNELQKDKMAEAYSEIGMKGERRRGKGHDGLYQGLSTATKDTYDALHMQALPPRRAKRSGSGVKQTLNFDLLKLAGDVESNPGPGHMTEYKPTVRLATRDDVPRAVRTLAAAFADYPATRHTVDPDRHIERVTELQELFLTRVGLDIGKVWVADDGAAVAVWTTPESVEAGAVFAEIGPRMAELSGSRLAAQQQMEGLLAPHRPKEPAWFLATVGVSPDHQGKGLGSAVVLPGVEAAERAGVPAFLETSAPRNLPFYERLGFTVTADVEVPEGPRTWCMTRKPGA

SEQ ID NO: 6804 - protein, 1406 aa, Artificial Sequence
  Synthetic Polypeptide
MALPVTALLLPLALLLHAARPEVQLVESGGGLVQAGGSLRLSCAASGRTFSMGWFRQAPGKEREFVAAITYSGGSPYYADSVKGRFTISRDNAKNTVYLQMNSLKPEDTAVYYCAANPTYGSDWNAENWGQGTQVTVSSGTGGGGSGGGGSGGGGSEFDIQMTQSPSSLSASVGDRVTITCKASDHINNWLAWYQQKPGQAPKLLIYGATTLETGVPSRFSGSGSGTDYTLTISSLQPEDFATYYCQQSWNTPWTFGQGTKLEIKRLEDLKNVFPPEVAVFEPSEAEISHTQKATLVCLATGFYPDHVELSWWVNGKEVHSGVSTDPQPLKEQPALNDSRYCLSSRLRVSATFWQNPRNHFRCQVQFYGLSENDEWTQDRAKPVTQIVSAEAWGRADCGSTTPGERSSLPAFYPGTSGSCSGCGSLSLPLLAGLVAADAVASLLIVGAVFLCARPRRSPAQEDGKVYINMPGRGSTSRVKFSRSADAPAYQQGQNQLYNELNLGRREEYDVLDKRRGRDPEMGGKPQRRKNPQEGLYNELQKDKMAEAYSEIGMKGERRRGKGHDGLYQGLSTATKDTYDALHMQALPPRRAKRSGSGATNFSLLKQAGDVEENPGPMDWIWRILFLVGAATGAHSFEQVQLQQPGAELVKPGASVKMSCKASGYAFSSYWINWMKQKPGQGLEWIGQIYPGDGDTNYNGKFKGRATLTADTSSSTAYMQLSSLTSEDSAVYFCARSITTVVGCAMDYWGQGTSVTVSSTRIQNPDPAVYQLRDSKSSDKSVCLFTDFDSQTNVSQSKDSDVYITDKTVLDMRSMDFKSNSAVAWSNKSDFACANAFNNSIIPEDTFFPSPESSCGTNKILVKQSPMLVAYDNAVNLSCKYSYNLFSREFRASLHKGLDSAVEVCVVYGNYSQQLQVYSKTGFNCDGKLGNESVTFYLQNLYVNQTDIYFCKIEVMYPPPYLDNEKSNGTIIHVKGKHLCPSPLFPGPSKPFWVLVVVGGVLACYSLLVTVAFIIFWVRSKRSRLLHSDYMNMTPRRPGPTRKHYQPYAPPRDFAAYRSSSRRVKFSRSADAPAYQQGQNQLYNELNLGRREEYDVLDKRRGRDPEMGGKPQRRKNPQEGLYNELQKDKMAEAYSEIGMKGERRRGKGHDGLYQGLSTATKDTYDALHMQALPPRRAKRSGSGVKQTLNFDLLKLAGDVESNPGPGHMTEYKPTVRLATRDDVPRAVRTLAAAFADYPATRHTVDPDRHIERVTELQELFLTRVGLDIGKVWVADDGAAVAVWTTPESVEAGAVFAEIGPRMAELSGSRLAAQQQMEGLLAPHRPKEPAWFLATVGVSPDHQGKGLGSAVVLPGVEAAERAGVPAFLETSAPRNLPFYERLGFTVTADVEVPEGPRTWCMTRKPGA

SEQ ID NO: 6805 - protein, 1543 aa, Artificial Sequence
  Synthetic Polypeptide
MALPVTALLLPLALLLHAARPEVQLVESGGGLVQAGGSLRLSCAASGRTFSMGWFRQAPGKEREFVAAITYSGGSPYYADSVKGRFTISRDNAKNTVYLQMNSLKPEDTAVYYCAANPTYGSDWNAENWGQGTQVTVSSGTGGGGSGGGGSGGGGSEFDIQMTQSPSSLSASVGDRVTITCKASDHINNWLAWYQQKPGQAPKLLIYGATTLETGVPSRFSGSGSGTDYTLTISSLQPEDFATYYCQQSWNTPWTFGQGTKLEIKRLEDLKNVFPPEVAVFEPSEAEISHTQKATLVCLATGFYPDHVELSWWVNGKEVHSGVSTDPQPLKEQPALNDSRYCLSSRLRVSATFWQNPRNHFRCQVQFYGLSENDEWTQDRAKPVTQIVSAEAWGRADCGSTTPGERSSLPAFYPGTSGSCSGCGSLSLPLLAGLVAADAVASLLIVGAVFLCARPRRSPAQEDGKVYINMPGRGSTSRVKFSRSADAPAYQQGQNQLYNELNLGRREEYDVLDKRRGRDPEMGGKPQRRKNPQEGLYNELQKDKMAEAYSEIGMKGERRRGKGHDGLYQGLSTATKDTYDALHMQALPPRRAKRSGSGATNFSLLKQAGDVEENPGPMDWIWRILFLVGAATGAHSGPEVQLVESGGGLVQAGGSLRLSCAASGRTFTMGWFRQAPGKEREFVAAISLSPTLAYYADSVKGRFTISRDNAKNTVVLQMNSLKPEDTALYYCAADRKSVMSIRPDYWGQGTQVTVSSGSGGGGSGGGGSGGGGSFEQVQLQQPGAELVKPGASVKMSCKASGYAFSSYWINWMKQKPGQGLEWIGQIYPGDGDTNYNGKFKGRATLTADTSSSTAYMQLSSLTSEDSAVYFCARSITTVVGCAMDYWGQGTSVTVSSTRIQNPDPAVYQLRDSKSSDKSVCLFTDFDSQTNVSQSKDSDVYITDKTVLDMRSMDFKSNSAVAWSNKSDFACANAFNNSIIPEDTFFPSPESSCGTNKILVKQSPMLVAYDNAVNLSCKYSYNLFSREFRASLHKGLDSAVEVCVVYGNYSQQLQVYSKTGFNCDGKLGNESVTFYLQNLYVNQTDIYFCKIEVMYPPPYLDNEKSNGTIIHVKGKHLCPSPLFPGPSKPFWVLVVVGGVLACYSLLVTVAFIIFWVRSKRSRLLHSDYMNMTPRRPGPTRKHYQPYAPPRDFAAYRSSSRRVKFSRSADAPAYQQGQNQLYNELNLGRREEYDVLDKRRGRDPEMGGKPQRRKNPQEGLYNELQKDKMAEAYSEIGMKGERRRGKGHDGLYQGLSTATKDTYDALHMQALPPRRAKRSGSGVKQTLNFDLLKLAGDVESNPGPGHMTEYKPTVRLATRDDVPRAVRTLAAAFADYPATRHTVDPDRHIERVTELQELFLTRVGLDIGKVWVADDGAAVAVWTTPESVEAGAVFAEIGPRMAELSGSRLAAQQQMEGLLAPHRPKEPAWFLATVGVSPDHQGKGLGSAVVLPGVEAAERAGVPAFLETSAPRNLPFYERLGFTVTADVEVPEGPRTWCMTRKPGA

SEQ ID NO: 6806 - protein, 1276 aa, Artificial Sequence
  Synthetic Polypeptide
MALPVTALLLPLALLLHAARPEVQLVESGGGLVQAGGSLRLSCAASGRTFSMGWFRQAPGKEREFVAAITYSGGSPYYADSVKGRFTISRDNAKNTVYLQMNSLKPEDTAVYYCAANPTYGSDWNAENWGQGTQVTVSSLEDLKNVFPPEVAVFEPSEAEISHTQKATLVCLATGFYPDHVELSWWVNGKEVHSGVSTDPQPLKEQPALNDSRYCLSSRLRVSATFWQNPRNHFRCQVQFYGLSENDEWTQDRAKPVTQIVSAEAWGRADCGSTTPGERSSLPAFYPGTSGSCSGCGSLSLPLLAGLVAADAVASLLIVGAVFLCARPRRSPAQEDGKVYINMPGRGSTSRVKFSRSADAPAYQQGQNQLYNELNLGRREEYDVLDKRRGRDPEMGGKPQRRKNPQEGLYNELQKDKMAEAYSEIGMKGERRRGKGHDGLYQGLSTATKDTYDALHMQALPPRRAKRSGSGATNFSLLKQAGDVEENPGPMDWIWRILFLVGAATGAHSGPEVQLVESGGGLVQAGGSLRLSCAASGRTFTMGWFRQAPGKEREFVAAISLSPTLAYYADSVKGRFTISRDNAKNTVVLQMNSLKPEDTALYYCAADRKSVMSIRPDYWGQGTQVTVSSTRIQNPDPAVYQLRDSKSSDKSVCLFTDFDSQTNVSQSKDSDVYITDKTVLDMRSMDFKSNSAVAWSNKSDFACANAFNNSIIPEDTFFPSPESSCGTNKILVKQSPMLVAYDNAVNLSCKYSYNLFSREFRASLHKGLDSAVEVCVVYGNYSQQLQVYSKTGFNCDGKLGNESVTFYLQNLYVNQTDIYFCKIEVMYPPPYLDNEKSNGTIIHVKGKHLCPSPLFPGPSKPFWVLVVVGGVLACYSLLVTVAFIIFWVRSKRSRLLHSDYMNMTPRRPGPTRKHYQPYAPPRDFAAYRSSSRRVKFSRSADAPAYQQGQNQLYNELNLGRREEYDVLDKRRGRDPEMGGKPQRRKNPQEGLYNELQKDKMAEAYSEIGMKGERRRGKGHDGLYQGLSTATKDTYDALHMQALPPRRAKRSGSGVKQTLNFDLLKLAGDVESNPGPGHMTEYKPTVRLATRDDVPRAVRTLAAAFADYPATRHTVDPDRHIERVTELQELFLTRVGLDIGKVWVADDGAAVAVWTTPESVEAGAVFAEIGPRMAELSGSRLAAQQQMEGLLAPHRPKEPAWFLATVGVSPDHQGKGLGSAVVLPGVEAAERAGVPAFLETSAPRNLPFYERLGFTVTADVEVPEGPRTWCMTRKPGA

SEQ ID NO: 6807 - protein, 585 aa, Artificial Sequence; identical to SEQ ID NO: 4431
  Synthetic Polypeptide

SEQ ID NO: 6808 - protein, 457 aa, Artificial Sequence; identical to SEQ ID NO: 6712
  Synthetic Polypeptide

SEQ ID NO: 6809 - protein, 457 aa, Artificial Sequence; identical to SEQ ID NO: 6713
  Synthetic Polypeptide

SEQ ID NO: 6810 - protein, 331 aa, Artificial Sequence; identical to SEQ ID NO: 6714
  Synthetic Polypeptide

SEQ ID NO: 6811 - protein, 331 aa, Artificial Sequence; identical to SEQ ID NO: 6715
  Synthetic Polypeptide

SEQ ID NO: 6812 - protein, 331 aa, Artificial Sequence; identical to SEQ ID NO: 6716
  Synthetic Polypeptide

SEQ ID NO: 6813 - protein, 333 aa, Artificial Sequence; identical to SEQ ID NO: 6717
  Synthetic Polypeptide

SEQ ID NO: 6814 - protein, 341 aa, Artificial Sequence; identical to SEQ ID NO: 6718
  Synthetic Polypeptide

SEQ ID NO: 6815 - protein, 337 aa, Artificial Sequence; identical to SEQ ID NO: 6719
  Synthetic Polypeptide

SEQ ID NO: 6816 - protein, 332 aa, Artificial Sequence; identical to SEQ ID NO: 6720
  Synthetic Polypeptide

SEQ ID NO: 6817 - protein, 337 aa, Artificial Sequence; identical to SEQ ID NO: 6721
  Synthetic Polypeptide

SEQ ID NO: 6818 - protein, 271 aa, Artificial Sequence; identical to SEQ ID NO: 6722
  Synthetic Polypeptide

SEQ ID NO: 6819 - protein, 302 aa, Artificial Sequence; identical to SEQ ID NO: 6723
  Synthetic Polypeptide

SEQ ID NO: 6820 - protein, 303 aa, Artificial Sequence; identical to SEQ ID NO: 6724
  Synthetic Polypeptide

SEQ ID NO: 6821 - protein, 520 aa, Artificial Sequence; identical to SEQ ID NO: 6725
  Synthetic Polypeptide

SEQ ID NO: 6822 - protein, 400 aa, Artificial Sequence; identical to SEQ ID NO: 6726
  Synthetic Polypeptide

SEQ ID NO: 6823 - protein, 266 aa, Artificial Sequence; identical to SEQ ID NO: 6727
  Synthetic Polypeptide

SEQ ID NO: 6824 - protein, 241 aa, Artificial Sequence; identical to SEQ ID NO: 6728
  Synthetic Polypeptide

SEQ ID NO: 6825 - protein, 499 aa, Artificial Sequence; identical to SEQ ID NO: 6729
  Synthetic Polypeptide

SEQ ID NO: 6826 - protein, 499 aa, Artificial Sequence; identical to SEQ ID NO: 6730
  Synthetic Polypeptide

SEQ ID NO: 6827 - protein, 1169 aa, Artificial Sequence
  Synthetic Polypeptide
MALPVTALLLPLALLLHAARPDIQMTQSPSSLSASVGDRVTITCKASDHINNWLAWYQQKPGQAPKLLIYGATTLETGVPSRFSGSGSGTDYTLTISSLQPEDFATYYCQQSWNTPWTFGQGTKLEIKRLENKILVKQSPMLVAYDNAVNLSCKYSYNLFSREFRASLHKGLDSAVEVCVVYGNYSQQLQVYSKTGFNCDGKLGNESVTFYLQNLYVNQTDIYFCKIEVMYPPPYLDNEKSNGTIIHVKGKHLCPSPLFPGPSKPFWVLVVVGGVLACYSLLVTVAFIIFWVRSKRSRLLHSDYMNMTPRRPGPTRKHYQPYAPPRDFAAYRSSTSRVKFSRSADAPAYQQGQNQLYNELNLGRREEYDVLDKRRGRDPEMGGKPQRRKNPQEGLYNELQKDKMAEAYSEIGMKGERRRGKGHDGLYQGLSTATKDTYDALHMQALPPRRAKRSGSGATNFSLLKQAGDVEENPGPMDWIWRILFLVGAATGAHSFEQVQLQQPGAELVKPGASVKMSCKASGYAFSSYWINWMKQKPGQGLEWIGQIYPGDGDTNYNGKFKGRATLTADTSSSTAYMQLSSLTSEDSAVYFCARSITTVVGCAMDYWGQGTSVTVSSTRNKILVKQSPMLVAYDNAVNLSCKYSYNLFSREFRASLHKGLDSAVEVCVVYGNYSQQLQVYSKTGFNCDGKLGNESVTFYLQNLYVNQTDIYFCKIEVMYPPPYLDNEKSNGTIIHVKGKHLCPSPLFPGPSKPFWVLVVVGGVLACYSLLVTVAFIIFWVRSKRSRLLHSDYMNMTPRRPGPTRKHYQPYAPPRDFAAYRSSSRRVKFSRSADAPAYQQGQNQLYNELNLGRREEYDVLDKRRGRDPEMGGKPQRRKNPQEGLYNELQKDKMAEAYSEIGMKGERRRGKGHDGLYQGLSTATKDTYDALHMQALPPRRAKRSGSGVKQTLNFDLLKLAGDVESNPGPGHMTEYKPTVRLATRDDVPRAVRTLAAAFADYPATRHTVDPDRHIERVTELQELFLTRVGLDIGKVWVADDGAAVAVWTTPESVEAGAVFAEIGPRMAELSGSRLAAQQQMEGLLAPHRPKEPAWFLATVGVSPDHQGKGLGSAVVLPGVEAAERAGVPAFLETSAPRNLPFYERLGFTVTADVEVPEGPRTWCMTRKPGA

SEQ ID NO: 6828 - protein, 1221 aa, Artificial Sequence
  Synthetic Polypeptide
MALPVTALLLPLALLLHAARPACEVQLLESGGGLIQPGGSLRLSCAASGFTFSSHAMTWVRQAPGKGLEWVSAISGSGDYTHYADSVKGRFTISRDNSKNTVYLQMNSLRAEDSAVYYCAKDEDGGSLLGHRGQGTLVTVSSGTGGGGSGGGGSGGGGSEFGSLENKILVKQSPMLVAYDNAVNLSCKYSYNLFSREFRASLHKGLDSAVEVCVVYGNYSQQLQVYSKTGFNCDGKLGNESVTFYLQNLYVNQTDIYFCKIEVMYPPPYLDNEKSNGTIIHVKGKHLCPSPLFPGPSKPFWVLVVVGGVLACYSLLVTVAFIIFWVRSKRSRLLHSDYMNMTPRRPGPTRKHYQPYAPPRDFAAYRSSTSRVKFSRSADAPAYQQGQNQLYNELNLGRREEYDVLDKRRGRDPEMGGKPQRRKNPQEGLYNELQKDKMAEAYSEIGMKGERRRGKGHDGLYQGLSTATKDTYDALHMQALPPRRAKRSGSGATNFSLLKQAGDVEENPGPMDWIWRILFLVGAATGAHSGPEVQLVESGGGLVQAGGSLRLSCAASGRTFSMGWFRQAPGKEREFVAAITYSGGSPYYADSVKGRFTISRDNAKNTVYLQMNSLKPEDTAVYYCAANPTYGSDWNAENWGQGTQVTVSSGSGGGGSGGGGSGGGGSFEGSTRNKILVKQSPMLVAYDNAVNLSCKYSYNLFSREFRASLHKGLDSAVEVCVVYGNYSQQLQVYSKTGFNCDGKLGNESVTFYLQNLYVNQTDIYFCKIEVMYPPPYLDNEKSNGTIIHVKGKHLCPSPLFPGPSKPFWVLVVVGGVLACYSLLVTVAFIIFWVRSKRSRLLHSDYMNMTPRRPGPTRKHYQPYAPPRDFAAYRSSSRRVKFSRSADAPAYQQGQNQLYNELNLGRREEYDVLDKRRGRDPEMGGKPQRRKNPQEGLYNELQKDKMAEAYSEIGMKGERRRGKGHDGLYQGLSTATKDTYDALHMQALPPRRAKRSGSGVKQTLNFDLLKLAGDVESNPGPGHMTEYKPTVRLATRDDVPRAVRTLAAAFADYPATRHTVDPDRHIERVTELQELFLTRVGLDIGKVWVADDGAAVAVWTTPESVEAGAVFAEIGPRMAELSGSRLAAQQQMEGLLAPHRPKEPAWFLATVGVSPDHQGKGLGSAVVLPGVEAAERAGVPAFLETSAPRNLPFYERLGFTVTADVEVPEGPRTWCMTRKPGA

SEQ ID NO: 6829 - protein, 1371 aa, Artificial Sequence
  Synthetic Polypeptide
MALPVTALLLPLALLLHAARPDIQMTQSPSSLSASVGDRVTITCKASDHINNWLAWYQQKPGQAPKLLIYGATTLETGVPSRFSGSGSGTDYTLTISSLQPEDFATYYCQQSWNTPWTFGQGTKLEIKRLEGQPKANPTVTLFPPSSEELQANKATLVCLISDFYPGAVTVAWKADGSPVKAGVETTKPSKQSNNKYAASSYLSLTPEQWKSHRSYSCQVTHEGSTVEKTVAPTECSGSNKILVKQSPMLVAYDNAVNLSCKYSYNLFSREFRASLHKGLDSAVEVCVVYGNYSQQLQVYSKTGFNCDGKLGNESVTFYLQNLYVNQTDIYFCKIEVMYPPPYLDNEKSNGTIIHVKGKHLCPSPLFPGPSKPFWVLVVVGGVLACYSLLVTVAFIIFWVRSKRSRLLHSDYMNMTPRRPGPTRKHYQPYAPPRDFAAYRSSTSRVKFSRSADAPAYQQGQNQLYNELNLGRREEYDVLDKRRGRDPEMGGKPQRRKNPQEGLYNELQKDKMAEAYSEIGMKGERRRGKGHDGLYQGLSTATKDTYDALHMQALPPRRAKRSGSGATNFSLLKQAGDVEENPGPMDWIWRILFLVGAATGAHSFEQVQLQQPGAELVKPGASVKMSCKASGYAFSSYWINWMKQKPGQGLEWIGQIYPGDGDTNYNGKFKGRATLTADTSSSTAYMQLSSLTSEDSAVYFCARSITTVVGCAMDYWGQGTSVTVSSTRASTKGPSVFPLAPSSKSTSGGTAALGCLVKDYFPEPVTVSWNSGALTSGVHTFPAVLQSSGLYSLSSVVTVPSSSLGTQTYICNVNHKPSNTKVDKRVEPKSCGTNKILVKQSPMLVAYDNAVNLSCKYSYNLFSREFRASLHKGLDSAVEVCVVYGNYSQQLQVYSKTGFNCDGKLGNESVTFYLQNLYVNQTDIYFCKIEVMYPPPYLDNEKSNGTIIHVKGKHLCPSPLFPGPSKPFWVLVVVGGVLACYSLLVTVAFIIFWVRSKRSRLLHSDYMNMTPRRPGPTRKHYQPYAPPRDFAAYRSSSRRVKFSRSADAPAYQQGQNQLYNELNLGRREEYDVLDKRRGRDPEMGGKPQRRKNPQEGLYNELQKDKMAEAYSEIGMKGERRRGKGHDGLYQGLSTATKDTYDALHMQALPPRRAKRSGSGVKQTLNFDLLKLAGDVESNPGPGHMATYEVLCEVARKLGTDDREVVLFLLNVFIPQPTLAQLIGALRALKEEGRLTFPLLAECLFRAGRRDLLRDLLHLDPRFLERHLAGTMSYFSPYQLTVLHVDGELCARDIRSLIFLSKDTIGSRSTPQTFLHWVYCMENLDLLGPTDVDALMSMLRSLSRVDLQRQVQTLMGLHLSGPSHSQHYRHTP

SEQ ID NO: 6830 - protein, 1424 aa, Artificial Sequence
  Synthetic Polypeptide
MALPVTALLLPLALLLHAARPDIQMTQSPSSLSASVGDRVTITCKASDHINNWLAWYQQKPGQAPKLLIYGATTLETGVPSRFSGSGSGTDYTLTISSLQPEDFATYYCQQSWNTPWTFGQGTKLEIKRLEGQPKANPTVTLFPPSSEELQANKATLVCLISDFYPGAVTVAWKADGSPVKAGVETTKPSKQSNNKYAASSYLSLTPEQWKSHRSYSCQVTHEGSTVEKTVAPTECSGSNKILVKQSPMLVAYDNAVNLSCKYSYNLFSREFRASLHKGLDSAVEVCVVYGNYSQQLQVYSKTGFNCDGKLGNESVTFYLQNLYVNQTDIYFCKIEVMYPPPYLDNEKSNGTIIHVKGKHLCPSPLFPGPSKPFWVLVVVGGVLACYSLLVTVAFIIFWVRSKRSRLLHSDYMNMTPRRPGPTRKHYQPYAPPRDFAAYRSSTSRVKFSRSADAPAYQQGQNQLYNELNLGRREEYDVLDKRRGRDPEMGGKPQRRKNPQEGLYNELQKDKMAEAYSEIGMKGERRRGKGHDGLYQGLSTATKDTYDALHMQALPPRRAKRSGSGATNFSLLKQAGDVEENPGPMDWIWRILFLVGAATGAHSFEQVQLQQPGAELVKPGASVKMSCKASGYAFSSYWINWMKQKPGQGLEWIGQIYPGDGDTNYNGKFKGRATLTADTSSSTAYMQLSSLTSEDSAVYFCARSITTVVGCAMDYWGQGTSVTVSSTRASTKGPSVFPLAPSSKSTSGGTAALGCLVKDYFPEPVTVSWNSGALTSGVHTFPAVLQSSGLYSLSSVVTVPSSSLGTQTYICNVNHKPSNTKVDKRVEPKSCGTNKILVKQSPMLVAYDNAVNLSCKYSYNLFSREFRASLHKGLDSAVEVCVVYGNYSQQLQVYSKTGFNCDGKLGNESVTFYLQNLYVNQTDIYFCKIEVMYPPPYLDNEKSNGTIIHVKGKHLCPSPLFPGPSKPFWVLVVVGGVLACYSLLVTVAFIIFWVRSKRSRLLHSDYMNMTPRRPGPTRKHYQPYAPPRDFAAYRSSSRRVKFSRSADAPAYQQGQNQLYNELNLGRREEYDVLDKRRGRDPEMGGKPQRRKNPQEGLYNELQKDKMAEAYSEIGMKGERRRGKGHDGLYQGLSTATKDTYDALHMQALPPRRAKRSGSGVKQTLNFDLLKLAGDVESNPGPGHMSDSKEVPSLPFLRHLLEELDSHEDSLLLFLCHDAAPGCTTVTQALCSLSQQRKLTLAALVEMLYVLQRMDLLKSRFGLSKEGAEQLLGTSFLTRYRKLMVCVGEELDSSELRALRLFACNLNPSLSTALSESSRFVELVLALENVGLVSPSSVSVLADMLRTLRRLDLCQQLVEYEQQEQARYRYCYAASPSLPVRTLRRGHGASEHEQLCMPVQESSDSPELLRTPVQESSSDSPEQTT

SEQ ID NO: 6831 - protein, 1382 aa, Artificial Sequence
  Synthetic Polypeptide
MALPVTALLLPLALLLHAARPDIQMTQSPSSLSASVGDRVTITCKASDHINNWLAWYQQKPGQAPKLLIYGATTLETGVPSRFSGSGSGTDYTLTISSLQPEDFATYYCQQSWNTPWTFGQGTKLEIKRLEGQPKANPTVTLFPPSSEELQANKATLVCLISDFYPGAVTVAWKADGSPVKAGVETTKPSKQSNNKYAASSYLSLTPEQWKSHRSYSCQVTHEGSTVEKTVAPTECSGSNKILVKQSPMLVAYDNAVNLSCKYSYNLFSREFRASLHKGLDSAVEVCVVYGNYSQQLQVYSKTGFNCDGKLGNESVTFYLQNLYVNQTDIYFCKIEVMYPPPYLDNEKSNGTIIHVKGKHLCPSPLFPGPSKPFWVLVVVGGVLACYSLLVTVAFIIFWVRSKRSRLLHSDYMNMTPRRPGPTRKHYQPYAPPRDFAAYRSSTSRVKFSRSADAPAYQQGQNQLYNELNLGRREEYDVLDKRRGRDPEMGGKPQRRKNPQEGLYNELQKDKMAEAYSEIGMKGERRRGKGHDGLYQGLSTATKDTYDALHMQALPPRRAKRSGSGATNFSLLKQAGDVEENPGPMDWIWRILFLVGAATGAHSFEQVQLQQPGAELVKPGASVKMSCKASGYAFSSYWINWMKQKPGQGLEWIGQIYPGDGDTNYNGKFKGRATLTADTSSSTAYMQLSSLTSEDSAVYFCARSITTVVGCAMDYWGQGTSVTVSSTRASTKGPSVFPLAPSSKSTSGGTAALGCLVKDYFPEPVTVSWNSGALTSGVHTFPAVLQSSGLYSLSSVVTVPSSSLGTQTYICNVNHKPSNTKVDKRVEPKSCGTNKILVKQSPMLVAYDNAVNLSCKYSYNLFSREFRASLHKGLDSAVEVCVVYGNYSQQLQVYSKTGFNCDGKLGNESVTFYLQNLYVNQTDIYFCKIEVMYPPPYLDNEKSNGTIIHVKGKHLCPSPLFPGPSKPFWVLVVVGGVLACYSLLVTVAFIIFWVRSKRSRLLHSDYMNMTPRRPGPTRKHYQPYAPPRDFAAYRSSSRRVKFSRSADAPAYQQGQNQLYNELNLGRREEYDVLDKRRGRDPEMGGKPQRRKNPQEGLYNELQKDKMAEAYSEIGMKGERRRGKGHDGLYQGLSTATKDTYDALHMQALPPRRAKRSGSGVKQTLNFDLLKLAGDVESNPGPGHMTEYKPTVRLATRDDVPRAVRTLAAAFADYPATRHTVDPDRHIERVTELQELFLTRVGLDIGKVWVADDGAAVAVWTTPESVEAGAVFAEIGPRMAELSGSRLAAQQQMEGLLAPHRPKEPAWFLATVGVSPDHQGKGLGSAVVLPGVEAAERAGVPAFLETSAPRNLPFYERLGFTVTADVEVPEGPRTWCMTRKPGA

SEQ ID NO: 6832 - protein, 1519 aa, Artificial Sequence
  Synthetic Polypeptide
MALPVTALLLPLALLLHAARPEVQLVESGGGLVQAGGSLRLSCAASGRTFSMGWFRQAPGKEREFVAAITYSGGSPYYADSVKGRFTISRDNAKNTVYLQMNSLKPEDTAVYYCAANPTYGSDWNAENWGQGTQVTVSSGTGGGGSGGGGSGGGGSEFDIQMTQSPSSLSASVGDRVTITCKASDHINNWLAWYQQKPGQAPKLLIYGATTLETGVPSRFSGSGSGTDYTLTISSLQPEDFATYYCQQSWNTPWTFGQGTKLEIKRLEGQPKANPTVTLFPPSSEELQANKATLVCLISDFYPGAVTVAWKADGSPVKAGVETTKPSKQSNNKYAASSYLSLTPEQWKSHRSYSCQVTHEGSTVEKTVAPTECSGSNKILVKQSPMLVAYDNAVNLSCKYSYNLFSREFRASLHKGLDSAVEVCVVYGNYSQQLQVYSKTGFNCDGKLGNESVTFYLQNLYVNQTDIYFCKIEVMYPPPYLDNEKSNGTIIHVKGKHLCPSPLFPGPSKPFWVLVVVGGVLACYSLLVTVAFIIFWVRSKRSRLLHSDYMNMTPRRPGPTRKHYQPYAPPRDFAAYRSSTSRVKFSRSADAPAYQQGQNQLYNELNLGRREEYDVLDKRRGRDPEMGGKPQRRKNPQEGLYNELQKDKMAEAYSEIGMKGERRRGKGHDGLYQGLSTATKDTYDALHMQALPPRRAKRSGSGATNFSLLKQAGDVEENPGPMDWIWRILFLVGAATGAHSFEQVQLQQPGAELVKPGASVKMSCKASGYAFSSYWINWMKQKPGQGLEWIGQIYPGDGDTNYNGKFKGRATLTADTSSSTAYMQLSSLTSEDSAVYFCARSITTVVGCAMDYWGQGTSVTVSSTRASTKGPSVFPLAPSSKSTSGGTAALGCLVKDYFPEPVTVSWNSGALTSGVHTFPAVLQSSGLYSLSSVVTVPSSSLGTQTYICNVNHKPSNTKVDKRVEPKSCGTNKILVKQSPMLVAYDNAVNLSCKYSYNLFSREFRASLHKGLDSAVEVCVVYGNYSQQLQVYSKTGFNCDGKLGNESVTFYLQNLYVNQTDIYFCKIEVMYPPPYLDNEKSNGTIIHVKGKHLCPSPLFPGPSKPFWVLVVVGGVLACYSLLVTVAFIIFWVRSKRSRLLHSDYMNMTPRRPGPTRKHYQPYAPPRDFAAYRSSSRRVKFSRSADAPAYQQGQNQLYNELNLGRREEYDVLDKRRGRDPEMGGKPQRRKNPQEGLYNELQKDKMAEAYSEIGMKGERRRGKGHDGLYQGLSTATKDTYDALHMQALPPRRAKRSGSGVKQTLNFDLLKLAGDVESNPGPGHMTEYKPTVRLATRDDVPRAVRTLAAAFADYPATRHTVDPDRHIERVTELQELFLTRVGLDIGKVWVADDGAAVAVWTTPESVEAGAVFAEIGPRMAELSGSRLAAQQQMEGLLAPHRPKEPAWFLATVGVSPDHQGKGLGSAVVLPGVEAAERAGVPAFLETSAPRNLPFYERLGFTVTADVEVPEGPRTWCMTRKPGA

SEQ ID NO: 6833 - protein, 1656 aa, Artificial Sequence
  Synthetic Polypeptide
MALPVTALLLPLALLLHAARPEVQLVESGGGLVQAGGSLRLSCAASGRTFSMGWFRQAPGKEREFVAAITYSGGSPYYADSVKGRFTISRDNAKNTVYLQMNSLKPEDTAVYYCAANPTYGSDWNAENWGQGTQVTVSSGTGGGGSGGGGSGGGGSEFDIQMTQSPSSLSASVGDRVTITCKASDHINNWLAWYQQKPGQAPKLLIYGATTLETGVPSRFSGSGSGTDYTLTISSLQPEDFATYYCQQSWNTPWTFGQGTKLEIKRLEGQPKANPTVTLFPPSSEELQANKATLVCLISDFYPGAVTVAWKADGSPVKAGVETTKPSKQSNNKYAASSYLSLTPEQWKSHRSYSCQVTHEGSTVEKTVAPTECSGSNKILVKQSPMLVAYDNAVNLSCKYSYNLFSREFRASLHKGLDSAVEVCVVYGNYSQQLQVYSKTGFNCDGKLGNESVTFYLQNLYVNQTDIYFCKIEVMYPPPYLDNEKSNGTIIHVKGKHLCPSPLFPGPSKPFWVLVVVGGVLACYSLLVTVAFIIFWVRSKRSRLLHSDYMNMTPRRPGPTRKHYQPYAPPRDFAAYRSSTSRVKFSRSADAPAYQQGQNQLYNELNLGRREEYDVLDKRRGRDPEMGGKPQRRKNPQEGLYNELQKDKMAEAYSEIGMKGERRRGKGHDGLYQGLSTATKDTYDALHMQALPPRRAKRSGSGATNFSLLKQAGDVEENPGPMDWIWRILFLVGAATGAHSGPEVQLVESGGGLVQAGGSLRLSCAASGRTFTMGWFRQAPGKEREFVAAISLSPTLAYYADSVKGRFTISRDNAKNTVVLQMNSLKPEDTALYYCAADRKSVMSIRPDYWGQGTQVTVSSGSGGGGSGGGGSGGGGSFEQVQLQQPGAELVKPGASVKMSCKASGYAFSSYWINWMKQKPGQGLEWIGQIYPGDGDTNYNGKFKGRATLTADTSSSTAYMQLSSLTSEDSAVYFCARSITTVVGCAMDYWGQGTSVTVSSTRASTKGPSVFPLAPSSKSTSGGTAALGCLVKDYFPEPVTVSWNSGALTSGVHTFPAVLQSSGLYSLSSVVTVPSSSLGTQTYICNVNHKPSNTKVDKRVEPKSCGTNKILVKQSPMLVAYDNAVNLSCKYSYNLFSREFRASLHKGLDSAVEVCVVYGNYSQQLQVYSKTGFNCDGKLGNESVTFYLQNLYVNQTDIYFCKIEVMYPPPYLDNEKSNGTIIHVKGKHLCPSPLFPGPSKPFWVLVVVGGVLACYSLLVTVAFIIFWVRSKRSRLLHSDYMNMTPRRPGPTRKHYQPYAPPRDFAAYRSSSRRVKFSRSADAPAYQQGQNQLYNELNLGRREEYDVLDKRRGRDPEMGGKPQRRKNPQEGLYNELQKDKMAEAYSEIGMKGERRRGKGHDGLYQGLSTATKDTYDALHMQALPPRRAKRSGSGVKQTLNFDLLKLAGDVESNPGPGHMTEYKPTVRLATRDDVPRAVRTLAAAFADYPATRHTVDPDRHIERVTELQELFLTRVGLDIGKVWVADDGAAVAVWTTPESVEAGAVFAEIGPRMAELSGSRLAAQQQMEGLLAPHRPKEPAWFLATVGVSPDHQGKGLGSAVVLPGVEAAERAGVPAFLETSAPRNLPFYERLGFTVTADVEVPEGPRTWCMTRKPGA

SEQ ID NO: 6834 - protein, 1389 aa, Artificial Sequence
  Synthetic Polypeptide
MALPVTALLLPLALLLHAARPEVQLVESGGGLVQAGGSLRLSCAASGRTFSMGWFRQAPGKEREFVAAITYSGGSPYYADSVKGRFTISRDNAKNTVYLQMNSLKPEDTAVYYCAANPTYGSDWNAENWGQGTQVTVSSLEGQPKANPTVTLFPPSSEELQANKATLVCLISDFYPGAVTVAWKADGSPVKAGVETTKPSKQSNNKYAASSYLSLTPEQWKSHRSYSCQVTHEGSTVEKTVAPTECSGSNKILVKQSPMLVAYDNAVNLSCKYSYNLFSREFRASLHKGLDSAVEVCVVYGNYSQQLQVYSKTGFNCDGKLGNESVTFYLQNLYVNQTDIYFCKIEVMYPPPYLDNEKSNGTIIHVKGKHLCPSPLFPGPSKPFWVLVVVGGVLACYSLLVTVAFIIFWVRSKRSRLLHSDYMNMTPRRPGPTRKHYQPYAPPRDFAAYRSSTSRVKFSRSADAPAYQQGQNQLYNELNLGRREEYDVLDKRRGRDPEMGGKPQRRKNPQEGLYNELQKDKMAEAYSEIGMKGERRRGKGHDGLYQGLSTATKDTYDALHMQALPPRRAKRSGSGATNFSLLKQAGDVEENPGPMDWIWRILFLVGAATGAHSGPEVQLVESGGGLVQAGGSLRLSCAASGRTFTMGWFRQAPGKEREFVAAISLSPTLAYYADSVKGRFTISRDNAKNTVVLQMNSLKPEDTALYYCAADRKSVMSIRPDYWGQGTQVTVSSTRASTKGPSVFPLAPSSKSTSGGTAALGCLVKDYFPEPVTVSWNSGALTSGVHTFPAVLQSSGLYSLSSVVTVPSSSLGTQTYICNVNHKPSNTKVDKRVEPKSCGTNKILVKQSPMLVAYDNAVNLSCKYSYNLFSREFRASLHKGLDSAVEVCVVYGNYSQQLQVYSKTGFNCDGKLGNESVTFYLQNLYVNQTDIYFCKIEVMYPPPYLDNEKSNGTIIHVKGKHLCPSPLFPGPSKPFWVLVVVGGVLACYSLLVTVAFIIFWVRSKRSRLLHSDYMNMTPRRPGPTRKHYQPYAPPRDFAAYRSSSRRVKFSRSADAPAYQQGQNQLYNELNLGRREEYDVLDKRRGRDPEMGGKPQRRKNPQEGLYNELQKDKMAEAYSEIGMKGERRRGKGHDGLYQGLSTATKDTYDALHMQALPPRRAKRSGSGVKQTLNFDLLKLAGDVESNPGPGHMTEYKPTVRLATRDDVPRAVRTLAAAFADYPATRHTVDPDRHIERVTELQELFLTRVGLDIGKVWVADDGAAVAVWTTPESVEAGAVFAEIGPRMAELSGSRLAAQQQMEGLLAPHRPKEPAWFLATVGVSPDHQGKGLGSAVVLPGVEAAERAGVPAFLETSAPRNLPFYERLGFTVTADVEVPEGPRTWCMTRKPGA

SEQ ID NO: 6835 - protein, 1397 aa, Artificial Sequence
  Synthetic Polypeptide
MALPVTALLLPLALLLHAARPDIQMTQSPSSLSASVGDRVTITCKASDHINNWLAWYQQKPGQAPKLLIYGATTLETGVPSRFSGSGSGTDYTLTISSLQPEDFATYYCQQSWNTPWTFGQGTKLEIKRLEDLKNVFPPEVAVFEPSEAEISHTQKATLVCLATGFYPDHVELSWWVNGKEVHSGVSTDPQPLKEQPALNDSRYCLSSRLRVSATFWQNPRNHFRCQVQFYGLSENDEWTQDRAKPVTQIVSAEAWGRADCGSNKILVKQSPMLVAYDNAVNLSCKYSYNLFSREFRASLHKGLDSAVEVCVVYGNYSQQLQVYSKTGFNCDGKLGNESVTFYLQNLYVNQTDIYFCKIEVMYPPPYLDNEKSNGTIIHVKGKHLCPSPLFPGPSKPFWVLVVVGGVLACYSLLVTVAFIIFWVRSKRSRLLHSDYMNMTPRRPGPTRKHYQPYAPPRDFAAYRSSTSRVKFSRSADAPAYQQGQNQLYNELNLGRREEYDVLDKRRGRDPEMGGKPQRRKNPQEGLYNELQKDKMAEAYSEIGMKGERRRGKGHDGLYQGLSTATKDTYDALHMQALPPRRAKRSGSGATNFSLLKQAGDVEENPGPMDWIWRILFLVGAATGAHSFEQVQLQQPGAELVKPGASVKMSCKASGYAFSSYWINWMKQKPGQGLEWIGQIYPGDGDTNYNGKFKGRATLTADTSSSTAYMQLSSLTSEDSAVYFCARSITTVVGCAMDYWGQGTSVTVSSTRIQNPDPAVYQLRDSKSSDKSVCLFTDFDSQTNVSQSKDSDVYITDKTVLDMRSMDFKSNSAVAWSNKSDFACANAFNNSIIPEDTFFPSPESSCGTNKILVKQSPMLVAYDNAVNLSCKYSYNLFSREFRASLHKGLDSAVEVCVVYGNYSQQLQVYSKTGFNCDGKLGNESVTFYLQNLYVNQTDIYFCKIEVMYPPPYLDNEKSNGTIIHVKGKHLCPSPLFPGPSKPFWVLVVVGGVLACYSLLVTVAFIIFWVRSKRSRLLHSDYMNMTPRRPGPTRKHYQPYAPPRDFAAYRSSSRRVKFSRSADAPAYQQGQNQLYNELNLGRREEYDVLDKRRGRDPEMGGKPQRRKNPQEGLYNELQKDKMAEAYSEIGMKGERRRGKGHDGLYQGLSTATKDTYDALHMQALPPRRAKRSGSGVKQTLNFDLLKLAGDVESNPGPGHMTEYKPTVRLATRDDVPRAVRTLAAAFADYPATRHTVDPDRHIERVTELQELFLTRVGLDIGKVWVADDGAAVAVWTTPESVEAGAVFAEIGPRMAELSGSRLAAQQQMEGLLAPHRPKEPAWFLATVGVSPDHQGKGLGSAVVLPGVEAAERAGVPAFLETSAPRNLPFYERLGFTVTADVEVPEGPRTWCMTRKPGA

SEQ ID NO: 6836 - protein, 1534 aa, Artificial Sequence
  Synthetic Polypeptide
MALPVTALLLPLALLLHAARPEVQLVESGGGLVQAGGSLRLSCAASGRTFSMGWFRQAPGKEREFVAAITYSGGSPYYADSVKGRFTISRDNAKNTVYLQMNSLKPEDTAVYYCAANPTYGSDWNAENWGQGTQVTVSSGTGGGGSGGGGSGGGGSEFDIQMTQSPSSLSASVGDRVTITCKASDHINNWLAWYQQKPGQAPKLLIYGATTLETGVPSRFSGSGSGTDYTLTISSLQPEDFATYYCQQSWNTPWTFGQGTKLEIKRLEDLKNVFPPEVAVFEPSEAEISHTQKATLVCLATGFYPDHVELSWWVNGKEVHSGVSTDPQPLKEQPALNDSRYCLSSRLRVSATFWQNPRNHFRCQVQFYGLSENDEWTQDRAKPVTQIVSAEAWGRADCGSNKILVKQSPMLVAYDNAVNLSCKYSYNLFSREFRASLHKGLDSAVEVCVVYGNYSQQLQVYSKTGFNCDGKLGNESVTFYLQNLYVNQTDIYFCKIEVMYPPPYLDNEKSNGTIIHVKGKHLCPSPLFPGPSKPFWVLVVVGGVLACYSLLVTVAFIIFWVRSKRSRLLHSDYMNMTPRRPGPTRKHYQPYAPPRDFAAYRSSTSRVKFSRSADAPAYQQGQNQLYNELNLGRREEYDVLDKRRGRDPEMGGKPQRRKNPQEGLYNELQKDKMAEAYSEIGMKGERRRGKGHDGLYQGLSTATKDTYDALHMQALPPRRAKRSGSGATNFSLLKQAGDVEENPGPMDWIWRILFLVGAATGAHSFEQVQLQQPGAELVKPGASVKMSCKASGYAFSSYWINWMKQKPGQGLEWIGQIYPGDGDTNYNGKFKGRATLTADTSSSTAYMQLSSLTSEDSAVYFCARSITTVVGCAMDYWGQGTSVTVSSTRIQNPDPAVYQLRDSKSSDKSVCLFTDFDSQTNVSQSKDSDVYITDKTVLDMRSMDFKSNSAVAWSNKSDFACANAFNNSIIPEDTFFPSPESSCGTNKILVKQSPMLVAYDNAVNLSCKYSYNLFSREFRASLHKGLDSAVEVCVVYGNYSQQLQVYSKTGFNCDGKLGNESVTFYLQNLYVNQTDIYFCKIEVMYPPPYLDNEKSNGTIIHVKGKHLCPSPLFPGPSKPFWVLVVVGGVLACYSLLVTVAFIIFWVRSKRSRLLHSDYMNMTPRRPGPTRKHYQPYAPPRDFAAYRSSSRRVKFSRSADAPAYQQGQNQLYNELNLGRREEYDVLDKRRGRDPEMGGKPQRRKNPQEGLYNELQKDKMAEAYSEIGMKGERRRGKGHDGLYQGLSTATKDTYDALHMQALPPRRAKRSGSGVKQTLNFDLLKLAGDVESNPGPGHMTEYKPTVRLATRDDVPRAVRTLAAAFADYPATRHTVDPDRHIERVTELQELFLTRVGLDIGKVWVADDGAAVAVWTTPESVEAGAVFAEIGPRMAELSGSRLAAQQQMEGLLAPHRPKEPAWFLATVGVSPDHQGKGLGSAVVLPGVEAAERAGVPAFLETSAPRNLPFYERLGFTVTADVEVPEGPRTWCMTRKPGA

SEQ ID NO: 6837 - protein, 1671 aa, Artificial Sequence
  Synthetic Polypeptide
MALPVTALLLPLALLLHAARPEVQLVESGGGLVQAGGSLRLSCAASGRTFSMGWFRQAPGKEREFVAAITYSGGSPYYADSVKGRFTISRDNAKNTVYLQMNSLKPEDTAVYYCAANPTYGSDWNAENWGQGTQVTVSSGTGGGGSGGGGSGGGGSEFDIQMTQSPSSLSASVGDRVTITCKASDHINNWLAWYQQKPGQAPKLLIYGATTLETGVPSRFSGSGSGTDYTLTISSLQPEDFATYYCQQSWNTPWTFGQGTKLEIKRLEDLKNVFPPEVAVFEPSEAEISHTQKATLVCLATGFYPDHVELSWWVNGKEVHSGVSTDPQPLKEQPALNDSRYCLSSRLRVSATFWQNPRNHFRCQVQFYGLSENDEWTQDRAKPVTQIVSAEAWGRADCGSNKILVKQSPMLVAYDNAVNLSCKYSYNLFSREFRASLHKGLDSAVEVCVVYGNYSQQLQVYSKTGFNCDGKLGNESVTFYLQNLYVNQTDIYFCKIEVMYPPPYLDNEKSNGTIIHVKGKHLCPSPLFPGPSKPFWVLVVVGGVLACYSLLVTVAFIIFWVRSKRSRLLHSDYMNMTPRRPGPTRKHYQPYAPPRDFAAYRSSTSRVKFSRSADAPAYQQGQNQLYNELNLGRREEYDVLDKRRGRDPEMGGKPQRRKNPQEGLYNELQKDKMAEAYSEIGMKGERRRGKGHDGLYQGLSTATKDTYDALHMQALPPRRAKRSGSGATNFSLLKQAGDVEENPGPMDWIWRILFLVGAATGAHSGPEVQLVESGGGLVQAGGSLRLSCAASGRTFTMGWFRQAPGKEREFVAAISLSPTLAYYADSVKGRFTISRDNAKNTVVLQMNSLKPEDTALYYCAADRKSVMSIRPDYWGQGTQVTVSSGSGGGGSGGGGSGGGGSFEQVQLQQPGAELVKPGASVKMSCKASGYAFSSYWINWMKQKPGQGLEWIGQIYPGDGDTNYNGKFKGRATLTADTSSSTAYMQLSSLTSEDSAVYFCARSITTVVGCAMDYWGQGTSVTVSSTRIQNPDPAVYQLRDSKSSDKSVCLFTDFDSQTNVSQSKDSDVYITDKTVLDMRSMDFKSNSAVAWSNKSDFACANAFNNSIIPEDTFFPSPESSCGTNKILVKQSPMLVAYDNAVNLSCKYSYNLFSREFRASLHKGLDSAVEVCVVYGNYSQQLQVYSKTGFNCDGKLGNESVTFYLQNLYVNQTDIYFCKIEVMYPPPYLDNEKSNGTIIHVKGKHLCPSPLFPGPSKPFWVLVVVGGVLACYSLLVTVAFIIFWVRSKRSRLLHSDYMNMTPRRPGPTRKHYQPYAPPRDFAAYRSSSRRVKFSRSADAPAYQQGQNQLYNELNLGRREEYDVLDKRRGRDPEMGGKPQRRKNPQEGLYNELQKDKMAEAYSEIGMKGERRRGKGHDGLYQGLSTATKDTYDALHMQALPPRRAKRSGSGVKQTLNFDLLKLAGDVESNPGPGHMTEYKPTVRLATRDDVPRAVRTLAAAFADYPATRHTVDPDRHIERVTELQELFLTRVGLDIGKVWVADDGAAVAVWTTPESVEAGAVFAEIGPRMAELSGSRLAAQQQMEGLLAPHRPKEPAWFLATVGVSPDHQGKGLGSAVVLPGVEAAERAGVPAFLETSAPRNLPFYERLGFTVTADVEVPEGPRTWCMTRKPGA

SEQ ID NO: 6838 - protein, 1404 aa, Artificial Sequence
  Synthetic Polypeptide
MALPVTALLLPLALLLHAARPEVQLVESGGGLVQAGGSLRLSCAASGRTFSMGWFRQAPGKEREFVAAITYSGGSPYYADSVKGRFTISRDNAKNTVYLQMNSLKPEDTAVYYCAANPTYGSDWNAENWGQGTQVTVSSLEDLKNVFPPEVAVFEPSEAEISHTQKATLVCLATGFYPDHVELSWWVNGKEVHSGVSTDPQPLKEQPALNDSRYCLSSRLRVSATFWQNPRNHFRCQVQFYGLSENDEWTQDRAKPVTQIVSAEAWGRADCGSNKILVKQSPMLVAYDNAVNLSCKYSYNLFSREFRASLHKGLDSAVEVCVVYGNYSQQLQVYSKTGFNCDGKLGNESVTFYLQNLYVNQTDIYFCKIEVMYPPPYLDNEKSNGTIIHVKGKHLCPSPLFPGPSKPFWVLVVVGGVLACYSLLVTVAFIIFWVRSKRSRLLHSDYMNMTPRRPGPTRKHYQPYAPPRDFAAYRSSTSRVKFSRSADAPAYQQGQNQLYNELNLGRREEYDVLDKRRGRDPEMGGKPQRRKNPQEGLYNELQKDKMAEAYSEIGMKGERRRGKGHDGLYQGLSTATKDTYDALHMQALPPRRAKRSGSGATNFSLLKQAGDVEENPGPMDWIWRILFLVGAATGAHSGPEVQLVESGGGLVQAGGSLRLSCAASGRTFTMGWFRQAPGKEREFVAAISLSPTLAYYADSVKGRFTISRDNAKNTVVLQMNSLKPEDTALYYCAADRKSVMSIRPDYWGQGTQVTVSSTRIQNPDPAVYQLRDSKSSDKSVCLFTDFDSQTNVSQSKDSDVYITDKTVLDMRSMDFKSNSAVAWSNKSDFACANAFNNSIIPEDTFFPSPESSCGTNKILVKQSPMLVAYDNAVNLSCKYSYNLFSREFRASLHKGLDSAVEVCVVYGNYSQQLQVYSKTGFNCDGKLGNESVTFYLQNLYVNQTDIYFCKIEVMYPPPYLDNEKSNGTIIHVKGKHLCPSPLFPGPSKPFWVLVVVGGVLACYSLLVTVAFIIFWVRSKRSRLLHSDYMNMTPRRPGPTRKHYQPYAPPRDFAAYRSSSRRVKFSRSADAPAYQQGQNQLYNELNLGRREEYDVLDKRRGRDPEMGGKPQRRKNPQEGLYNELQKDKMAEAYSEIGMKGERRRGKGHDGLYQGLSTATKDTYDALHMQALPPRRAKRSGSGVKQTLNFDLLKLAGDVESNPGPGHMTEYKPTVRLATRDDVPRAVRTLAAAFADYPATRHTVDPDRHIERVTELQELFLTRVGLDIGKVWVADDGAAVAVWTTPESVEAGAVFAEIGPRMAELSGSRLAAQQQMEGLLAPHRPKEPAWFLATVGVSPDHQGKGLGSAVVLPGVEAAERAGVPAFLETSAPRNLPFYERLGFTVTADVEVPEGPRTWCMTRKPGA

SEQ ID NO: 6839 - protein, 713 aa, Artificial Sequence
  Synthetic Polypeptide
MALPVTALLLPLALLLHAARPACEVQLLESGGGLIQPGGSLRLSCAASGFTFSSHAMTWVRQAPGKGLEWVSAISGSGDYTHYADSVKGRFTISRDNSKNTVYLQMNSLRAEDSAVYYCAKDEDGGSLLGHRGQGTLVTVSSGTGGGGSGGGGSGGGGSEFGSLENKILVKQSPMLVAYDNAVNLSCKYSYNLFSREFRASLHKGLDSAVEVCVVYGNYSQQLQVYSKTGFNCDGKLGNESVTFYLQNLYVNQTDIYFCKIEVMYPPPYLDNEKSNGTIIHVKGKHLCPSPLFPGPSKPFWVLVVVGGVLACYSLLVTVAFIIFWVRSKRSRLLHSDYMNMTPRRPGPTRKHYQPYAPPRDFAAYRSSTSRVKFSRSADAPAYQQGQNQLYNELNLGRREEYDVLDKRRGRDPEMGGKPQRRKNPQEGLYNELQKDKMAEAYSEIGMKGERRRGKGHDGLYQGLSTATKDTYDALHMQALPPRRAKRSGSGATNFSLLKQAGDVEENPGPTRGHMTEYKPTVRLATRDDVPRAVRTLAAAFADYPATRHTVDPDRHIERVTELQELFLTRVGLDIGKVWVADDGAAVAVWTTPESVEAGAVFAEIGPRMAELSGSRLAAQQQMEGLLAPHRPKEPAWFLATVGVSPDHQGKGLGSAVVLPGVEAAERAGVPAFLETSAPRNLPFYERLGFTVTADVEVPEGPRTWCMTRKPGA

SEQ ID NO: 6840 - protein, 585 aa, Artificial Sequence
  Synthetic Polypeptide
MALPVTALLLPLALLLHAARPDIQMTQSPSSLSASVGDRVTITCKASDHINNWLAWYQQKPGQAPKLLIYGATTLETGVPSRFSGSGSGTDYTLTISSLQPEDFATYYCQQSWNTPWTFGQGTKLEIKRGGGGSGGGGSGGGGSQVQLQQPGAELVKPGASVKMSCKASGYAFSSYWINWMKQKPGQGLEWIGQIYPGDGDTNYNGKFKGRATLTADTSSSTAYMQLSSLTSEDSAVYFCARSITTVVGCAMDYWGQGTSVTVSSTRNKILVKQSPMLVAYDNAVNLSCKYSYNLFSREFRASLHKGLDSAVEVCVVYGNYSQQLQVYSKTGFNCDGKLGNESVTFYLQNLYVNQTDIYFCKIEVMYPPPYLDNEKSNGTIIHVKGKHLCPSPLFPGPSKPFWVLVVVGGVLACYSLLVTVAFIIFWVRSKRSRLLHSDYMNMTPRRPGPTRKHYQPYAPPRDFAAYRSSTSRVKFSRSADAPAYQQGQNQLYNELNLGRREEYDVLDKRRGRDPEMGGKPQRRKNPQEGLYNELQKDKMAEAYSEIGMKGERRRGKGHDGLYQGLSTATKDTYDALHMQALPPR

SEQ ID NO: 6841 - protein, 585 aa, Artificial Sequence
  Synthetic Polypeptide
MALPVTALLLPLALLLHAARPEIVLTQSPATLSLSPGERATLSCRASQSVSSYLAWYQQKPGQAPRLLIYDASNRATGIPARFSGSGSGTDFTLTISSLEPEDFAVYYCQQRSNWPITFGQGTRLEIKGGGGSGGGGSGGGGSEVQLVESGGGLVQPGRSLRLSCAASGFTFNDYAMHWVRQAPGKGLEWVSTISWNSGSIGYADSVKGRFTISRDNAKKSLYLQMNSLRAEDTALYYCAKDIQYGNYYYGMDVWGQGTTVTVSSTRNKILVKQSPMLVAYDNAVNLSCKYSYNLFSREFRASLHKGLDSAVEVCVVYGNYSQQLQVYSKTGFNCDGKLGNESVTFYLQNLYVNQTDIYFCKIEVMYPPPYLDNEKSNGTIIHVKGKHLCPSPLFPGPSKPFWVLVVVGGVLACYSLLVTVAFIIFWVRSKRSRLLHSDYMNMTPRRPGPTRKHYQPYAPPRDFAAYRSSTSRVKFSRSADAPAYQQGQNQLYNELNLGRREEYDVLDKRRGRDPEMGGKPQRRKNPQEGLYNELQKDKMAEAYSEIGMKGERRRGKGHDGLYQGLSTATKDTYDALHMQALPPR

SEQ ID NO: 6842 - protein, 459 aa, Artificial Sequence
  Synthetic Polypeptide
MALPVTALLLPLALLLHAARPEVQLVESGGGLVQAGGSLRLSCAASGRTFSMGWFRQAPGKEREFVAAITYSGGSPYYADSVKGRFTISRDNAKNTVYLQMNSLKPEDTAVYYCAANPTYGSDWNAENWGQGTQVTVSSTRNKILVKQSPMLVAYDNAVNLSCKYSYNLFSREFRASLHKGLDSAVEVCVVYGNYSQQLQVYSKTGFNCDGKLGNESVTFYLQNLYVNQTDIYFCKIEVMYPPPYLDNEKSNGTIIHVKGKHLCPSPLFPGPSKPFWVLVVVGGVLACYSLLVTVAFIIFWVRSKRSRLLHSDYMNMTPRRPGPTRKHYQPYAPPRDFAAYRSSTSRVKFSRSADAPAYQQGQNQLYNELNLGRREEYDVLDKRRGRDPEMGGKPQRRKNPQEGLYNELQKDKMAEAYSEIGMKGERRRGKGHDGLYQGLSTATKDTYDALHMQALPPR

SEQ ID NO: 6843 - protein, 459 aa, Artificial Sequence
  Synthetic Polypeptide
MALPVTALLLPLALLLHAARPQLQLQESGPGLVKPSETLSLTCTVSGGSISSGDYYWGWIRQPPGKGLEWIGHIYYSGATYYNPSLKSRVTISVDTSRNQFSLKLSSVTAADTAVYYCTRDDSSNWRSRGQGTLVTVSSTRNKILVKQSPMLVAYDNAVNLSCKYSYNLFSREFRASLHKGLDSAVEVCVVYGNYSQQLQVYSKTGFNCDGKLGNESVTFYLQNLYVNQTDIYFCKIEVMYPPPYLDNEKSNGTIIHVKGKHLCPSPLFPGPSKPFWVLVVVGGVLACYSLLVTVAFIIFWVRSKRSRLLHSDYMNMTPRRPGPTRKHYQPYAPPRDFAAYRSSTSRVKFSRSADAPAYQQGQNQLYNELNLGRREEYDVLDKRRGRDPEMGGKPQRRKNPQEGLYNELQKDKMAEAYSEIGMKGERRRGKGHDGLYQGLSTATKDTYDALHMQALPPR

SEQ ID NO: 6844 - protein, 459 aa, Artificial Sequence
  Synthetic Polypeptide
MALPVTALLLPLALLLHAARPQLQLQESGPGLVKPSETLSLTCTVSGDSISSGDYYWGWIRQPPGKGLEWIGHIYYSGVTYYNPSLKSRVTISVDTSRNQFSLKLSSVTAADTAVYYCTREDSSNWRSRGQGTLVTVSSTRNKILVKQSPMLVAYDNAVNLSCKYSYNLFSREFRASLHKGLDSAVEVCVVYGNYSQQLQVYSKTGFNCDGKLGNESVTFYLQNLYVNQTDIYFCKIEVMYPPPYLDNEKSNGTIIHVKGKHLCPSPLFPGPSKPFWVLVVVGGVLACYSLLVTVAFIIFWVRSKRSRLLHSDYMNMTPRRPGPTRKHYQPYAPPRDFAAYRSSTSRVKFSRSADAPAYQQGQNQLYNELNLGRREEYDVLDKRRGRDPEMGGKPQRRKNPQEGLYNELQKDKMAEAYSEIGMKGERRRGKGHDGLYQGLSTATKDTYDALHMQALPPR

SEQ ID NO: 6845 - protein, 461 aa, Artificial Sequence
  Synthetic Polypeptide
MALPVTALLLPLALLLHAARPEVQLQESGGGLVQPGGSLRLSCAASGRTFSSLFMGWFRQAPGKERELVAAISRYSLYTYYADSVKGRFTISADNAKNAVYLQMNSLKPEDTAVYYCASKLEYTSNDYDSWGQGTQVTVSSTRNKILVKQSPMLVAYDNAVNLSCKYSYNLFSREFRASLHKGLDSAVEVCVVYGNYSQQLQVYSKTGFNCDGKLGNESVTFYLQNLYVNQTDIYFCKIEVMYPPPYLDNEKSNGTIIHVKGKHLCPSPLFPGPSKPFWVLVVVGGVLACYSLLVTVAFIIFWVRSKRSRLLHSDYMNMTPRRPGPTRKHYQPYAPPRDFAAYRSSTSRVKFSRSADAPAYQQGQNQLYNELNLGRREEYDVLDKRRGRDPEMGGKPQRRKNPQEGLYNELQKDKMAEAYSEIGMKGERRRGKGHDGLYQGLSTATKDTYDALHMQALPPR

SEQ ID NO: 6846 - protein, 469 aa, Artificial Sequence
  Synthetic Polypeptide
MALPVTALLLPLALLLHAARPEVQLVESGGGLVQPGGSLRLSCAASGFASDYYIIGWFRQAPGKEREGVSCISSRYANTNYADSVKGRFTISRDNAKNTVYLQMNSLKPEDTAVYYCAADTRRYTCPDIATMHRNFDSWGQGTLVTVSSTRNKILVKQSPMLVAYDNAVNLSCKYSYNLFSREFRASLHKGLDSAVEVCVVYGNYSQQLQVYSKTGFNCDGKLGNESVTFYLQNLYVNQTDIYFCKIEVMYPPPYLDNEKSNGTIIHVKGKHLCPSPLFPGPSKPFWVLVVVGGVLACYSLLVTVAFIIFWVRSKRSRLLHSDYMNMTPRRPGPTRKHYQPYAPPRDFAAYRSSTSRVKFSRSADAPAYQQGQNQLYNELNLGRREEYDVLDKRRGRDPEMGGKPQRRKNPQEGLYNELQKDKMAEAYSEIGMKGERRRGKGHDGLYQGLSTATKDTYDALHMQALPPR

SEQ ID NO: 6847 - protein, 465 aa, Artificial Sequence
  Synthetic Polypeptide
MALPVTALLLPLALLLHAARPEVQLVESGGSLVQPGGSLRLSCAASGFTFDDYAMSWVRQVPGKGLEWVSSINWSGTHTDYADSVKGRFTISRNNANNTLYLQMNSLKSEDTAVYYCAKNWRDAGTTWFEKSGSAGQGTQVTVSSTRNKILVKQSPMLVAYDNAVNLSCKYSYNLFSREFRASLHKGLDSAVEVCVVYGNYSQQLQVYSKTGFNCDGKLGNESVTFYLQNLYVNQTDIYFCKIEVMYPPPYLDNEKSNGTIIHVKGKHLCPSPLFPGPSKPFWVLVVVGGVLACYSLLVTVAFIIFWVRSKRSRLLHSDYMNMTPRRPGPTRKHYQPYAPPRDFAAYRSSTSRVKFSRSADAPAYQQGQNQLYNELNLGRREEYDVLDKRRGRDPEMGGKPQRRKNPQEGLYNELQKDKMAEAYSEIGMKGERRRGKGHDGLYQGLSTATKDTYDALHMQALPPR

SEQ ID NO: 6848 - protein, 460 aa, Artificial Sequence
  Synthetic Polypeptide
MALPVTALLLPLALLLHAARPEVQLVESGGGLVQPGGSLRLSCAASGFNIKDTCIGWVRRAPGKEEELVAKICKYSGHTRYADSVKGRFTISADTSKNTAYLQMNSLRAEDTAVYYCAAVSVRDGHYNYWGQGTTVTVSSTRNKILVKQSPMLVAYDNAVNLSCKYSYNLFSREFRASLHKGLDSAVEVCVVYGNYSQQLQVYSKTGFNCDGKLGNESVTFYLQNLYVNQTDIYFCKIEVMYPPPYLDNEKSNGTIIHVKGKHLCPSPLFPGPSKPFWVLVVVGGVLACYSLLVTVAFIIFWVRSKRSRLLHSDYMNMTPRRPGPTRKHYQPYAPPRDFAAYRSSTSRVKFSRSADAPAYQQGQNQLYNELNLGRREEYDVLDKRRGRDPEMGGKPQRRKNPQEGLYNELQKDKMAEAYSEIGMKGERRRGKGHDGLYQGLSTATKDTYDALHMQALPPR

SEQ ID NO: 6849 - protein, 465 aa, Artificial Sequence
  Synthetic Polypeptide
MALPVTALLLPLALLLHAARPGSDLGIKLLFAAAKGQDDEVRILLAAGADVNAKDFEGYTPLHVAAYDGHLEIVEVLLKAGADVNAKDSQGRTPLHEAAYSGHLEIVEVLLKAGADVNAQDDAGETPADLAAAWGHEDIAEVLQKTRNKILVKQSPMLVAYDNAVNLSCKYSYNLFSREFRASLHKGLDSAVEVCVVYGNYSQQLQVYSKTGFNCDGKLGNESVTFYLQNLYVNQTDIYFCKIEVMYPPPYLDNEKSNGTIIHVKGKHLCPSPLFPGPSKPFWVLVVVGGVLACYSLLVTVAFIIFWVRSKRSRLLHSDYMNMTPRRPGPTRKHYQPYAPPRDFAAYRSSTSRVKFSRSADAPAYQQGQNQLYNELNLGRREEYDVLDKRRGRDPEMGGKPQRRKNPQEGLYNELQKDKMAEAYSEIGMKGERRRGKGHDGLYQGLSTATKDTYDALHMQALPPR

SEQ ID NO: 6850 - protein, 399 aa, Artificial Sequence
  Synthetic Polypeptide
MALPVTALLLPLALLLHAARPVDNKFNKERYSAYYEIWQLPNLNVRQKAAFIGSLQDDPSQSANLLAEAKKLNDAQAPKTRNKILVKQSPMLVAYDNAVNLSCKYSYNLFSREFRASLHKGLDSAVEVCVVYGNYSQQLQVYSKTGFNCDGKLGNESVTFYLQNLYVNQTDIYFCKIEVMYPPPYLDNEKSNGTIIHVKGKHLCPSPLFPGPSKPFWVLVVVGGVLACYSLLVTVAFIIFWVRSKRSRLLHSDYMNMTPRRPGPTRKHYQPYAPPRDFAAYRSSTSRVKFSRSADAPAYQQGQNQLYNELNLGRREEYDVLDKRRGRDPEMGGKPQRRKNPQEGLYNELQKDKMAEAYSEIGMKGERRRGKGHDGLYQGLSTATKDTYDALHMQALPPR

SEQ ID NO: 6851 - protein, 430 aa, Artificial Sequence
  Synthetic Polypeptide
MALPVTALLLPLALLLHAARPLPAPKNLVVSRVTEDSARLSWTAPDAAFDSFAIGYWEWDDDGEAIVLTVPGSERSYDLTGLKPGTEYPVYIAGVKGGQWSFPLSAIFTTTRNKILVKQSPMLVAYDNAVNLSCKYSYNLFSREFRASLHKGLDSAVEVCVVYGNYSQQLQVYSKTGFNCDGKLGNESVTFYLQNLYVNQTDIYFCKIEVMYPPPYLDNEKSNGTIIHVKGKHLCPSPLFPGPSKPFWVLVVVGGVLACYSLLVTVAFIIFWVRSKRSRLLHSDYMNMTPRRPGPTRKHYQPYAPPRDFAAYRSSTSRVKFSRSADAPAYQQGQNQLYNELNLGRREEYDVLDKRRGRDPEMGGKPQRRKNPQEGLYNELQKDKMAEAYSEIGMKGERRRGKGHDGLYQGLSTATKDTYDALHMQALPPR

SEQ ID NO: 6852 - protein, 431 aa, Artificial Sequence
  Synthetic Polypeptide
MALPVTALLLPLALLLHAARPMLPAPKNLVVSRITEDSARLSWTAPDAAFDSFPIRYIETLIWGEAIWLDVPGSERSYDLTGLKPGTEYAVVITGVKGGRFSSPLVASFTTTRNKILVKQSPMLVAYDNAVNLSCKYSYNLFSREFRASLHKGLDSAVEVCVVYGNYSQQLQVYSKTGFNCDGKLGNESVTFYLQNLYVNQTDIYFCKIEVMYPPPYLDNEKSNGTIIHVKGKHLCPSPLFPGPSKPFWVLVVVGGVLACYSLLVTVAFIIFWVRSKRSRLLHSDYMNMTPRRPGPTRKHYQPYAPPRDFAAYRSSTSRVKFSRSADAPAYQQGQNQLYNELNLGRREEYDVLDKRRGRDPEMGGKPQRRKNPQEGLYNELQKDKMAEAYSEIGMKGERRRGKGHDGLYQGLSTATKDTYDALHMQALPPR

SEQ ID NO: 6853 - protein, 648 aa, Artificial Sequence
  Synthetic Polypeptide
MALPVTALLLPLALLLHAARPMALPVTALLLPLALLLHAARPLFNQEVQIPLTESYCGPCPKNWICYKNNCYQFFDESKNWYESQASCMSQNASLLKVYSKEDQDLLKLVKSYHWMGLVHIPTNGSWQWEDGSILSPNLLTIIEMQKGDCALYASSFKGYIENCSTPNTYICMQRTVGGGGSGGGGSGGGGSDLFNQEVQIPLTESYCGPCPKNWICYKNNCYQFFDESKNWYESQASCMSQNASLLKVYSKEDQDLLKLVKSYHWMGLVHIPTNGSWQWEDGSILSPNLLTIIEMQKGDCALYASSFKGYIENCSTPNTYICMQRTVTRNKILVKQSPMLVAYDNAVNLSCKYSYNLFSREFRASLHKGLDSAVEVCVVYGNYSQQLQVYSKTGFNCDGKLGNESVTFYLQNLYVNQTDIYFCKIEVMYPPPYLDNEKSNGTIIHVKGKHLCPSPLFPGPSKPFWVLVVVGGVLACYSLLVTVAFIIFWVRSKRSRLLHSDYMNMTPRRPGPTRKHYQPYAPPRDFAAYRSSTSRVKFSRSADAPAYQQGQNQLYNELNLGRREEYDVLDKRRGRDPEMGGKPQRRKNPQEGLYNELQKDKMAEAYSEIGMKGERRRGKGHDGLYQGLSTATKDTYDALHMQALPPR

SEQ ID NO: 6854 - protein, 528 aa, Artificial Sequence
  Synthetic Polypeptide
MALPVTALLLPLALLLHAARPMELTDLLLAAMLLAVARLTLSSPVAPACDPRLLNKLLRDSHLLHSRLSQCPDVDPLSIPVLLPAVDFSLGEWKTQTEQSKAQDILGAVSLLLEGVMAARGQLEPSCLSSLLGQLSGQVRLLLGALQGLLGTQLPLQGRTTAHKDPNALFLSLQQLLRGKVRFLLLVEGPTLCVRRTLPTTAVPSSTSTRNKILVKQSPMLVAYDNAVNLSCKYSYNLFSREFRASLHKGLDSAVEVCVVYGNYSQQLQVYSKTGFNCDGKLGNESVTFYLQNLYVNQTDIYFCKIEVMYPPPYLDNEKSNGTIIHVKGKHLCPSPLFPGPSKPFWVLVVVGGVLACYSLLVTVAFIIFWVRSKRSRLLHSDYMNMTPRRPGPTRKHYQPYAPPRDFAAYRSSTSRVKFSRSADAPAYQQGQNQLYNELNLGRREEYDVLDKRRGRDPEMGGKPQRRKNPQEGLYNELQKDKMAEAYSEIGMKGERRRGKGHDGLYQGLSTATKDTYDALHMQALPPR

SEQ ID NO: 6855 - protein, 394 aa, Artificial Sequence
  Synthetic Polypeptide
MALPVTALLLPLALLLHAARPMDPDLEIRAAFLRQRNTALRTEVAELEQEVQRLENEVSQYETRYGPLGGGKTRTRNKILVKQSPMLVAYDNAVNLSCKYSYNLFSREFRASLHKGLDSAVEVCVVYGNYSQQLQVYSKTGFNCDGKLGNESVTFYLQNLYVNQTDIYFCKIEVMYPPPYLDNEKSNGTIIHVKGKHLCPSPLFPGPSKPFWVLVVVGGVLACYSLLVTVAFIIFWVRSKRSRLLHSDYMNMTPRRPGPTRKHYQPYAPPRDFAAYRSSTSRVKFSRSADAPAYQQGQNQLYNELNLGRREEYDVLDKRRGRDPEMGGKPQRRKNPQEGLYNELQKDKMAEAYSEIGMKGERRRGKGHDGLYQGLSTATKDTYDALHMQALPPR

SEQ ID NO: 6856 - protein, 369 aa, Artificial Sequence
  Synthetic Polypeptide
MALPVTALLLPLALLLHAARPEVAALEKEVAALEKEVAALEKEVAALEKTRNKILVKQSPMLVAYDNAVNLSCKYSYNLFSREFRASLHKGLDSAVEVCVVYGNYSQQLQVYSKTGFNCDGKLGNESVTFYLQNLYVNQTDIYFCKIEVMYPPPYLDNEKSNGTIIHVKGKHLCPSPLFPGPSKPFWVLVVVGGVLACYSLLVTVAFIIFWVRSKRSRLLHSDYMNMTPRRPGPTRKHYQPYAPPRDFAAYRSSTSRVKFSRSADAPAYQQGQNQLYNELNLGRREEYDVLDKRRGRDPEMGGKPQRRKNPQEGLYNELQKDKMAEAYSEIGMKGERRRGKGHDGLYQGLSTATKDTYDALHMQALPPR

SEQ ID NO: 6857 - protein, 627 aa, Artificial Sequence
  Synthetic Polypeptide
MALPVTALLLPLALLLHAARPLFNQEVQIPLTESYCGPCPKNWICYKNNCYQFFDESKNWYESQASCMSQNASLLKVYSKEDQDLLKLVKSAHWMGLVHIPTNGSWQWEDGSILSPNLLTIIEMQKGDCALYASSFKGFIENCSTPNTYICMQRTVGGGGSGGGGSGGGGSDLFNQEVQIPLTESYCGPCPKNWICYKNNCYQFFDESKNWYESQASCMSQNASLLKVYSKEDQDLLKLVKSAHWMGLVHIPTNGSWQWEDGSILSPNLLTIIEMQKGDCALYASSFKGFIENCSTPNTYICMQRTVTRNKILVKQSPMLVAYDNAVNLSCKYSYNLFSREFRASLHKGLDSAVEVCVVYGNYSQQLQVYSKTGFNCDGKLGNESVTFYLQNLYVNQTDIYFCKIEVMYPPPYLDNEKSNGTIIHVKGKHLCPSPLFPGPSKPFWVLVVVGGVLACYSLLVTVAFIIFWVRSKRSRLLHSDYMNMTPRRPGPTRKHYQPYAPPRDFAAYRSSTSRVKFSRSADAPAYQQGQNQLYNELNLGRREEYDVLDKRRGRDPEMGGKPQRRKNPQEGLYNELQKDKMAEAYSEIGMKGERRRGKGHDGLYQGLSTATKDTYDALHMQALPPR

SEQ ID NO: 6858 - protein, 627 aa, Artificial Sequence
  Synthetic Polypeptide
MALPVTALLLPLALLLHAARPLFNQEVQIPLTESYCGPCPKNWICYKNNCYQFFDESKNWYESQASCMSQNASLLKVYSKEDQDLLKLVKSAHWMGLVHIPTNGSWQWEDGSILSPNLLTIIEMQKGDCALYASSFKGYIENCSTPNTYICMQRTVSGGGGSGGGGSGGGGDLFNQEVQIPLTESYCGPCPKNWICYKNNCYQFFDESKNWYESQASCMSQNASLLKVYSKEDQDLLKLVKSAHWMGLVHIPTNGSWQWEDGSILSPNLLTIIEMQKGDCALYASSFKGYIENCSTPNTYICMQRTVTRNKILVKQSPMLVAYDNAVNLSCKYSYNLFSREFRASLHKGLDSAVEVCVVYGNYSQQLQVYSKTGFNCDGKLGNESVTFYLQNLYVNQTDIYFCKIEVMYPPPYLDNEKSNGTIIHVKGKHLCPSPLFPGPSKPFWVLVVVGGVLACYSLLVTVAFIIFWVRSKRSRLLHSDYMNMTPRRPGPTRKHYQPYAPPRDFAAYRSSTSRVKFSRSADAPAYQQGQNQLYNELNLGRREEYDVLDKRRGRDPEMGGKPQRRKNPQEGLYNELQKDKMAEAYSEIGMKGERRRGKGHDGLYQGLSTATKDTYDALHMQALPPR

SEQ ID NO: 6859 - protein, 1088 aa, Artificial Sequence
  Synthetic Polypeptide
MALPVTALLLPLALLLHAARPDIQMTQSPSSLSASVGDRVTITCKASDHINNWLAWYQQKPGQAPKLLIYGATTLETGVPSRFSGSGSGTDYTLTISSLQPEDFATYYCQQSWNTPWTFGQGTKLEIKRLETTPGERSSLPAFYPGTSGSCSGCGSLSLPLLAGLVAADAVASLLIVGAVFLCARPRRSPAQEDGKVYINMPGRGSTSRVKFSRSADAPAYQQGQNQLYNELNLGRREEYDVLDKRRGRDPEMGGKPQRRKNPQEGLYNELQKDKMAEAYSEIGMKGERRRGKGHDGLYQGLSTATKDTYDALHMQALPPRRAKRSGSGATNFSLLKQAGDVEENPGPMDWIWRILFLVGAATGAHSFEQVQLQQPGAELVKPGASVKMSCKASGYAFSSYWINWMKQKPGQGLEWIGQIYPGDGDTNYNGKFKGRATLTADTSSSTAYMQLSSLTSEDSAVYFCARSITTVVGCAMDYWGQGTSVTVSSTRLHCVGDTYPSNDRCCHECRPGNGMVSRCSRSQNTVCRPCGPGFYNDVVSSKPCKPCTWCNLRSGSERKQLCTATQDTVCRCRAGTQPLDSYKPGVDCAPCPPGHFSPGDNQACKPWTNCTLAGKHTLQPASNSSDAICEDRDPPATQPQETQGPPARPITVQPTEAWPRTSQGPSTRPVEVPGGRAVAAILGLGLVLGLLGPLAILLALYLLRRDQRLPPDAHKPPGGGSFRTPIQEEQADAHSTLAKISSRRVKFSRSADAPAYQQGQNQLYNELNLGRREEYDVLDKRRGRDPEMGGKPQRRKNPQEGLYNELQKDKMAEAYSEIGMKGERRRGKGHDGLYQGLSTATKDTYDALHMQALPPRRAKRSGSGVKQTLNFDLLKLAGDVESNPGPGHMTEYKPTVRLATRDDVPRAVRTLAAAFADYPATRHTVDPDRHIERVTELQELFLTRVGLDIGKVWVADDGAAVAVWTTPESVEAGAVFAEIGPRMAELSGSRLAAQQQMEGLLAPHRPKEPAWFLATVGVSPDHQGKGLGSAVVLPGVEAAERAGVPAFLETSAPRNLPFYERLGFTVTADVEVPEGPRTWCMTRKPGA

SEQ ID NO: 6860 - protein, 1140 aa, Artificial Sequence
  Synthetic Polypeptide
MALPVTALLLPLALLLHAARPACEVQLLESGGGLIQPGGSLRLSCAASGFTFSSHAMTWVRQAPGKGLEWVSAISGSGDYTHYADSVKGRFTISRDNSKNTVYLQMNSLRAEDSAVYYCAKDEDGGSLLGHRGQGTLVTVSSGTGGGGSGGGGSGGGGSEFGSLETTPGERSSLPAFYPGTSGSCSGCGSLSLPLLAGLVAADAVASLLIVGAVFLCARPRRSPAQEDGKVYINMPGRGSTSRVKFSRSADAPAYQQGQNQLYNELNLGRREEYDVLDKRRGRDPEMGGKPQRRKNPQEGLYNELQKDKMAEAYSEIGMKGERRRGKGHDGLYQGLSTATKDTYDALHMQALPPRRAKRSGSGATNFSLLKQAGDVEENPGPMDWIWRILFLVGAATGAHSGPEVQLVESGGGLVQAGGSLRLSCAASGRTFSMGWFRQAPGKEREFVAAITYSGGSPYYADSVKGRFTISRDNAKNTVYLQMNSLKPEDTAVYYCAANPTYGSDWNAENWGQGTQVTVSSGSGGGGSGGGGSGGGGSFEGSTRLHCVGDTYPSNDRCCHECRPGNGMVSRCSRSQNTVCRPCGPGFYNDVVSSKPCKPCTWCNLRSGSERKQLCTATQDTVCRCRAGTQPLDSYKPGVDCAPCPPGHFSPGDNQACKPWTNCTLAGKHTLQPASNSSDAICEDRDPPATQPQETQGPPARPITVQPTEAWPRTSQGPSTRPVEVPGGRAVAAILGLGLVLGLLGPLAILLALYLLRRDQRLPPDAHKPPGGGSFRTPIQEEQADAHSTLAKISSRRVKFSRSADAPAYQQGQNQLYNELNLGRREEYDVLDKRRGRDPEMGGKPQRRKNPQEGLYNELQKDKMAEAYSEIGMKGERRRGKGHDGLYQGLSTATKDTYDALHMQALPPRRAKRSGSGVKQTLNFDLLKLAGDVESNPGPGHMTEYKPTVRLATRDDVPRAVRTLAAAFADYPATRHTVDPDRHIERVTELQELFLTRVGLDIGKVWVADDGAAVAVWTTPESVEAGAVFAEIGPRMAELSGSRLAAQQQMEGLLAPHRPKEPAWFLATVGVSPDHQGKGLGSAVVLPGVEAAERAGVPAFLETSAPRNLPFYERLGFTVTADVEVPEGPRTWCMTRKPGA

SEQ ID NO: 6861 - protein, 1290 aa, Artificial Sequence
  Synthetic Polypeptide
MALPVTALLLPLALLLHAARPDIQMTQSPSSLSASVGDRVTITCKASDHINNWLAWYQQKPGQAPKLLIYGATTLETGVPSRFSGSGSGTDYTLTISSLQPEDFATYYCQQSWNTPWTFGQGTKLEIKRLEGQPKANPTVTLFPPSSEELQANKATLVCLISDFYPGAVTVAWKADGSPVKAGVETTKPSKQSNNKYAASSYLSLTPEQWKSHRSYSCQVTHEGSTVEKTVAPTECSGSTTPGERSSLPAFYPGTSGSCSGCGSLSLPLLAGLVAADAVASLLIVGAVFLCARPRRSPAQEDGKVYINMPGRGSTSRVKFSRSADAPAYQQGQNQLYNELNLGRREEYDVLDKRRGRDPEMGGKPQRRKNPQEGLYNELQKDKMAEAYSEIGMKGERRRGKGHDGLYQGLSTATKDTYDALHMQALPPRRAKRSGSGATNFSLLKQAGDVEENPGPMDWIWRILFLVGAATGAHSFEQVQLQQPGAELVKPGASVKMSCKASGYAFSSYWINWMKQKPGQGLEWIGQIYPGDGDTNYNGKFKGRATLTADTSSSTAYMQLSSLTSEDSAVYFCARSITTVVGCAMDYWGQGTSVTVSSTRASTKGPSVFPLAPSSKSTSGGTAALGCLVKDYFPEPVTVSWNSGALTSGVHTFPAVLQSSGLYSLSSVVTVPSSSLGTQTYICNVNHKPSNTKVDKRVEPKSCGTLHCVGDTYPSNDRCCHECRPGNGMVSRCSRSQNTVCRPCGPGFYNDVVSSKPCKPCTWCNLRSGSERKQLCTATQDTVCRCRAGTQPLDSYKPGVDCAPCPPGHFSPGDNQACKPWTNCTLAGKHTLQPASNSSDAICEDRDPPATQPQETQGPPARPITVQPTEAWPRTSQGPSTRPVEVPGGRAVAAILGLGLVLGLLGPLAILLALYLLRRDQRLPPDAHKPPGGGSFRTPIQEEQADAHSTLAKISSRRVKFSRSADAPAYQQGQNQLYNELNLGRREEYDVLDKRRGRDPEMGGKPQRRKNPQEGLYNELQKDKMAEAYSEIGMKGERRRGKGHDGLYQGLSTATKDTYDALHMQALPPRRAKRSGSGVKQTLNFDLLKLAGDVESNPGPGHMATYEVLCEVARKLGTDDREVVLFLLNVFIPQPTLAQLIGALRALKEEGRLTFPLLAECLFRAGRRDLLRDLLHLDPRFLERHLAGTMSYFSPYQLTVLHVDGELCARDIRSLIFLSKDTIGSRSTPQTFLHWVYCMENLDLLGPTDVDALMSMLRSLSRVDLQRQVQTLMGLHLSGPSHSQHYRHTP

SEQ ID NO: 6862 - protein, 1343 aa, Artificial Sequence
  Synthetic Polypeptide
MALPVTALLLPLALLLHAARPDIQMTQSPSSLSASVGDRVTITCKASDHINNWLAWYQQKPGQAPKLLIYGATTLETGVPSRFSGSGSGTDYTLTISSLQPEDFATYYCQQSWNTPWTFGQGTKLEIKRLEGQPKANPTVTLFPPSSEELQANKATLVCLISDFYPGAVTVAWKADGSPVKAGVETTKPSKQSNNKYAASSYLSLTPEQWKSHRSYSCQVTHEGSTVEKTVAPTECSGSTTPGERSSLPAFYPGTSGSCSGCGSLSLPLLAGLVAADAVASLLIVGAVFLCARPRRSPAQEDGKVYINMPGRGSTSRVKFSRSADAPAYQQGQNQLYNELNLGRREEYDVLDKRRGRDPEMGGKPQRRKNPQEGLYNELQKDKMAEAYSEIGMKGERRRGKGHDGLYQGLSTATKDTYDALHMQALPPRRAKRSGSGATNFSLLKQAGDVEENPGPMDWIWRILFLVGAATGAHSFEQVQLQQPGAELVKPGASVKMSCKASGYAFSSYWINWMKQKPGQGLEWIGQIYPGDGDTNYNGKFKGRATLTADTSSSTAYMQLSSLTSEDSAVYFCARSITTVVGCAMDYWGQGTSVTVSSTRASTKGPSVFPLAPSSKSTSGGTAALGCLVKDYFPEPVTVSWNSGALTSGVHTFPAVLQSSGLYSLSSVVTVPSSSLGTQTYICNVNHKPSNTKVDKRVEPKSCGTLHCVGDTYPSNDRCCHECRPGNGMVSRCSRSQNTVCRPCGPGFYNDVVSSKPCKPCTWCNLRSGSERKQLCTATQDTVCRCRAGTQPLDSYKPGVDCAPCPPGHFSPGDNQACKPWTNCTLAGKHTLQPASNSSDAICEDRDPPATQPQETQGPPARPITVQPTEAWPRTSQGPSTRPVEVPGGRAVAAILGLGLVLGLLGPLAILLALYLLRRDQRLPPDAHKPPGGGSFRTPIQEEQADAHSTLAKISSRRVKFSRSADAPAYQQGQNQLYNELNLGRREEYDVLDKRRGRDPEMGGKPQRRKNPQEGLYNELQKDKMAEAYSEIGMKGERRRGKGHDGLYQGLSTATKDTYDALHMQALPPRRAKRSGSGVKQTLNFDLLKLAGDVESNPGPGHMSDSKEVPSLPFLRHLLEELDSHEDSLLLFLCHDAAPGCTTVTQALCSLSQQRKLTLAALVEMLYVLQRMDLLKSRFGLSKEGAEQLLGTSFLTRYRKLMVCVGEELDSSELRALRLFACNLNPSLSTALSESSRFVELVLALENVGLVSPSSVSVLADMLRTLRRLDLCQQLVEYEQQEQARYRYCYAASPSLPVRTLRRGHGASEHEQLCMPVQESSDSPELLRTPVQESSSDSPEQTT

SEQ ID NO: 6863 - protein, 1301 aa, Artificial Sequence
  Synthetic Polypeptide
MALPVTALLLPLALLLHAARPDIQMTQSPSSLSASVGDRVTITCKASDHINNWLAWYQQKPGQAPKLLIYGATTLETGVPSRFSGSGSGTDYTLTISSLQPEDFATYYCQQSWNTPWTFGQGTKLEIKRLEGQPKANPTVTLFPPSSEELQANKATLVCLISDFYPGAVTVAWKADGSPVKAGVETTKPSKQSNNKYAASSYLSLTPEQWKSHRSYSCQVTHEGSTVEKTVAPTECSGSTTPGERSSLPAFYPGTSGSCSGCGSLSLPLLAGLVAADAVASLLIVGAVFLCARPRRSPAQEDGKVYINMPGRGSTSRVKFSRSADAPAYQQGQNQLYNELNLGRREEYDVLDKRRGRDPEMGGKPQRRKNPQEGLYNELQKDKMAEAYSEIGMKGERRRGKGHDGLYQGLSTATKDTYDALHMQALPPRRAKRSGSGATNFSLLKQAGDVEENPGPMDWIWRILFLVGAATGAHSFEQVQLQQPGAELVKPGASVKMSCKASGYAFSSYWINWMKQKPGQGLEWIGQIYPGDGDTNYNGKFKGRATLTADTSSSTAYMQLSSLTSEDSAVYFCARSITTVVGCAMDYWGQGTSVTVSSTRASTKGPSVFPLAPSSKSTSGGTAALGCLVKDYFPEPVTVSWNSGALTSGVHTFPAVLQSSGLYSLSSVVTVPSSSLGTQTYICNVNHKPSNTKVDKRVEPKSCGTLHCVGDTYPSNDRCCHECRPGNGMVSRCSRSQNTVCRPCGPGFYNDVVSSKPCKPCTWCNLRSGSERKQLCTATQDTVCRCRAGTQPLDSYKPGVDCAPCPPGHFSPGDNQACKPWTNCTLAGKHTLQPASNSSDAICEDRDPPATQPQETQGPPARPITVQPTEAWPRTSQGPSTRPVEVPGGRAVAAILGLGLVLGLLGPLAILLALYLLRRDQRLPPDAHKPPGGGSFRTPIQEEQADAHSTLAKISSRRVKFSRSADAPAYQQGQNQLYNELNLGRREEYDVLDKRRGRDPEMGGKPQRRKNPQEGLYNELQKDKMAEAYSEIGMKGERRRGKGHDGLYQGLSTATKDTYDALHMQALPPRRAKRSGSGVKQTLNFDLLKLAGDVESNPGPGHMTEYKPTVRLATRDDVPRAVRTLAAAFADYPATRHTVDPDRHIERVTELQELFLTRVGLDIGKVWVADDGAAVAVWTTPESVEAGAVFAEIGPRMAELSGSRLAAQQQMEGLLAPHRPKEPAWFLATVGVSPDHQGKGLGSAVVLPGVEAAERAGVPAFLETSAPRNLPFYERLGFTVTADVEVPEGPRTWCMTRKPGA

SEQ ID NO: 6864 - protein, 1438 aa, Artificial Sequence
  Synthetic Polypeptide
MALPVTALLLPLALLLHAARPEVQLVESGGGLVQAGGSLRLSCAASGRTFSMGWFRQAPGKEREFVAAITYSGGSPYYADSVKGRFTISRDNAKNTVYLQMNSLKPEDTAVYYCAANPTYGSDWNAENWGQGTQVTVSSGTGGGGSGGGGSGGGGSEFDIQMTQSPSSLSASVGDRVTITCKASDHINNWLAWYQQKPGQAPKLLIYGATTLETGVPSRFSGSGSGTDYTLTISSLQPEDFATYYCQQSWNTPWTFGQGTKLEIKRLEGQPKANPTVTLFPPSSEELQANKATLVCLISDFYPGAVTVAWKADGSPVKAGVETTKPSKQSNNKYAASSYLSLTPEQWKSHRSYSCQVTHEGSTVEKTVAPTECSGSTTPGERSSLPAFYPGTSGSCSGCGSLSLPLLAGLVAADAVASLLIVGAVFLCARPRRSPAQEDGKVYINMPGRGSTSRVKFSRSADAPAYQQGQNQLYNELNLGRREEYDVLDKRRGRDPEMGGKPQRRKNPQEGLYNELQKDKMAEAYSEIGMKGERRRGKGHDGLYQGLSTATKDTYDALHMQALPPRRAKRSGSGATNFSLLKQAGDVEENPGPMDWIWRILFLVGAATGAHSFEQVQLQQPGAELVKPGASVKMSCKASGYAFSSYWINWMKQKPGQGLEWIGQIYPGDGDTNYNGKFKGRATLTADTSSSTAYMQLSSLTSEDSAVYFCARSITTVVGCAMDYWGQGTSVTVSSTRASTKGPSVFPLAPSSKSTSGGTAALGCLVKDYFPEPVTVSWNSGALTSGVHTFPAVLQSSGLYSLSSVVTVPSSSLGTQTYICNVNHKPSNTKVDKRVEPKSCGTLHCVGDTYPSNDRCCHECRPGNGMVSRCSRSQNTVCRPCGPGFYNDVVSSKPCKPCTWCNLRSGSERKQLCTATQDTVCRCRAGTQPLDSYKPGVDCAPCPPGHFSPGDNQACKPWTNCTLAGKHTLQPASNSSDAICEDRDPPATQPQETQGPPARPITVQPTEAWPRTSQGPSTRPVEVPGGRAVAAILGLGLVLGLLGPLAILLALYLLRRDQRLPPDAHKPPGGGSFRTPIQEEQADAHSTLAKISSRRVKFSRSADAPAYQQGQNQLYNELNLGRREEYDVLDKRRGRDPEMGGKPQRRKNPQEGLYNELQKDKMAEAYSEIGMKGERRRGKGHDGLYQGLSTATKDTYDALHMQALPPRRAKRSGSGVKQTLNFDLLKLAGDVESNPGPGHMTEYKPTVRLATRDDVPRAVRTLAAAFADYPATRHTVDPDRHIERVTELQELFLTRVGLDIGKVWVADDGAAVAVWTTPESVEAGAVFAEIGPRMAELSGSRLAAQQQMEGLLAPHRPKEPAWFLATVGVSPDHQGKGLGSAVVLPGVEAAERAGVPAFLETSAPRNLPFYERLGFTVTADVEVPEGPRTWCMTRKPGA

SEQ ID NO: 6865 - protein, 1575 aa, Artificial Sequence
  Synthetic Polypeptide
MALPVTALLLPLALLLHAARPEVQLVESGGGLVQAGGSLRLSCAASGRTFSMGWFRQAPGKEREFVAAITYSGGSPYYADSVKGRFTISRDNAKNTVYLQMNSLKPEDTAVYYCAANPTYGSDWNAENWGQGTQVTVSSGTGGGGSGGGGSGGGGSEFDIQMTQSPSSLSASVGDRVTITCKASDHINNWLAWYQQKPGQAPKLLIYGATTLETGVPSRFSGSGSGTDYTLTISSLQPEDFATYYCQQSWNTPWTFGQGTKLEIKRLEGQPKANPTVTLFPPSSEELQANKATLVCLISDFYPGAVTVAWKADGSPVKAGVETTKPSKQSNNKYAASSYLSLTPEQWKSHRSYSCQVTHEGSTVEKTVAPTECSGSTTPGERSSLPAFYPGTSGSCSGCGSLSLPLLAGLVAADAVASLLIVGAVFLCARPRRSPAQEDGKVYINMPGRGSTSRVKFSRSADAPAYQQGQNQLYNELNLGRREEYDVLDKRRGRDPEMGGKPQRRKNPQEGLYNELQKDKMAEAYSEIGMKGERRRGKGHDGLYQGLSTATKDTYDALHMQALPPRRAKRSGSGATNFSLLKQAGDVEENPGPMDWIWRILFLVGAATGAHSGPEVQLVESGGGLVQAGGSLRLSCAASGRTFTMGWFRQAPGKEREFVAAISLSPTLAYYADSVKGRFTISRDNAKNTVVLQMNSLKPEDTALYYCAADRKSVMSIRPDYWGQGTQVTVSSGSGGGGSGGGGSGGGGSFEQVQLQQPGAELVKPGASVKMSCKASGYAFSSYWINWMKQKPGQGLEWIGQIYPGDGDTNYNGKFKGRATLTADTSSSTAYMQLSSLTSEDSAVYFCARSITTVVGCAMDYWGQGTSVTVSSTRASTKGPSVFPLAPSSKSTSGGTAALGCLVKDYFPEPVTVSWNSGALTSGVHTFPAVLQSSGLYSLSSVVTVPSSSLGTQTYICNVNHKPSNTKVDKRVEPKSCGTLHCVGDTYPSNDRCCHECRPGNGMVSRCSRSQNTVCRPCGPGFYNDVVSSKPCKPCTWCNLRSGSERKQLCTATQDTVCRCRAGTQPLDSYKPGVDCAPCPPGHFSPGDNQACKPWTNCTLAGKHTLQPASNSSDAICEDRDPPATQPQETQGPPARPITVQPTEAWPRTSQGPSTRPVEVPGGRAVAAILGLGLVLGLLGPLAILLALYLLRRDQRLPPDAHKPPGGGSFRTPIQEEQADAHSTLAKISSRRVKFSRSADAPAYQQGQNQLYNELNLGRREEYDVLDKRRGRDPEMGGKPQRRKNPQEGLYNELQKDKMAEAYSEIGMKGERRRGKGHDGLYQGLSTATKDTYDALHMQALPPRRAKRSGSGVKQTLNFDLLKLAGDVESNPGPGHMTEYKPTVRLATRDDVPRAVRTLAAAFADYPATRHTVDPDRHIERVTELQELFLTRVGLDIGKVWVADDGAAVAVWTTPESVEAGAVFAEIGPRMAELSGSRLAAQQQMEGLLAPHRPKEPAWFLATVGVSPDHQGKGLGSAVVLPGVEAAERAGVPAFLETSAPRNLPFYERLGFTVTADVEVPEGPRTWCMTRKPGA

SEQ ID NO: 6866 - protein, 1308 aa, Artificial Sequence
  Synthetic Polypeptide
MALPVTALLLPLALLLHAARPEVQLVESGGGLVQAGGSLRLSCAASGRTFSMGWFRQAPGKEREFVAAITYSGGSPYYADSVKGRFTISRDNAKNTVYLQMNSLKPEDTAVYYCAANPTYGSDWNAENWGQGTQVTVSSLEGQPKANPTVTLFPPSSEELQANKATLVCLISDFYPGAVTVAWKADGSPVKAGVETTKPSKQSNNKYAASSYLSLTPEQWKSHRSYSCQVTHEGSTVEKTVAPTECSGSTTPGERSSLPAFYPGTSGSCSGCGSLSLPLLAGLVAADAVASLLIVGAVFLCARPRRSPAQEDGKVYINMPGRGSTSRVKFSRSADAPAYQQGQNQLYNELNLGRREEYDVLDKRRGRDPEMGGKPQRRKNPQEGLYNELQKDKMAEAYSEIGMKGERRRGKGHDGLYQGLSTATKDTYDALHMQALPPRRAKRSGSGATNFSLLKQAGDVEENPGPMDWIWRILFLVGAATGAHSGPEVQLVESGGGLVQAGGSLRLSCAASGRTFTMGWFRQAPGKEREFVAAISLSPTLAYYADSVKGRFTISRDNAKNTVVLQMNSLKPEDTALYYCAADRKSVMSIRPDYWGQGTQVTVSSTRASTKGPSVFPLAPSSKSTSGGTAALGCLVKDYFPEPVTVSWNSGALTSGVHTFPAVLQSSGLYSLSSVVTVPSSSLGTQTYICNVNHKPSNTKVDKRVEPKSCGTLHCVGDTYPSNDRCCHECRPGNGMVSRCSRSQNTVCRPCGPGFYNDVVSSKPCKPCTWCNLRSGSERKQLCTATQDTVCRCRAGTQPLDSYKPGVDCAPCPPGHFSPGDNQACKPWTNCTLAGKHTLQPASNSSDAICEDRDPPATQPQETQGPPARPITVQPTEAWPRTSQGPSTRPVEVPGGRAVAAILGLGLVLGLLGPLAILLALYLLRRDQRLPPDAHKPPGGGSFRTPIQEEQADAHSTLAKISSRRVKFSRSADAPAYQQGQNQLYNELNLGRREEYDVLDKRRGRDPEMGGKPQRRKNPQEGLYNELQKDKMAEAYSEIGMKGERRRGKGHDGLYQGLSTATKDTYDALHMQALPPRRAKRSGSGVKQTLNFDLLKLAGDVESNPGPGHMTEYKPTVRLATRDDVPRAVRTLAAAFADYPATRHTVDPDRHIERVTELQELFLTRVGLDIGKVWVADDGAAVAVWTTPESVEAGAVFAEIGPRMAELSGSRLAAQQQMEGLLAPHRPKEPAWFLATVGVSPDHQGKGLGSAVVLPGVEAAERAGVPAFLETSAPRNLPFYERLGFTVTADVEVPEGPRTWCMTRKPGA

SEQ ID NO: 6867 - protein, 1316 aa, Artificial Sequence
  Synthetic Polypeptide
MALPVTALLLPLALLLHAARPDIQMTQSPSSLSASVGDRVTITCKASDHINNWLAWYQQKPGQAPKLLIYGATTLETGVPSRFSGSGSGTDYTLTISSLQPEDFATYYCQQSWNTPWTFGQGTKLEIKRLEDLKNVFPPEVAVFEPSEAEISHTQKATLVCLATGFYPDHVELSWWVNGKEVHSGVSTDPQPLKEQPALNDSRYCLSSRLRVSATFWQNPRNHFRCQVQFYGLSENDEWTQDRAKPVTQIVSAEAWGRADCGSTTPGERSSLPAFYPGTSGSCSGCGSLSLPLLAGLVAADAVASLLIVGAVFLCARPRRSPAQEDGKVYINMPGRGSTSRVKFSRSADAPAYQQGQNQLYNELNLGRREEYDVLDKRRGRDPEMGGKPQRRKNPQEGLYNELQKDKMAEAYSEIGMKGERRRGKGHDGLYQGLSTATKDTYDALHMQALPPRRAKRSGSGATNFSLLKQAGDVEENPGPMDWIWRILFLVGAATGAHSFEQVQLQQPGAELVKPGASVKMSCKASGYAFSSYWINWMKQKPGQGLEWIGQIYPGDGDTNYNGKFKGRATLTADTSSSTAYMQLSSLTSEDSAVYFCARSITTVVGCAMDYWGQGTSVTVSSTRIQNPDPAVYQLRDSKSSDKSVCLFTDFDSQTNVSQSKDSDVYITDKTVLDMRSMDFKSNSAVAWSNKSDFACANAFNNSIIPEDTFFPSPESSCGTLHCVGDTYPSNDRCCHECRPGNGMVSRCSRSQNTVCRPCGPGFYNDVVSSKPCKPCTWCNLRSGSERKQLCTATQDTVCRCRAGTQPLDSYKPGVDCAPCPPGHFSPGDNQACKPWTNCTLAGKHTLQPASNSSDAICEDRDPPATQPQETQGPPARPITVQPTEAWPRTSQGPSTRPVEVPGGRAVAAILGLGLVLGLLGPLAILLALYLLRRDQRLPPDAHKPPGGGSFRTPIQEEQADAHSTLAKISSRRVKFSRSADAPAYQQGQNQLYNELNLGRREEYDVLDKRRGRDPEMGGKPQRRKNPQEGLYNELQKDKMAEAYSEIGMKGERRRGKGHDGLYQGLSTATKDTYDALHMQALPPRRAKRSGSGVKQTLNFDLLKLAGDVESNPGPGHMTEYKPTVRLATRDDVPRAVRTLAAAFADYPATRHTVDPDRHIERVTELQELFLTRVGLDIGKVWVADDGAAVAVWTTPESVEAGAVFAEIGPRMAELSGSRLAAQQQMEGLLAPHRPKEPAWFLATVGVSPDHQGKGLGSAVVLPGVEAAERAGVPAFLETSAPRNLPFYERLGFTVTADVEVPEGPRTWCMTRKPGA

SEQ ID NO: 6868 - protein, 1453 aa, Artificial Sequence
  Synthetic Polypeptide
MALPVTALLLPLALLLHAARPEVQLVESGGGLVQAGGSLRLSCAASGRTFSMGWFRQAPGKEREFVAAITYSGGSPYYADSVKGRFTISRDNAKNTVYLQMNSLKPEDTAVYYCAANPTYGSDWNAENWGQGTQVTVSSGTGGGGSGGGGSGGGGSEFDIQMTQSPSSLSASVGDRVTITCKASDHINNWLAWYQQKPGQAPKLLIYGATTLETGVPSRFSGSGSGTDYTLTISSLQPEDFATYYCQQSWNTPWTFGQGTKLEIKRLEDLKNVFPPEVAVFEPSEAEISHTQKATLVCLATGFYPDHVELSWWVNGKEVHSGVSTDPQPLKEQPALNDSRYCLSSRLRVSATFWQNPRNHFRCQVQFYGLSENDEWTQDRAKPVTQIVSAEAWGRADCGSTTPGERSSLPAFYPGTSGSCSGCGSLSLPLLAGLVAADAVASLLIVGAVFLCARPRRSPAQEDGKVYINMPGRGSTSRVKFSRSADAPAYQQGQNQLYNELNLGRREEYDVLDKRRGRDPEMGGKPQRRKNPQEGLYNELQKDKMAEAYSEIGMKGERRRGKGHDGLYQGLSTATKDTYDALHMQALPPRRAKRSGSGATNFSLLKQAGDVEENPGPMDWIWRILFLVGAATGAHSFEQVQLQQPGAELVKPGASVKMSCKASGYAFSSYWINWMKQKPGQGLEWIGQIYPGDGDTNYNGKFKGRATLTADTSSSTAYMQLSSLTSEDSAVYFCARSITTVVGCAMDYWGQGTSVTVSSTRIQNPDPAVYQLRDSKSSDKSVCLFTDFDSQTNVSQSKDSDVYITDKTVLDMRSMDFKSNSAVAWSNKSDFACANAFNNSIIPEDTFFPSPESSCGTLHCVGDTYPSNDRCCHECRPGNGMVSRCSRSQNTVCRPCGPGFYNDVVSSKPCKPCTWCNLRSGSERKQLCTATQDTVCRCRAGTQPLDSYKPGVDCAPCPPGHFSPGDNQACKPWTNCTLAGKHTLQPASNSSDAICEDRDPPATQPQETQGPPARPITVQPTEAWPRTSQGPSTRPVEVPGGRAVAAILGLGLVLGLLGPLAILLALYLLRRDQRLPPDAHKPPGGGSFRTPIQEEQADAHSTLAKISSRRVKFSRSADAPAYQQGQNQLYNELNLGRREEYDVLDKRRGRDPEMGGKPQRRKNPQEGLYNELQKDKMAEAYSEIGMKGERRRGKGHDGLYQGLSTATKDTYDALHMQALPPRRAKRSGSGVKQTLNFDLLKLAGDVESNPGPGHMTEYKPTVRLATRDDVPRAVRTLAAAFADYPATRHTVDPDRHIERVTELQELFLTRVGLDIGKVWVADDGAAVAVWTTPESVEAGAVFAEIGPRMAELSGSRLAAQQQMEGLLAPHRPKEPAWFLATVGVSPDHQGKGLGSAVVLPGVEAAERAGVPAFLETSAPRNLPFYERLGFTVTADVEVPEGPRTWCMTRKPGA

SEQ ID NO: 6869 - protein, 1590 aa, Artificial Sequence
  Synthetic Polypeptide
MALPVTALLLPLALLLHAARPEVQLVESGGGLVQAGGSLRLSCAASGRTFSMGWFRQAPGKEREFVAAITYSGGSPYYADSVKGRFTISRDNAKNTVYLQMNSLKPEDTAVYYCAANPTYGSDWNAENWGQGTQVTVSSGTGGGGSGGGGSGGGGSEFDIQMTQSPSSLSASVGDRVTITCKASDHINNWLAWYQQKPGQAPKLLIYGATTLETGVPSRFSGSGSGTDYTLTISSLQPEDFATYYCQQSWNTPWTFGQGTKLEIKRLEDLKNVFPPEVAVFEPSEAEISHTQKATLVCLATGFYPDHVELSWWVNGKEVHSGVSTDPQPLKEQPALNDSRYCLSSRLRVSATFWQNPRNHFRCQVQFYGLSENDEWTQDRAKPVTQIVSAEAWGRADCGSTTPGERSSLPAFYPGTSGSCSGCGSLSLPLLAGLVAADAVASLLIVGAVFLCARPRRSPAQEDGKVYINMPGRGSTSRVKFSRSADAPAYQQGQNQLYNELNLGRREEYDVLDKRRGRDPEMGGKPQRRKNPQEGLYNELQKDKMAEAYSEIGMKGERRRGKGHDGLYQGLSTATKDTYDALHMQALPPRRAKRSGSGATNFSLLKQAGDVEENPGPMDWIWRILFLVGAATGAHSGPEVQLVESGGGLVQAGGSLRLSCAASGRTFTMGWFRQAPGKEREFVAAISLSPTLAYYADSVKGRFTISRDNAKNTVVLQMNSLKPEDTALYYCAADRKSVMSIRPDYWGQGTQVTVSSGSGGGGSGGGGSGGGGSFEQVQLQQPGAELVKPGASVKMSCKASGYAFSSYWINWMKQKPGQGLEWIGQIYPGDGDTNYNGKFKGRATLTADTSSSTAYMQLSSLTSEDSAVYFCARSITTVVGCAMDYWGQGTSVTVSSTRIQNPDPAVYQLRDSKSSDKSVCLFTDFDSQTNVSQSKDSDVYITDKTVLDMRSMDFKSNSAVAWSNKSDFACANAFNNSIIPEDTFFPSPESSCGTLHCVGDTYPSNDRCCHECRPGNGMVSRCSRSQNTVCRPCGPGFYNDVVSSKPCKPCTWCNLRSGSERKQLCTATQDTVCRCRAGTQPLDSYKPGVDCAPCPPGHFSPGDNQACKPWTNCTLAGKHTLQPASNSSDAICEDRDPPATQPQETQGPPARPITVQPTEAWPRTSQGPSTRPVEVPGGRAVAAILGLGLVLGLLGPLAILLALYLLRRDQRLPPDAHKPPGGGSFRTPIQEEQADAHSTLAKISSRRVKFSRSADAPAYQQGQNQLYNELNLGRREEYDVLDKRRGRDPEMGGKPQRRKNPQEGLYNELQKDKMAEAYSEIGMKGERRRGKGHDGLYQGLSTATKDTYDALHMQALPPRRAKRSGSGVKQTLNFDLLKLAGDVESNPGPGHMTEYKPTVRLATRDDVPRAVRTLAAAFADYPATRHTVDPDRHIERVTELQELFLTRVGLDIGKVWVADDGAAVAVWTTPESVEAGAVFAEIGPRMAELSGSRLAAQQQMEGLLAPHRPKEPAWFLATVGVSPDHQGKGLGSAVVLPGVEAAERAGVPAFLETSAPRNLPFYERLGFTVTADVEVPEGPRTWCMTRKPGA

SEQ ID NO: 6870 - protein, 1323 aa, Artificial Sequence
  Synthetic Polypeptide
MALPVTALLLPLALLLHAARPEVQLVESGGGLVQAGGSLRLSCAASGRTFSMGWFRQAPGKEREFVAAITYSGGSPYYADSVKGRFTISRDNAKNTVYLQMNSLKPEDTAVYYCAANPTYGSDWNAENWGQGTQVTVSSLEDLKNVFPPEVAVFEPSEAEISHTQKATLVCLATGFYPDHVELSWWVNGKEVHSGVSTDPQPLKEQPALNDSRYCLSSRLRVSATFWQNPRNHFRCQVQFYGLSENDEWTQDRAKPVTQIVSAEAWGRADCGSTTPGERSSLPAFYPGTSGSCSGCGSLSLPLLAGLVAADAVASLLIVGAVFLCARPRRSPAQEDGKVYINMPGRGSTSRVKFSRSADAPAYQQGQNQLYNELNLGRREEYDVLDKRRGRDPEMGGKPQRRKNPQEGLYNELQKDKMAEAYSEIGMKGERRRGKGHDGLYQGLSTATKDTYDALHMQALPPRRAKRSGSGATNFSLLKQAGDVEENPGPMDWIWRILFLVGAATGAHSGPEVQLVESGGGLVQAGGSLRLSCAASGRTFTMGWFRQAPGKEREFVAAISLSPTLAYYADSVKGRFTISRDNAKNTVVLQMNSLKPEDTALYYCAADRKSVMSIRPDYWGQGTQVTVSSTRIQNPDPAVYQLRDSKSSDKSVCLFTDFDSQTNVSQSKDSDVYITDKTVLDMRSMDFKSNSAVAWSNKSDFACANAFNNSIIPEDTFFPSPESSCGTLHCVGDTYPSNDRCCHECRPGNGMVSRCSRSQNTVCRPCGPGFYNDVVSSKPCKPCTWCNLRSGSERKQLCTATQDTVCRCRAGTQPLDSYKPGVDCAPCPPGHFSPGDNQACKPWTNCTLAGKHTLQPASNSSDAICEDRDPPATQPQETQGPPARPITVQPTEAWPRTSQGPSTRPVEVPGGRAVAAILGLGLVLGLLGPLAILLALYLLRRDQRLPPDAHKPPGGGSFRTPIQEEQADAHSTLAKISSRRVKFSRSADAPAYQQGQNQLYNELNLGRREEYDVLDKRRGRDPEMGGKPQRRKNPQEGLYNELQKDKMAEAYSEIGMKGERRRGKGHDGLYQGLSTATKDTYDALHMQALPPRRAKRSGSGVKQTLNFDLLKLAGDVESNPGPGHMTEYKPTVRLATRDDVPRAVRTLAAAFADYPATRHTVDPDRHIERVTELQELFLTRVGLDIGKVWVADDGAAVAVWTTPESVEAGAVFAEIGPRMAELSGSRLAAQQQMEGLLAPHRPKEPAWFLATVGVSPDHQGKGLGSAVVLPGVEAAERAGVPAFLETSAPRNLPFYERLGFTVTADVEVPEGPRTWCMTRKPGA

SEQ ID NO: 6871 - protein, 585 aa, Artificial Sequence; identical to SEQ ID NO: 4431
  Synthetic Polypeptide

SEQ ID NO: 6872 - protein, 457 aa, Artificial Sequence; identical to SEQ ID NO: 6712
  Synthetic Polypeptide

SEQ ID NO: 6873 - protein, 457 aa, Artificial Sequence; identical to SEQ ID NO: 6713
  Synthetic Polypeptide

SEQ ID NO: 6874 - protein, 331 aa, Artificial Sequence; identical to SEQ ID NO: 6714
  Synthetic Polypeptide

SEQ ID NO: 6875 - protein, 331 aa, Artificial Sequence; identical to SEQ ID NO: 6715
  Synthetic Polypeptide

SEQ ID NO: 6876 - protein, 331 aa, Artificial Sequence; identical to SEQ ID NO: 6716
  Synthetic Polypeptide

SEQ ID NO: 6877 - protein, 333 aa, Artificial Sequence; identical to SEQ ID NO: 6717
  Synthetic Polypeptide

SEQ ID NO: 6878 - protein, 341 aa, Artificial Sequence; identical to SEQ ID NO: 6718
  Synthetic Polypeptide

SEQ ID NO: 6879 - protein, 337 aa, Artificial Sequence; identical to SEQ ID NO: 6719
  Synthetic Polypeptide

SEQ ID NO: 6880 - protein, 332 aa, Artificial Sequence; identical to SEQ ID NO: 6720
  Synthetic Polypeptide

SEQ ID NO: 6881 - protein, 337 aa, Artificial Sequence; identical to SEQ ID NO: 6721
  Synthetic Polypeptide

SEQ ID NO: 6882 - protein, 271 aa, Artificial Sequence; identical to SEQ ID NO: 6722
  Synthetic Polypeptide

SEQ ID NO: 6883 - protein, 302 aa, Artificial Sequence; identical to SEQ ID NO: 6723
  Synthetic Polypeptide

SEQ ID NO: 6884 - protein, 303 aa, Artificial Sequence; identical to SEQ ID NO: 6724
  Synthetic Polypeptide

SEQ ID NO: 6885 - protein, 520 aa, Artificial Sequence; identical to SEQ ID NO: 6725
  Synthetic Polypeptide

SEQ ID NO: 6886 - protein, 400 aa, Artificial Sequence; identical to SEQ ID NO: 6726
  Synthetic Polypeptide

SEQ ID NO: 6887 - protein, 266 aa, Artificial Sequence; identical to SEQ ID NO: 6727
  Synthetic Polypeptide

SEQ ID NO: 6888 - protein, 241 aa, Artificial Sequence; identical to SEQ ID NO: 6728
  Synthetic Polypeptide

SEQ ID NO: 6889 - protein, 499 aa, Artificial Sequence; identical to SEQ ID NO: 6729
  Synthetic Polypeptide

SEQ ID NO: 6890 - protein, 499 aa, Artificial Sequence; identical to SEQ ID NO: 6730
  Synthetic Polypeptide

SEQ ID NO: 6891 - protein, 1263 aa, Artificial Sequence
  Synthetic Polypeptide
MALPVTALLLPLALLLHAARPDIQMTQSPSSLSASVGDRVTITCKASDHINNWLAWYQQKPGQAPKLLIYGATTLETGVPSRFSGSGSGTDYTLTISSLQPEDFATYYCQQSWNTPWTFGQGTKLEIKRLELHCVGDTYPSNDRCCHECRPGNGMVSRCSRSQNTVCRPCGPGFYNDVVSSKPCKPCTWCNLRSGSERKQLCTATQDTVCRCRAGTQPLDSYKPGVDCAPCPPGHFSPGDNQACKPWTNCTLAGKHTLQPASNSSDAICEDRDPPATQPQETQGPPARPITVQPTEAWPRTSQGPSTRPVEVPGGRAVAAILGLGLVLGLLGPLAILLALYLLRRDQRLPPDAHKPPGGGSFRTPIQEEQADAHSTLAKISTSRVKFSRSADAPAYQQGQNQLYNELNLGRREEYDVLDKRRGRDPEMGGKPQRRKNPQEGLYNELQKDKMAEAYSEIGMKGERRRGKGHDGLYQGLSTATKDTYDALHMQALPPRRAKRSGSGATNFSLLKQAGDVEENPGPMDWIWRILFLVGAATGAHSFEQVQLQQPGAELVKPGASVKMSCKASGYAFSSYWINWMKQKPGQGLEWIGQIYPGDGDTNYNGKFKGRATLTADTSSSTAYMQLSSLTSEDSAVYFCARSITTVVGCAMDYWGQGTSVTVSSTRLHCVGDTYPSNDRCCHECRPGNGMVSRCSRSQNTVCRPCGPGFYNDVVSSKPCKPCTWCNLRSGSERKQLCTATQDTVCRCRAGTQPLDSYKPGVDCAPCPPGHFSPGDNQACKPWTNCTLAGKHTLQPASNSSDAICEDRDPPATQPQETQGPPARPITVQPTEAWPRTSQGPSTRPVEVPGGRAVAAILGLGLVLGLLGPLAILLALYLLRRDQRLPPDAHKPPGGGSFRTPIQEEQADAHSTLAKISSRRVKFSRSADAPAYQQGQNQLYNELNLGRREEYDVLDKRRGRDPEMGGKPQRRKNPQEGLYNELQKDKMAEAYSEIGMKGERRRGKGHDGLYQGLSTATKDTYDALHMQALPPRRAKRSGSGVKQTLNFDLLKLAGDVESNPGPGHMTEYKPTVRLATRDDVPRAVRTLAAAFADYPATRHTVDPDRHIERVTELQELFLTRVGLDIGKVWVADDGAAVAVWTTPESVEAGAVFAEIGPRMAELSGSRLAAQQQMEGLLAPHRPKEPAWFLATVGVSPDHQGKGLGSAVVLPGVEAAERAGVPAFLETSAPRNLPFYERLGFTVTADVEVPEGPRTWCMTRKPGA

SEQ ID NO: 6892 - protein, 1315 aa, Artificial Sequence
  Synthetic Polypeptide
MALPVTALLLPLALLLHAARPACEVQLLESGGGLIQPGGSLRLSCAASGFTFSSHAMTWVRQAPGKGLEWVSAISGSGDYTHYADSVKGRFTISRDNSKNTVYLQMNSLRAEDSAVYYCAKDEDGGSLLGHRGQGTLVTVSSGTGGGGSGGGGSGGGGSEFGSLELHCVGDTYPSNDRCCHECRPGNGMVSRCSRSQNTVCRPCGPGFYNDVVSSKPCKPCTWCNLRSGSERKQLCTATQDTVCRCRAGTQPLDSYKPGVDCAPCPPGHFSPGDNQACKPWTNCTLAGKHTLQPASNSSDAICEDRDPPATQPQETQGPPARPITVQPTEAWPRTSQGPSTRPVEVPGGRAVAAILGLGLVLGLLGPLAILLALYLLRRDQRLPPDAHKPPGGGSFRTPIQEEQADAHSTLAKISTSRVKFSRSADAPAYQQGQNQLYNELNLGRREEYDVLDKRRGRDPEMGGKPQRRKNPQEGLYNELQKDKMAEAYSEIGMKGERRRGKGHDGLYQGLSTATKDTYDALHMQALPPRRAKRSGSGATNFSLLKQAGDVEENPGPMDWIWRILFLVGAATGAHSGPEVQLVESGGGLVQAGGSLRLSCAASGRTFSMGWFRQAPGKEREFVAAITYSGGSPYYADSVKGRFTISRDNAKNTVYLQMNSLKPEDTAVYYCAANPTYGSDWNAENWGQGTQVTVSSGSGGGGSGGGGSGGGGSFEGSTRLHCVGDTYPSNDRCCHECRPGNGMVSRCSRSQNTVCRPCGPGFYNDVVSSKPCKPCTWCNLRSGSERKQLCTATQDTVCRCRAGTQPLDSYKPGVDCAPCPPGHFSPGDNQACKPWTNCTLAGKHTLQPASNSSDAICEDRDPPATQPQETQGPPARPITVQPTEAWPRTSQGPSTRPVEVPGGRAVAAILGLGLVLGLLGPLAILLALYLLRRDQRLPPDAHKPPGGGSFRTPIQEEQADAHSTLAKISSRRVKFSRSADAPAYQQGQNQLYNELNLGRREEYDVLDKRRGRDPEMGGKPQRRKNPQEGLYNELQKDKMAEAYSEIGMKGERRRGKGHDGLYQGLSTATKDTYDALHMQALPPRRAKRSGSGVKQTLNFDLLKLAGDVESNPGPGHMTEYKPTVRLATRDDVPRAVRTLAAAFADYPATRHTVDPDRHIERVTELQELFLTRVGLDIGKVWVADDGAAVAVWTTPESVEAGAVFAEIGPRMAELSGSRLAAQQQMEGLLAPHRPKEPAWFLATVGVSPDHQGKGLGSAVVLPGVEAAERAGVPAFLETSAPRNLPFYERLGFTVTADVEVPEGPRTWCMTRKPGA

SEQ ID NO: 6893 - protein, 1465 aa, Artificial Sequence
  Synthetic Polypeptide
MALPVTALLLPLALLLHAARPDIQMTQSPSSLSASVGDRVTITCKASDHINNWLAWYQQKPGQAPKLLIYGATTLETGVPSRFSGSGSGTDYTLTISSLQPEDFATYYCQQSWNTPWTFGQGTKLEIKRLEGQPKANPTVTLFPPSSEELQANKATLVCLISDFYPGAVTVAWKADGSPVKAGVETTKPSKQSNNKYAASSYLSLTPEQWKSHRSYSCQVTHEGSTVEKTVAPTECSGSLHCVGDTYPSNDRCCHECRPGNGMVSRCSRSQNTVCRPCGPGFYNDVVSSKPCKPCTWCNLRSGSERKQLCTATQDTVCRCRAGTQPLDSYKPGVDCAPCPPGHFSPGDNQACKPWTNCTLAGKHTLQPASNSSDAICEDRDPPATQPQETQGPPARPITVQPTEAWPRTSQGPSTRPVEVPGGRAVAAILGLGLVLGLLGPLAILLALYLLRRDQRLPPDAHKPPGGGSFRTPIQEEQADAHSTLAKISTSRVKFSRSADAPAYQQGQNQLYNELNLGRREEYDVLDKRRGRDPEMGGKPQRRKNPQEGLYNELQKDKMAEAYSEIGMKGERRRGKGHDGLYQGLSTATKDTYDALHMQALPPRRAKRSGSGATNFSLLKQAGDVEENPGPMDWIWRILFLVGAATGAHSFEQVQLQQPGAELVKPGASVKMSCKASGYAFSSYWINWMKQKPGQGLEWIGQIYPGDGDTNYNGKFKGRATLTADTSSSTAYMQLSSLTSEDSAVYFCARSITTVVGCAMDYWGQGTSVTVSSTRASTKGPSVFPLAPSSKSTSGGTAALGCLVKDYFPEPVTVSWNSGALTSGVHTFPAVLQSSGLYSLSSVVTVPSSSLGTQTYICNVNHKPSNTKVDKRVEPKSCGTLHCVGDTYPSNDRCCHECRPGNGMVSRCSRSQNTVCRPCGPGFYNDVVSSKPCKPCTWCNLRSGSERKQLCTATQDTVCRCRAGTQPLDSYKPGVDCAPCPPGHFSPGDNQACKPWTNCTLAGKHTLQPASNSSDAICEDRDPPATQPQETQGPPARPITVQPTEAWPRTSQGPSTRPVEVPGGRAVAAILGLGLVLGLLGPLAILLALYLLRRDQRLPPDAHKPPGGGSFRTPIQEEQADAHSTLAKISSRRVKFSRSADAPAYQQGQNQLYNELNLGRREEYDVLDKRRGRDPEMGGKPQRRKNPQEGLYNELQKDKMAEAYSEIGMKGERRRGKGHDGLYQGLSTATKDTYDALHMQALPPRRAKRSGSGVKQTLNFDLLKLAGDVESNPGPGHMATYEVLCEVARKLGTDDREVVLFLLNVFIPQPTLAQLIGALRALKEEGRLTFPLLAECLFRAGRRDLLRDLLHLDPRFLERHLAGTMSYFSPYQLTVLHVDGELCARDIRSLIFLSKDTIGSRSTPQTFLHWVYCMENLDLLGPTDVDALMSMLRSLSRVDLQRQVQTLMGLHLSGPSHSQHYRHTP

SEQ ID NO: 6894 - protein, 1518 aa, Artificial Sequence
  Synthetic Polypeptide
MALPVTALLLPLALLLHAARPDIQMTQSPSSLSASVGDRVTITCKASDHINNWLAWYQQKPGQAPKLLIYGATTLETGVPSRFSGSGSGTDYTLTISSLQPEDFATYYCQQSWNTPWTFGQGTKLEIKRLEGQPKANPTVTLFPPSSEELQANKATLVCLISDFYPGAVTVAWKADGSPVKAGVETTKPSKQSNNKYAASSYLSLTPEQWKSHRSYSCQVTHEGSTVEKTVAPTECSGSLHCVGDTYPSNDRCCHECRPGNGMVSRCSRSQNTVCRPCGPGFYNDVVSSKPCKPCTWCNLRSGSERKQLCTATQDTVCRCRAGTQPLDSYKPGVDCAPCPPGHFSPGDNQACKPWTNCTLAGKHTLQPASNSSDAICEDRDPPATQPQETQGPPARPITVQPTEAWPRTSQGPSTRPVEVPGGRAVAAILGLGLVLGLLGPLAILLALYLLRRDQRLPPDAHKPPGGGSFRTPIQEEQADAHSTLAKISTSRVKFSRSADAPAYQQGQNQLYNELNLGRREEYDVLDKRRGRDPEMGGKPQRRKNPQEGLYNELQKDKMAEAYSEIGMKGERRRGKGHDGLYQGLSTATKDTYDALHMQALPPRRAKRSGSGATNFSLLKQAGDVEENPGPMDWIWRILFLVGAATGAHSFEQVQLQQPGAELVKPGASVKMSCKASGYAFSSYWINWMKQKPGQGLEWIGQIYPGDGDTNYNGKFKGRATLTADTSSSTAYMQLSSLTSEDSAVYFCARSITTVVGCAMDYWGQGTSVTVSSTRASTKGPSVFPLAPSSKSTSGGTAALGCLVKDYFPEPVTVSWNSGALTSGVHTFPAVLQSSGLYSLSSVVTVPSSSLGTQTYICNVNHKPSNTKVDKRVEPKSCGTLHCVGDTYPSNDRCCHECRPGNGMVSRCSRSQNTVCRPCGPGFYNDVVSSKPCKPCTWCNLRSGSERKQLCTATQDTVCRCRAGTQPLDSYKPGVDCAPCPPGHFSPGDNQACKPWTNCTLAGKHTLQPASNSSDAICEDRDPPATQPQETQGPPARPITVQPTEAWPRTSQGPSTRPVEVPGGRAVAAILGLGLVLGLLGPLAILLALYLLRRDQRLPPDAHKPPGGGSFRTPIQEEQADAHSTLAKISSRRVKFSRSADAPAYQQGQNQLYNELNLGRREEYDVLDKRRGRDPEMGGKPQRRKNPQEGLYNELQKDKMAEAYSEIGMKGERRRGKGHDGLYQGLSTATKDTYDALHMQALPPRRAKRSGSGVKQTLNFDLLKLAGDVESNPGPGHMSDSKEVPSLPFLRHLLEELDSHEDSLLLFLCHDAAPGCTTVTQALCSLSQQRKLTLAALVEMLYVLQRMDLLKSRFGLSKEGAEQLLGTSFLTRYRKLMVCVGEELDSSELRALRLFACNLNPSLSTALSESSRFVELVLALENVGLVSPSSVSVLADMLRTLRRLDLCQQLVEYEQQEQARYRYCYAASPSLPVRTLRRGHGASEHEQLCMPVQESSDSPELLRTPVQESSSDSPEQTT

SEQ ID NO: 6895 - protein, 1476 aa, Artificial Sequence
  Synthetic Polypeptide
MALPVTALLLPLALLLHAARPDIQMTQSPSSLSASVGDRVTITCKASDHINNWLAWYQQKPGQAPKLLIYGATTLETGVPSRFSGSGSGTDYTLTISSLQPEDFATYYCQQSWNTPWTFGQGTKLEIKRLEGQPKANPTVTLFPPSSEELQANKATLVCLISDFYPGAVTVAWKADGSPVKAGVETTKPSKQSNNKYAASSYLSLTPEQWKSHRSYSCQVTHEGSTVEKTVAPTECSGSLHCVGDTYPSNDRCCHECRPGNGMVSRCSRSQNTVCRPCGPGFYNDVVSSKPCKPCTWCNLRSGSERKQLCTATQDTVCRCRAGTQPLDSYKPGVDCAPCPPGHFSPGDNQACKPWTNCTLAGKHTLQPASNSSDAICEDRDPPATQPQETQGPPARPITVQPTEAWPRTSQGPSTRPVEVPGGRAVAAILGLGLVLGLLGPLAILLALYLLRRDQRLPPDAHKPPGGGSFRTPIQEEQADAHSTLAKISTSRVKFSRSADAPAYQQGQNQLYNELNLGRREEYDVLDKRRGRDPEMGGKPQRRKNPQEGLYNELQKDKMAEAYSEIGMKGERRRGKGHDGLYQGLSTATKDTYDALHMQALPPRRAKRSGSGATNFSLLKQAGDVEENPGPMDWIWRILFLVGAATGAHSFEQVQLQQPGAELVKPGASVKMSCKASGYAFSSYWINWMKQKPGQGLEWIGQIYPGDGDTNYNGKFKGRATLTADTSSSTAYMQLSSLTSEDSAVYFCARSITTVVGCAMDYWGQGTSVTVSSTRASTKGPSVFPLAPSSKSTSGGTAALGCLVKDYFPEPVTVSWNSGALTSGVHTFPAVLQSSGLYSLSSVVTVPSSSLGTQTYICNVNHKPSNTKVDKRVEPKSCGTLHCVGDTYPSNDRCCHECRPGNGMVSRCSRSQNTVCRPCGPGFYNDVVSSKPCKPCTWCNLRSGSERKQLCTATQDTVCRCRAGTQPLDSYKPGVDCAPCPPGHFSPGDNQACKPWTNCTLAGKHTLQPASNSSDAICEDRDPPATQPQETQGPPARPITVQPTEAWPRTSQGPSTRPVEVPGGRAVAAILGLGLVLGLLGPLAILLALYLLRRDQRLPPDAHKPPGGGSFRTPIQEEQADAHSTLAKISSRRVKFSRSADAPAYQQGQNQLYNELNLGRREEYDVLDKRRGRDPEMGGKPQRRKNPQEGLYNELQKDKMAEAYSEIGMKGERRRGKGHDGLYQGLSTATKDTYDALHMQALPPRRAKRSGSGVKQTLNFDLLKLAGDVESNPGPGHMTEYKPTVRLATRDDVPRAVRTLAAAFADYPATRHTVDPDRHIERVTELQELFLTRVGLDIGKVWVADDGAAVAVWTTPESVEAGAVFAEIGPRMAELSGSRLAAQQQMEGLLAPHRPKEPAWFLATVGVSPDHQGKGLGSAVVLPGVEAAERAGVPAFLETSAPRNLPFYERLGFTVTADVEVPEGPRTWCMTRKPGA

SEQ ID NO: 6896 - protein, 1613 aa, Artificial Sequence
  Synthetic Polypeptide
MALPVTALLLPLALLLHAARPEVQLVESGGGLVQAGGSLRLSCAASGRTFSMGWFRQAPGKEREFVAAITYSGGSPYYADSVKGRFTISRDNAKNTVYLQMNSLKPEDTAVYYCAANPTYGSDWNAENWGQGTQVTVSSGTGGGGSGGGGSGGGGSEFDIQMTQSPSSLSASVGDRVTITCKASDHINNWLAWYQQKPGQAPKLLIYGATTLETGVPSRFSGSGSGTDYTLTISSLQPEDFATYYCQQSWNTPWTFGQGTKLEIKRLEGQPKANPTVTLFPPSSEELQANKATLVCLISDFYPGAVTVAWKADGSPVKAGVETTKPSKQSNNKYAASSYLSLTPEQWKSHRSYSCQVTHEGSTVEKTVAPTECSGSLHCVGDTYPSNDRCCHECRPGNGMVSRCSRSQNTVCRPCGPGFYNDVVSSKPCKPCTWCNLRSGSERKQLCTATQDTVCRCRAGTQPLDSYKPGVDCAPCPPGHFSPGDNQACKPWTNCTLAGKHTLQPASNSSDAICEDRDPPATQPQETQGPPARPITVQPTEAWPRTSQGPSTRPVEVPGGRAVAAILGLGLVLGLLGPLAILLALYLLRRDQRLPPDAHKPPGGGSFRTPIQEEQADAHSTLAKISTSRVKFSRSADAPAYQQGQNQLYNELNLGRREEYDVLDKRRGRDPEMGGKPQRRKNPQEGLYNELQKDKMAEAYSEIGMKGERRRGKGHDGLYQGLSTATKDTYDALHMQALPPRRAKRSGSGATNFSLLKQAGDVEENPGPMDWIWRILFLVGAATGAHSFEQVQLQQPGAELVKPGASVKMSCKASGYAFSSYWINWMKQKPGQGLEWIGQIYPGDGDTNYNGKFKGRATLTADTSSSTAYMQLSSLTSEDSAVYFCARSITTVVGCAMDYWGQGTSVTVSSTRASTKGPSVFPLAPSSKSTSGGTAALGCLVKDYFPEPVTVSWNSGALTSGVHTFPAVLQSSGLYSLSSVVTVPSSSLGTQTYICNVNHKPSNTKVDKRVEPKSCGTLHCVGDTYPSNDRCCHECRPGNGMVSRCSRSQNTVCRPCGPGFYNDVVSSKPCKPCTWCNLRSGSERKQLCTATQDTVCRCRAGTQPLDSYKPGVDCAPCPPGHFSPGDNQACKPWTNCTLAGKHTLQPASNSSDAICEDRDPPATQPQETQGPPARPITVQPTEAWPRTSQGPSTRPVEVPGGRAVAAILGLGLVLGLLGPLAILLALYLLRRDQRLPPDAHKPPGGGSFRTPIQEEQADAHSTLAKISSRRVKFSRSADAPAYQQGQNQLYNELNLGRREEYDVLDKRRGRDPEMGGKPQRRKNPQEGLYNELQKDKMAEAYSEIGMKGERRRGKGHDGLYQGLSTATKDTYDALHMQALPPRRAKRSGSGVKQTLNFDLLKLAGDVESNPGPGHMTEYKPTVRLATRDDVPRAVRTLAAAFADYPATRHTVDPDRHIERVTELQELFLTRVGLDIGKVWVADDGAAVAVWTTPESVEAGAVFAEIGPRMAELSGSRLAAQQQMEGLLAPHRPKEPAWFLATVGVSPDHQGKGLGSAVVLPGVEAAERAGVPAFLETSAPRNLPFYERLGFTVTADVEVPEGPRTWCMTRKPGA

SEQ ID NO: 6897 - protein, 1750 aa, Artificial Sequence
  Synthetic Polypeptide
MALPVTALLLPLALLLHAARPEVQLVESGGGLVQAGGSLRLSCAASGRTFSMGWFRQAPGKEREFVAAITYSGGSPYYADSVKGRFTISRDNAKNTVYLQMNSLKPEDTAVYYCAANPTYGSDWNAENWGQGTQVTVSSGTGGGGSGGGGSGGGGSEFDIQMTQSPSSLSASVGDRVTITCKASDHINNWLAWYQQKPGQAPKLLIYGATTLETGVPSRFSGSGSGTDYTLTISSLQPEDFATYYCQQSWNTPWTFGQGTKLEIKRLEGQPKANPTVTLFPPSSEELQANKATLVCLISDFYPGAVTVAWKADGSPVKAGVETTKPSKQSNNKYAASSYLSLTPEQWKSHRSYSCQVTHEGSTVEKTVAPTECSGSLHCVGDTYPSNDRCCHECRPGNGMVSRCSRSQNTVCRPCGPGFYNDVVSSKPCKPCTWCNLRSGSERKQLCTATQDTVCRCRAGTQPLDSYKPGVDCAPCPPGHFSPGDNQACKPWTNCTLAGKHTLQPASNSSDAICEDRDPPATQPQETQGPPARPITVQPTEAWPRTSQGPSTRPVEVPGGRAVAAILGLGLVLGLLGPLAILLALYLLRRDQRLPPDAHKPPGGGSFRTPIQEEQADAHSTLAKISTSRVKFSRSADAPAYQQGQNQLYNELNLGRREEYDVLDKRRGRDPEMGGKPQRRKNPQEGLYNELQKDKMAEAYSEIGMKGERRRGKGHDGLYQGLSTATKDTYDALHMQALPPRRAKRSGSGATNFSLLKQAGDVEENPGPMDWIWRILFLVGAATGAHSGPEVQLVESGGGLVQAGGSLRLSCAASGRTFTMGWFRQAPGKEREFVAAISLSPTLAYYADSVKGRFTISRDNAKNTVVLQMNSLKPEDTALYYCAADRKSVMSIRPDYWGQGTQVTVSSGSGGGGSGGGGSGGGGSFEQVQLQQPGAELVKPGASVKMSCKASGYAFSSYWINWMKQKPGQGLEWIGQIYPGDGDTNYNGKFKGRATLTADTSSSTAYMQLSSLTSEDSAVYFCARSITTVVGCAMDYWGQGTSVTVSSTRASTKGPSVFPLAPSSKSTSGGTAALGCLVKDYFPEPVTVSWNSGALTSGVHTFPAVLQSSGLYSLSSVVTVPSSSLGTQTYICNVNHKPSNTKVDKRVEPKSCGTLHCVGDTYPSNDRCCHECRPGNGMVSRCSRSQNTVCRPCGPGFYNDVVSSKPCKPCTWCNLRSGSERKQLCTATQDTVCRCRAGTQPLDSYKPGVDCAPCPPGHFSPGDNQACKPWTNCTLAGKHTLQPASNSSDAICEDRDPPATQPQETQGPPARPITVQPTEAWPRTSQGPSTRPVEVPGGRAVAAILGLGLVLGLLGPLAILLALYLLRRDQRLPPDAHKPPGGGSFRTPIQEEQADAHSTLAKISSRRVKFSRSADAPAYQQGQNQLYNELNLGRREEYDVLDKRRGRDPEMGGKPQRRKNPQEGLYNELQKDKMAEAYSEIGMKGERRRGKGHDGLYQGLSTATKDTYDALHMQALPPRRAKRSGSGVKQTLNFDLLKLAGDVESNPGPGHMTEYKPTVRLATRDDVPRAVRTLAAAFADYPATRHTVDPDRHIERVTELQELFLTRVGLDIGKVWVADDGAAVAVWTTPESVEAGAVFAEIGPRMAELSGSRLAAQQQMEGLLAPHRPKEPAWFLATVGVSPDHQGKGLGSAVVLPGVEAAERAGVPAFLETSAPRNLPFYERLGFTVTADVEVPEGPRTWCMTRKPGA

SEQ ID NO: 6898 - protein, 1483 aa, Artificial Sequence
  Synthetic Polypeptide
MALPVTALLLPLALLLHAARPEVQLVESGGGLVQAGGSLRLSCAASGRTFSMGWFRQAPGKEREFVAAITYSGGSPYYADSVKGRFTISRDNAKNTVYLQMNSLKPEDTAVYYCAANPTYGSDWNAENWGQGTQVTVSSLEGQPKANPTVTLFPPSSEELQANKATLVCLISDFYPGAVTVAWKADGSPVKAGVETTKPSKQSNNKYAASSYLSLTPEQWKSHRSYSCQVTHEGSTVEKTVAPTECSGSLHCVGDTYPSNDRCCHECRPGNGMVSRCSRSQNTVCRPCGPGFYNDVVSSKPCKPCTWCNLRSGSERKQLCTATQDTVCRCRAGTQPLDSYKPGVDCAPCPPGHFSPGDNQACKPWTNCTLAGKHTLQPASNSSDAICEDRDPPATQPQETQGPPARPITVQPTEAWPRTSQGPSTRPVEVPGGRAVAAILGLGLVLGLLGPLAILLALYLLRRDQRLPPDAHKPPGGGSFRTPIQEEQADAHSTLAKISTSRVKFSRSADAPAYQQGQNQLYNELNLGRREEYDVLDKRRGRDPEMGGKPQRRKNPQEGLYNELQKDKMAEAYSEIGMKGERRRGKGHDGLYQGLSTATKDTYDALHMQALPPRRAKRSGSGATNFSLLKQAGDVEENPGPMDWIWRILFLVGAATGAHSGPEVQLVESGGGLVQAGGSLRLSCAASGRTFTMGWFRQAPGKEREFVAAISLSPTLAYYADSVKGRFTISRDNAKNTVVLQMNSLKPEDTALYYCAADRKSVMSIRPDYWGQGTQVTVSSTRASTKGPSVFPLAPSSKSTSGGTAALGCLVKDYFPEPVTVSWNSGALTSGVHTFPAVLQSSGLYSLSSVVTVPSSSLGTQTYICNVNHKPSNTKVDKRVEPKSCGTLHCVGDTYPSNDRCCHECRPGNGMVSRCSRSQNTVCRPCGPGFYNDVVSSKPCKPCTWCNLRSGSERKQLCTATQDTVCRCRAGTQPLDSYKPGVDCAPCPPGHFSPGDNQACKPWTNCTLAGKHTLQPASNSSDAICEDRDPPATQPQETQGPPARPITVQPTEAWPRTSQGPSTRPVEVPGGRAVAAILGLGLVLGLLGPLAILLALYLLRRDQRLPPDAHKPPGGGSFRTPIQEEQADAHSTLAKISSRRVKFSRSADAPAYQQGQNQLYNELNLGRREEYDVLDKRRGRDPEMGGKPQRRKNPQEGLYNELQKDKMAEAYSEIGMKGERRRGKGHDGLYQGLSTATKDTYDALHMQALPPRRAKRSGSGVKQTLNFDLLKLAGDVESNPGPGHMTEYKPTVRLATRDDVPRAVRTLAAAFADYPATRHTVDPDRHIERVTELQELFLTRVGLDIGKVWVADDGAAVAVWTTPESVEAGAVFAEIGPRMAELSGSRLAAQQQMEGLLAPHRPKEPAWFLATVGVSPDHQGKGLGSAVVLPGVEAAERAGVPAFLETSAPRNLPFYERLGFTVTADVEVPEGPRTWCMTRKPGA

SEQ ID NO: 6899 - protein, 1491 aa, Artificial Sequence
  Synthetic Polypeptide
MALPVTALLLPLALLLHAARPDIQMTQSPSSLSASVGDRVTITCKASDHINNWLAWYQQKPGQAPKLLIYGATTLETGVPSRFSGSGSGTDYTLTISSLQPEDFATYYCQQSWNTPWTFGQGTKLEIKRLEDLKNVFPPEVAVFEPSEAEISHTQKATLVCLATGFYPDHVELSWWVNGKEVHSGVSTDPQPLKEQPALNDSRYCLSSRLRVSATFWQNPRNHFRCQVQFYGLSENDEWTQDRAKPVTQIVSAEAWGRADCGSLHCVGDTYPSNDRCCHECRPGNGMVSRCSRSQNTVCRPCGPGFYNDVVSSKPCKPCTWCNLRSGSERKQLCTATQDTVCRCRAGTQPLDSYKPGVDCAPCPPGHFSPGDNQACKPWTNCTLAGKHTLQPASNSSDAICEDRDPPATQPQETQGPPARPITVQPTEAWPRTSQGPSTRPVEVPGGRAVAAILGLGLVLGLLGPLAILLALYLLRRDQRLPPDAHKPPGGGSFRTPIQEEQADAHSTLAKISTSRVKFSRSADAPAYQQGQNQLYNELNLGRREEYDVLDKRRGRDPEMGGKPQRRKNPQEGLYNELQKDKMAEAYSEIGMKGERRRGKGHDGLYQGLSTATKDTYDALHMQALPPRRAKRSGSGATNFSLLKQAGDVEENPGPMDWIWRILFLVGAATGAHSFEQVQLQQPGAELVKPGASVKMSCKASGYAFSSYWINWMKQKPGQGLEWIGQIYPGDGDTNYNGKFKGRATLTADTSSSTAYMQLSSLTSEDSAVYFCARSITTVVGCAMDYWGQGTSVTVSSTRIQNPDPAVYQLRDSKSSDKSVCLFTDFDSQTNVSQSKDSDVYITDKTVLDMRSMDFKSNSAVAWSNKSDFACANAFNNSIIPEDTFFPSPESSCGTLHCVGDTYPSNDRCCHECRPGNGMVSRCSRSQNTVCRPCGPGFYNDVVSSKPCKPCTWCNLRSGSERKQLCTATQDTVCRCRAGTQPLDSYKPGVDCAPCPPGHFSPGDNQACKPWTNCTLAGKHTLQPASNSSDAICEDRDPPATQPQETQGPPARPITVQPTEAWPRTSQGPSTRPVEVPGGRAVAAILGLGLVLGLLGPLAILLALYLLRRDQRLPPDAHKPPGGGSFRTPIQEEQADAHSTLAKISSRRVKFSRSADAPAYQQGQNQLYNELNLGRREEYDVLDKRRGRDPEMGGKPQRRKNPQEGLYNELQKDKMAEAYSEIGMKGERRRGKGHDGLYQGLSTATKDTYDALHMQALPPRRAKRSGSGVKQTLNFDLLKLAGDVESNPGPGHMTEYKPTVRLATRDDVPRAVRTLAAAFADYPATRHTVDPDRHIERVTELQELFLTRVGLDIGKVWVADDGAAVAVWTTPESVEAGAVFAEIGPRMAELSGSRLAAQQQMEGLLAPHRPKEPAWFLATVGVSPDHQGKGLGSAVVLPGVEAAERAGVPAFLETSAPRNLPFYERLGFTVTADVEVPEGPRTWCMTRKPGA

SEQ ID NO: 6900 - protein, 1628 aa, Artificial Sequence
  Synthetic Polypeptide
MALPVTALLLPLALLLHAARPEVQLVESGGGLVQAGGSLRLSCAASGRTFSMGWFRQAPGKEREFVAAITYSGGSPYYADSVKGRFTISRDNAKNTVYLQMNSLKPEDTAVYYCAANPTYGSDWNAENWGQGTQVTVSSGTGGGGSGGGGSGGGGSEFDIQMTQSPSSLSASVGDRVTITCKASDHINNWLAWYQQKPGQAPKLLIYGATTLETGVPSRFSGSGSGTDYTLTISSLQPEDFATYYCQQSWNTPWTFGQGTKLEIKRLEDLKNVFPPEVAVFEPSEAEISHTQKATLVCLATGFYPDHVELSWWVNGKEVHSGVSTDPQPLKEQPALNDSRYCLSSRLRVSATFWQNPRNHFRCQVQFYGLSENDEWTQDRAKPVTQIVSAEAWGRADCGSLHCVGDTYPSNDRCCHECRPGNGMVSRCSRSQNTVCRPCGPGFYNDVVSSKPCKPCTWCNLRSGSERKQLCTATQDTVCRCRAGTQPLDSYKPGVDCAPCPPGHFSPGDNQACKPWTNCTLAGKHTLQPASNSSDAICEDRDPPATQPQETQGPPARPITVQPTEAWPRTSQGPSTRPVEVPGGRAVAAILGLGLVLGLLGPLAILLALYLLRRDQRLPPDAHKPPGGGSFRTPIQEEQADAHSTLAKISTSRVKFSRSADAPAYQQGQNQLYNELNLGRREEYDVLDKRRGRDPEMGGKPQRRKNPQEGLYNELQKDKMAEAYSEIGMKGERRRGKGHDGLYQGLSTATKDTYDALHMQALPPRRAKRSGSGATNFSLLKQAGDVEENPGPMDWIWRILFLVGAATGAHSFEQVQLQQPGAELVKPGASVKMSCKASGYAFSSYWINWMKQKPGQGLEWIGQIYPGDGDTNYNGKFKGRATLTADTSSSTAYMQLSSLTSEDSAVYFCARSITTVVGCAMDYWGQGTSVTVSSTRIQNPDPAVYQLRDSKSSDKSVCLFTDFDSQTNVSQSKDSDVYITDKTVLDMRSMDFKSNSAVAWSNKSDFACANAFNNSIIPEDTFFPSPESSCGTLHCVGDTYPSNDRCCHECRPGNGMVSRCSRSQNTVCRPCGPGFYNDVVSSKPCKPCTWCNLRSGSERKQLCTATQDTVCRCRAGTQPLDSYKPGVDCAPCPPGHFSPGDNQACKPWTNCTLAGKHTLQPASNSSDAICEDRDPPATQPQETQGPPARPITVQPTEAWPRTSQGPSTRPVEVPGGRAVAAILGLGLVLGLLGPLAILLALYLLRRDQRLPPDAHKPPGGGSFRTPIQEEQADAHSTLAKISSRRVKFSRSADAPAYQQGQNQLYNELNLGRREEYDVLDKRRGRDPEMGGKPQRRKNPQEGLYNELQKDKMAEAYSEIGMKGERRRGKGHDGLYQGLSTATKDTYDALHMQALPPRRAKRSGSGVKQTLNFDLLKLAGDVESNPGPGHMTEYKPTVRLATRDDVPRAVRTLAAAFADYPATRHTVDPDRHIERVTELQELFLTRVGLDIGKVWVADDGAAVAVWTTPESVEAGAVFAEIGPRMAELSGSRLAAQQQMEGLLAPHRPKEPAWFLATVGVSPDHQGKGLGSAVVLPGVEAAERAGVPAFLETSAPRNLPFYERLGFTVTADVEVPEGPRTWCMTRKPGA

SEQ ID NO: 6901 - protein, 1765 aa, Artificial Sequence
  Synthetic Polypeptide
MALPVTALLLPLALLLHAARPEVQLVESGGGLVQAGGSLRLSCAASGRTFSMGWFRQAPGKEREFVAAITYSGGSPYYADSVKGRFTISRDNAKNTVYLQMNSLKPEDTAVYYCAANPTYGSDWNAENWGQGTQVTVSSGTGGGGSGGGGSGGGGSEFDIQMTQSPSSLSASVGDRVTITCKASDHINNWLAWYQQKPGQAPKLLIYGATTLETGVPSRFSGSGSGTDYTLTISSLQPEDFATYYCQQSWNTPWTFGQGTKLEIKRLEDLKNVFPPEVAVFEPSEAEISHTQKATLVCLATGFYPDHVELSWWVNGKEVHSGVSTDPQPLKEQPALNDSRYCLSSRLRVSATFWQNPRNHFRCQVQFYGLSENDEWTQDRAKPVTQIVSAEAWGRADCGSLHCVGDTYPSNDRCCHECRPGNGMVSRCSRSQNTVCRPCGPGFYNDVVSSKPCKPCTWCNLRSGSERKQLCTATQDTVCRCRAGTQPLDSYKPGVDCAPCPPGHFSPGDNQACKPWTNCTLAGKHTLQPASNSSDAICEDRDPPATQPQETQGPPARPITVQPTEAWPRTSQGPSTRPVEVPGGRAVAAILGLGLVLGLLGPLAILLALYLLRRDQRLPPDAHKPPGGGSFRTPIQEEQADAHSTLAKISTSRVKFSRSADAPAYQQGQNQLYNELNLGRREEYDVLDKRRGRDPEMGGKPQRRKNPQEGLYNELQKDKMAEAYSEIGMKGERRRGKGHDGLYQGLSTATKDTYDALHMQALPPRRAKRSGSGATNFSLLKQAGDVEENPGPMDWIWRILFLVGAATGAHSGPEVQLVESGGGLVQAGGSLRLSCAASGRTFTMGWFRQAPGKEREFVAAISLSPTLAYYADSVKGRFTISRDNAKNTVVLQMNSLKPEDTALYYCAADRKSVMSIRPDYWGQGTQVTVSSGSGGGGSGGGGSGGGGSFEQVQLQQPGAELVKPGASVKMSCKASGYAFSSYWINWMKQKPGQGLEWIGQIYPGDGDTNYNGKFKGRATLTADTSSSTAYMQLSSLTSEDSAVYFCARSITTVVGCAMDYWGQGTSVTVSSTRIQNPDPAVYQLRDSKSSDKSVCLFTDFDSQTNVSQSKDSDVYITDKTVLDMRSMDFKSNSAVAWSNKSDFACANAFNNSIIPEDTFFPSPESSCGTLHCVGDTYPSNDRCCHECRPGNGMVSRCSRSQNTVCRPCGPGFYNDVVSSKPCKPCTWCNLRSGSERKQLCTATQDTVCRCRAGTQPLDSYKPGVDCAPCPPGHFSPGDNQACKPWTNCTLAGKHTLQPASNSSDAICEDRDPPATQPQETQGPPARPITVQPTEAWPRTSQGPSTRPVEVPGGRAVAAILGLGLVLGLLGPLAILLALYLLRRDQRLPPDAHKPPGGGSFRTPIQEEQADAHSTLAKISSRRVKFSRSADAPAYQQGQNQLYNELNLGRREEYDVLDKRRGRDPEMGGKPQRRKNPQEGLYNELQKDKMAEAYSEIGMKGERRRGKGHDGLYQGLSTATKDTYDALHMQALPPRRAKRSGSGVKQTLNFDLLKLAGDVESNPGPGHMTEYKPTVRLATRDDVPRAVRTLAAAFADYPATRHTVDPDRHIERVTELQELFLTRVGLDIGKVWVADDGAAVAVWTTPESVEAGAVFAEIGPRMAELSGSRLAAQQQMEGLLAPHRPKEPAWFLATVGVSPDHQGKGLGSAVVLPGVEAAERAGVPAFLETSAPRNLPFYERLGFTVTADVEVPEGPRTWCMTRKPGA

SEQ ID NO: 6902 - protein, 1498 aa, Artificial Sequence
  Synthetic Polypeptide
MALPVTALLLPLALLLHAARPEVQLVESGGGLVQAGGSLRLSCAASGRTFSMGWFRQAPGKEREFVAAITYSGGSPYYADSVKGRFTISRDNAKNTVYLQMNSLKPEDTAVYYCAANPTYGSDWNAENWGQGTQVTVSSLEDLKNVFPPEVAVFEPSEAEISHTQKATLVCLATGFYPDHVELSWWVNGKEVHSGVSTDPQPLKEQPALNDSRYCLSSRLRVSATFWQNPRNHFRCQVQFYGLSENDEWTQDRAKPVTQIVSAEAWGRADCGSLHCVGDTYPSNDRCCHECRPGNGMVSRCSRSQNTVCRPCGPGFYNDVVSSKPCKPCTWCNLRSGSERKQLCTATQDTVCRCRAGTQPLDSYKPGVDCAPCPPGHFSPGDNQACKPWTNCTLAGKHTLQPASNSSDAICEDRDPPATQPQETQGPPARPITVQPTEAWPRTSQGPSTRPVEVPGGRAVAAILGLGLVLGLLGPLAILLALYLLRRDQRLPPDAHKPPGGGSFRTPIQEEQADAHSTLAKISTSRVKFSRSADAPAYQQGQNQLYNELNLGRREEYDVLDKRRGRDPEMGGKPQRRKNPQEGLYNELQKDKMAEAYSEIGMKGERRRGKGHDGLYQGLSTATKDTYDALHMQALPPRRAKRSGSGATNFSLLKQAGDVEENPGPMDWIWRILFLVGAATGAHSGPEVQLVESGGGLVQAGGSLRLSCAASGRTFTMGWFRQAPGKEREFVAAISLSPTLAYYADSVKGRFTISRDNAKNTVVLQMNSLKPEDTALYYCAADRKSVMSIRPDYWGQGTQVTVSSTRIQNPDPAVYQLRDSKSSDKSVCLFTDFDSQTNVSQSKDSDVYITDKTVLDMRSMDFKSNSAVAWSNKSDFACANAFNNSIIPEDTFFPSPESSCGTLHCVGDTYPSNDRCCHECRPGNGMVSRCSRSQNTVCRPCGPGFYNDVVSSKPCKPCTWCNLRSGSERKQLCTATQDTVCRCRAGTQPLDSYKPGVDCAPCPPGHFSPGDNQACKPWTNCTLAGKHTLQPASNSSDAICEDRDPPATQPQETQGPPARPITVQPTEAWPRTSQGPSTRPVEVPGGRAVAAILGLGLVLGLLGPLAILLALYLLRRDQRLPPDAHKPPGGGSFRTPIQEEQADAHSTLAKISSRRVKFSRSADAPAYQQGQNQLYNELNLGRREEYDVLDKRRGRDPEMGGKPQRRKNPQEGLYNELQKDKMAEAYSEIGMKGERRRGKGHDGLYQGLSTATKDTYDALHMQALPPRRAKRSGSGVKQTLNFDLLKLAGDVESNPGPGHMTEYKPTVRLATRDDVPRAVRTLAAAFADYPATRHTVDPDRHIERVTELQELFLTRVGLDIGKVWVADDGAAVAVWTTPESVEAGAVFAEIGPRMAELSGSRLAAQQQMEGLLAPHRPKEPAWFLATVGVSPDHQGKGLGSAVVLPGVEAAERAGVPAFLETSAPRNLPFYERLGFTVTADVEVPEGPRTWCMTRKPGA

SEQ ID NO: 6903 - protein, 760 aa, Artificial Sequence
  Synthetic Polypeptide
MALPVTALLLPLALLLHAARPACEVQLLESGGGLIQPGGSLRLSCAASGFTFSSHAMTWVRQAPGKGLEWVSAISGSGDYTHYADSVKGRFTISRDNSKNTVYLQMNSLRAEDSAVYYCAKDEDGGSLLGHRGQGTLVTVSSGTGGGGSGGGGSGGGGSEFGSLELHCVGDTYPSNDRCCHECRPGNGMVSRCSRSQNTVCRPCGPGFYNDVVSSKPCKPCTWCNLRSGSERKQLCTATQDTVCRCRAGTQPLDSYKPGVDCAPCPPGHFSPGDNQACKPWTNCTLAGKHTLQPASNSSDAICEDRDPPATQPQETQGPPARPITVQPTEAWPRTSQGPSTRPVEVPGGRAVAAILGLGLVLGLLGPLAILLALYLLRRDQRLPPDAHKPPGGGSFRTPIQEEQADAHSTLAKISTSRVKFSRSADAPAYQQGQNQLYNELNLGRREEYDVLDKRRGRDPEMGGKPQRRKNPQEGLYNELQKDKMAEAYSEIGMKGERRRGKGHDGLYQGLSTATKDTYDALHMQALPPRRAKRSGSGATNFSLLKQAGDVEENPGPTRGHMTEYKPTVRLATRDDVPRAVRTLAAAFADYPATRHTVDPDRHIERVTELQELFLTRVGLDIGKVWVADDGAAVAVWTTPESVEAGAVFAEIGPRMAELSGSRLAAQQQMEGLLAPHRPKEPAWFLATVGVSPDHQGKGLGSAVVLPGVEAAERAGVPAFLETSAPRNLPFYERLGFTVTADVEVPEGPRTWCMTRKPGA

SEQ ID NO: 6904 - protein, 632 aa, Artificial Sequence
  Synthetic Polypeptide
MALPVTALLLPLALLLHAARPDIQMTQSPSSLSASVGDRVTITCKASDHINNWLAWYQQKPGQAPKLLIYGATTLETGVPSRFSGSGSGTDYTLTISSLQPEDFATYYCQQSWNTPWTFGQGTKLEIKRGGGGSGGGGSGGGGSQVQLQQPGAELVKPGASVKMSCKASGYAFSSYWINWMKQKPGQGLEWIGQIYPGDGDTNYNGKFKGRATLTADTSSSTAYMQLSSLTSEDSAVYFCARSITTVVGCAMDYWGQGTSVTVSSTRLHCVGDTYPSNDRCCHECRPGNGMVSRCSRSQNTVCRPCGPGFYNDVVSSKPCKPCTWCNLRSGSERKQLCTATQDTVCRCRAGTQPLDSYKPGVDCAPCPPGHFSPGDNQACKPWTNCTLAGKHTLQPASNSSDAICEDRDPPATQPQETQGPPARPITVQPTEAWPRTSQGPSTRPVEVPGGRAVAAILGLGLVLGLLGPLAILLALYLLRRDQRLPPDAHKPPGGGSFRTPIQEEQADAHSTLAKISTSRVKFSRSADAPAYQQGQNQLYNELNLGRREEYDVLDKRRGRDPEMGGKPQRRKNPQEGLYNELQKDKMAEAYSEIGMKGERRRGKGHDGLYQGLSTATKDTYDALHMQALPPR

SEQ ID NO: 6905 - protein, 632 aa, Artificial Sequence
  Synthetic Polypeptide
MALPVTALLLPLALLLHAARPEIVLTQSPATLSLSPGERATLSCRASQSVSSYLAWYQQKPGQAPRLLIYDASNRATGIPARFSGSGSGTDFTLTISSLEPEDFAVYYCQQRSNWPITFGQGTRLEIKGGGGSGGGGSGGGGSEVQLVESGGGLVQPGRSLRLSCAASGFTFNDYAMHWVRQAPGKGLEWVSTISWNSGSIGYADSVKGRFTISRDNAKKSLYLQMNSLRAEDTALYYCAKDIQYGNYYYGMDVWGQGTTVTVSSTRLHCVGDTYPSNDRCCHECRPGNGMVSRCSRSQNTVCRPCGPGFYNDVVSSKPCKPCTWCNLRSGSERKQLCTATQDTVCRCRAGTQPLDSYKPGVDCAPCPPGHFSPGDNQACKPWTNCTLAGKHTLQPASNSSDAICEDRDPPATQPQETQGPPARPITVQPTEAWPRTSQGPSTRPVEVPGGRAVAAILGLGLVLGLLGPLAILLALYLLRRDQRLPPDAHKPPGGGSFRTPIQEEQADAHSTLAKISTSRVKFSRSADAPAYQQGQNQLYNELNLGRREEYDVLDKRRGRDPEMGGKPQRRKNPQEGLYNELQKDKMAEAYSEIGMKGERRRGKGHDGLYQGLSTATKDTYDALHMQALPPR

SEQ ID NO: 6906 - protein, 506 aa, Artificial Sequence
  Synthetic Polypeptide
MALPVTALLLPLALLLHAARPEVQLVESGGGLVQAGGSLRLSCAASGRTFSMGWFRQAPGKEREFVAAITYSGGSPYYADSVKGRFTISRDNAKNTVYLQMNSLKPEDTAVYYCAANPTYGSDWNAENWGQGTQVTVSSTRLHCVGDTYPSNDRCCHECRPGNGMVSRCSRSQNTVCRPCGPGFYNDVVSSKPCKPCTWCNLRSGSERKQLCTATQDTVCRCRAGTQPLDSYKPGVDCAPCPPGHFSPGDNQACKPWTNCTLAGKHTLQPASNSSDAICEDRDPPATQPQETQGPPARPITVQPTEAWPRTSQGPSTRPVEVPGGRAVAAILGLGLVLGLLGPLAILLALYLLRRDQRLPPDAHKPPGGGSFRTPIQEEQADAHSTLAKISTSRVKFSRSADAPAYQQGQNQLYNELNLGRREEYDVLDKRRGRDPEMGGKPQRRKNPQEGLYNELQKDKMAEAYSEIGMKGERRRGKGHDGLYQGLSTATKDTYDALHMQALPPR

SEQ ID NO: 6907 - protein, 506 aa, Artificial Sequence
  Synthetic Polypeptide
MALPVTALLLPLALLLHAARPQLQLQESGPGLVKPSETLSLTCTVSGGSISSGDYYWGWIRQPPGKGLEWIGHIYYSGATYYNPSLKSRVTISVDTSRNQFSLKLSSVTAADTAVYYCTRDDSSNWRSRGQGTLVTVSSTRLHCVGDTYPSNDRCCHECRPGNGMVSRCSRSQNTVCRPCGPGFYNDVVSSKPCKPCTWCNLRSGSERKQLCTATQDTVCRCRAGTQPLDSYKPGVDCAPCPPGHFSPGDNQACKPWTNCTLAGKHTLQPASNSSDAICEDRDPPATQPQETQGPPARPITVQPTEAWPRTSQGPSTRPVEVPGGRAVAAILGLGLVLGLLGPLAILLALYLLRRDQRLPPDAHKPPGGGSFRTPIQEEQADAHSTLAKISTSRVKFSRSADAPAYQQGQNQLYNELNLGRREEYDVLDKRRGRDPEMGGKPQRRKNPQEGLYNELQKDKMAEAYSEIGMKGERRRGKGHDGLYQGLSTATKDTYDALHMQALPPR

SEQ ID NO: 6908 - protein, 506 aa, Artificial Sequence
  Synthetic Polypeptide
MALPVTALLLPLALLLHAARPQLQLQESGPGLVKPSETLSLTCTVSGDSISSGDYYWGWIRQPPGKGLEWIGHIYYSGVTYYNPSLKSRVTISVDTSRNQFSLKLSSVTAADTAVYYCTREDSSNWRSRGQGTLVTVSSTRLHCVGDTYPSNDRCCHECRPGNGMVSRCSRSQNTVCRPCGPGFYNDVVSSKPCKPCTWCNLRSGSERKQLCTATQDTVCRCRAGTQPLDSYKPGVDCAPCPPGHFSPGDNQACKPWTNCTLAGKHTLQPASNSSDAICEDRDPPATQPQETQGPPARPITVQPTEAWPRTSQGPSTRPVEVPGGRAVAAILGLGLVLGLLGPLAILLALYLLRRDQRLPPDAHKPPGGGSFRTPIQEEQADAHSTLAKISTSRVKFSRSADAPAYQQGQNQLYNELNLGRREEYDVLDKRRGRDPEMGGKPQRRKNPQEGLYNELQKDKMAEAYSEIGMKGERRRGKGHDGLYQGLSTATKDTYDALHMQALPPR

SEQ ID NO: 6909 - protein, 508 aa, Artificial Sequence
  Synthetic Polypeptide
MALPVTALLLPLALLLHAARPEVQLQESGGGLVQPGGSLRLSCAASGRTFSSLFMGWFRQAPGKERELVAAISRYSLYTYYADSVKGRFTISADNAKNAVYLQMNSLKPEDTAVYYCASKLEYTSNDYDSWGQGTQVTVSSTRLHCVGDTYPSNDRCCHECRPGNGMVSRCSRSQNTVCRPCGPGFYNDVVSSKPCKPCTWCNLRSGSERKQLCTATQDTVCRCRAGTQPLDSYKPGVDCAPCPPGHFSPGDNQACKPWTNCTLAGKHTLQPASNSSDAICEDRDPPATQPQETQGPPARPITVQPTEAWPRTSQGPSTRPVEVPGGRAVAAILGLGLVLGLLGPLAILLALYLLRRDQRLPPDAHKPPGGGSFRTPIQEEQADAHSTLAKISTSRVKFSRSADAPAYQQGQNQLYNELNLGRREEYDVLDKRRGRDPEMGGKPQRRKNPQEGLYNELQKDKMAEAYSEIGMKGERRRGKGHDGLYQGLSTATKDTYDALHMQALPPR

SEQ ID NO: 6910 - protein, 516 aa, Artificial Sequence
  Synthetic Polypeptide
MALPVTALLLPLALLLHAARPEVQLVESGGGLVQPGGSLRLSCAASGFASDYYIIGWFRQAPGKEREGVSCISSRYANTNYADSVKGRFTISRDNAKNTVYLQMNSLKPEDTAVYYCAADTRRYTCPDIATMHRNFDSWGQGTLVTVSSTRLHCVGDTYPSNDRCCHECRPGNGMVSRCSRSQNTVCRPCGPGFYNDVVSSKPCKPCTWCNLRSGSERKQLCTATQDTVCRCRAGTQPLDSYKPGVDCAPCPPGHFSPGDNQACKPWTNCTLAGKHTLQPASNSSDAICEDRDPPATQPQETQGPPARPITVQPTEAWPRTSQGPSTRPVEVPGGRAVAAILGLGLVLGLLGPLAILLALYLLRRDQRLPPDAHKPPGGGSFRTPIQEEQADAHSTLAKISTSRVKFSRSADAPAYQQGQNQLYNELNLGRREEYDVLDKRRGRDPEMGGKPQRRKNPQEGLYNELQKDKMAEAYSEIGMKGERRRGKGHDGLYQGLSTATKDTYDALHMQALPPR

SEQ ID NO: 6911 - protein, 512 aa, Artificial Sequence
  Synthetic Polypeptide
MALPVTALLLPLALLLHAARPEVQLVESGGSLVQPGGSLRLSCAASGFTFDDYAMSWVRQVPGKGLEWVSSINWSGTHTDYADSVKGRFTISRNNANNTLYLQMNSLKSEDTAVYYCAKNWRDAGTTWFEKSGSAGQGTQVTVSSTRLHCVGDTYPSNDRCCHECRPGNGMVSRCSRSQNTVCRPCGPGFYNDVVSSKPCKPCTWCNLRSGSERKQLCTATQDTVCRCRAGTQPLDSYKPGVDCAPCPPGHFSPGDNQACKPWTNCTLAGKHTLQPASNSSDAICEDRDPPATQPQETQGPPARPITVQPTEAWPRTSQGPSTRPVEVPGGRAVAAILGLGLVLGLLGPLAILLALYLLRRDQRLPPDAHKPPGGGSFRTPIQEEQADAHSTLAKISTSRVKFSRSADAPAYQQGQNQLYNELNLGRREEYDVLDKRRGRDPEMGGKPQRRKNPQEGLYNELQKDKMAEAYSEIGMKGERRRGKGHDGLYQGLSTATKDTYDALHMQALPPR

SEQ ID NO: 6912 - protein, 507 aa, Artificial Sequence
  Synthetic Polypeptide
MALPVTALLLPLALLLHAARPEVQLVESGGGLVQPGGSLRLSCAASGFNIKDTCIGWVRRAPGKEEELVAKICKYSGHTRYADSVKGRFTISADTSKNTAYLQMNSLRAEDTAVYYCAAVSVRDGHYNYWGQGTTVTVSSTRLHCVGDTYPSNDRCCHECRPGNGMVSRCSRSQNTVCRPCGPGFYNDVVSSKPCKPCTWCNLRSGSERKQLCTATQDTVCRCRAGTQPLDSYKPGVDCAPCPPGHFSPGDNQACKPWTNCTLAGKHTLQPASNSSDAICEDRDPPATQPQETQGPPARPITVQPTEAWPRTSQGPSTRPVEVPGGRAVAAILGLGLVLGLLGPLAILLALYLLRRDQRLPPDAHKPPGGGSFRTPIQEEQADAHSTLAKISTSRVKFSRSADAPAYQQGQNQLYNELNLGRREEYDVLDKRRGRDPEMGGKPQRRKNPQEGLYNELQKDKMAEAYSEIGMKGERRRGKGHDGLYQGLSTATKDTYDALHMQALPPR

SEQ ID NO: 6913 - protein, 512 aa, Artificial Sequence
  Synthetic Polypeptide
MALPVTALLLPLALLLHAARPGSDLGIKLLFAAAKGQDDEVRILLAAGADVNAKDFEGYTPLHVAAYDGHLEIVEVLLKAGADVNAKDSQGRTPLHEAAYSGHLEIVEVLLKAGADVNAQDDAGETPADLAAAWGHEDIAEVLQKTRLHCVGDTYPSNDRCCHECRPGNGMVSRCSRSQNTVCRPCGPGFYNDVVSSKPCKPCTWCNLRSGSERKQLCTATQDTVCRCRAGTQPLDSYKPGVDCAPCPPGHFSPGDNQACKPWTNCTLAGKHTLQPASNSSDAICEDRDPPATQPQETQGPPARPITVQPTEAWPRTSQGPSTRPVEVPGGRAVAAILGLGLVLGLLGPLAILLALYLLRRDQRLPPDAHKPPGGGSFRTPIQEEQADAHSTLAKISTSRVKFSRSADAPAYQQGQNQLYNELNLGRREEYDVLDKRRGRDPEMGGKPQRRKNPQEGLYNELQKDKMAEAYSEIGMKGERRRGKGHDGLYQGLSTATKDTYDALHMQALPPR

SEQ ID NO: 6914 - protein, 446 aa, Artificial Sequence
  Synthetic Polypeptide
MALPVTALLLPLALLLHAARPVDNKFNKERYSAYYEIWQLPNLNVRQKAAFIGSLQDDPSQSANLLAEAKKLNDAQAPKTRLHCVGDTYPSNDRCCHECRPGNGMVSRCSRSQNTVCRPCGPGFYNDVVSSKPCKPCTWCNLRSGSERKQLCTATQDTVCRCRAGTQPLDSYKPGVDCAPCPPGHFSPGDNQACKPWTNCTLAGKHTLQPASNSSDAICEDRDPPATQPQETQGPPARPITVQPTEAWPRTSQGPSTRPVEVPGGRAVAAILGLGLVLGLLGPLAILLALYLLRRDQRLPPDAHKPPGGGSFRTPIQEEQADAHSTLAKISTSRVKFSRSADAPAYQQGQNQLYNELNLGRREEYDVLDKRRGRDPEMGGKPQRRKNPQEGLYNELQKDKMAEAYSEIGMKGERRRGKGHDGLYQGLSTATKDTYDALHMQALPPR

SEQ ID NO: 6915 - protein, 477 aa, Artificial Sequence
  Synthetic Polypeptide
MALPVTALLLPLALLLHAARPLPAPKNLVVSRVTEDSARLSWTAPDAAFDSFAIGYWEWDDDGEAIVLTVPGSERSYDLTGLKPGTEYPVYIAGVKGGQWSFPLSAIFTTTRLHCVGDTYPSNDRCCHECRPGNGMVSRCSRSQNTVCRPCGPGFYNDVVSSKPCKPCTWCNLRSGSERKQLCTATQDTVCRCRAGTQPLDSYKPGVDCAPCPPGHFSPGDNQACKPWTNCTLAGKHTLQPASNSSDAICEDRDPPATQPQETQGPPARPITVQPTEAWPRTSQGPSTRPVEVPGGRAVAAILGLGLVLGLLGPLAILLALYLLRRDQRLPPDAHKPPGGGSFRTPIQEEQADAHSTLAKISTSRVKFSRSADAPAYQQGQNQLYNELNLGRREEYDVLDKRRGRDPEMGGKPQRRKNPQEGLYNELQKDKMAEAYSEIGMKGERRRGKGHDGLYQGLSTATKDTYDALHMQALPPR

SEQ ID NO: 6916 - protein, 478 aa, Artificial Sequence
  Synthetic Polypeptide
MALPVTALLLPLALLLHAARPMLPAPKNLVVSRITEDSARLSWTAPDAAFDSFPIRYIETLIWGEAIWLDVPGSERSYDLTGLKPGTEYAVVITGVKGGRFSSPLVASFTTTRLHCVGDTYPSNDRCCHECRPGNGMVSRCSRSQNTVCRPCGPGFYNDVVSSKPCKPCTWCNLRSGSERKQLCTATQDTVCRCRAGTQPLDSYKPGVDCAPCPPGHFSPGDNQACKPWTNCTLAGKHTLQPASNSSDAICEDRDPPATQPQETQGPPARPITVQPTEAWPRTSQGPSTRPVEVPGGRAVAAILGLGLVLGLLGPLAILLALYLLRRDQRLPPDAHKPPGGGSFRTPIQEEQADAHSTLAKISTSRVKFSRSADAPAYQQGQNQLYNELNLGRREEYDVLDKRRGRDPEMGGKPQRRKNPQEGLYNELQKDKMAEAYSEIGMKGERRRGKGHDGLYQGLSTATKDTYDALHMQALPPR

SEQ ID NO: 6917 - protein, 695 aa, Artificial Sequence
  Synthetic Polypeptide
MALPVTALLLPLALLLHAARPMALPVTALLLPLALLLHAARPLFNQEVQIPLTESYCGPCPKNWICYKNNCYQFFDESKNWYESQASCMSQNASLLKVYSKEDQDLLKLVKSYHWMGLVHIPTNGSWQWEDGSILSPNLLTIIEMQKGDCALYASSFKGYIENCSTPNTYICMQRTVGGGGSGGGGSGGGGSDLFNQEVQIPLTESYCGPCPKNWICYKNNCYQFFDESKNWYESQASCMSQNASLLKVYSKEDQDLLKLVKSYHWMGLVHIPTNGSWQWEDGSILSPNLLTIIEMQKGDCALYASSFKGYIENCSTPNTYICMQRTVTRLHCVGDTYPSNDRCCHECRPGNGMVSRCSRSQNTVCRPCGPGFYNDVVSSKPCKPCTWCNLRSGSERKQLCTATQDTVCRCRAGTQPLDSYKPGVDCAPCPPGHFSPGDNQACKPWTNCTLAGKHTLQPASNSSDAICEDRDPPATQPQETQGPPARPITVQPTEAWPRTSQGPSTRPVEVPGGRAVAAILGLGLVLGLLGPLAILLALYLLRRDQRLPPDAHKPPGGGSFRTPIQEEQADAHSTLAKISTSRVKFSRSADAPAYQQGQNQLYNELNLGRREEYDVLDKRRGRDPEMGGKPQRRKNPQEGLYNELQKDKMAEAYSEIGMKGERRRGKGHDGLYQGLSTATKDTYDALHMQALPPR

SEQ ID NO: 6918 - protein, 575 aa, Artificial Sequence
  Synthetic Polypeptide
MALPVTALLLPLALLLHAARPMELTDLLLAAMLLAVARLTLSSPVAPACDPRLLNKLLRDSHLLHSRLSQCPDVDPLSIPVLLPAVDFSLGEWKTQTEQSKAQDILGAVSLLLEGVMAARGQLEPSCLSSLLGQLSGQVRLLLGALQGLLGTQLPLQGRTTAHKDPNALFLSLQQLLRGKVRFLLLVEGPTLCVRRTLPTTAVPSSTSTRLHCVGDTYPSNDRCCHECRPGNGMVSRCSRSQNTVCRPCGPGFYNDVVSSKPCKPCTWCNLRSGSERKQLCTATQDTVCRCRAGTQPLDSYKPGVDCAPCPPGHFSPGDNQACKPWTNCTLAGKHTLQPASNSSDAICEDRDPPATQPQETQGPPARPITVQPTEAWPRTSQGPSTRPVEVPGGRAVAAILGLGLVLGLLGPLAILLALYLLRRDQRLPPDAHKPPGGGSFRTPIQEEQADAHSTLAKISTSRVKFSRSADAPAYQQGQNQLYNELNLGRREEYDVLDKRRGRDPEMGGKPQRRKNPQEGLYNELQKDKMAEAYSEIGMKGERRRGKGHDGLYQGLSTATKDTYDALHMQALPPR

SEQ ID NO: 6919 - protein, 441 aa, Artificial Sequence
  Synthetic Polypeptide
MALPVTALLLPLALLLHAARPMDPDLEIRAAFLRQRNTALRTEVAELEQEVQRLENEVSQYETRYGPLGGGKTRTRLHCVGDTYPSNDRCCHECRPGNGMVSRCSRSQNTVCRPCGPGFYNDVVSSKPCKPCTWCNLRSGSERKQLCTATQDTVCRCRAGTQPLDSYKPGVDCAPCPPGHFSPGDNQACKPWTNCTLAGKHTLQPASNSSDAICEDRDPPATQPQETQGPPARPITVQPTEAWPRTSQGPSTRPVEVPGGRAVAAILGLGLVLGLLGPLAILLALYLLRRDQRLPPDAHKPPGGGSFRTPIQEEQADAHSTLAKISTSRVKFSRSADAPAYQQGQNQLYNELNLGRREEYDVLDKRRGRDPEMGGKPQRRKNPQEGLYNELQKDKMAEAYSEIGMKGERRRGKGHDGLYQGLSTATKDTYDALHMQALPPR

SEQ ID NO: 6920 - protein, 416 aa, Artificial Sequence
  Synthetic Polypeptide
MALPVTALLLPLALLLHAARPEVAALEKEVAALEKEVAALEKEVAALEKTRLHCVGDTYPSNDRCCHECRPGNGMVSRCSRSQNTVCRPCGPGFYNDVVSSKPCKPCTWCNLRSGSERKQLCTATQDTVCRCRAGTQPLDSYKPGVDCAPCPPGHFSPGDNQACKPWTNCTLAGKHTLQPASNSSDAICEDRDPPATQPQETQGPPARPITVQPTEAWPRTSQGPSTRPVEVPGGRAVAAILGLGLVLGLLGPLAILLALYLLRRDQRLPPDAHKPPGGGSFRTPIQEEQADAHSTLAKISTSRVKFSRSADAPAYQQGQNQLYNELNLGRREEYDVLDKRRGRDPEMGGKPQRRKNPQEGLYNELQKDKMAEAYSEIGMKGERRRGKGHDGLYQGLSTATKDTYDALHMQALPPR

SEQ ID NO: 6921 - protein, 674 aa, Artificial Sequence
  Synthetic Polypeptide
MALPVTALLLPLALLLHAARPLFNQEVQIPLTESYCGPCPKNWICYKNNCYQFFDESKNWYESQASCMSQNASLLKVYSKEDQDLLKLVKSAHWMGLVHIPTNGSWQWEDGSILSPNLLTIIEMQKGDCALYASSFKGFIENCSTPNTYICMQRTVGGGGSGGGGSGGGGSDLFNQEVQIPLTESYCGPCPKNWICYKNNCYQFFDESKNWYESQASCMSQNASLLKVYSKEDQDLLKLVKSAHWMGLVHIPTNGSWQWEDGSILSPNLLTIIEMQKGDCALYASSFKGFIENCSTPNTYICMQRTVTRLHCVGDTYPSNDRCCHECRPGNGMVSRCSRSQNTVCRPCGPGFYNDVVSSKPCKPCTWCNLRSGSERKQLCTATQDTVCRCRAGTQPLDSYKPGVDCAPCPPGHFSPGDNQACKPWTNCTLAGKHTLQPASNSSDAICEDRDPPATQPQETQGPPARPITVQPTEAWPRTSQGPSTRPVEVPGGRAVAAILGLGLVLGLLGPLAILLALYLLRRDQRLPPDAHKPPGGGSFRTPIQEEQADAHSTLAKISTSRVKFSRSADAPAYQQGQNQLYNELNLGRREEYDVLDKRRGRDPEMGGKPQRRKNPQEGLYNELQKDKMAEAYSEIGMKGERRRGKGHDGLYQGLSTATKDTYDALHMQALPPR

SEQ ID NO: 6922 - protein, 674 aa, Artificial Sequence
  Synthetic Polypeptide
MALPVTALLLPLALLLHAARPLFNQEVQIPLTESYCGPCPKNWICYKNNCYQFFDESKNWYESQASCMSQNASLLKVYSKEDQDLLKLVKSAHWMGLVHIPTNGSWQWEDGSILSPNLLTIIEMQKGDCALYASSFKGYIENCSTPNTYICMQRTVSGGGGSGGGGSGGGGDLFNQEVQIPLTESYCGPCPKNWICYKNNCYQFFDESKNWYESQASCMSQNASLLKVYSKEDQDLLKLVKSAHWMGLVHIPTNGSWQWEDGSILSPNLLTIIEMQKGDCALYASSFKGYIENCSTPNTYICMQRTVTRLHCVGDTYPSNDRCCHECRPGNGMVSRCSRSQNTVCRPCGPGFYNDVVSSKPCKPCTWCNLRSGSERKQLCTATQDTVCRCRAGTQPLDSYKPGVDCAPCPPGHFSPGDNQACKPWTNCTLAGKHTLQPASNSSDAICEDRDPPATQPQETQGPPARPITVQPTEAWPRTSQGPSTRPVEVPGGRAVAAILGLGLVLGLLGPLAILLALYLLRRDQRLPPDAHKPPGGGSFRTPIQEEQADAHSTLAKISTSRVKFSRSADAPAYQQGQNQLYNELNLGRREEYDVLDKRRGRDPEMGGKPQRRKNPQEGLYNELQKDKMAEAYSEIGMKGERRRGKGHDGLYQGLSTATKDTYDALHMQALPPR

SEQ ID NO: 6923 - protein, 1185 aa, Artificial Sequence
  Synthetic Polypeptide
MALPVTALLLPLALLLHAARPDIQMTQSPSSLSASVGDRVTITCKASDHINNWLAWYQQKPGQAPKLLIYGATTLETGVPSRFSGSGSGTDYTLTISSLQPEDFATYYCQQSWNTPWTFGQGTKLEIKRLETTPGERSSLPAFYPGTSGSCSGCGSLSLPLLAGLVAADAVASLLIVGAVFLCARPRRSPAQEDGKVYINMPGRGSTSRVKFSRSADAPAYQQGQNQLYNELNLGRREEYDVLDKRRGRDPEMGGKPQRRKNPQEGLYNELQKDKMAEAYSEIGMKGERRRGKGHDGLYQGLSTATKDTYDALHMQALPPRRAKRSGSGATNFSLLKQAGDVEENPGPMDWIWRILFLVGAATGAHSFEQVQLQQPGAELVKPGASVKMSCKASGYAFSSYWINWMKQKPGQGLEWIGQIYPGDGDTNYNGKFKGRATLTADTSSSTAYMQLSSLTSEDSAVYFCARSITTVVGCAMDYWGQGTSVTVSSTRKGCQGSADHVVSISGVPLQLQPNSIQTKVDSIAWKKLLPSQNGFHHILKWENGSLPSNTSNDRFSFIVKNLSLLIKAAQQQDSGLYCLEVTSISGKVQTATFQVFVFDKVEKPRLQGQGKILDRGRCQVALSCLVSRDGNVSYAWYRGSKLIQTAGNLTYLDEEVDINGTHTYTCNVSNPVSWESHTLNLTQDCQNAHQEFRFWPFLVIIVILSALFLGTLACFCVWRRKRKEKQSETSPKEFLTIYEDVKDLKTRRNHEQEQTFPGGGSTIYSMIQSQSSAPTSQEPAYTLYSLIQPSRKSGSRKRNHSPSFNSTIYEVIGKSQPKAQNPARLSRKELENFDVYSSSRRVKFSRSADAPAYQQGQNQLYNELNLGRREEYDVLDKRRGRDPEMGGKPQRRKNPQEGLYNELQKDKMAEAYSEIGMKGERRRGKGHDGLYQGLSTATKDTYDALHMQALPPRRAKRSGSGVKQTLNFDLLKLAGDVESNPGPGHMTEYKPTVRLATRDDVPRAVRTLAAAFADYPATRHTVDPDRHIERVTELQELFLTRVGLDIGKVWVADDGAAVAVWTTPESVEAGAVFAEIGPRMAELSGSRLAAQQQMEGLLAPHRPKEPAWFLATVGVSPDHQGKGLGSAVVLPGVEAAERAGVPAFLETSAPRNLPFYERLGFTVTADVEVPEGPRTWCMTRKPGA

SEQ ID NO: 6924 - protein, 1237 aa, Artificial Sequence
  Synthetic Polypeptide
MALPVTALLLPLALLLHAARPACEVQLLESGGGLIQPGGSLRLSCAASGFTFSSHAMTWVRQAPGKGLEWVSAISGSGDYTHYADSVKGRFTISRDNSKNTVYLQMNSLRAEDSAVYYCAKDEDGGSLLGHRGQGTLVTVSSGTGGGGSGGGGSGGGGSEFGSLETTPGERSSLPAFYPGTSGSCSGCGSLSLPLLAGLVAADAVASLLIVGAVFLCARPRRSPAQEDGKVYINMPGRGSTSRVKFSRSADAPAYQQGQNQLYNELNLGRREEYDVLDKRRGRDPEMGGKPQRRKNPQEGLYNELQKDKMAEAYSEIGMKGERRRGKGHDGLYQGLSTATKDTYDALHMQALPPRRAKRSGSGATNFSLLKQAGDVEENPGPMDWIWRILFLVGAATGAHSGPEVQLVESGGGLVQAGGSLRLSCAASGRTFSMGWFRQAPGKEREFVAAITYSGGSPYYADSVKGRFTISRDNAKNTVYLQMNSLKPEDTAVYYCAANPTYGSDWNAENWGQGTQVTVSSGSGGGGSGGGGSGGGGSFEGSTRKGCQGSADHVVSISGVPLQLQPNSIQTKVDSIAWKKLLPSQNGFHHILKWENGSLPSNTSNDRFSFIVKNLSLLIKAAQQQDSGLYCLEVTSISGKVQTATFQVFVFDKVEKPRLQGQGKILDRGRCQVALSCLVSRDGNVSYAWYRGSKLIQTAGNLTYLDEEVDINGTHTYTCNVSNPVSWESHTLNLTQDCQNAHQEFRFWPFLVIIVILSALFLGTLACFCVWRRKRKEKQSETSPKEFLTIYEDVKDLKTRRNHEQEQTFPGGGSTIYSMIQSQSSAPTSQEPAYTLYSLIQPSRKSGSRKRNHSPSFNSTIYEVIGKSQPKAQNPARLSRKELENFDVYSSSRRVKFSRSADAPAYQQGQNQLYNELNLGRREEYDVLDKRRGRDPEMGGKPQRRKNPQEGLYNELQKDKMAEAYSEIGMKGERRRGKGHDGLYQGLSTATKDTYDALHMQALPPRRAKRSGSGVKQTLNFDLLKLAGDVESNPGPGHMTEYKPTVRLATRDDVPRAVRTLAAAFADYPATRHTVDPDRHIERVTELQELFLTRVGLDIGKVWVADDGAAVAVWTTPESVEAGAVFAEIGPRMAELSGSRLAAQQQMEGLLAPHRPKEPAWFLATVGVSPDHQGKGLGSAVVLPGVEAAERAGVPAFLETSAPRNLPFYERLGFTVTADVEVPEGPRTWCMTRKPGA

SEQ ID NO: 6925 - protein, 1387 aa, Artificial Sequence
  Synthetic Polypeptide
MALPVTALLLPLALLLHAARPDIQMTQSPSSLSASVGDRVTITCKASDHINNWLAWYQQKPGQAPKLLIYGATTLETGVPSRFSGSGSGTDYTLTISSLQPEDFATYYCQQSWNTPWTFGQGTKLEIKRLEGQPKANPTVTLFPPSSEELQANKATLVCLISDFYPGAVTVAWKADGSPVKAGVETTKPSKQSNNKYAASSYLSLTPEQWKSHRSYSCQVTHEGSTVEKTVAPTECSGSTTPGERSSLPAFYPGTSGSCSGCGSLSLPLLAGLVAADAVASLLIVGAVFLCARPRRSPAQEDGKVYINMPGRGSTSRVKFSRSADAPAYQQGQNQLYNELNLGRREEYDVLDKRRGRDPEMGGKPQRRKNPQEGLYNELQKDKMAEAYSEIGMKGERRRGKGHDGLYQGLSTATKDTYDALHMQALPPRRAKRSGSGATNFSLLKQAGDVEENPGPMDWIWRILFLVGAATGAHSFEQVQLQQPGAELVKPGASVKMSCKASGYAFSSYWINWMKQKPGQGLEWIGQIYPGDGDTNYNGKFKGRATLTADTSSSTAYMQLSSLTSEDSAVYFCARSITTVVGCAMDYWGQGTSVTVSSTRASTKGPSVFPLAPSSKSTSGGTAALGCLVKDYFPEPVTVSWNSGALTSGVHTFPAVLQSSGLYSLSSVVTVPSSSLGTQTYICNVNHKPSNTKVDKRVEPKSCGTKGCQGSADHVVSISGVPLQLQPNSIQTKVDSIAWKKLLPSQNGFHHILKWENGSLPSNTSNDRFSFIVKNLSLLIKAAQQQDSGLYCLEVTSISGKVQTATFQVFVFDKVEKPRLQGQGKILDRGRCQVALSCLVSRDGNVSYAWYRGSKLIQTAGNLTYLDEEVDINGTHTYTCNVSNPVSWESHTLNLTQDCQNAHQEFRFWPFLVIIVILSALFLGTLACFCVWRRKRKEKQSETSPKEFLTIYEDVKDLKTRRNHEQEQTFPGGGSTIYSMIQSQSSAPTSQEPAYTLYSLIQPSRKSGSRKRNHSPSFNSTIYEVIGKSQPKAQNPARLSRKELENFDVYSSSRRVKFSRSADAPAYQQGQNQLYNELNLGRREEYDVLDKRRGRDPEMGGKPQRRKNPQEGLYNELQKDKMAEAYSEIGMKGERRRGKGHDGLYQGLSTATKDTYDALHMQALPPRRAKRSGSGVKQTLNFDLLKLAGDVESNPGPGHMATYEVLCEVARKLGTDDREVVLFLLNVFIPQPTLAQLIGALRALKEEGRLTFPLLAECLFRAGRRDLLRDLLHLDPRFLERHLAGTMSYFSPYQLTVLHVDGELCARDIRSLIFLSKDTIGSRSTPQTFLHWVYCMENLDLLGPTDVDALMSMLRSLSRVDLQRQVQTLMGLHLSGPSHSQHYRHTP

SEQ ID NO: 6926 - protein, 1440 aa, Artificial Sequence
  Synthetic Polypeptide
MALPVTALLLPLALLLHAARPDIQMTQSPSSLSASVGDRVTITCKASDHINNWLAWYQQKPGQAPKLLIYGATTLETGVPSRFSGSGSGTDYTLTISSLQPEDFATYYCQQSWNTPWTFGQGTKLEIKRLEGQPKANPTVTLFPPSSEELQANKATLVCLISDFYPGAVTVAWKADGSPVKAGVETTKPSKQSNNKYAASSYLSLTPEQWKSHRSYSCQVTHEGSTVEKTVAPTECSGSTTPGERSSLPAFYPGTSGSCSGCGSLSLPLLAGLVAADAVASLLIVGAVFLCARPRRSPAQEDGKVYINMPGRGSTSRVKFSRSADAPAYQQGQNQLYNELNLGRREEYDVLDKRRGRDPEMGGKPQRRKNPQEGLYNELQKDKMAEAYSEIGMKGERRRGKGHDGLYQGLSTATKDTYDALHMQALPPRRAKRSGSGATNFSLLKQAGDVEENPGPMDWIWRILFLVGAATGAHSFEQVQLQQPGAELVKPGASVKMSCKASGYAFSSYWINWMKQKPGQGLEWIGQIYPGDGDTNYNGKFKGRATLTADTSSSTAYMQLSSLTSEDSAVYFCARSITTVVGCAMDYWGQGTSVTVSSTRASTKGPSVFPLAPSSKSTSGGTAALGCLVKDYFPEPVTVSWNSGALTSGVHTFPAVLQSSGLYSLSSVVTVPSSSLGTQTYICNVNHKPSNTKVDKRVEPKSCGTKGCQGSADHVVSISGVPLQLQPNSIQTKVDSIAWKKLLPSQNGFHHILKWENGSLPSNTSNDRFSFIVKNLSLLIKAAQQQDSGLYCLEVTSISGKVQTATFQVFVFDKVEKPRLQGQGKILDRGRCQVALSCLVSRDGNVSYAWYRGSKLIQTAGNLTYLDEEVDINGTHTYTCNVSNPVSWESHTLNLTQDCQNAHQEFRFWPFLVIIVILSALFLGTLACFCVWRRKRKEKQSETSPKEFLTIYEDVKDLKTRRNHEQEQTFPGGGSTIYSMIQSQSSAPTSQEPAYTLYSLIQPSRKSGSRKRNHSPSFNSTIYEVIGKSQPKAQNPARLSRKELENFDVYSSSRRVKFSRSADAPAYQQGQNQLYNELNLGRREEYDVLDKRRGRDPEMGGKPQRRKNPQEGLYNELQKDKMAEAYSEIGMKGERRRGKGHDGLYQGLSTATKDTYDALHMQALPPRRAKRSGSGVKQTLNFDLLKLAGDVESNPGPGHMSDSKEVPSLPFLRHLLEELDSHEDSLLLFLCHDAAPGCTTVTQALCSLSQQRKLTLAALVEMLYVLQRMDLLKSRFGLSKEGAEQLLGTSFLTRYRKLMVCVGEELDSSELRALRLFACNLNPSLSTALSESSRFVELVLALENVGLVSPSSVSVLADMLRTLRRLDLCQQLVEYEQQEQARYRYCYAASPSLPVRTLRRGHGASEHEQLCMPVQESSDSPELLRTPVQESSSDSPEQTT

SEQ ID NO: 6927 - protein, 1398 aa, Artificial Sequence
  Synthetic Polypeptide
MALPVTALLLPLALLLHAARPDIQMTQSPSSLSASVGDRVTITCKASDHINNWLAWYQQKPGQAPKLLIYGATTLETGVPSRFSGSGSGTDYTLTISSLQPEDFATYYCQQSWNTPWTFGQGTKLEIKRLEGQPKANPTVTLFPPSSEELQANKATLVCLISDFYPGAVTVAWKADGSPVKAGVETTKPSKQSNNKYAASSYLSLTPEQWKSHRSYSCQVTHEGSTVEKTVAPTECSGSTTPGERSSLPAFYPGTSGSCSGCGSLSLPLLAGLVAADAVASLLIVGAVFLCARPRRSPAQEDGKVYINMPGRGSTSRVKFSRSADAPAYQQGQNQLYNELNLGRREEYDVLDKRRGRDPEMGGKPQRRKNPQEGLYNELQKDKMAEAYSEIGMKGERRRGKGHDGLYQGLSTATKDTYDALHMQALPPRRAKRSGSGATNFSLLKQAGDVEENPGPMDWIWRILFLVGAATGAHSFEQVQLQQPGAELVKPGASVKMSCKASGYAFSSYWINWMKQKPGQGLEWIGQIYPGDGDTNYNGKFKGRATLTADTSSSTAYMQLSSLTSEDSAVYFCARSITTVVGCAMDYWGQGTSVTVSSTRASTKGPSVFPLAPSSKSTSGGTAALGCLVKDYFPEPVTVSWNSGALTSGVHTFPAVLQSSGLYSLSSVVTVPSSSLGTQTYICNVNHKPSNTKVDKRVEPKSCGTKGCQGSADHVVSISGVPLQLQPNSIQTKVDSIAWKKLLPSQNGFHHILKWENGSLPSNTSNDRFSFIVKNLSLLIKAAQQQDSGLYCLEVTSISGKVQTATFQVFVFDKVEKPRLQGQGKILDRGRCQVALSCLVSRDGNVSYAWYRGSKLIQTAGNLTYLDEEVDINGTHTYTCNVSNPVSWESHTLNLTQDCQNAHQEFRFWPFLVIIVILSALFLGTLACFCVWRRKRKEKQSETSPKEFLTIYEDVKDLKTRRNHEQEQTFPGGGSTIYSMIQSQSSAPTSQEPAYTLYSLIQPSRKSGSRKRNHSPSFNSTIYEVIGKSQPKAQNPARLSRKELENFDVYSSSRRVKFSRSADAPAYQQGQNQLYNELNLGRREEYDVLDKRRGRDPEMGGKPQRRKNPQEGLYNELQKDKMAEAYSEIGMKGERRRGKGHDGLYQGLSTATKDTYDALHMQALPPRRAKRSGSGVKQTLNFDLLKLAGDVESNPGPGHMTEYKPTVRLATRDDVPRAVRTLAAAFADYPATRHTVDPDRHIERVTELQELFLTRVGLDIGKVWVADDGAAVAVWTTPESVEAGAVFAEIGPRMAELSGSRLAAQQQMEGLLAPHRPKEPAWFLATVGVSPDHQGKGLGSAVVLPGVEAAERAGVPAFLETSAPRNLPFYERLGFTVTADVEVPEGPRTWCMTRKPGA

SEQ ID NO: 6928 - protein, 1535 aa, Artificial Sequence
  Synthetic Polypeptide
MALPVTALLLPLALLLHAARPEVQLVESGGGLVQAGGSLRLSCAASGRTFSMGWFRQAPGKEREFVAAITYSGGSPYYADSVKGRFTISRDNAKNTVYLQMNSLKPEDTAVYYCAANPTYGSDWNAENWGQGTQVTVSSGTGGGGSGGGGSGGGGSEFDIQMTQSPSSLSASVGDRVTITCKASDHINNWLAWYQQKPGQAPKLLIYGATTLETGVPSRFSGSGSGTDYTLTISSLQPEDFATYYCQQSWNTPWTFGQGTKLEIKRLEGQPKANPTVTLFPPSSEELQANKATLVCLISDFYPGAVTVAWKADGSPVKAGVETTKPSKQSNNKYAASSYLSLTPEQWKSHRSYSCQVTHEGSTVEKTVAPTECSGSTTPGERSSLPAFYPGTSGSCSGCGSLSLPLLAGLVAADAVASLLIVGAVFLCARPRRSPAQEDGKVYINMPGRGSTSRVKFSRSADAPAYQQGQNQLYNELNLGRREEYDVLDKRRGRDPEMGGKPQRRKNPQEGLYNELQKDKMAEAYSEIGMKGERRRGKGHDGLYQGLSTATKDTYDALHMQALPPRRAKRSGSGATNFSLLKQAGDVEENPGPMDWIWRILFLVGAATGAHSFEQVQLQQPGAELVKPGASVKMSCKASGYAFSSYWINWMKQKPGQGLEWIGQIYPGDGDTNYNGKFKGRATLTADTSSSTAYMQLSSLTSEDSAVYFCARSITTVVGCAMDYWGQGTSVTVSSTRASTKGPSVFPLAPSSKSTSGGTAALGCLVKDYFPEPVTVSWNSGALTSGVHTFPAVLQSSGLYSLSSVVTVPSSSLGTQTYICNVNHKPSNTKVDKRVEPKSCGTKGCQGSADHVVSISGVPLQLQPNSIQTKVDSIAWKKLLPSQNGFHHILKWENGSLPSNTSNDRFSFIVKNLSLLIKAAQQQDSGLYCLEVTSISGKVQTATFQVFVFDKVEKPRLQGQGKILDRGRCQVALSCLVSRDGNVSYAWYRGSKLIQTAGNLTYLDEEVDINGTHTYTCNVSNPVSWESHTLNLTQDCQNAHQEFRFWPFLVIIVILSALFLGTLACFCVWRRKRKEKQSETSPKEFLTIYEDVKDLKTRRNHEQEQTFPGGGSTIYSMIQSQSSAPTSQEPAYTLYSLIQPSRKSGSRKRNHSPSFNSTIYEVIGKSQPKAQNPARLSRKELENFDVYSSSRRVKFSRSADAPAYQQGQNQLYNELNLGRREEYDVLDKRRGRDPEMGGKPQRRKNPQEGLYNELQKDKMAEAYSEIGMKGERRRGKGHDGLYQGLSTATKDTYDALHMQALPPRRAKRSGSGVKQTLNFDLLKLAGDVESNPGPGHMTEYKPTVRLATRDDVPRAVRTLAAAFADYPATRHTVDPDRHIERVTELQELFLTRVGLDIGKVWVADDGAAVAVWTTPESVEAGAVFAEIGPRMAELSGSRLAAQQQMEGLLAPHRPKEPAWFLATVGVSPDHQGKGLGSAVVLPGVEAAERAGVPAFLETSAPRNLPFYERLGFTVTADVEVPEGPRTWCMTRKPGA

SEQ ID NO: 6929 - protein, 1672 aa, Artificial Sequence
  Synthetic Polypeptide
MALPVTALLLPLALLLHAARPEVQLVESGGGLVQAGGSLRLSCAASGRTFSMGWFRQAPGKEREFVAAITYSGGSPYYADSVKGRFTISRDNAKNTVYLQMNSLKPEDTAVYYCAANPTYGSDWNAENWGQGTQVTVSSGTGGGGSGGGGSGGGGSEFDIQMTQSPSSLSASVGDRVTITCKASDHINNWLAWYQQKPGQAPKLLIYGATTLETGVPSRFSGSGSGTDYTLTISSLQPEDFATYYCQQSWNTPWTFGQGTKLEIKRLEGQPKANPTVTLFPPSSEELQANKATLVCLISDFYPGAVTVAWKADGSPVKAGVETTKPSKQSNNKYAASSYLSLTPEQWKSHRSYSCQVTHEGSTVEKTVAPTECSGSTTPGERSSLPAFYPGTSGSCSGCGSLSLPLLAGLVAADAVASLLIVGAVFLCARPRRSPAQEDGKVYINMPGRGSTSRVKFSRSADAPAYQQGQNQLYNELNLGRREEYDVLDKRRGRDPEMGGKPQRRKNPQEGLYNELQKDKMAEAYSEIGMKGERRRGKGHDGLYQGLSTATKDTYDALHMQALPPRRAKRSGSGATNFSLLKQAGDVEENPGPMDWIWRILFLVGAATGAHSGPEVQLVESGGGLVQAGGSLRLSCAASGRTFTMGWFRQAPGKEREFVAAISLSPTLAYYADSVKGRFTISRDNAKNTVVLQMNSLKPEDTALYYCAADRKSVMSIRPDYWGQGTQVTVSSGSGGGGSGGGGSGGGGSFEQVQLQQPGAELVKPGASVKMSCKASGYAFSSYWINWMKQKPGQGLEWIGQIYPGDGDTNYNGKFKGRATLTADTSSSTAYMQLSSLTSEDSAVYFCARSITTVVGCAMDYWGQGTSVTVSSTRASTKGPSVFPLAPSSKSTSGGTAALGCLVKDYFPEPVTVSWNSGALTSGVHTFPAVLQSSGLYSLSSVVTVPSSSLGTQTYICNVNHKPSNTKVDKRVEPKSCGTKGCQGSADHVVSISGVPLQLQPNSIQTKVDSIAWKKLLPSQNGFHHILKWENGSLPSNTSNDRFSFIVKNLSLLIKAAQQQDSGLYCLEVTSISGKVQTATFQVFVFDKVEKPRLQGQGKILDRGRCQVALSCLVSRDGNVSYAWYRGSKLIQTAGNLTYLDEEVDINGTHTYTCNVSNPVSWESHTLNLTQDCQNAHQEFRFWPFLVIIVILSALFLGTLACFCVWRRKRKEKQSETSPKEFLTIYEDVKDLKTRRNHEQEQTFPGGGSTIYSMIQSQSSAPTSQEPAYTLYSLIQPSRKSGSRKRNHSPSFNSTIYEVIGKSQPKAQNPARLSRKELENFDVYSSSRRVKFSRSADAPAYQQGQNQLYNELNLGRREEYDVLDKRRGRDPEMGGKPQRRKNPQEGLYNELQKDKMAEAYSEIGMKGERRRGKGHDGLYQGLSTATKDTYDALHMQALPPRRAKRSGSGVKQTLNFDLLKLAGDVESNPGPGHMTEYKPTVRLATRDDVPRAVRTLAAAFADYPATRHTVDPDRHIERVTELQELFLTRVGLDIGKVWVADDGAAVAVWTTPESVEAGAVFAEIGPRMAELSGSRLAAQQQMEGLLAPHRPKEPAWFLATVGVSPDHQGKGLGSAVVLPGVEAAERAGVPAFLETSAPRNLPFYERLGFTVTADVEVPEGPRTWCMTRKPGA

SEQ ID NO: 6930 - protein, 1405 aa, Artificial Sequence
  Synthetic Polypeptide
MALPVTALLLPLALLLHAARPEVQLVESGGGLVQAGGSLRLSCAASGRTFSMGWFRQAPGKEREFVAAITYSGGSPYYADSVKGRFTISRDNAKNTVYLQMNSLKPEDTAVYYCAANPTYGSDWNAENWGQGTQVTVSSLEGQPKANPTVTLFPPSSEELQANKATLVCLISDFYPGAVTVAWKADGSPVKAGVETTKPSKQSNNKYAASSYLSLTPEQWKSHRSYSCQVTHEGSTVEKTVAPTECSGSTTPGERSSLPAFYPGTSGSCSGCGSLSLPLLAGLVAADAVASLLIVGAVFLCARPRRSPAQEDGKVYINMPGRGSTSRVKFSRSADAPAYQQGQNQLYNELNLGRREEYDVLDKRRGRDPEMGGKPQRRKNPQEGLYNELQKDKMAEAYSEIGMKGERRRGKGHDGLYQGLSTATKDTYDALHMQALPPRRAKRSGSGATNFSLLKQAGDVEENPGPMDWIWRILFLVGAATGAHSGPEVQLVESGGGLVQAGGSLRLSCAASGRTFTMGWFRQAPGKEREFVAAISLSPTLAYYADSVKGRFTISRDNAKNTVVLQMNSLKPEDTALYYCAADRKSVMSIRPDYWGQGTQVTVSSTRASTKGPSVFPLAPSSKSTSGGTAALGCLVKDYFPEPVTVSWNSGALTSGVHTFPAVLQSSGLYSLSSVVTVPSSSLGTQTYICNVNHKPSNTKVDKRVEPKSCGTKGCQGSADHVVSISGVPLQLQPNSIQTKVDSIAWKKLLPSQNGFHHILKWENGSLPSNTSNDRFSFIVKNLSLLIKAAQQQDSGLYCLEVTSISGKVQTATFQVFVFDKVEKPRLQGQGKILDRGRCQVALSCLVSRDGNVSYAWYRGSKLIQTAGNLTYLDEEVDINGTHTYTCNVSNPVSWESHTLNLTQDCQNAHQEFRFWPFLVIIVILSALFLGTLACFCVWRRKRKEKQSETSPKEFLTIYEDVKDLKTRRNHEQEQTFPGGGSTIYSMIQSQSSAPTSQEPAYTLYSLIQPSRKSGSRKRNHSPSFNSTIYEVIGKSQPKAQNPARLSRKELENFDVYSSSRRVKFSRSADAPAYQQGQNQLYNELNLGRREEYDVLDKRRGRDPEMGGKPQRRKNPQEGLYNELQKDKMAEAYSEIGMKGERRRGKGHDGLYQGLSTATKDTYDALHMQALPPRRAKRSGSGVKQTLNFDLLKLAGDVESNPGPGHMTEYKPTVRLATRDDVPRAVRTLAAAFADYPATRHTVDPDRHIERVTELQELFLTRVGLDIGKVWVADDGAAVAVWTTPESVEAGAVFAEIGPRMAELSGSRLAAQQQMEGLLAPHRPKEPAWFLATVGVSPDHQGKGLGSAVVLPGVEAAERAGVPAFLETSAPRNLPFYERLGFTVTADVEVPEGPRTWCMTRKPGA

SEQ ID NO: 6931 - protein, 1413 aa, Artificial Sequence
  Synthetic Polypeptide
MALPVTALLLPLALLLHAARPDIQMTQSPSSLSASVGDRVTITCKASDHINNWLAWYQQKPGQAPKLLIYGATTLETGVPSRFSGSGSGTDYTLTISSLQPEDFATYYCQQSWNTPWTFGQGTKLEIKRLEDLKNVFPPEVAVFEPSEAEISHTQKATLVCLATGFYPDHVELSWWVNGKEVHSGVSTDPQPLKEQPALNDSRYCLSSRLRVSATFWQNPRNHFRCQVQFYGLSENDEWTQDRAKPVTQIVSAEAWGRADCGSTTPGERSSLPAFYPGTSGSCSGCGSLSLPLLAGLVAADAVASLLIVGAVFLCARPRRSPAQEDGKVYINMPGRGSTSRVKFSRSADAPAYQQGQNQLYNELNLGRREEYDVLDKRRGRDPEMGGKPQRRKNPQEGLYNELQKDKMAEAYSEIGMKGERRRGKGHDGLYQGLSTATKDTYDALHMQALPPRRAKRSGSGATNFSLLKQAGDVEENPGPMDWIWRILFLVGAATGAHSFEQVQLQQPGAELVKPGASVKMSCKASGYAFSSYWINWMKQKPGQGLEWIGQIYPGDGDTNYNGKFKGRATLTADTSSSTAYMQLSSLTSEDSAVYFCARSITTVVGCAMDYWGQGTSVTVSSTRIQNPDPAVYQLRDSKSSDKSVCLFTDFDSQTNVSQSKDSDVYITDKTVLDMRSMDFKSNSAVAWSNKSDFACANAFNNSIIPEDTFFPSPESSCGTKGCQGSADHVVSISGVPLQLQPNSIQTKVDSIAWKKLLPSQNGFHHILKWENGSLPSNTSNDRFSFIVKNLSLLIKAAQQQDSGLYCLEVTSISGKVQTATFQVFVFDKVEKPRLQGQGKILDRGRCQVALSCLVSRDGNVSYAWYRGSKLIQTAGNLTYLDEEVDINGTHTYTCNVSNPVSWESHTLNLTQDCQNAHQEFRFWPFLVIIVILSALFLGTLACFCVWRRKRKEKQSETSPKEFLTIYEDVKDLKTRRNHEQEQTFPGGGSTIYSMIQSQSSAPTSQEPAYTLYSLIQPSRKSGSRKRNHSPSFNSTIYEVIGKSQPKAQNPARLSRKELENFDVYSSSRRVKFSRSADAPAYQQGQNQLYNELNLGRREEYDVLDKRRGRDPEMGGKPQRRKNPQEGLYNELQKDKMAEAYSEIGMKGERRRGKGHDGLYQGLSTATKDTYDALHMQALPPRRAKRSGSGVKQTLNFDLLKLAGDVESNPGPGHMTEYKPTVRLATRDDVPRAVRTLAAAFADYPATRHTVDPDRHIERVTELQELFLTRVGLDIGKVWVADDGAAVAVWTTPESVEAGAVFAEIGPRMAELSGSRLAAQQQMEGLLAPHRPKEPAWFLATVGVSPDHQGKGLGSAVVLPGVEAAERAGVPAFLETSAPRNLPFYERLGFTVTADVEVPEGPRTWCMTRKPGA

SEQ ID NO: 6932 - protein, 1550 aa, Artificial Sequence
  Synthetic Polypeptide
MALPVTALLLPLALLLHAARPEVQLVESGGGLVQAGGSLRLSCAASGRTFSMGWFRQAPGKEREFVAAITYSGGSPYYADSVKGRFTISRDNAKNTVYLQMNSLKPEDTAVYYCAANPTYGSDWNAENWGQGTQVTVSSGTGGGGSGGGGSGGGGSEFDIQMTQSPSSLSASVGDRVTITCKASDHINNWLAWYQQKPGQAPKLLIYGATTLETGVPSRFSGSGSGTDYTLTISSLQPEDFATYYCQQSWNTPWTFGQGTKLEIKRLEDLKNVFPPEVAVFEPSEAEISHTQKATLVCLATGFYPDHVELSWWVNGKEVHSGVSTDPQPLKEQPALNDSRYCLSSRLRVSATFWQNPRNHFRCQVQFYGLSENDEWTQDRAKPVTQIVSAEAWGRADCGSTTPGERSSLPAFYPGTSGSCSGCGSLSLPLLAGLVAADAVASLLIVGAVFLCARPRRSPAQEDGKVYINMPGRGSTSRVKFSRSADAPAYQQGQNQLYNELNLGRREEYDVLDKRRGRDPEMGGKPQRRKNPQEGLYNELQKDKMAEAYSEIGMKGERRRGKGHDGLYQGLSTATKDTYDALHMQALPPRRAKRSGSGATNFSLLKQAGDVEENPGPMDWIWRILFLVGAATGAHSFEQVQLQQPGAELVKPGASVKMSCKASGYAFSSYWINWMKQKPGQGLEWIGQIYPGDGDTNYNGKFKGRATLTADTSSSTAYMQLSSLTSEDSAVYFCARSITTVVGCAMDYWGQGTSVTVSSTRIQNPDPAVYQLRDSKSSDKSVCLFTDFDSQTNVSQSKDSDVYITDKTVLDMRSMDFKSNSAVAWSNKSDFACANAFNNSIIPEDTFFPSPESSCGTKGCQGSADHVVSISGVPLQLQPNSIQTKVDSIAWKKLLPSQNGFHHILKWENGSLPSNTSNDRFSFIVKNLSLLIKAAQQQDSGLYCLEVTSISGKVQTATFQVFVFDKVEKPRLQGQGKILDRGRCQVALSCLVSRDGNVSYAWYRGSKLIQTAGNLTYLDEEVDINGTHTYTCNVSNPVSWESHTLNLTQDCQNAHQEFRFWPFLVIIVILSALFLGTLACFCVWRRKRKEKQSETSPKEFLTIYEDVKDLKTRRNHEQEQTFPGGGSTIYSMIQSQSSAPTSQEPAYTLYSLIQPSRKSGSRKRNHSPSFNSTIYEVIGKSQPKAQNPARLSRKELENFDVYSSSRRVKFSRSADAPAYQQGQNQLYNELNLGRREEYDVLDKRRGRDPEMGGKPQRRKNPQEGLYNELQKDKMAEAYSEIGMKGERRRGKGHDGLYQGLSTATKDTYDALHMQALPPRRAKRSGSGVKQTLNFDLLKLAGDVESNPGPGHMTEYKPTVRLATRDDVPRAVRTLAAAFADYPATRHTVDPDRHIERVTELQELFLTRVGLDIGKVWVADDGAAVAVWTTPESVEAGAVFAEIGPRMAELSGSRLAAQQQMEGLLAPHRPKEPAWFLATVGVSPDHQGKGLGSAVVLPGVEAAERAGVPAFLETSAPRNLPFYERLGFTVTADVEVPEGPRTWCMTRKPGA

SEQ ID NO: 6933 - protein, 1687 aa, Artificial Sequence
  Synthetic Polypeptide
MALPVTALLLPLALLLHAARPEVQLVESGGGLVQAGGSLRLSCAASGRTFSMGWFRQAPGKEREFVAAITYSGGSPYYADSVKGRFTISRDNAKNTVYLQMNSLKPEDTAVYYCAANPTYGSDWNAENWGQGTQVTVSSGTGGGGSGGGGSGGGGSEFDIQMTQSPSSLSASVGDRVTITCKASDHINNWLAWYQQKPGQAPKLLIYGATTLETGVPSRFSGSGSGTDYTLTISSLQPEDFATYYCQQSWNTPWTFGQGTKLEIKRLEDLKNVFPPEVAVFEPSEAEISHTQKATLVCLATGFYPDHVELSWWVNGKEVHSGVSTDPQPLKEQPALNDSRYCLSSRLRVSATFWQNPRNHFRCQVQFYGLSENDEWTQDRAKPVTQIVSAEAWGRADCGSTTPGERSSLPAFYPGTSGSCSGCGSLSLPLLAGLVAADAVASLLIVGAVFLCARPRRSPAQEDGKVYINMPGRGSTSRVKFSRSADAPAYQQGQNQLYNELNLGRREEYDVLDKRRGRDPEMGGKPQRRKNPQEGLYNELQKDKMAEAYSEIGMKGERRRGKGHDGLYQGLSTATKDTYDALHMQALPPRRAKRSGSGATNFSLLKQAGDVEENPGPMDWIWRILFLVGAATGAHSGPEVQLVESGGGLVQAGGSLRLSCAASGRTFTMGWFRQAPGKEREFVAAISLSPTLAYYADSVKGRFTISRDNAKNTVVLQMNSLKPEDTALYYCAADRKSVMSIRPDYWGQGTQVTVSSGSGGGGSGGGGSGGGGSFEQVQLQQPGAELVKPGASVKMSCKASGYAFSSYWINWMKQKPGQGLEWIGQIYPGDGDTNYNGKFKGRATLTADTSSSTAYMQLSSLTSEDSAVYFCARSITTVVGCAMDYWGQGTSVTVSSTRIQNPDPAVYQLRDSKSSDKSVCLFTDFDSQTNVSQSKDSDVYITDKTVLDMRSMDFKSNSAVAWSNKSDFACANAFNNSIIPEDTFFPSPESSCGTKGCQGSADHVVSISGVPLQLQPNSIQTKVDSIAWKKLLPSQNGFHHILKWENGSLPSNTSNDRFSFIVKNLSLLIKAAQQQDSGLYCLEVTSISGKVQTATFQVFVFDKVEKPRLQGQGKILDRGRCQVALSCLVSRDGNVSYAWYRGSKLIQTAGNLTYLDEEVDINGTHTYTCNVSNPVSWESHTLNLTQDCQNAHQEFRFWPFLVIIVILSALFLGTLACFCVWRRKRKEKQSETSPKEFLTIYEDVKDLKTRRNHEQEQTFPGGGSTIYSMIQSQSSAPTSQEPAYTLYSLIQPSRKSGSRKRNHSPSFNSTIYEVIGKSQPKAQNPARLSRKELENFDVYSSSRRVKFSRSADAPAYQQGQNQLYNELNLGRREEYDVLDKRRGRDPEMGGKPQRRKNPQEGLYNELQKDKMAEAYSEIGMKGERRRGKGHDGLYQGLSTATKDTYDALHMQALPPRRAKRSGSGVKQTLNFDLLKLAGDVESNPGPGHMTEYKPTVRLATRDDVPRAVRTLAAAFADYPATRHTVDPDRHIERVTELQELFLTRVGLDIGKVWVADDGAAVAVWTTPESVEAGAVFAEIGPRMAELSGSRLAAQQQMEGLLAPHRPKEPAWFLATVGVSPDHQGKGLGSAVVLPGVEAAERAGVPAFLETSAPRNLPFYERLGFTVTADVEVPEGPRTWCMTRKPGA

SEQ ID NO: 6934 - protein, 1420 aa, Artificial Sequence
  Synthetic Polypeptide
MALPVTALLLPLALLLHAARPEVQLVESGGGLVQAGGSLRLSCAASGRTFSMGWFRQAPGKEREFVAAITYSGGSPYYADSVKGRFTISRDNAKNTVYLQMNSLKPEDTAVYYCAANPTYGSDWNAENWGQGTQVTVSSLEDLKNVFPPEVAVFEPSEAEISHTQKATLVCLATGFYPDHVELSWWVNGKEVHSGVSTDPQPLKEQPALNDSRYCLSSRLRVSATFWQNPRNHFRCQVQFYGLSENDEWTQDRAKPVTQIVSAEAWGRADCGSTTPGERSSLPAFYPGTSGSCSGCGSLSLPLLAGLVAADAVASLLIVGAVFLCARPRRSPAQEDGKVYINMPGRGSTSRVKFSRSADAPAYQQGQNQLYNELNLGRREEYDVLDKRRGRDPEMGGKPQRRKNPQEGLYNELQKDKMAEAYSEIGMKGERRRGKGHDGLYQGLSTATKDTYDALHMQALPPRRAKRSGSGATNFSLLKQAGDVEENPGPMDWIWRILFLVGAATGAHSGPEVQLVESGGGLVQAGGSLRLSCAASGRTFTMGWFRQAPGKEREFVAAISLSPTLAYYADSVKGRFTISRDNAKNTVVLQMNSLKPEDTALYYCAADRKSVMSIRPDYWGQGTQVTVSSTRIQNPDPAVYQLRDSKSSDKSVCLFTDFDSQTNVSQSKDSDVYITDKTVLDMRSMDFKSNSAVAWSNKSDFACANAFNNSIIPEDTFFPSPESSCGTKGCQGSADHVVSISGVPLQLQPNSIQTKVDSIAWKKLLPSQNGFHHILKWENGSLPSNTSNDRFSFIVKNLSLLIKAAQQQDSGLYCLEVTSISGKVQTATFQVFVFDKVEKPRLQGQGKILDRGRCQVALSCLVSRDGNVSYAWYRGSKLIQTAGNLTYLDEEVDINGTHTYTCNVSNPVSWESHTLNLTQDCQNAHQEFRFWPFLVIIVILSALFLGTLACFCVWRRKRKEKQSETSPKEFLTIYEDVKDLKTRRNHEQEQTFPGGGSTIYSMIQSQSSAPTSQEPAYTLYSLIQPSRKSGSRKRNHSPSFNSTIYEVIGKSQPKAQNPARLSRKELENFDVYSSSRRVKFSRSADAPAYQQGQNQLYNELNLGRREEYDVLDKRRGRDPEMGGKPQRRKNPQEGLYNELQKDKMAEAYSEIGMKGERRRGKGHDGLYQGLSTATKDTYDALHMQALPPRRAKRSGSGVKQTLNFDLLKLAGDVESNPGPGHMTEYKPTVRLATRDDVPRAVRTLAAAFADYPATRHTVDPDRHIERVTELQELFLTRVGLDIGKVWVADDGAAVAVWTTPESVEAGAVFAEIGPRMAELSGSRLAAQQQMEGLLAPHRPKEPAWFLATVGVSPDHQGKGLGSAVVLPGVEAAERAGVPAFLETSAPRNLPFYERLGFTVTADVEVPEGPRTWCMTRKPGA

SEQ ID NO: 6935 - protein, 585 aa, Artificial Sequence; identical to SEQ ID NO: 4431
  Synthetic Polypeptide

SEQ ID NO: 6936 - protein, 457 aa, Artificial Sequence; identical to SEQ ID NO: 6712
  Synthetic Polypeptide

SEQ ID NO: 6937 - protein, 457 aa, Artificial Sequence; identical to SEQ ID NO: 6713
  Synthetic Polypeptide

SEQ ID NO: 6938 - protein, 331 aa, Artificial Sequence; identical to SEQ ID NO: 6714
  Synthetic Polypeptide

SEQ ID NO: 6939 - protein, 331 aa, Artificial Sequence; identical to SEQ ID NO: 6715
  Synthetic Polypeptide

SEQ ID NO: 6940 - protein, 331 aa, Artificial Sequence; identical to SEQ ID NO: 6716
  Synthetic Polypeptide

SEQ ID NO: 6941 - protein, 333 aa, Artificial Sequence; identical to SEQ ID NO: 6717
  Synthetic Polypeptide

SEQ ID NO: 6942 - protein, 341 aa, Artificial Sequence; identical to SEQ ID NO: 6718
  Synthetic Polypeptide

SEQ ID NO: 6943 - protein, 337 aa, Artificial Sequence; identical to SEQ ID NO: 6719
  Synthetic Polypeptide

SEQ ID NO: 6944 - protein, 332 aa, Artificial Sequence; identical to SEQ ID NO: 6720
  Synthetic Polypeptide

SEQ ID NO: 6945 - protein, 337 aa, Artificial Sequence; identical to SEQ ID NO: 6721
  Synthetic Polypeptide

SEQ ID NO: 6946 - protein, 271 aa, Artificial Sequence; identical to SEQ ID NO: 6722
  Synthetic Polypeptide

SEQ ID NO: 6947 - protein, 302 aa, Artificial Sequence; identical to SEQ ID NO: 6723
  Synthetic Polypeptide

SEQ ID NO: 6948 - protein, 303 aa, Artificial Sequence; identical to SEQ ID NO: 6724
  Synthetic Polypeptide

SEQ ID NO: 6949 - protein, 520 aa, Artificial Sequence; identical to SEQ ID NO: 6725
  Synthetic Polypeptide

SEQ ID NO: 6950 - protein, 400 aa, Artificial Sequence; identical to SEQ ID NO: 6726
  Synthetic Polypeptide

SEQ ID NO: 6951 - protein, 266 aa, Artificial Sequence; identical to SEQ ID NO: 6727
  Synthetic Polypeptide

SEQ ID NO: 6952 - protein, 241 aa, Artificial Sequence; identical to SEQ ID NO: 6728
  Synthetic Polypeptide

SEQ ID NO: 6953 - protein, 499 aa, Artificial Sequence; identical to SEQ ID NO: 6729
  Synthetic Polypeptide

SEQ ID NO: 6954 - protein, 499 aa, Artificial Sequence; identical to SEQ ID NO: 6730
  Synthetic Polypeptide

SEQ ID NO: 6955 - protein, 1457 aa, Artificial Sequence
  Synthetic Polypeptide
MALPVTALLLPLALLLHAARPDIQMTQSPSSLSASVGDRVTITCKASDHINNWLAWYQQKPGQAPKLLIYGATTLETGVPSRFSGSGSGTDYTLTISSLQPEDFATYYCQQSWNTPWTFGQGTKLEIKRLEKGCQGSADHVVSISGVPLQLQPNSIQTKVDSIAWKKLLPSQNGFHHILKWENGSLPSNTSNDRFSFIVKNLSLLIKAAQQQDSGLYCLEVTSISGKVQTATFQVFVFDKVEKPRLQGQGKILDRGRCQVALSCLVSRDGNVSYAWYRGSKLIQTAGNLTYLDEEVDINGTHTYTCNVSNPVSWESHTLNLTQDCQNAHQEFRFWPFLVIIVILSALFLGTLACFCVWRRKRKEKQSETSPKEFLTIYEDVKDLKTRRNHEQEQTFPGGGSTIYSMIQSQSSAPTSQEPAYTLYSLIQPSRKSGSRKRNHSPSFNSTIYEVIGKSQPKAQNPARLSRKELENFDVYSSTSRVKFSRSADAPAYQQGQNQLYNELNLGRREEYDVLDKRRGRDPEMGGKPQRRKNPQEGLYNELQKDKMAEAYSEIGMKGERRRGKGHDGLYQGLSTATKDTYDALHMQALPPRRAKRSGSGATNFSLLKQAGDVEENPGPMDWIWRILFLVGAATGAHSFEQVQLQQPGAELVKPGASVKMSCKASGYAFSSYWINWMKQKPGQGLEWIGQIYPGDGDTNYNGKFKGRATLTADTSSSTAYMQLSSLTSEDSAVYFCARSITTVVGCAMDYWGQGTSVTVSSTRKGCQGSADHVVSISGVPLQLQPNSIQTKVDSIAWKKLLPSQNGFHHILKWENGSLPSNTSNDRFSFIVKNLSLLIKAAQQQDSGLYCLEVTSISGKVQTATFQVFVFDKVEKPRLQGQGKILDRGRCQVALSCLVSRDGNVSYAWYRGSKLIQTAGNLTYLDEEVDINGTHTYTCNVSNPVSWESHTLNLTQDCQNAHQEFRFWPFLVIIVILSALFLGTLACFCVWRRKRKEKQSETSPKEFLTIYEDVKDLKTRRNHEQEQTFPGGGSTIYSMIQSQSSAPTSQEPAYTLYSLIQPSRKSGSRKRNHSPSFNSTIYEVIGKSQPKAQNPARLSRKELENFDVYSSSRRVKFSRSADAPAYQQGQNQLYNELNLGRREEYDVLDKRRGRDPEMGGKPQRRKNPQEGLYNELQKDKMAEAYSEIGMKGERRRGKGHDGLYQGLSTATKDTYDALHMQALPPRRAKRSGSGVKQTLNFDLLKLAGDVESNPGPGHMTEYKPTVRLATRDDVPRAVRTLAAAFADYPATRHTVDPDRHIERVTELQELFLTRVGLDIGKVWVADDGAAVAVWTTPESVEAGAVFAEIGPRMAELSGSRLAAQQQMEGLLAPHRPKEPAWFLATVGVSPDHQGKGLGSAVVLPGVEAAERAGVPAFLETSAPRNLPFYERLGFTVTADVEVPEGPRTWCMTRKPGA

SEQ ID NO: 6956 - protein, 1509 aa, Artificial Sequence
  Synthetic Polypeptide
MALPVTALLLPLALLLHAARPACEVQLLESGGGLIQPGGSLRLSCAASGFTFSSHAMTWVRQAPGKGLEWVSAISGSGDYTHYADSVKGRFTISRDNSKNTVYLQMNSLRAEDSAVYYCAKDEDGGSLLGHRGQGTLVTVSSGTGGGGSGGGGSGGGGSEFGSLEKGCQGSADHVVSISGVPLQLQPNSIQTKVDSIAWKKLLPSQNGFHHILKWENGSLPSNTSNDRFSFIVKNLSLLIKAAQQQDSGLYCLEVTSISGKVQTATFQVFVFDKVEKPRLQGQGKILDRGRCQVALSCLVSRDGNVSYAWYRGSKLIQTAGNLTYLDEEVDINGTHTYTCNVSNPVSWESHTLNLTQDCQNAHQEFRFWPFLVIIVILSALFLGTLACFCVWRRKRKEKQSETSPKEFLTIYEDVKDLKTRRNHEQEQTFPGGGSTIYSMIQSQSSAPTSQEPAYTLYSLIQPSRKSGSRKRNHSPSFNSTIYEVIGKSQPKAQNPARLSRKELENFDVYSSTSRVKFSRSADAPAYQQGQNQLYNELNLGRREEYDVLDKRRGRDPEMGGKPQRRKNPQEGLYNELQKDKMAEAYSEIGMKGERRRGKGHDGLYQGLSTATKDTYDALHMQALPPRRAKRSGSGATNFSLLKQAGDVEENPGPMDWIWRILFLVGAATGAHSGPEVQLVESGGGLVQAGGSLRLSCAASGRTFSMGWFRQAPGKEREFVAAITYSGGSPYYADSVKGRFTISRDNAKNTVYLQMNSLKPEDTAVYYCAANPTYGSDWNAENWGQGTQVTVSSGSGGGGSGGGGSGGGGSFEGSTRKGCQGSADHVVSISGVPLQLQPNSIQTKVDSIAWKKLLPSQNGFHHILKWENGSLPSNTSNDRFSFIVKNLSLLIKAAQQQDSGLYCLEVTSISGKVQTATFQVFVFDKVEKPRLQGQGKILDRGRCQVALSCLVSRDGNVSYAWYRGSKLIQTAGNLTYLDEEVDINGTHTYTCNVSNPVSWESHTLNLTQDCQNAHQEFRFWPFLVIIVILSALFLGTLACFCVWRRKRKEKQSETSPKEFLTIYEDVKDLKTRRNHEQEQTFPGGGSTIYSMIQSQSSAPTSQEPAYTLYSLIQPSRKSGSRKRNHSPSFNSTIYEVIGKSQPKAQNPARLSRKELENFDVYSSSRRVKFSRSADAPAYQQGQNQLYNELNLGRREEYDVLDKRRGRDPEMGGKPQRRKNPQEGLYNELQKDKMAEAYSEIGMKGERRRGKGHDGLYQGLSTATKDTYDALHMQALPPRRAKRSGSGVKQTLNFDLLKLAGDVESNPGPGHMTEYKPTVRLATRDDVPRAVRTLAAAFADYPATRHTVDPDRHIERVTELQELFLTRVGLDIGKVWVADDGAAVAVWTTPESVEAGAVFAEIGPRMAELSGSRLAAQQQMEGLLAPHRPKEPAWFLATVGVSPDHQGKGLGSAVVLPGVEAAERAGVPAFLETSAPRNLPFYERLGFTVTADVEVPEGPRTWCMTRKPGA

SEQ ID NO: 6957 - protein, 1659 aa, Artificial Sequence
  Synthetic Polypeptide
MALPVTALLLPLALLLHAARPDIQMTQSPSSLSASVGDRVTITCKASDHINNWLAWYQQKPGQAPKLLIYGATTLETGVPSRFSGSGSGTDYTLTISSLQPEDFATYYCQQSWNTPWTFGQGTKLEIKRLEGQPKANPTVTLFPPSSEELQANKATLVCLISDFYPGAVTVAWKADGSPVKAGVETTKPSKQSNNKYAASSYLSLTPEQWKSHRSYSCQVTHEGSTVEKTVAPTECSGSKGCQGSADHVVSISGVPLQLQPNSIQTKVDSIAWKKLLPSQNGFHHILKWENGSLPSNTSNDRFSFIVKNLSLLIKAAQQQDSGLYCLEVTSISGKVQTATFQVFVFDKVEKPRLQGQGKILDRGRCQVALSCLVSRDGNVSYAWYRGSKLIQTAGNLTYLDEEVDINGTHTYTCNVSNPVSWESHTLNLTQDCQNAHQEFRFWPFLVIIVILSALFLGTLACFCVWRRKRKEKQSETSPKEFLTIYEDVKDLKTRRNHEQEQTFPGGGSTIYSMIQSQSSAPTSQEPAYTLYSLIQPSRKSGSRKRNHSPSFNSTIYEVIGKSQPKAQNPARLSRKELENFDVYSSTSRVKFSRSADAPAYQQGQNQLYNELNLGRREEYDVLDKRRGRDPEMGGKPQRRKNPQEGLYNELQKDKMAEAYSEIGMKGERRRGKGHDGLYQGLSTATKDTYDALHMQALPPRRAKRSGSGATNFSLLKQAGDVEENPGPMDWIWRILFLVGAATGAHSFEQVQLQQPGAELVKPGASVKMSCKASGYAFSSYWINWMKQKPGQGLEWIGQIYPGDGDTNYNGKFKGRATLTADTSSSTAYMQLSSLTSEDSAVYFCARSITTVVGCAMDYWGQGTSVTVSSTRASTKGPSVFPLAPSSKSTSGGTAALGCLVKDYFPEPVTVSWNSGALTSGVHTFPAVLQSSGLYSLSSVVTVPSSSLGTQTYICNVNHKPSNTKVDKRVEPKSCGTKGCQGSADHVVSISGVPLQLQPNSIQTKVDSIAWKKLLPSQNGFHHILKWENGSLPSNTSNDRFSFIVKNLSLLIKAAQQQDSGLYCLEVTSISGKVQTATFQVFVFDKVEKPRLQGQGKILDRGRCQVALSCLVSRDGNVSYAWYRGSKLIQTAGNLTYLDEEVDINGTHTYTCNVSNPVSWESHTLNLTQDCQNAHQEFRFWPFLVIIVILSALFLGTLACFCVWRRKRKEKQSETSPKEFLTIYEDVKDLKTRRNHEQEQTFPGGGSTIYSMIQSQSSAPTSQEPAYTLYSLIQPSRKSGSRKRNHSPSFNSTIYEVIGKSQPKAQNPARLSRKELENFDVYSSSRRVKFSRSADAPAYQQGQNQLYNELNLGRREEYDVLDKRRGRDPEMGGKPQRRKNPQEGLYNELQKDKMAEAYSEIGMKGERRRGKGHDGLYQGLSTATKDTYDALHMQALPPRRAKRSGSGVKQTLNFDLLKLAGDVESNPGPGHMATYEVLCEVARKLGTDDREVVLFLLNVFIPQPTLAQLIGALRALKEEGRLTFPLLAECLFRAGRRDLLRDLLHLDPRFLERHLAGTMSYFSPYQLTVLHVDGELCARDIRSLIFLSKDTIGSRSTPQTFLHWVYCMENLDLLGPTDVDALMSMLRSLSRVDLQRQVQTLMGLHLSGPSHSQHYRHTP

SEQ ID NO: 6958 - protein, 1712 aa, Artificial Sequence
  Synthetic Polypeptide
MALPVTALLLPLALLLHAARPDIQMTQSPSSLSASVGDRVTITCKASDHINNWLAWYQQKPGQAPKLLIYGATTLETGVPSRFSGSGSGTDYTLTISSLQPEDFATYYCQQSWNTPWTFGQGTKLEIKRLEGQPKANPTVTLFPPSSEELQANKATLVCLISDFYPGAVTVAWKADGSPVKAGVETTKPSKQSNNKYAASSYLSLTPEQWKSHRSYSCQVTHEGSTVEKTVAPTECSGSKGCQGSADHVVSISGVPLQLQPNSIQTKVDSIAWKKLLPSQNGFHHILKWENGSLPSNTSNDRFSFIVKNLSLLIKAAQQQDSGLYCLEVTSISGKVQTATFQVFVFDKVEKPRLQGQGKILDRGRCQVALSCLVSRDGNVSYAWYRGSKLIQTAGNLTYLDEEVDINGTHTYTCNVSNPVSWESHTLNLTQDCQNAHQEFRFWPFLVIIVILSALFLGTLACFCVWRRKRKEKQSETSPKEFLTIYEDVKDLKTRRNHEQEQTFPGGGSTIYSMIQSQSSAPTSQEPAYTLYSLIQPSRKSGSRKRNHSPSFNSTIYEVIGKSQPKAQNPARLSRKELENFDVYSSTSRVKFSRSADAPAYQQGQNQLYNELNLGRREEYDVLDKRRGRDPEMGGKPQRRKNPQEGLYNELQKDKMAEAYSEIGMKGERRRGKGHDGLYQGLSTATKDTYDALHMQALPPRRAKRSGSGATNFSLLKQAGDVEENPGPMDWIWRILFLVGAATGAHSFEQVQLQQPGAELVKPGASVKMSCKASGYAFSSYWINWMKQKPGQGLEWIGQIYPGDGDTNYNGKFKGRATLTADTSSSTAYMQLSSLTSEDSAVYFCARSITTVVGCAMDYWGQGTSVTVSSTRASTKGPSVFPLAPSSKSTSGGTAALGCLVKDYFPEPVTVSWNSGALTSGVHTFPAVLQSSGLYSLSSVVTVPSSSLGTQTYICNVNHKPSNTKVDKRVEPKSCGTKGCQGSADHVVSISGVPLQLQPNSIQTKVDSIAWKKLLPSQNGFHHILKWENGSLPSNTSNDRFSFIVKNLSLLIKAAQQQDSGLYCLEVTSISGKVQTATFQVFVFDKVEKPRLQGQGKILDRGRCQVALSCLVSRDGNVSYAWYRGSKLIQTAGNLTYLDEEVDINGTHTYTCNVSNPVSWESHTLNLTQDCQNAHQEFRFWPFLVIIVILSALFLGTLACFCVWRRKRKEKQSETSPKEFLTIYEDVKDLKTRRNHEQEQTFPGGGSTIYSMIQSQSSAPTSQEPAYTLYSLIQPSRKSGSRKRNHSPSFNSTIYEVIGKSQPKAQNPARLSRKELENFDVYSSSRRVKFSRSADAPAYQQGQNQLYNELNLGRREEYDVLDKRRGRDPEMGGKPQRRKNPQEGLYNELQKDKMAEAYSEIGMKGERRRGKGHDGLYQGLSTATKDTYDALHMQALPPRRAKRSGSGVKQTLNFDLLKLAGDVESNPGPGHMSDSKEVPSLPFLRHLLEELDSHEDSLLLFLCHDAAPGCTTVTQALCSLSQQRKLTLAALVEMLYVLQRMDLLKSRFGLSKEGAEQLLGTSFLTRYRKLMVCVGEELDSSELRALRLFACNLNPSLSTALSESSRFVELVLALENVGLVSPSSVSVLADMLRTLRRLDLCQQLVEYEQQEQARYRYCYAASPSLPVRTLRRGHGASEHEQLCMPVQESSDSPELLRTPVQESSSDSPEQTT

SEQ ID NO: 6959 - protein, 1670 aa, Artificial Sequence
  Synthetic Polypeptide
MALPVTALLLPLALLLHAARPDIQMTQSPSSLSASVGDRVTITCKASDHINNWLAWYQQKPGQAPKLLIYGATTLETGVPSRFSGSGSGTDYTLTISSLQPEDFATYYCQQSWNTPWTFGQGTKLEIKRLEGQPKANPTVTLFPPSSEELQANKATLVCLISDFYPGAVTVAWKADGSPVKAGVETTKPSKQSNNKYAASSYLSLTPEQWKSHRSYSCQVTHEGSTVEKTVAPTECSGSKGCQGSADHVVSISGVPLQLQPNSIQTKVDSIAWKKLLPSQNGFHHILKWENGSLPSNTSNDRFSFIVKNLSLLIKAAQQQDSGLYCLEVTSISGKVQTATFQVFVFDKVEKPRLQGQGKILDRGRCQVALSCLVSRDGNVSYAWYRGSKLIQTAGNLTYLDEEVDINGTHTYTCNVSNPVSWESHTLNLTQDCQNAHQEFRFWPFLVIIVILSALFLGTLACFCVWRRKRKEKQSETSPKEFLTIYEDVKDLKTRRNHEQEQTFPGGGSTIYSMIQSQSSAPTSQEPAYTLYSLIQPSRKSGSRKRNHSPSFNSTIYEVIGKSQPKAQNPARLSRKELENFDVYSSTSRVKFSRSADAPAYQQGQNQLYNELNLGRREEYDVLDKRRGRDPEMGGKPQRRKNPQEGLYNELQKDKMAEAYSEIGMKGERRRGKGHDGLYQGLSTATKDTYDALHMQALPPRRAKRSGSGATNFSLLKQAGDVEENPGPMDWIWRILFLVGAATGAHSFEQVQLQQPGAELVKPGASVKMSCKASGYAFSSYWINWMKQKPGQGLEWIGQIYPGDGDTNYNGKFKGRATLTADTSSSTAYMQLSSLTSEDSAVYFCARSITTVVGCAMDYWGQGTSVTVSSTRASTKGPSVFPLAPSSKSTSGGTAALGCLVKDYFPEPVTVSWNSGALTSGVHTFPAVLQSSGLYSLSSVVTVPSSSLGTQTYICNVNHKPSNTKVDKRVEPKSCGTKGCQGSADHVVSISGVPLQLQPNSIQTKVDSIAWKKLLPSQNGFHHILKWENGSLPSNTSNDRFSFIVKNLSLLIKAAQQQDSGLYCLEVTSISGKVQTATFQVFVFDKVEKPRLQGQGKILDRGRCQVALSCLVSRDGNVSYAWYRGSKLIQTAGNLTYLDEEVDINGTHTYTCNVSNPVSWESHTLNLTQDCQNAHQEFRFWPFLVIIVILSALFLGTLACFCVWRRKRKEKQSETSPKEFLTIYEDVKDLKTRRNHEQEQTFPGGGSTIYSMIQSQSSAPTSQEPAYTLYSLIQPSRKSGSRKRNHSPSFNSTIYEVIGKSQPKAQNPARLSRKELENFDVYSSSRRVKFSRSADAPAYQQGQNQLYNELNLGRREEYDVLDKRRGRDPEMGGKPQRRKNPQEGLYNELQKDKMAEAYSEIGMKGERRRGKGHDGLYQGLSTATKDTYDALHMQALPPRRAKRSGSGVKQTLNFDLLKLAGDVESNPGPGHMTEYKPTVRLATRDDVPRAVRTLAAAFADYPATRHTVDPDRHIERVTELQELFLTRVGLDIGKVWVADDGAAVAVWTTPESVEAGAVFAEIGPRMAELSGSRLAAQQQMEGLLAPHRPKEPAWFLATVGVSPDHQGKGLGSAVVLPGVEAAERAGVPAFLETSAPRNLPFYERLGFTVTADVEVPEGPRTWCMTRKPGA

SEQ ID NO: 6960 - protein, 1807 aa, Artificial Sequence
  Synthetic Polypeptide
MALPVTALLLPLALLLHAARPEVQLVESGGGLVQAGGSLRLSCAASGRTFSMGWFRQAPGKEREFVAAITYSGGSPYYADSVKGRFTISRDNAKNTVYLQMNSLKPEDTAVYYCAANPTYGSDWNAENWGQGTQVTVSSGTGGGGSGGGGSGGGGSEFDIQMTQSPSSLSASVGDRVTITCKASDHINNWLAWYQQKPGQAPKLLIYGATTLETGVPSRFSGSGSGTDYTLTISSLQPEDFATYYCQQSWNTPWTFGQGTKLEIKRLEGQPKANPTVTLFPPSSEELQANKATLVCLISDFYPGAVTVAWKADGSPVKAGVETTKPSKQSNNKYAASSYLSLTPEQWKSHRSYSCQVTHEGSTVEKTVAPTECSGSKGCQGSADHVVSISGVPLQLQPNSIQTKVDSIAWKKLLPSQNGFHHILKWENGSLPSNTSNDRFSFIVKNLSLLIKAAQQQDSGLYCLEVTSISGKVQTATFQVFVFDKVEKPRLQGQGKILDRGRCQVALSCLVSRDGNVSYAWYRGSKLIQTAGNLTYLDEEVDINGTHTYTCNVSNPVSWESHTLNLTQDCQNAHQEFRFWPFLVIIVILSALFLGTLACFCVWRRKRKEKQSETSPKEFLTIYEDVKDLKTRRNHEQEQTFPGGGSTIYSMIQSQSSAPTSQEPAYTLYSLIQPSRKSGSRKRNHSPSFNSTIYEVIGKSQPKAQNPARLSRKELENFDVYSSTSRVKFSRSADAPAYQQGQNQLYNELNLGRREEYDVLDKRRGRDPEMGGKPQRRKNPQEGLYNELQKDKMAEAYSEIGMKGERRRGKGHDGLYQGLSTATKDTYDALHMQALPPRRAKRSGSGATNFSLLKQAGDVEENPGPMDWIWRILFLVGAATGAHSFEQVQLQQPGAELVKPGASVKMSCKASGYAFSSYWINWMKQKPGQGLEWIGQIYPGDGDTNYNGKFKGRATLTADTSSSTAYMQLSSLTSEDSAVYFCARSITTVVGCAMDYWGQGTSVTVSSTRASTKGPSVFPLAPSSKSTSGGTAALGCLVKDYFPEPVTVSWNSGALTSGVHTFPAVLQSSGLYSLSSVVTVPSSSLGTQTYICNVNHKPSNTKVDKRVEPKSCGTKGCQGSADHVVSISGVPLQLQPNSIQTKVDSIAWKKLLPSQNGFHHILKWENGSLPSNTSNDRFSFIVKNLSLLIKAAQQQDSGLYCLEVTSISGKVQTATFQVFVFDKVEKPRLQGQGKILDRGRCQVALSCLVSRDGNVSYAWYRGSKLIQTAGNLTYLDEEVDINGTHTYTCNVSNPVSWESHTLNLTQDCQNAHQEFRFWPFLVIIVILSALFLGTLACFCVWRRKRKEKQSETSPKEFLTIYEDVKDLKTRRNHEQEQTFPGGGSTIYSMIQSQSSAPTSQEPAYTLYSLIQPSRKSGSRKRNHSPSFNSTIYEVIGKSQPKAQNPARLSRKELENFDVYSSSRRVKFSRSADAPAYQQGQNQLYNELNLGRREEYDVLDKRRGRDPEMGGKPQRRKNPQEGLYNELQKDKMAEAYSEIGMKGERRRGKGHDGLYQGLSTATKDTYDALHMQALPPRRAKRSGSGVKQTLNFDLLKLAGDVESNPGPGHMTEYKPTVRLATRDDVPRAVRTLAAAFADYPATRHTVDPDRHIERVTELQELFLTRVGLDIGKVWVADDGAAVAVWTTPESVEAGAVFAEIGPRMAELSGSRLAAQQQMEGLLAPHRPKEPAWFLATVGVSPDHQGKGLGSAVVLPGVEAAERAGVPAFLETSAPRNLPFYERLGFTVTADVEVPEGPRTWCMTRKPGA

SEQ ID NO: 6961 - protein, 1944 aa, Artificial Sequence
  Synthetic Polypeptide
MALPVTALLLPLALLLHAARPEVQLVESGGGLVQAGGSLRLSCAASGRTFSMGWFRQAPGKEREFVAAITYSGGSPYYADSVKGRFTISRDNAKNTVYLQMNSLKPEDTAVYYCAANPTYGSDWNAENWGQGTQVTVSSGTGGGGSGGGGSGGGGSEFDIQMTQSPSSLSASVGDRVTITCKASDHINNWLAWYQQKPGQAPKLLIYGATTLETGVPSRFSGSGSGTDYTLTISSLQPEDFATYYCQQSWNTPWTFGQGTKLEIKRLEGQPKANPTVTLFPPSSEELQANKATLVCLISDFYPGAVTVAWKADGSPVKAGVETTKPSKQSNNKYAASSYLSLTPEQWKSHRSYSCQVTHEGSTVEKTVAPTECSGSKGCQGSADHVVSISGVPLQLQPNSIQTKVDSIAWKKLLPSQNGFHHILKWENGSLPSNTSNDRFSFIVKNLSLLIKAAQQQDSGLYCLEVTSISGKVQTATFQVFVFDKVEKPRLQGQGKILDRGRCQVALSCLVSRDGNVSYAWYRGSKLIQTAGNLTYLDEEVDINGTHTYTCNVSNPVSWESHTLNLTQDCQNAHQEFRFWPFLVIIVILSALFLGTLACFCVWRRKRKEKQSETSPKEFLTIYEDVKDLKTRRNHEQEQTFPGGGSTIYSMIQSQSSAPTSQEPAYTLYSLIQPSRKSGSRKRNHSPSFNSTIYEVIGKSQPKAQNPARLSRKELENFDVYSSTSRVKFSRSADAPAYQQGQNQLYNELNLGRREEYDVLDKRRGRDPEMGGKPQRRKNPQEGLYNELQKDKMAEAYSEIGMKGERRRGKGHDGLYQGLSTATKDTYDALHMQALPPRRAKRSGSGATNFSLLKQAGDVEENPGPMDWIWRILFLVGAATGAHSGPEVQLVESGGGLVQAGGSLRLSCAASGRTFTMGWFRQAPGKEREFVAAISLSPTLAYYADSVKGRFTISRDNAKNTVVLQMNSLKPEDTALYYCAADRKSVMSIRPDYWGQGTQVTVSSGSGGGGSGGGGSGGGGSFEQVQLQQPGAELVKPGASVKMSCKASGYAFSSYWINWMKQKPGQGLEWIGQIYPGDGDTNYNGKFKGRATLTADTSSSTAYMQLSSLTSEDSAVYFCARSITTVVGCAMDYWGQGTSVTVSSTRASTKGPSVFPLAPSSKSTSGGTAALGCLVKDYFPEPVTVSWNSGALTSGVHTFPAVLQSSGLYSLSSVVTVPSSSLGTQTYICNVNHKPSNTKVDKRVEPKSCGTKGCQGSADHVVSISGVPLQLQPNSIQTKVDSIAWKKLLPSQNGFHHILKWENGSLPSNTSNDRFSFIVKNLSLLIKAAQQQDSGLYCLEVTSISGKVQTATFQVFVFDKVEKPRLQGQGKILDRGRCQVALSCLVSRDGNVSYAWYRGSKLIQTAGNLTYLDEEVDINGTHTYTCNVSNPVSWESHTLNLTQDCQNAHQEFRFWPFLVIIVILSALFLGTLACFCVWRRKRKEKQSETSPKEFLTIYEDVKDLKTRRNHEQEQTFPGGGSTIYSMIQSQSSAPTSQEPAYTLYSLIQPSRKSGSRKRNHSPSFNSTIYEVIGKSQPKAQNPARLSRKELENFDVYSSSRRVKFSRSADAPAYQQGQNQLYNELNLGRREEYDVLDKRRGRDPEMGGKPQRRKNPQEGLYNELQKDKMAEAYSEIGMKGERRRGKGHDGLYQGLSTATKDTYDALHMQALPPRRAKRSGSGVKQTLNFDLLKLAGDVESNPGPGHMTEYKPTVRLATRDDVPRAVRTLAAAFADYPATRHTVDPDRHIERVTELQELFLTRVGLDIGKVWVADDGAAVAVWTTPESVEAGAVFAEIGPRMAELSGSRLAAQQQMEGLLAPHRPKEPAWFLATVGVSPDHQGKGLGSAVVLPGVEAAERAGVPAFLETSAPRNLPFYERLGFTVTADVEVPEGPRTWCMTRKPGA

SEQ ID NO: 6962 - protein, 1677 aa, Artificial Sequence
  Synthetic Polypeptide
MALPVTALLLPLALLLHAARPEVQLVESGGGLVQAGGSLRLSCAASGRTFSMGWFRQAPGKEREFVAAITYSGGSPYYADSVKGRFTISRDNAKNTVYLQMNSLKPEDTAVYYCAANPTYGSDWNAENWGQGTQVTVSSLEGQPKANPTVTLFPPSSEELQANKATLVCLISDFYPGAVTVAWKADGSPVKAGVETTKPSKQSNNKYAASSYLSLTPEQWKSHRSYSCQVTHEGSTVEKTVAPTECSGSKGCQGSADHVVSISGVPLQLQPNSIQTKVDSIAWKKLLPSQNGFHHILKWENGSLPSNTSNDRFSFIVKNLSLLIKAAQQQDSGLYCLEVTSISGKVQTATFQVFVFDKVEKPRLQGQGKILDRGRCQVALSCLVSRDGNVSYAWYRGSKLIQTAGNLTYLDEEVDINGTHTYTCNVSNPVSWESHTLNLTQDCQNAHQEFRFWPFLVIIVILSALFLGTLACFCVWRRKRKEKQSETSPKEFLTIYEDVKDLKTRRNHEQEQTFPGGGSTIYSMIQSQSSAPTSQEPAYTLYSLIQPSRKSGSRKRNHSPSFNSTIYEVIGKSQPKAQNPARLSRKELENFDVYSSTSRVKFSRSADAPAYQQGQNQLYNELNLGRREEYDVLDKRRGRDPEMGGKPQRRKNPQEGLYNELQKDKMAEAYSEIGMKGERRRGKGHDGLYQGLSTATKDTYDALHMQALPPRRAKRSGSGATNFSLLKQAGDVEENPGPMDWIWRILFLVGAATGAHSGPEVQLVESGGGLVQAGGSLRLSCAASGRTFTMGWFRQAPGKEREFVAAISLSPTLAYYADSVKGRFTISRDNAKNTVVLQMNSLKPEDTALYYCAADRKSVMSIRPDYWGQGTQVTVSSTRASTKGPSVFPLAPSSKSTSGGTAALGCLVKDYFPEPVTVSWNSGALTSGVHTFPAVLQSSGLYSLSSVVTVPSSSLGTQTYICNVNHKPSNTKVDKRVEPKSCGTKGCQGSADHVVSISGVPLQLQPNSIQTKVDSIAWKKLLPSQNGFHHILKWENGSLPSNTSNDRFSFIVKNLSLLIKAAQQQDSGLYCLEVTSISGKVQTATFQVFVFDKVEKPRLQGQGKILDRGRCQVALSCLVSRDGNVSYAWYRGSKLIQTAGNLTYLDEEVDINGTHTYTCNVSNPVSWESHTLNLTQDCQNAHQEFRFWPFLVIIVILSALFLGTLACFCVWRRKRKEKQSETSPKEFLTIYEDVKDLKTRRNHEQEQTFPGGGSTIYSMIQSQSSAPTSQEPAYTLYSLIQPSRKSGSRKRNHSPSFNSTIYEVIGKSQPKAQNPARLSRKELENFDVYSSSRRVKFSRSADAPAYQQGQNQLYNELNLGRREEYDVLDKRRGRDPEMGGKPQRRKNPQEGLYNELQKDKMAEAYSEIGMKGERRRGKGHDGLYQGLSTATKDTYDALHMQALPPRRAKRSGSGVKQTLNFDLLKLAGDVESNPGPGHMTEYKPTVRLATRDDVPRAVRTLAAAFADYPATRHTVDPDRHIERVTELQELFLTRVGLDIGKVWVADDGAAVAVWTTPESVEAGAVFAEIGPRMAELSGSRLAAQQQMEGLLAPHRPKEPAWFLATVGVSPDHQGKGLGSAVVLPGVEAAERAGVPAFLETSAPRNLPFYERLGFTVTADVEVPEGPRTWCMTRKPGA

SEQ ID NO: 6963 - protein, 1685 aa, Artificial Sequence
  Synthetic Polypeptide
MALPVTALLLPLALLLHAARPDIQMTQSPSSLSASVGDRVTITCKASDHINNWLAWYQQKPGQAPKLLIYGATTLETGVPSRFSGSGSGTDYTLTISSLQPEDFATYYCQQSWNTPWTFGQGTKLEIKRLEDLKNVFPPEVAVFEPSEAEISHTQKATLVCLATGFYPDHVELSWWVNGKEVHSGVSTDPQPLKEQPALNDSRYCLSSRLRVSATFWQNPRNHFRCQVQFYGLSENDEWTQDRAKPVTQIVSAEAWGRADCGSKGCQGSADHVVSISGVPLQLQPNSIQTKVDSIAWKKLLPSQNGFHHILKWENGSLPSNTSNDRFSFIVKNLSLLIKAAQQQDSGLYCLEVTSISGKVQTATFQVFVFDKVEKPRLQGQGKILDRGRCQVALSCLVSRDGNVSYAWYRGSKLIQTAGNLTYLDEEVDINGTHTYTCNVSNPVSWESHTLNLTQDCQNAHQEFRFWPFLVIIVILSALFLGTLACFCVWRRKRKEKQSETSPKEFLTIYEDVKDLKTRRNHEQEQTFPGGGSTIYSMIQSQSSAPTSQEPAYTLYSLIQPSRKSGSRKRNHSPSFNSTIYEVIGKSQPKAQNPARLSRKELENFDVYSSTSRVKFSRSADAPAYQQGQNQLYNELNLGRREEYDVLDKRRGRDPEMGGKPQRRKNPQEGLYNELQKDKMAEAYSEIGMKGERRRGKGHDGLYQGLSTATKDTYDALHMQALPPRRAKRSGSGATNFSLLKQAGDVEENPGPMDWIWRILFLVGAATGAHSFEQVQLQQPGAELVKPGASVKMSCKASGYAFSSYWINWMKQKPGQGLEWIGQIYPGDGDTNYNGKFKGRATLTADTSSSTAYMQLSSLTSEDSAVYFCARSITTVVGCAMDYWGQGTSVTVSSTRIQNPDPAVYQLRDSKSSDKSVCLFTDFDSQTNVSQSKDSDVYITDKTVLDMRSMDFKSNSAVAWSNKSDFACANAFNNSIIPEDTFFPSPESSCGTKGCQGSADHVVSISGVPLQLQPNSIQTKVDSIAWKKLLPSQNGFHHILKWENGSLPSNTSNDRFSFIVKNLSLLIKAAQQQDSGLYCLEVTSISGKVQTATFQVFVFDKVEKPRLQGQGKILDRGRCQVALSCLVSRDGNVSYAWYRGSKLIQTAGNLTYLDEEVDINGTHTYTCNVSNPVSWESHTLNLTQDCQNAHQEFRFWPFLVIIVILSALFLGTLACFCVWRRKRKEKQSETSPKEFLTIYEDVKDLKTRRNHEQEQTFPGGGSTIYSMIQSQSSAPTSQEPAYTLYSLIQPSRKSGSRKRNHSPSFNSTIYEVIGKSQPKAQNPARLSRKELENFDVYSSSRRVKFSRSADAPAYQQGQNQLYNELNLGRREEYDVLDKRRGRDPEMGGKPQRRKNPQEGLYNELQKDKMAEAYSEIGMKGERRRGKGHDGLYQGLSTATKDTYDALHMQALPPRRAKRSGSGVKQTLNFDLLKLAGDVESNPGPGHMTEYKPTVRLATRDDVPRAVRTLAAAFADYPATRHTVDPDRHIERVTELQELFLTRVGLDIGKVWVADDGAAVAVWTTPESVEAGAVFAEIGPRMAELSGSRLAAQQQMEGLLAPHRPKEPAWFLATVGVSPDHQGKGLGSAVVLPGVEAAERAGVPAFLETSAPRNLPFYERLGFTVTADVEVPEGPRTWCMTRKPGA

SEQ ID NO: 6964 - protein, 1822 aa, Artificial Sequence
  Synthetic Polypeptide
MALPVTALLLPLALLLHAARPEVQLVESGGGLVQAGGSLRLSCAASGRTFSMGWFRQAPGKEREFVAAITYSGGSPYYADSVKGRFTISRDNAKNTVYLQMNSLKPEDTAVYYCAANPTYGSDWNAENWGQGTQVTVSSGTGGGGSGGGGSGGGGSEFDIQMTQSPSSLSASVGDRVTITCKASDHINNWLAWYQQKPGQAPKLLIYGATTLETGVPSRFSGSGSGTDYTLTISSLQPEDFATYYCQQSWNTPWTFGQGTKLEIKRLEDLKNVFPPEVAVFEPSEAEISHTQKATLVCLATGFYPDHVELSWWVNGKEVHSGVSTDPQPLKEQPALNDSRYCLSSRLRVSATFWQNPRNHFRCQVQFYGLSENDEWTQDRAKPVTQIVSAEAWGRADCGSKGCQGSADHVVSISGVPLQLQPNSIQTKVDSIAWKKLLPSQNGFHHILKWENGSLPSNTSNDRFSFIVKNLSLLIKAAQQQDSGLYCLEVTSISGKVQTATFQVFVFDKVEKPRLQGQGKILDRGRCQVALSCLVSRDGNVSYAWYRGSKLIQTAGNLTYLDEEVDINGTHTYTCNVSNPVSWESHTLNLTQDCQNAHQEFRFWPFLVIIVILSALFLGTLACFCVWRRKRKEKQSETSPKEFLTIYEDVKDLKTRRNHEQEQTFPGGGSTIYSMIQSQSSAPTSQEPAYTLYSLIQPSRKSGSRKRNHSPSFNSTIYEVIGKSQPKAQNPARLSRKELENFDVYSSTSRVKFSRSADAPAYQQGQNQLYNELNLGRREEYDVLDKRRGRDPEMGGKPQRRKNPQEGLYNELQKDKMAEAYSEIGMKGERRRGKGHDGLYQGLSTATKDTYDALHMQALPPRRAKRSGSGATNFSLLKQAGDVEENPGPMDWIWRILFLVGAATGAHSFEQVQLQQPGAELVKPGASVKMSCKASGYAFSSYWINWMKQKPGQGLEWIGQIYPGDGDTNYNGKFKGRATLTADTSSSTAYMQLSSLTSEDSAVYFCARSITTVVGCAMDYWGQGTSVTVSSTRIQNPDPAVYQLRDSKSSDKSVCLFTDFDSQTNVSQSKDSDVYITDKTVLDMRSMDFKSNSAVAWSNKSDFACANAFNNSIIPEDTFFPSPESSCGTKGCQGSADHVVSISGVPLQLQPNSIQTKVDSIAWKKLLPSQNGFHHILKWENGSLPSNTSNDRFSFIVKNLSLLIKAAQQQDSGLYCLEVTSISGKVQTATFQVFVFDKVEKPRLQGQGKILDRGRCQVALSCLVSRDGNVSYAWYRGSKLIQTAGNLTYLDEEVDINGTHTYTCNVSNPVSWESHTLNLTQDCQNAHQEFRFWPFLVIIVILSALFLGTLACFCVWRRKRKEKQSETSPKEFLTIYEDVKDLKTRRNHEQEQTFPGGGSTIYSMIQSQSSAPTSQEPAYTLYSLIQPSRKSGSRKRNHSPSFNSTIYEVIGKSQPKAQNPARLSRKELENFDVYSSSRRVKFSRSADAPAYQQGQNQLYNELNLGRREEYDVLDKRRGRDPEMGGKPQRRKNPQEGLYNELQKDKMAEAYSEIGMKGERRRGKGHDGLYQGLSTATKDTYDALHMQALPPRRAKRSGSGVKQTLNFDLLKLAGDVESNPGPGHMTEYKPTVRLATRDDVPRAVRTLAAAFADYPATRHTVDPDRHIERVTELQELFLTRVGLDIGKVWVADDGAAVAVWTTPESVEAGAVFAEIGPRMAELSGSRLAAQQQMEGLLAPHRPKEPAWFLATVGVSPDHQGKGLGSAVVLPGVEAAERAGVPAFLETSAPRNLPFYERLGFTVTADVEVPEGPRTWCMTRKPGA

SEQ ID NO: 6965 - protein, 1959 aa, Artificial Sequence
  Synthetic Polypeptide
MALPVTALLLPLALLLHAARPEVQLVESGGGLVQAGGSLRLSCAASGRTFSMGWFRQAPGKEREFVAAITYSGGSPYYADSVKGRFTISRDNAKNTVYLQMNSLKPEDTAVYYCAANPTYGSDWNAENWGQGTQVTVSSGTGGGGSGGGGSGGGGSEFDIQMTQSPSSLSASVGDRVTITCKASDHINNWLAWYQQKPGQAPKLLIYGATTLETGVPSRFSGSGSGTDYTLTISSLQPEDFATYYCQQSWNTPWTFGQGTKLEIKRLEDLKNVFPPEVAVFEPSEAEISHTQKATLVCLATGFYPDHVELSWWVNGKEVHSGVSTDPQPLKEQPALNDSRYCLSSRLRVSATFWQNPRNHFRCQVQFYGLSENDEWTQDRAKPVTQIVSAEAWGRADCGSKGCQGSADHVVSISGVPLQLQPNSIQTKVDSIAWKKLLPSQNGFHHILKWENGSLPSNTSNDRFSFIVKNLSLLIKAAQQQDSGLYCLEVTSISGKVQTATFQVFVFDKVEKPRLQGQGKILDRGRCQVALSCLVSRDGNVSYAWYRGSKLIQTAGNLTYLDEEVDINGTHTYTCNVSNPVSWESHTLNLTQDCQNAHQEFRFWPFLVIIVILSALFLGTLACFCVWRRKRKEKQSETSPKEFLTIYEDVKDLKTRRNHEQEQTFPGGGSTIYSMIQSQSSAPTSQEPAYTLYSLIQPSRKSGSRKRNHSPSFNSTIYEVIGKSQPKAQNPARLSRKELENFDVYSSTSRVKFSRSADAPAYQQGQNQLYNELNLGRREEYDVLDKRRGRDPEMGGKPQRRKNPQEGLYNELQKDKMAEAYSEIGMKGERRRGKGHDGLYQGLSTATKDTYDALHMQALPPRRAKRSGSGATNFSLLKQAGDVEENPGPMDWIWRILFLVGAATGAHSGPEVQLVESGGGLVQAGGSLRLSCAASGRTFTMGWFRQAPGKEREFVAAISLSPTLAYYADSVKGRFTISRDNAKNTVVLQMNSLKPEDTALYYCAADRKSVMSIRPDYWGQGTQVTVSSGSGGGGSGGGGSGGGGSFEQVQLQQPGAELVKPGASVKMSCKASGYAFSSYWINWMKQKPGQGLEWIGQIYPGDGDTNYNGKFKGRATLTADTSSSTAYMQLSSLTSEDSAVYFCARSITTVVGCAMDYWGQGTSVTVSSTRIQNPDPAVYQLRDSKSSDKSVCLFTDFDSQTNVSQSKDSDVYITDKTVLDMRSMDFKSNSAVAWSNKSDFACANAFNNSIIPEDTFFPSPESSCGTKGCQGSADHVVSISGVPLQLQPNSIQTKVDSIAWKKLLPSQNGFHHILKWENGSLPSNTSNDRFSFIVKNLSLLIKAAQQQDSGLYCLEVTSISGKVQTATFQVFVFDKVEKPRLQGQGKILDRGRCQVALSCLVSRDGNVSYAWYRGSKLIQTAGNLTYLDEEVDINGTHTYTCNVSNPVSWESHTLNLTQDCQNAHQEFRFWPFLVIIVILSALFLGTLACFCVWRRKRKEKQSETSPKEFLTIYEDVKDLKTRRNHEQEQTFPGGGSTIYSMIQSQSSAPTSQEPAYTLYSLIQPSRKSGSRKRNHSPSFNSTIYEVIGKSQPKAQNPARLSRKELENFDVYSSSRRVKFSRSADAPAYQQGQNQLYNELNLGRREEYDVLDKRRGRDPEMGGKPQRRKNPQEGLYNELQKDKMAEAYSEIGMKGERRRGKGHDGLYQGLSTATKDTYDALHMQALPPRRAKRSGSGVKQTLNFDLLKLAGDVESNPGPGHMTEYKPTVRLATRDDVPRAVRTLAAAFADYPATRHTVDPDRHIERVTELQELFLTRVGLDIGKVWVADDGAAVAVWTTPESVEAGAVFAEIGPRMAELSGSRLAAQQQMEGLLAPHRPKEPAWFLATVGVSPDHQGKGLGSAVVLPGVEAAERAGVPAFLETSAPRNLPFYERLGFTVTADVEVPEGPRTWCMTRKPGA

SEQ ID NO: 6966 - protein, 1692 aa, Artificial Sequence
  Synthetic Polypeptide
MALPVTALLLPLALLLHAARPEVQLVESGGGLVQAGGSLRLSCAASGRTFSMGWFRQAPGKEREFVAAITYSGGSPYYADSVKGRFTISRDNAKNTVYLQMNSLKPEDTAVYYCAANPTYGSDWNAENWGQGTQVTVSSLEDLKNVFPPEVAVFEPSEAEISHTQKATLVCLATGFYPDHVELSWWVNGKEVHSGVSTDPQPLKEQPALNDSRYCLSSRLRVSATFWQNPRNHFRCQVQFYGLSENDEWTQDRAKPVTQIVSAEAWGRADCGSKGCQGSADHVVSISGVPLQLQPNSIQTKVDSIAWKKLLPSQNGFHHILKWENGSLPSNTSNDRFSFIVKNLSLLIKAAQQQDSGLYCLEVTSISGKVQTATFQVFVFDKVEKPRLQGQGKILDRGRCQVALSCLVSRDGNVSYAWYRGSKLIQTAGNLTYLDEEVDINGTHTYTCNVSNPVSWESHTLNLTQDCQNAHQEFRFWPFLVIIVILSALFLGTLACFCVWRRKRKEKQSETSPKEFLTIYEDVKDLKTRRNHEQEQTFPGGGSTIYSMIQSQSSAPTSQEPAYTLYSLIQPSRKSGSRKRNHSPSFNSTIYEVIGKSQPKAQNPARLSRKELENFDVYSSTSRVKFSRSADAPAYQQGQNQLYNELNLGRREEYDVLDKRRGRDPEMGGKPQRRKNPQEGLYNELQKDKMAEAYSEIGMKGERRRGKGHDGLYQGLSTATKDTYDALHMQALPPRRAKRSGSGATNFSLLKQAGDVEENPGPMDWIWRILFLVGAATGAHSGPEVQLVESGGGLVQAGGSLRLSCAASGRTFTMGWFRQAPGKEREFVAAISLSPTLAYYADSVKGRFTISRDNAKNTVVLQMNSLKPEDTALYYCAADRKSVMSIRPDYWGQGTQVTVSSTRIQNPDPAVYQLRDSKSSDKSVCLFTDFDSQTNVSQSKDSDVYITDKTVLDMRSMDFKSNSAVAWSNKSDFACANAFNNSIIPEDTFFPSPESSCGTKGCQGSADHVVSISGVPLQLQPNSIQTKVDSIAWKKLLPSQNGFHHILKWENGSLPSNTSNDRFSFIVKNLSLLIKAAQQQDSGLYCLEVTSISGKVQTATFQVFVFDKVEKPRLQGQGKILDRGRCQVALSCLVSRDGNVSYAWYRGSKLIQTAGNLTYLDEEVDINGTHTYTCNVSNPVSWESHTLNLTQDCQNAHQEFRFWPFLVIIVILSALFLGTLACFCVWRRKRKEKQSETSPKEFLTIYEDVKDLKTRRNHEQEQTFPGGGSTIYSMIQSQSSAPTSQEPAYTLYSLIQPSRKSGSRKRNHSPSFNSTIYEVIGKSQPKAQNPARLSRKELENFDVYSSSRRVKFSRSADAPAYQQGQNQLYNELNLGRREEYDVLDKRRGRDPEMGGKPQRRKNPQEGLYNELQKDKMAEAYSEIGMKGERRRGKGHDGLYQGLSTATKDTYDALHMQALPPRRAKRSGSGVKQTLNFDLLKLAGDVESNPGPGHMTEYKPTVRLATRDDVPRAVRTLAAAFADYPATRHTVDPDRHIERVTELQELFLTRVGLDIGKVWVADDGAAVAVWTTPESVEAGAVFAEIGPRMAELSGSRLAAQQQMEGLLAPHRPKEPAWFLATVGVSPDHQGKGLGSAVVLPGVEAAERAGVPAFLETSAPRNLPFYERLGFTVTADVEVPEGPRTWCMTRKPGA

SEQ ID NO: 6967 - protein, 857 aa, Artificial Sequence
  Synthetic Polypeptide
MALPVTALLLPLALLLHAARPACEVQLLESGGGLIQPGGSLRLSCAASGFTFSSHAMTWVRQAPGKGLEWVSAISGSGDYTHYADSVKGRFTISRDNSKNTVYLQMNSLRAEDSAVYYCAKDEDGGSLLGHRGQGTLVTVSSGTGGGGSGGGGSGGGGSEFGSLEKGCQGSADHVVSISGVPLQLQPNSIQTKVDSIAWKKLLPSQNGFHHILKWENGSLPSNTSNDRFSFIVKNLSLLIKAAQQQDSGLYCLEVTSISGKVQTATFQVFVFDKVEKPRLQGQGKILDRGRCQVALSCLVSRDGNVSYAWYRGSKLIQTAGNLTYLDEEVDINGTHTYTCNVSNPVSWESHTLNLTQDCQNAHQEFRFWPFLVIIVILSALFLGTLACFCVWRRKRKEKQSETSPKEFLTIYEDVKDLKTRRNHEQEQTFPGGGSTIYSMIQSQSSAPTSQEPAYTLYSLIQPSRKSGSRKRNHSPSFNSTIYEVIGKSQPKAQNPARLSRKELENFDVYSSTSRVKFSRSADAPAYQQGQNQLYNELNLGRREEYDVLDKRRGRDPEMGGKPQRRKNPQEGLYNELQKDKMAEAYSEIGMKGERRRGKGHDGLYQGLSTATKDTYDALHMQALPPRRAKRSGSGATNFSLLKQAGDVEENPGPTRGHMTEYKPTVRLATRDDVPRAVRTLAAAFADYPATRHTVDPDRHIERVTELQELFLTRVGLDIGKVWVADDGAAVAVWTTPESVEAGAVFAEIGPRMAELSGSRLAAQQQMEGLLAPHRPKEPAWFLATVGVSPDHQGKGLGSAVVLPGVEAAERAGVPAFLETSAPRNLPFYERLGFTVTADVEVPEGPRTWCMTRKPGA

SEQ ID NO: 6968 - protein, 729 aa, Artificial Sequence
  Synthetic Polypeptide
MALPVTALLLPLALLLHAARPDIQMTQSPSSLSASVGDRVTITCKASDHINNWLAWYQQKPGQAPKLLIYGATTLETGVPSRFSGSGSGTDYTLTISSLQPEDFATYYCQQSWNTPWTFGQGTKLEIKRGGGGSGGGGSGGGGSQVQLQQPGAELVKPGASVKMSCKASGYAFSSYWINWMKQKPGQGLEWIGQIYPGDGDTNYNGKFKGRATLTADTSSSTAYMQLSSLTSEDSAVYFCARSITTVVGCAMDYWGQGTSVTVSSTRKGCQGSADHVVSISGVPLQLQPNSIQTKVDSIAWKKLLPSQNGFHHILKWENGSLPSNTSNDRFSFIVKNLSLLIKAAQQQDSGLYCLEVTSISGKVQTATFQVFVFDKVEKPRLQGQGKILDRGRCQVALSCLVSRDGNVSYAWYRGSKLIQTAGNLTYLDEEVDINGTHTYTCNVSNPVSWESHTLNLTQDCQNAHQEFRFWPFLVIIVILSALFLGTLACFCVWRRKRKEKQSETSPKEFLTIYEDVKDLKTRRNHEQEQTFPGGGSTIYSMIQSQSSAPTSQEPAYTLYSLIQPSRKSGSRKRNHSPSFNSTIYEVIGKSQPKAQNPARLSRKELENFDVYSSTSRVKFSRSADAPAYQQGQNQLYNELNLGRREEYDVLDKRRGRDPEMGGKPQRRKNPQEGLYNELQKDKMAEAYSEIGMKGERRRGKGHDGLYQGLSTATKDTYDALHMQALPPR

SEQ ID NO: 6969 - protein, 729 aa, Artificial Sequence
  Synthetic Polypeptide
MALPVTALLLPLALLLHAARPEIVLTQSPATLSLSPGERATLSCRASQSVSSYLAWYQQKPGQAPRLLIYDASNRATGIPARFSGSGSGTDFTLTISSLEPEDFAVYYCQQRSNWPITFGQGTRLEIKGGGGSGGGGSGGGGSEVQLVESGGGLVQPGRSLRLSCAASGFTFNDYAMHWVRQAPGKGLEWVSTISWNSGSIGYADSVKGRFTISRDNAKKSLYLQMNSLRAEDTALYYCAKDIQYGNYYYGMDVWGQGTTVTVSSTRKGCQGSADHVVSISGVPLQLQPNSIQTKVDSIAWKKLLPSQNGFHHILKWENGSLPSNTSNDRFSFIVKNLSLLIKAAQQQDSGLYCLEVTSISGKVQTATFQVFVFDKVEKPRLQGQGKILDRGRCQVALSCLVSRDGNVSYAWYRGSKLIQTAGNLTYLDEEVDINGTHTYTCNVSNPVSWESHTLNLTQDCQNAHQEFRFWPFLVIIVILSALFLGTLACFCVWRRKRKEKQSETSPKEFLTIYEDVKDLKTRRNHEQEQTFPGGGSTIYSMIQSQSSAPTSQEPAYTLYSLIQPSRKSGSRKRNHSPSFNSTIYEVIGKSQPKAQNPARLSRKELENFDVYSSTSRVKFSRSADAPAYQQGQNQLYNELNLGRREEYDVLDKRRGRDPEMGGKPQRRKNPQEGLYNELQKDKMAEAYSEIGMKGERRRGKGHDGLYQGLSTATKDTYDALHMQALPPR

SEQ ID NO: 6970 - protein, 603 aa, Artificial Sequence
  Synthetic Polypeptide
MALPVTALLLPLALLLHAARPEVQLVESGGGLVQAGGSLRLSCAASGRTFSMGWFRQAPGKEREFVAAITYSGGSPYYADSVKGRFTISRDNAKNTVYLQMNSLKPEDTAVYYCAANPTYGSDWNAENWGQGTQVTVSSTRKGCQGSADHVVSISGVPLQLQPNSIQTKVDSIAWKKLLPSQNGFHHILKWENGSLPSNTSNDRFSFIVKNLSLLIKAAQQQDSGLYCLEVTSISGKVQTATFQVFVFDKVEKPRLQGQGKILDRGRCQVALSCLVSRDGNVSYAWYRGSKLIQTAGNLTYLDEEVDINGTHTYTCNVSNPVSWESHTLNLTQDCQNAHQEFRFWPFLVIIVILSALFLGTLACFCVWRRKRKEKQSETSPKEFLTIYEDVKDLKTRRNHEQEQTFPGGGSTIYSMIQSQSSAPTSQEPAYTLYSLIQPSRKSGSRKRNHSPSFNSTIYEVIGKSQPKAQNPARLSRKELENFDVYSSTSRVKFSRSADAPAYQQGQNQLYNELNLGRREEYDVLDKRRGRDPEMGGKPQRRKNPQEGLYNELQKDKMAEAYSEIGMKGERRRGKGHDGLYQGLSTATKDTYDALHMQALPPR

SEQ ID NO: 6971 - protein, 603 aa, Artificial Sequence
  Synthetic Polypeptide
MALPVTALLLPLALLLHAARPQLQLQESGPGLVKPSETLSLTCTVSGGSISSGDYYWGWIRQPPGKGLEWIGHIYYSGATYYNPSLKSRVTISVDTSRNQFSLKLSSVTAADTAVYYCTRDDSSNWRSRGQGTLVTVSSTRKGCQGSADHVVSISGVPLQLQPNSIQTKVDSIAWKKLLPSQNGFHHILKWENGSLPSNTSNDRFSFIVKNLSLLIKAAQQQDSGLYCLEVTSISGKVQTATFQVFVFDKVEKPRLQGQGKILDRGRCQVALSCLVSRDGNVSYAWYRGSKLIQTAGNLTYLDEEVDINGTHTYTCNVSNPVSWESHTLNLTQDCQNAHQEFRFWPFLVIIVILSALFLGTLACFCVWRRKRKEKQSETSPKEFLTIYEDVKDLKTRRNHEQEQTFPGGGSTIYSMIQSQSSAPTSQEPAYTLYSLIQPSRKSGSRKRNHSPSFNSTIYEVIGKSQPKAQNPARLSRKELENFDVYSSTSRVKFSRSADAPAYQQGQNQLYNELNLGRREEYDVLDKRRGRDPEMGGKPQRRKNPQEGLYNELQKDKMAEAYSEIGMKGERRRGKGHDGLYQGLSTATKDTYDALHMQALPPR

SEQ ID NO: 6972 - protein, 603 aa, Artificial Sequence
  Synthetic Polypeptide
MALPVTALLLPLALLLHAARPQLQLQESGPGLVKPSETLSLTCTVSGDSISSGDYYWGWIRQPPGKGLEWIGHIYYSGVTYYNPSLKSRVTISVDTSRNQFSLKLSSVTAADTAVYYCTREDSSNWRSRGQGTLVTVSSTRKGCQGSADHVVSISGVPLQLQPNSIQTKVDSIAWKKLLPSQNGFHHILKWENGSLPSNTSNDRFSFIVKNLSLLIKAAQQQDSGLYCLEVTSISGKVQTATFQVFVFDKVEKPRLQGQGKILDRGRCQVALSCLVSRDGNVSYAWYRGSKLIQTAGNLTYLDEEVDINGTHTYTCNVSNPVSWESHTLNLTQDCQNAHQEFRFWPFLVIIVILSALFLGTLACFCVWRRKRKEKQSETSPKEFLTIYEDVKDLKTRRNHEQEQTFPGGGSTIYSMIQSQSSAPTSQEPAYTLYSLIQPSRKSGSRKRNHSPSFNSTIYEVIGKSQPKAQNPARLSRKELENFDVYSSTSRVKFSRSADAPAYQQGQNQLYNELNLGRREEYDVLDKRRGRDPEMGGKPQRRKNPQEGLYNELQKDKMAEAYSEIGMKGERRRGKGHDGLYQGLSTATKDTYDALHMQALPPR

SEQ ID NO: 6973 - protein, 605 aa, Artificial Sequence
  Synthetic Polypeptide
MALPVTALLLPLALLLHAARPEVQLQESGGGLVQPGGSLRLSCAASGRTFSSLFMGWFRQAPGKERELVAAISRYSLYTYYADSVKGRFTISADNAKNAVYLQMNSLKPEDTAVYYCASKLEYTSNDYDSWGQGTQVTVSSTRKGCQGSADHVVSISGVPLQLQPNSIQTKVDSIAWKKLLPSQNGFHHILKWENGSLPSNTSNDRFSFIVKNLSLLIKAAQQQDSGLYCLEVTSISGKVQTATFQVFVFDKVEKPRLQGQGKILDRGRCQVALSCLVSRDGNVSYAWYRGSKLIQTAGNLTYLDEEVDINGTHTYTCNVSNPVSWESHTLNLTQDCQNAHQEFRFWPFLVIIVILSALFLGTLACFCVWRRKRKEKQSETSPKEFLTIYEDVKDLKTRRNHEQEQTFPGGGSTIYSMIQSQSSAPTSQEPAYTLYSLIQPSRKSGSRKRNHSPSFNSTIYEVIGKSQPKAQNPARLSRKELENFDVYSSTSRVKFSRSADAPAYQQGQNQLYNELNLGRREEYDVLDKRRGRDPEMGGKPQRRKNPQEGLYNELQKDKMAEAYSEIGMKGERRRGKGHDGLYQGLSTATKDTYDALHMQALPPR

SEQ ID NO: 6974 - protein, 613 aa, Artificial Sequence
  Synthetic Polypeptide
MALPVTALLLPLALLLHAARPEVQLVESGGGLVQPGGSLRLSCAASGFASDYYIIGWFRQAPGKEREGVSCISSRYANTNYADSVKGRFTISRDNAKNTVYLQMNSLKPEDTAVYYCAADTRRYTCPDIATMHRNFDSWGQGTLVTVSSTRKGCQGSADHVVSISGVPLQLQPNSIQTKVDSIAWKKLLPSQNGFHHILKWENGSLPSNTSNDRFSFIVKNLSLLIKAAQQQDSGLYCLEVTSISGKVQTATFQVFVFDKVEKPRLQGQGKILDRGRCQVALSCLVSRDGNVSYAWYRGSKLIQTAGNLTYLDEEVDINGTHTYTCNVSNPVSWESHTLNLTQDCQNAHQEFRFWPFLVIIVILSALFLGTLACFCVWRRKRKEKQSETSPKEFLTIYEDVKDLKTRRNHEQEQTFPGGGSTIYSMIQSQSSAPTSQEPAYTLYSLIQPSRKSGSRKRNHSPSFNSTIYEVIGKSQPKAQNPARLSRKELENFDVYSSTSRVKFSRSADAPAYQQGQNQLYNELNLGRREEYDVLDKRRGRDPEMGGKPQRRKNPQEGLYNELQKDKMAEAYSEIGMKGERRRGKGHDGLYQGLSTATKDTYDALHMQALPPR

SEQ ID NO: 6975 - protein, 609 aa, Artificial Sequence
  Synthetic Polypeptide
MALPVTALLLPLALLLHAARPEVQLVESGGSLVQPGGSLRLSCAASGFTFDDYAMSWVRQVPGKGLEWVSSINWSGTHTDYADSVKGRFTISRNNANNTLYLQMNSLKSEDTAVYYCAKNWRDAGTTWFEKSGSAGQGTQVTVSSTRKGCQGSADHVVSISGVPLQLQPNSIQTKVDSIAWKKLLPSQNGFHHILKWENGSLPSNTSNDRFSFIVKNLSLLIKAAQQQDSGLYCLEVTSISGKVQTATFQVFVFDKVEKPRLQGQGKILDRGRCQVALSCLVSRDGNVSYAWYRGSKLIQTAGNLTYLDEEVDINGTHTYTCNVSNPVSWESHTLNLTQDCQNAHQEFRFWPFLVIIVILSALFLGTLACFCVWRRKRKEKQSETSPKEFLTIYEDVKDLKTRRNHEQEQTFPGGGSTIYSMIQSQSSAPTSQEPAYTLYSLIQPSRKSGSRKRNHSPSFNSTIYEVIGKSQPKAQNPARLSRKELENFDVYSSTSRVKFSRSADAPAYQQGQNQLYNELNLGRREEYDVLDKRRGRDPEMGGKPQRRKNPQEGLYNELQKDKMAEAYSEIGMKGERRRGKGHDGLYQGLSTATKDTYDALHMQALPPR

SEQ ID NO: 6976 - protein, 604 aa, Artificial Sequence
  Synthetic Polypeptide
MALPVTALLLPLALLLHAARPEVQLVESGGGLVQPGGSLRLSCAASGFNIKDTCIGWVRRAPGKEEELVAKICKYSGHTRYADSVKGRFTISADTSKNTAYLQMNSLRAEDTAVYYCAAVSVRDGHYNYWGQGTTVTVSSTRKGCQGSADHVVSISGVPLQLQPNSIQTKVDSIAWKKLLPSQNGFHHILKWENGSLPSNTSNDRFSFIVKNLSLLIKAAQQQDSGLYCLEVTSISGKVQTATFQVFVFDKVEKPRLQGQGKILDRGRCQVALSCLVSRDGNVSYAWYRGSKLIQTAGNLTYLDEEVDINGTHTYTCNVSNPVSWESHTLNLTQDCQNAHQEFRFWPFLVIIVILSALFLGTLACFCVWRRKRKEKQSETSPKEFLTIYEDVKDLKTRRNHEQEQTFPGGGSTIYSMIQSQSSAPTSQEPAYTLYSLIQPSRKSGSRKRNHSPSFNSTIYEVIGKSQPKAQNPARLSRKELENFDVYSSTSRVKFSRSADAPAYQQGQNQLYNELNLGRREEYDVLDKRRGRDPEMGGKPQRRKNPQEGLYNELQKDKMAEAYSEIGMKGERRRGKGHDGLYQGLSTATKDTYDALHMQALPPR

SEQ ID NO: 6977 - protein, 609 aa, Artificial Sequence
  Synthetic Polypeptide
MALPVTALLLPLALLLHAARPGSDLGIKLLFAAAKGQDDEVRILLAAGADVNAKDFEGYTPLHVAAYDGHLEIVEVLLKAGADVNAKDSQGRTPLHEAAYSGHLEIVEVLLKAGADVNAQDDAGETPADLAAAWGHEDIAEVLQKTRKGCQGSADHVVSISGVPLQLQPNSIQTKVDSIAWKKLLPSQNGFHHILKWENGSLPSNTSNDRFSFIVKNLSLLIKAAQQQDSGLYCLEVTSISGKVQTATFQVFVFDKVEKPRLQGQGKILDRGRCQVALSCLVSRDGNVSYAWYRGSKLIQTAGNLTYLDEEVDINGTHTYTCNVSNPVSWESHTLNLTQDCQNAHQEFRFWPFLVIIVILSALFLGTLACFCVWRRKRKEKQSETSPKEFLTIYEDVKDLKTRRNHEQEQTFPGGGSTIYSMIQSQSSAPTSQEPAYTLYSLIQPSRKSGSRKRNHSPSFNSTIYEVIGKSQPKAQNPARLSRKELENFDVYSSTSRVKFSRSADAPAYQQGQNQLYNELNLGRREEYDVLDKRRGRDPEMGGKPQRRKNPQEGLYNELQKDKMAEAYSEIGMKGERRRGKGHDGLYQGLSTATKDTYDALHMQALPPR

SEQ ID NO: 6978 - protein, 543 aa, Artificial Sequence
  Synthetic Polypeptide
MALPVTALLLPLALLLHAARPVDNKFNKERYSAYYEIWQLPNLNVRQKAAFIGSLQDDPSQSANLLAEAKKLNDAQAPKTRKGCQGSADHVVSISGVPLQLQPNSIQTKVDSIAWKKLLPSQNGFHHILKWENGSLPSNTSNDRFSFIVKNLSLLIKAAQQQDSGLYCLEVTSISGKVQTATFQVFVFDKVEKPRLQGQGKILDRGRCQVALSCLVSRDGNVSYAWYRGSKLIQTAGNLTYLDEEVDINGTHTYTCNVSNPVSWESHTLNLTQDCQNAHQEFRFWPFLVIIVILSALFLGTLACFCVWRRKRKEKQSETSPKEFLTIYEDVKDLKTRRNHEQEQTFPGGGSTIYSMIQSQSSAPTSQEPAYTLYSLIQPSRKSGSRKRNHSPSFNSTIYEVIGKSQPKAQNPARLSRKELENFDVYSSTSRVKFSRSADAPAYQQGQNQLYNELNLGRREEYDVLDKRRGRDPEMGGKPQRRKNPQEGLYNELQKDKMAEAYSEIGMKGERRRGKGHDGLYQGLSTATKDTYDALHMQALPPR

SEQ ID NO: 6979 - protein, 574 aa, Artificial Sequence
  Synthetic Polypeptide
MALPVTALLLPLALLLHAARPLPAPKNLVVSRVTEDSARLSWTAPDAAFDSFAIGYWEWDDDGEAIVLTVPGSERSYDLTGLKPGTEYPVYIAGVKGGQWSFPLSAIFTTTRKGCQGSADHVVSISGVPLQLQPNSIQTKVDSIAWKKLLPSQNGFHHILKWENGSLPSNTSNDRFSFIVKNLSLLIKAAQQQDSGLYCLEVTSISGKVQTATFQVFVFDKVEKPRLQGQGKILDRGRCQVALSCLVSRDGNVSYAWYRGSKLIQTAGNLTYLDEEVDINGTHTYTCNVSNPVSWESHTLNLTQDCQNAHQEFRFWPFLVIIVILSALFLGTLACFCVWRRKRKEKQSETSPKEFLTIYEDVKDLKTRRNHEQEQTFPGGGSTIYSMIQSQSSAPTSQEPAYTLYSLIQPSRKSGSRKRNHSPSFNSTIYEVIGKSQPKAQNPARLSRKELENFDVYSSTSRVKFSRSADAPAYQQGQNQLYNELNLGRREEYDVLDKRRGRDPEMGGKPQRRKNPQEGLYNELQKDKMAEAYSEIGMKGERRRGKGHDGLYQGLSTATKDTYDALHMQALPPR

SEQ ID NO: 6980 - protein, 575 aa, Artificial Sequence
  Synthetic Polypeptide
MALPVTALLLPLALLLHAARPMLPAPKNLVVSRITEDSARLSWTAPDAAFDSFPIRYIETLIWGEAIWLDVPGSERSYDLTGLKPGTEYAVVITGVKGGRFSSPLVASFTTTRKGCQGSADHVVSISGVPLQLQPNSIQTKVDSIAWKKLLPSQNGFHHILKWENGSLPSNTSNDRFSFIVKNLSLLIKAAQQQDSGLYCLEVTSISGKVQTATFQVFVFDKVEKPRLQGQGKILDRGRCQVALSCLVSRDGNVSYAWYRGSKLIQTAGNLTYLDEEVDINGTHTYTCNVSNPVSWESHTLNLTQDCQNAHQEFRFWPFLVIIVILSALFLGTLACFCVWRRKRKEKQSETSPKEFLTIYEDVKDLKTRRNHEQEQTFPGGGSTIYSMIQSQSSAPTSQEPAYTLYSLIQPSRKSGSRKRNHSPSFNSTIYEVIGKSQPKAQNPARLSRKELENFDVYSSTSRVKFSRSADAPAYQQGQNQLYNELNLGRREEYDVLDKRRGRDPEMGGKPQRRKNPQEGLYNELQKDKMAEAYSEIGMKGERRRGKGHDGLYQGLSTATKDTYDALHMQALPPR

SEQ ID NO: 6981 - protein, 792 aa, Artificial Sequence
  Synthetic Polypeptide
MALPVTALLLPLALLLHAARPMALPVTALLLPLALLLHAARPLFNQEVQIPLTESYCGPCPKNWICYKNNCYQFFDESKNWYESQASCMSQNASLLKVYSKEDQDLLKLVKSYHWMGLVHIPTNGSWQWEDGSILSPNLLTIIEMQKGDCALYASSFKGYIENCSTPNTYICMQRTVGGGGSGGGGSGGGGSDLFNQEVQIPLTESYCGPCPKNWICYKNNCYQFFDESKNWYESQASCMSQNASLLKVYSKEDQDLLKLVKSYHWMGLVHIPTNGSWQWEDGSILSPNLLTIIEMQKGDCALYASSFKGYIENCSTPNTYICMQRTVTRKGCQGSADHVVSISGVPLQLQPNSIQTKVDSIAWKKLLPSQNGFHHILKWENGSLPSNTSNDRFSFIVKNLSLLIKAAQQQDSGLYCLEVTSISGKVQTATFQVFVFDKVEKPRLQGQGKILDRGRCQVALSCLVSRDGNVSYAWYRGSKLIQTAGNLTYLDEEVDINGTHTYTCNVSNPVSWESHTLNLTQDCQNAHQEFRFWPFLVIIVILSALFLGTLACFCVWRRKRKEKQSETSPKEFLTIYEDVKDLKTRRNHEQEQTFPGGGSTIYSMIQSQSSAPTSQEPAYTLYSLIQPSRKSGSRKRNHSPSFNSTIYEVIGKSQPKAQNPARLSRKELENFDVYSSTSRVKFSRSADAPAYQQGQNQLYNELNLGRREEYDVLDKRRGRDPEMGGKPQRRKNPQEGLYNELQKDKMAEAYSEIGMKGERRRGKGHDGLYQGLSTATKDTYDALHMQALPPR

SEQ ID NO: 6982 - protein, 672 aa, Artificial Sequence
  Synthetic Polypeptide
MALPVTALLLPLALLLHAARPMELTDLLLAAMLLAVARLTLSSPVAPACDPRLLNKLLRDSHLLHSRLSQCPDVDPLSIPVLLPAVDFSLGEWKTQTEQSKAQDILGAVSLLLEGVMAARGQLEPSCLSSLLGQLSGQVRLLLGALQGLLGTQLPLQGRTTAHKDPNALFLSLQQLLRGKVRFLLLVEGPTLCVRRTLPTTAVPSSTSTRKGCQGSADHVVSISGVPLQLQPNSIQTKVDSIAWKKLLPSQNGFHHILKWENGSLPSNTSNDRFSFIVKNLSLLIKAAQQQDSGLYCLEVTSISGKVQTATFQVFVFDKVEKPRLQGQGKILDRGRCQVALSCLVSRDGNVSYAWYRGSKLIQTAGNLTYLDEEVDINGTHTYTCNVSNPVSWESHTLNLTQDCQNAHQEFRFWPFLVIIVILSALFLGTLACFCVWRRKRKEKQSETSPKEFLTIYEDVKDLKTRRNHEQEQTFPGGGSTIYSMIQSQSSAPTSQEPAYTLYSLIQPSRKSGSRKRNHSPSFNSTIYEVIGKSQPKAQNPARLSRKELENFDVYSSTSRVKFSRSADAPAYQQGQNQLYNELNLGRREEYDVLDKRRGRDPEMGGKPQRRKNPQEGLYNELQKDKMAEAYSEIGMKGERRRGKGHDGLYQGLSTATKDTYDALHMQALPPR

SEQ ID NO: 6983 - protein, 538 aa, Artificial Sequence
  Synthetic Polypeptide
MALPVTALLLPLALLLHAARPMDPDLEIRAAFLRQRNTALRTEVAELEQEVQRLENEVSQYETRYGPLGGGKTRTRKGCQGSADHVVSISGVPLQLQPNSIQTKVDSIAWKKLLPSQNGFHHILKWENGSLPSNTSNDRFSFIVKNLSLLIKAAQQQDSGLYCLEVTSISGKVQTATFQVFVFDKVEKPRLQGQGKILDRGRCQVALSCLVSRDGNVSYAWYRGSKLIQTAGNLTYLDEEVDINGTHTYTCNVSNPVSWESHTLNLTQDCQNAHQEFRFWPFLVIIVILSALFLGTLACFCVWRRKRKEKQSETSPKEFLTIYEDVKDLKTRRNHEQEQTFPGGGSTIYSMIQSQSSAPTSQEPAYTLYSLIQPSRKSGSRKRNHSPSFNSTIYEVIGKSQPKAQNPARLSRKELENFDVYSSTSRVKFSRSADAPAYQQGQNQLYNELNLGRREEYDVLDKRRGRDPEMGGKPQRRKNPQEGLYNELQKDKMAEAYSEIGMKGERRRGKGHDGLYQGLSTATKDTYDALHMQALPPR

SEQ ID NO: 6984 - protein, 513 aa, Artificial Sequence
  Synthetic Polypeptide
MALPVTALLLPLALLLHAARPEVAALEKEVAALEKEVAALEKEVAALEKTRKGCQGSADHVVSISGVPLQLQPNSIQTKVDSIAWKKLLPSQNGFHHILKWENGSLPSNTSNDRFSFIVKNLSLLIKAAQQQDSGLYCLEVTSISGKVQTATFQVFVFDKVEKPRLQGQGKILDRGRCQVALSCLVSRDGNVSYAWYRGSKLIQTAGNLTYLDEEVDINGTHTYTCNVSNPVSWESHTLNLTQDCQNAHQEFRFWPFLVIIVILSALFLGTLACFCVWRRKRKEKQSETSPKEFLTIYEDVKDLKTRRNHEQEQTFPGGGSTIYSMIQSQSSAPTSQEPAYTLYSLIQPSRKSGSRKRNHSPSFNSTIYEVIGKSQPKAQNPARLSRKELENFDVYSSTSRVKFSRSADAPAYQQGQNQLYNELNLGRREEYDVLDKRRGRDPEMGGKPQRRKNPQEGLYNELQKDKMAEAYSEIGMKGERRRGKGHDGLYQGLSTATKDTYDALHMQALPPR

SEQ ID NO: 6985 - protein, 771 aa, Artificial Sequence
  Synthetic Polypeptide
MALPVTALLLPLALLLHAARPLFNQEVQIPLTESYCGPCPKNWICYKNNCYQFFDESKNWYESQASCMSQNASLLKVYSKEDQDLLKLVKSAHWMGLVHIPTNGSWQWEDGSILSPNLLTIIEMQKGDCALYASSFKGFIENCSTPNTYICMQRTVGGGGSGGGGSGGGGSDLFNQEVQIPLTESYCGPCPKNWICYKNNCYQFFDESKNWYESQASCMSQNASLLKVYSKEDQDLLKLVKSAHWMGLVHIPTNGSWQWEDGSILSPNLLTIIEMQKGDCALYASSFKGFIENCSTPNTYICMQRTVTRKGCQGSADHVVSISGVPLQLQPNSIQTKVDSIAWKKLLPSQNGFHHILKWENGSLPSNTSNDRFSFIVKNLSLLIKAAQQQDSGLYCLEVTSISGKVQTATFQVFVFDKVEKPRLQGQGKILDRGRCQVALSCLVSRDGNVSYAWYRGSKLIQTAGNLTYLDEEVDINGTHTYTCNVSNPVSWESHTLNLTQDCQNAHQEFRFWPFLVIIVILSALFLGTLACFCVWRRKRKEKQSETSPKEFLTIYEDVKDLKTRRNHEQEQTFPGGGSTIYSMIQSQSSAPTSQEPAYTLYSLIQPSRKSGSRKRNHSPSFNSTIYEVIGKSQPKAQNPARLSRKELENFDVYSSTSRVKFSRSADAPAYQQGQNQLYNELNLGRREEYDVLDKRRGRDPEMGGKPQRRKNPQEGLYNELQKDKMAEAYSEIGMKGERRRGKGHDGLYQGLSTATKDTYDALHMQALPPR

SEQ ID NO: 6986 - protein, 771 aa, Artificial Sequence
  Synthetic Polypeptide
MALPVTALLLPLALLLHAARPLFNQEVQIPLTESYCGPCPKNWICYKNNCYQFFDESKNWYESQASCMSQNASLLKVYSKEDQDLLKLVKSAHWMGLVHIPTNGSWQWEDGSILSPNLLTIIEMQKGDCALYASSFKGYIENCSTPNTYICMQRTVSGGGGSGGGGSGGGGDLFNQEVQIPLTESYCGPCPKNWICYKNNCYQFFDESKNWYESQASCMSQNASLLKVYSKEDQDLLKLVKSAHWMGLVHIPTNGSWQWEDGSILSPNLLTIIEMQKGDCALYASSFKGYIENCSTPNTYICMQRTVTRKGCQGSADHVVSISGVPLQLQPNSIQTKVDSIAWKKLLPSQNGFHHILKWENGSLPSNTSNDRFSFIVKNLSLLIKAAQQQDSGLYCLEVTSISGKVQTATFQVFVFDKVEKPRLQGQGKILDRGRCQVALSCLVSRDGNVSYAWYRGSKLIQTAGNLTYLDEEVDINGTHTYTCNVSNPVSWESHTLNLTQDCQNAHQEFRFWPFLVIIVILSALFLGTLACFCVWRRKRKEKQSETSPKEFLTIYEDVKDLKTRRNHEQEQTFPGGGSTIYSMIQSQSSAPTSQEPAYTLYSLIQPSRKSGSRKRNHSPSFNSTIYEVIGKSQPKAQNPARLSRKELENFDVYSSTSRVKFSRSADAPAYQQGQNQLYNELNLGRREEYDVLDKRRGRDPEMGGKPQRRKNPQEGLYNELQKDKMAEAYSEIGMKGERRRGKGHDGLYQGLSTATKDTYDALHMQALPPR

SEQ ID NO: 6987 - protein, 1107 aa, Artificial Sequence
  Synthetic Polypeptide
MALPVTALLLPLALLLHAARPDIQMTQSPSSLSASVGDRVTITCKASDHINNWLAWYQQKPGQAPKLLIYGATTLETGVPSRFSGSGSGTDYTLTISSLQPEDFATYYCQQSWNTPWTFGQGTKLEIKRLETTPGERSSLPAFYPGTSGSCSGCGSLSLPLLAGLVAADAVASLLIVGAVFLCARPRRSPAQEDGKVYINMPGRGSTSRVKFSRSADAPAYQQGQNQLYNELNLGRREEYDVLDKRRGRDPEMGGKPQRRKNPQEGLYNELQKDKMAEAYSEIGMKGERRRGKGHDGLYQGLSTATKDTYDALHMQALPPRRAKRSGSGATNFSLLKQAGDVEENPGPMDWIWRILFLVGAATGAHSFEQVQLQQPGAELVKPGASVKMSCKASGYAFSSYWINWMKQKPGQGLEWIGQIYPGDGDTNYNGKFKGRATLTADTSSSTAYMQLSSLTSEDSAVYFCARSITTVVGCAMDYWGQGTSVTVSSTRTPAAPPKAVLKLEPQWINVLQEDSVTLTCRGTHSPESDSIQWFHNGNLIPTHTQPSYRFKANNNDSGEYTCQTGQTSLSDPVHLTVLSEWLVLQTPHLEFQEGETIVLRCHSWKDKPLVKVTFFQNGKSKKFSRSDPNFSIPQANHSHSGDYHCTGNIGYTLYSSKPVTITVQAPSSSPMGIIVAVVTGIAVAAIVAAVVALIYCRKKRISALPGYPECREMGETLPEKPANPTNPDEADKVGAENTITYSLLMHPDALEEPDDQNRISSRRVKFSRSADAPAYQQGQNQLYNELNLGRREEYDVLDKRRGRDPEMGGKPQRRKNPQEGLYNELQKDKMAEAYSEIGMKGERRRGKGHDGLYQGLSTATKDTYDALHMQALPPRRAKRSGSGVKQTLNFDLLKLAGDVESNPGPGHMTEYKPTVRLATRDDVPRAVRTLAAAFADYPATRHTVDPDRHIERVTELQELFLTRVGLDIGKVWVADDGAAVAVWTTPESVEAGAVFAEIGPRMAELSGSRLAAQQQMEGLLAPHRPKEPAWFLATVGVSPDHQGKGLGSAVVLPGVEAAERAGVPAFLETSAPRNLPFYERLGFTVTADVEVPEGPRTWCMTRKPGA

SEQ ID NO: 6988 - protein, 1159 aa, Artificial Sequence
  Synthetic Polypeptide
MALPVTALLLPLALLLHAARPACEVQLLESGGGLIQPGGSLRLSCAASGFTFSSHAMTWVRQAPGKGLEWVSAISGSGDYTHYADSVKGRFTISRDNSKNTVYLQMNSLRAEDSAVYYCAKDEDGGSLLGHRGQGTLVTVSSGTGGGGSGGGGSGGGGSEFGSLETTPGERSSLPAFYPGTSGSCSGCGSLSLPLLAGLVAADAVASLLIVGAVFLCARPRRSPAQEDGKVYINMPGRGSTSRVKFSRSADAPAYQQGQNQLYNELNLGRREEYDVLDKRRGRDPEMGGKPQRRKNPQEGLYNELQKDKMAEAYSEIGMKGERRRGKGHDGLYQGLSTATKDTYDALHMQALPPRRAKRSGSGATNFSLLKQAGDVEENPGPMDWIWRILFLVGAATGAHSGPEVQLVESGGGLVQAGGSLRLSCAASGRTFSMGWFRQAPGKEREFVAAITYSGGSPYYADSVKGRFTISRDNAKNTVYLQMNSLKPEDTAVYYCAANPTYGSDWNAENWGQGTQVTVSSGSGGGGSGGGGSGGGGSFEGSTRTPAAPPKAVLKLEPQWINVLQEDSVTLTCRGTHSPESDSIQWFHNGNLIPTHTQPSYRFKANNNDSGEYTCQTGQTSLSDPVHLTVLSEWLVLQTPHLEFQEGETIVLRCHSWKDKPLVKVTFFQNGKSKKFSRSDPNFSIPQANHSHSGDYHCTGNIGYTLYSSKPVTITVQAPSSSPMGIIVAVVTGIAVAAIVAAVVALIYCRKKRISALPGYPECREMGETLPEKPANPTNPDEADKVGAENTITYSLLMHPDALEEPDDQNRISSRRVKFSRSADAPAYQQGQNQLYNELNLGRREEYDVLDKRRGRDPEMGGKPQRRKNPQEGLYNELQKDKMAEAYSEIGMKGERRRGKGHDGLYQGLSTATKDTYDALHMQALPPRRAKRSGSGVKQTLNFDLLKLAGDVESNPGPGHMTEYKPTVRLATRDDVPRAVRTLAAAFADYPATRHTVDPDRHIERVTELQELFLTRVGLDIGKVWVADDGAAVAVWTTPESVEAGAVFAEIGPRMAELSGSRLAAQQQMEGLLAPHRPKEPAWFLATVGVSPDHQGKGLGSAVVLPGVEAAERAGVPAFLETSAPRNLPFYERLGFTVTADVEVPEGPRTWCMTRKPGA

SEQ ID NO: 6989 - protein, 1309 aa, Artificial Sequence
  Synthetic Polypeptide
MALPVTALLLPLALLLHAARPDIQMTQSPSSLSASVGDRVTITCKASDHINNWLAWYQQKPGQAPKLLIYGATTLETGVPSRFSGSGSGTDYTLTISSLQPEDFATYYCQQSWNTPWTFGQGTKLEIKRLEGQPKANPTVTLFPPSSEELQANKATLVCLISDFYPGAVTVAWKADGSPVKAGVETTKPSKQSNNKYAASSYLSLTPEQWKSHRSYSCQVTHEGSTVEKTVAPTECSGSTTPGERSSLPAFYPGTSGSCSGCGSLSLPLLAGLVAADAVASLLIVGAVFLCARPRRSPAQEDGKVYINMPGRGSTSRVKFSRSADAPAYQQGQNQLYNELNLGRREEYDVLDKRRGRDPEMGGKPQRRKNPQEGLYNELQKDKMAEAYSEIGMKGERRRGKGHDGLYQGLSTATKDTYDALHMQALPPRRAKRSGSGATNFSLLKQAGDVEENPGPMDWIWRILFLVGAATGAHSFEQVQLQQPGAELVKPGASVKMSCKASGYAFSSYWINWMKQKPGQGLEWIGQIYPGDGDTNYNGKFKGRATLTADTSSSTAYMQLSSLTSEDSAVYFCARSITTVVGCAMDYWGQGTSVTVSSTRASTKGPSVFPLAPSSKSTSGGTAALGCLVKDYFPEPVTVSWNSGALTSGVHTFPAVLQSSGLYSLSSVVTVPSSSLGTQTYICNVNHKPSNTKVDKRVEPKSCGTTPAAPPKAVLKLEPQWINVLQEDSVTLTCRGTHSPESDSIQWFHNGNLIPTHTQPSYRFKANNNDSGEYTCQTGQTSLSDPVHLTVLSEWLVLQTPHLEFQEGETIVLRCHSWKDKPLVKVTFFQNGKSKKFSRSDPNFSIPQANHSHSGDYHCTGNIGYTLYSSKPVTITVQAPSSSPMGIIVAVVTGIAVAAIVAAVVALIYCRKKRISALPGYPECREMGETLPEKPANPTNPDEADKVGAENTITYSLLMHPDALEEPDDQNRISSRRVKFSRSADAPAYQQGQNQLYNELNLGRREEYDVLDKRRGRDPEMGGKPQRRKNPQEGLYNELQKDKMAEAYSEIGMKGERRRGKGHDGLYQGLSTATKDTYDALHMQALPPRRAKRSGSGVKQTLNFDLLKLAGDVESNPGPGHMATYEVLCEVARKLGTDDREVVLFLLNVFIPQPTLAQLIGALRALKEEGRLTFPLLAECLFRAGRRDLLRDLLHLDPRFLERHLAGTMSYFSPYQLTVLHVDGELCARDIRSLIFLSKDTIGSRSTPQTFLHWVYCMENLDLLGPTDVDALMSMLRSLSRVDLQRQVQTLMGLHLSGPSHSQHYRHTP

SEQ ID NO: 6990 - protein, 1362 aa, Artificial Sequence
  Synthetic Polypeptide
MALPVTALLLPLALLLHAARPDIQMTQSPSSLSASVGDRVTITCKASDHINNWLAWYQQKPGQAPKLLIYGATTLETGVPSRFSGSGSGTDYTLTISSLQPEDFATYYCQQSWNTPWTFGQGTKLEIKRLEGQPKANPTVTLFPPSSEELQANKATLVCLISDFYPGAVTVAWKADGSPVKAGVETTKPSKQSNNKYAASSYLSLTPEQWKSHRSYSCQVTHEGSTVEKTVAPTECSGSTTPGERSSLPAFYPGTSGSCSGCGSLSLPLLAGLVAADAVASLLIVGAVFLCARPRRSPAQEDGKVYINMPGRGSTSRVKFSRSADAPAYQQGQNQLYNELNLGRREEYDVLDKRRGRDPEMGGKPQRRKNPQEGLYNELQKDKMAEAYSEIGMKGERRRGKGHDGLYQGLSTATKDTYDALHMQALPPRRAKRSGSGATNFSLLKQAGDVEENPGPMDWIWRILFLVGAATGAHSFEQVQLQQPGAELVKPGASVKMSCKASGYAFSSYWINWMKQKPGQGLEWIGQIYPGDGDTNYNGKFKGRATLTADTSSSTAYMQLSSLTSEDSAVYFCARSITTVVGCAMDYWGQGTSVTVSSTRASTKGPSVFPLAPSSKSTSGGTAALGCLVKDYFPEPVTVSWNSGALTSGVHTFPAVLQSSGLYSLSSVVTVPSSSLGTQTYICNVNHKPSNTKVDKRVEPKSCGTTPAAPPKAVLKLEPQWINVLQEDSVTLTCRGTHSPESDSIQWFHNGNLIPTHTQPSYRFKANNNDSGEYTCQTGQTSLSDPVHLTVLSEWLVLQTPHLEFQEGETIVLRCHSWKDKPLVKVTFFQNGKSKKFSRSDPNFSIPQANHSHSGDYHCTGNIGYTLYSSKPVTITVQAPSSSPMGIIVAVVTGIAVAAIVAAVVALIYCRKKRISALPGYPECREMGETLPEKPANPTNPDEADKVGAENTITYSLLMHPDALEEPDDQNRISSRRVKFSRSADAPAYQQGQNQLYNELNLGRREEYDVLDKRRGRDPEMGGKPQRRKNPQEGLYNELQKDKMAEAYSEIGMKGERRRGKGHDGLYQGLSTATKDTYDALHMQALPPRRAKRSGSGVKQTLNFDLLKLAGDVESNPGPGHMSDSKEVPSLPFLRHLLEELDSHEDSLLLFLCHDAAPGCTTVTQALCSLSQQRKLTLAALVEMLYVLQRMDLLKSRFGLSKEGAEQLLGTSFLTRYRKLMVCVGEELDSSELRALRLFACNLNPSLSTALSESSRFVELVLALENVGLVSPSSVSVLADMLRTLRRLDLCQQLVEYEQQEQARYRYCYAASPSLPVRTLRRGHGASEHEQLCMPVQESSDSPELLRTPVQESSSDSPEQTT

SEQ ID NO: 6991 - protein, 1320 aa, Artificial Sequence
  Synthetic Polypeptide
MALPVTALLLPLALLLHAARPDIQMTQSPSSLSASVGDRVTITCKASDHINNWLAWYQQKPGQAPKLLIYGATTLETGVPSRFSGSGSGTDYTLTISSLQPEDFATYYCQQSWNTPWTFGQGTKLEIKRLEGQPKANPTVTLFPPSSEELQANKATLVCLISDFYPGAVTVAWKADGSPVKAGVETTKPSKQSNNKYAASSYLSLTPEQWKSHRSYSCQVTHEGSTVEKTVAPTECSGSTTPGERSSLPAFYPGTSGSCSGCGSLSLPLLAGLVAADAVASLLIVGAVFLCARPRRSPAQEDGKVYINMPGRGSTSRVKFSRSADAPAYQQGQNQLYNELNLGRREEYDVLDKRRGRDPEMGGKPQRRKNPQEGLYNELQKDKMAEAYSEIGMKGERRRGKGHDGLYQGLSTATKDTYDALHMQALPPRRAKRSGSGATNFSLLKQAGDVEENPGPMDWIWRILFLVGAATGAHSFEQVQLQQPGAELVKPGASVKMSCKASGYAFSSYWINWMKQKPGQGLEWIGQIYPGDGDTNYNGKFKGRATLTADTSSSTAYMQLSSLTSEDSAVYFCARSITTVVGCAMDYWGQGTSVTVSSTRASTKGPSVFPLAPSSKSTSGGTAALGCLVKDYFPEPVTVSWNSGALTSGVHTFPAVLQSSGLYSLSSVVTVPSSSLGTQTYICNVNHKPSNTKVDKRVEPKSCGTTPAAPPKAVLKLEPQWINVLQEDSVTLTCRGTHSPESDSIQWFHNGNLIPTHTQPSYRFKANNNDSGEYTCQTGQTSLSDPVHLTVLSEWLVLQTPHLEFQEGETIVLRCHSWKDKPLVKVTFFQNGKSKKFSRSDPNFSIPQANHSHSGDYHCTGNIGYTLYSSKPVTITVQAPSSSPMGIIVAVVTGIAVAAIVAAVVALIYCRKKRISALPGYPECREMGETLPEKPANPTNPDEADKVGAENTITYSLLMHPDALEEPDDQNRISSRRVKFSRSADAPAYQQGQNQLYNELNLGRREEYDVLDKRRGRDPEMGGKPQRRKNPQEGLYNELQKDKMAEAYSEIGMKGERRRGKGHDGLYQGLSTATKDTYDALHMQALPPRRAKRSGSGVKQTLNFDLLKLAGDVESNPGPGHMTEYKPTVRLATRDDVPRAVRTLAAAFADYPATRHTVDPDRHIERVTELQELFLTRVGLDIGKVWVADDGAAVAVWTTPESVEAGAVFAEIGPRMAELSGSRLAAQQQMEGLLAPHRPKEPAWFLATVGVSPDHQGKGLGSAVVLPGVEAAERAGVPAFLETSAPRNLPFYERLGFTVTADVEVPEGPRTWCMTRKPGA

SEQ ID NO: 6992 - protein, 1457 aa, Artificial Sequence
  Synthetic Polypeptide
MALPVTALLLPLALLLHAARPEVQLVESGGGLVQAGGSLRLSCAASGRTFSMGWFRQAPGKEREFVAAITYSGGSPYYADSVKGRFTISRDNAKNTVYLQMNSLKPEDTAVYYCAANPTYGSDWNAENWGQGTQVTVSSGTGGGGSGGGGSGGGGSEFDIQMTQSPSSLSASVGDRVTITCKASDHINNWLAWYQQKPGQAPKLLIYGATTLETGVPSRFSGSGSGTDYTLTISSLQPEDFATYYCQQSWNTPWTFGQGTKLEIKRLEGQPKANPTVTLFPPSSEELQANKATLVCLISDFYPGAVTVAWKADGSPVKAGVETTKPSKQSNNKYAASSYLSLTPEQWKSHRSYSCQVTHEGSTVEKTVAPTECSGSTTPGERSSLPAFYPGTSGSCSGCGSLSLPLLAGLVAADAVASLLIVGAVFLCARPRRSPAQEDGKVYINMPGRGSTSRVKFSRSADAPAYQQGQNQLYNELNLGRREEYDVLDKRRGRDPEMGGKPQRRKNPQEGLYNELQKDKMAEAYSEIGMKGERRRGKGHDGLYQGLSTATKDTYDALHMQALPPRRAKRSGSGATNFSLLKQAGDVEENPGPMDWIWRILFLVGAATGAHSFEQVQLQQPGAELVKPGASVKMSCKASGYAFSSYWINWMKQKPGQGLEWIGQIYPGDGDTNYNGKFKGRATLTADTSSSTAYMQLSSLTSEDSAVYFCARSITTVVGCAMDYWGQGTSVTVSSTRASTKGPSVFPLAPSSKSTSGGTAALGCLVKDYFPEPVTVSWNSGALTSGVHTFPAVLQSSGLYSLSSVVTVPSSSLGTQTYICNVNHKPSNTKVDKRVEPKSCGTTPAAPPKAVLKLEPQWINVLQEDSVTLTCRGTHSPESDSIQWFHNGNLIPTHTQPSYRFKANNNDSGEYTCQTGQTSLSDPVHLTVLSEWLVLQTPHLEFQEGETIVLRCHSWKDKPLVKVTFFQNGKSKKFSRSDPNFSIPQANHSHSGDYHCTGNIGYTLYSSKPVTITVQAPSSSPMGIIVAVVTGIAVAAIVAAVVALIYCRKKRISALPGYPECREMGETLPEKPANPTNPDEADKVGAENTITYSLLMHPDALEEPDDQNRISSRRVKFSRSADAPAYQQGQNQLYNELNLGRREEYDVLDKRRGRDPEMGGKPQRRKNPQEGLYNELQKDKMAEAYSEIGMKGERRRGKGHDGLYQGLSTATKDTYDALHMQALPPRRAKRSGSGVKQTLNFDLLKLAGDVESNPGPGHMTEYKPTVRLATRDDVPRAVRTLAAAFADYPATRHTVDPDRHIERVTELQELFLTRVGLDIGKVWVADDGAAVAVWTTPESVEAGAVFAEIGPRMAELSGSRLAAQQQMEGLLAPHRPKEPAWFLATVGVSPDHQGKGLGSAVVLPGVEAAERAGVPAFLETSAPRNLPFYERLGFTVTADVEVPEGPRTWCMTRKPGA

SEQ ID NO: 6993 - protein, 1594 aa, Artificial Sequence
  Synthetic Polypeptide
MALPVTALLLPLALLLHAARPEVQLVESGGGLVQAGGSLRLSCAASGRTFSMGWFRQAPGKEREFVAAITYSGGSPYYADSVKGRFTISRDNAKNTVYLQMNSLKPEDTAVYYCAANPTYGSDWNAENWGQGTQVTVSSGTGGGGSGGGGSGGGGSEFDIQMTQSPSSLSASVGDRVTITCKASDHINNWLAWYQQKPGQAPKLLIYGATTLETGVPSRFSGSGSGTDYTLTISSLQPEDFATYYCQQSWNTPWTFGQGTKLEIKRLEGQPKANPTVTLFPPSSEELQANKATLVCLISDFYPGAVTVAWKADGSPVKAGVETTKPSKQSNNKYAASSYLSLTPEQWKSHRSYSCQVTHEGSTVEKTVAPTECSGSTTPGERSSLPAFYPGTSGSCSGCGSLSLPLLAGLVAADAVASLLIVGAVFLCARPRRSPAQEDGKVYINMPGRGSTSRVKFSRSADAPAYQQGQNQLYNELNLGRREEYDVLDKRRGRDPEMGGKPQRRKNPQEGLYNELQKDKMAEAYSEIGMKGERRRGKGHDGLYQGLSTATKDTYDALHMQALPPRRAKRSGSGATNFSLLKQAGDVEENPGPMDWIWRILFLVGAATGAHSGPEVQLVESGGGLVQAGGSLRLSCAASGRTFTMGWFRQAPGKEREFVAAISLSPTLAYYADSVKGRFTISRDNAKNTVVLQMNSLKPEDTALYYCAADRKSVMSIRPDYWGQGTQVTVSSGSGGGGSGGGGSGGGGSFEQVQLQQPGAELVKPGASVKMSCKASGYAFSSYWINWMKQKPGQGLEWIGQIYPGDGDTNYNGKFKGRATLTADTSSSTAYMQLSSLTSEDSAVYFCARSITTVVGCAMDYWGQGTSVTVSSTRASTKGPSVFPLAPSSKSTSGGTAALGCLVKDYFPEPVTVSWNSGALTSGVHTFPAVLQSSGLYSLSSVVTVPSSSLGTQTYICNVNHKPSNTKVDKRVEPKSCGTTPAAPPKAVLKLEPQWINVLQEDSVTLTCRGTHSPESDSIQWFHNGNLIPTHTQPSYRFKANNNDSGEYTCQTGQTSLSDPVHLTVLSEWLVLQTPHLEFQEGETIVLRCHSWKDKPLVKVTFFQNGKSKKFSRSDPNFSIPQANHSHSGDYHCTGNIGYTLYSSKPVTITVQAPSSSPMGIIVAVVTGIAVAAIVAAVVALIYCRKKRISALPGYPECREMGETLPEKPANPTNPDEADKVGAENTITYSLLMHPDALEEPDDQNRISSRRVKFSRSADAPAYQQGQNQLYNELNLGRREEYDVLDKRRGRDPEMGGKPQRRKNPQEGLYNELQKDKMAEAYSEIGMKGERRRGKGHDGLYQGLSTATKDTYDALHMQALPPRRAKRSGSGVKQTLNFDLLKLAGDVESNPGPGHMTEYKPTVRLATRDDVPRAVRTLAAAFADYPATRHTVDPDRHIERVTELQELFLTRVGLDIGKVWVADDGAAVAVWTTPESVEAGAVFAEIGPRMAELSGSRLAAQQQMEGLLAPHRPKEPAWFLATVGVSPDHQGKGLGSAVVLPGVEAAERAGVPAFLETSAPRNLPFYERLGFTVTADVEVPEGPRTWCMTRKPGA

SEQ ID NO: 6994 - protein, 1327 aa, Artificial Sequence
  Synthetic Polypeptide
MALPVTALLLPLALLLHAARPEVQLVESGGGLVQAGGSLRLSCAASGRTFSMGWFRQAPGKEREFVAAITYSGGSPYYADSVKGRFTISRDNAKNTVYLQMNSLKPEDTAVYYCAANPTYGSDWNAENWGQGTQVTVSSLEGQPKANPTVTLFPPSSEELQANKATLVCLISDFYPGAVTVAWKADGSPVKAGVETTKPSKQSNNKYAASSYLSLTPEQWKSHRSYSCQVTHEGSTVEKTVAPTECSGSTTPGERSSLPAFYPGTSGSCSGCGSLSLPLLAGLVAADAVASLLIVGAVFLCARPRRSPAQEDGKVYINMPGRGSTSRVKFSRSADAPAYQQGQNQLYNELNLGRREEYDVLDKRRGRDPEMGGKPQRRKNPQEGLYNELQKDKMAEAYSEIGMKGERRRGKGHDGLYQGLSTATKDTYDALHMQALPPRRAKRSGSGATNFSLLKQAGDVEENPGPMDWIWRILFLVGAATGAHSGPEVQLVESGGGLVQAGGSLRLSCAASGRTFTMGWFRQAPGKEREFVAAISLSPTLAYYADSVKGRFTISRDNAKNTVVLQMNSLKPEDTALYYCAADRKSVMSIRPDYWGQGTQVTVSSTRASTKGPSVFPLAPSSKSTSGGTAALGCLVKDYFPEPVTVSWNSGALTSGVHTFPAVLQSSGLYSLSSVVTVPSSSLGTQTYICNVNHKPSNTKVDKRVEPKSCGTTPAAPPKAVLKLEPQWINVLQEDSVTLTCRGTHSPESDSIQWFHNGNLIPTHTQPSYRFKANNNDSGEYTCQTGQTSLSDPVHLTVLSEWLVLQTPHLEFQEGETIVLRCHSWKDKPLVKVTFFQNGKSKKFSRSDPNFSIPQANHSHSGDYHCTGNIGYTLYSSKPVTITVQAPSSSPMGIIVAVVTGIAVAAIVAAVVALIYCRKKRISALPGYPECREMGETLPEKPANPTNPDEADKVGAENTITYSLLMHPDALEEPDDQNRISSRRVKFSRSADAPAYQQGQNQLYNELNLGRREEYDVLDKRRGRDPEMGGKPQRRKNPQEGLYNELQKDKMAEAYSEIGMKGERRRGKGHDGLYQGLSTATKDTYDALHMQALPPRRAKRSGSGVKQTLNFDLLKLAGDVESNPGPGHMTEYKPTVRLATRDDVPRAVRTLAAAFADYPATRHTVDPDRHIERVTELQELFLTRVGLDIGKVWVADDGAAVAVWTTPESVEAGAVFAEIGPRMAELSGSRLAAQQQMEGLLAPHRPKEPAWFLATVGVSPDHQGKGLGSAVVLPGVEAAERAGVPAFLETSAPRNLPFYERLGFTVTADVEVPEGPRTWCMTRKPGA

SEQ ID NO: 6995 - protein, 1335 aa, Artificial Sequence
  Synthetic Polypeptide
MALPVTALLLPLALLLHAARPDIQMTQSPSSLSASVGDRVTITCKASDHINNWLAWYQQKPGQAPKLLIYGATTLETGVPSRFSGSGSGTDYTLTISSLQPEDFATYYCQQSWNTPWTFGQGTKLEIKRLEDLKNVFPPEVAVFEPSEAEISHTQKATLVCLATGFYPDHVELSWWVNGKEVHSGVSTDPQPLKEQPALNDSRYCLSSRLRVSATFWQNPRNHFRCQVQFYGLSENDEWTQDRAKPVTQIVSAEAWGRADCGSTTPGERSSLPAFYPGTSGSCSGCGSLSLPLLAGLVAADAVASLLIVGAVFLCARPRRSPAQEDGKVYINMPGRGSTSRVKFSRSADAPAYQQGQNQLYNELNLGRREEYDVLDKRRGRDPEMGGKPQRRKNPQEGLYNELQKDKMAEAYSEIGMKGERRRGKGHDGLYQGLSTATKDTYDALHMQALPPRRAKRSGSGATNFSLLKQAGDVEENPGPMDWIWRILFLVGAATGAHSFEQVQLQQPGAELVKPGASVKMSCKASGYAFSSYWINWMKQKPGQGLEWIGQIYPGDGDTNYNGKFKGRATLTADTSSSTAYMQLSSLTSEDSAVYFCARSITTVVGCAMDYWGQGTSVTVSSTRIQNPDPAVYQLRDSKSSDKSVCLFTDFDSQTNVSQSKDSDVYITDKTVLDMRSMDFKSNSAVAWSNKSDFACANAFNNSIIPEDTFFPSPESSCGTTPAAPPKAVLKLEPQWINVLQEDSVTLTCRGTHSPESDSIQWFHNGNLIPTHTQPSYRFKANNNDSGEYTCQTGQTSLSDPVHLTVLSEWLVLQTPHLEFQEGETIVLRCHSWKDKPLVKVTFFQNGKSKKFSRSDPNFSIPQANHSHSGDYHCTGNIGYTLYSSKPVTITVQAPSSSPMGIIVAVVTGIAVAAIVAAVVALIYCRKKRISALPGYPECREMGETLPEKPANPTNPDEADKVGAENTITYSLLMHPDALEEPDDQNRISSRRVKFSRSADAPAYQQGQNQLYNELNLGRREEYDVLDKRRGRDPEMGGKPQRRKNPQEGLYNELQKDKMAEAYSEIGMKGERRRGKGHDGLYQGLSTATKDTYDALHMQALPPRRAKRSGSGVKQTLNFDLLKLAGDVESNPGPGHMTEYKPTVRLATRDDVPRAVRTLAAAFADYPATRHTVDPDRHIERVTELQELFLTRVGLDIGKVWVADDGAAVAVWTTPESVEAGAVFAEIGPRMAELSGSRLAAQQQMEGLLAPHRPKEPAWFLATVGVSPDHQGKGLGSAVVLPGVEAAERAGVPAFLETSAPRNLPFYERLGFTVTADVEVPEGPRTWCMTRKPGA

SEQ ID NO: 6996 - protein, 1472 aa, Artificial Sequence
  Synthetic Polypeptide
MALPVTALLLPLALLLHAARPEVQLVESGGGLVQAGGSLRLSCAASGRTFSMGWFRQAPGKEREFVAAITYSGGSPYYADSVKGRFTISRDNAKNTVYLQMNSLKPEDTAVYYCAANPTYGSDWNAENWGQGTQVTVSSGTGGGGSGGGGSGGGGSEFDIQMTQSPSSLSASVGDRVTITCKASDHINNWLAWYQQKPGQAPKLLIYGATTLETGVPSRFSGSGSGTDYTLTISSLQPEDFATYYCQQSWNTPWTFGQGTKLEIKRLEDLKNVFPPEVAVFEPSEAEISHTQKATLVCLATGFYPDHVELSWWVNGKEVHSGVSTDPQPLKEQPALNDSRYCLSSRLRVSATFWQNPRNHFRCQVQFYGLSENDEWTQDRAKPVTQIVSAEAWGRADCGSTTPGERSSLPAFYPGTSGSCSGCGSLSLPLLAGLVAADAVASLLIVGAVFLCARPRRSPAQEDGKVYINMPGRGSTSRVKFSRSADAPAYQQGQNQLYNELNLGRREEYDVLDKRRGRDPEMGGKPQRRKNPQEGLYNELQKDKMAEAYSEIGMKGERRRGKGHDGLYQGLSTATKDTYDALHMQALPPRRAKRSGSGATNFSLLKQAGDVEENPGPMDWIWRILFLVGAATGAHSFEQVQLQQPGAELVKPGASVKMSCKASGYAFSSYWINWMKQKPGQGLEWIGQIYPGDGDTNYNGKFKGRATLTADTSSSTAYMQLSSLTSEDSAVYFCARSITTVVGCAMDYWGQGTSVTVSSTRIQNPDPAVYQLRDSKSSDKSVCLFTDFDSQTNVSQSKDSDVYITDKTVLDMRSMDFKSNSAVAWSNKSDFACANAFNNSIIPEDTFFPSPESSCGTTPAAPPKAVLKLEPQWINVLQEDSVTLTCRGTHSPESDSIQWFHNGNLIPTHTQPSYRFKANNNDSGEYTCQTGQTSLSDPVHLTVLSEWLVLQTPHLEFQEGETIVLRCHSWKDKPLVKVTFFQNGKSKKFSRSDPNFSIPQANHSHSGDYHCTGNIGYTLYSSKPVTITVQAPSSSPMGIIVAVVTGIAVAAIVAAVVALIYCRKKRISALPGYPECREMGETLPEKPANPTNPDEADKVGAENTITYSLLMHPDALEEPDDQNRISSRRVKFSRSADAPAYQQGQNQLYNELNLGRREEYDVLDKRRGRDPEMGGKPQRRKNPQEGLYNELQKDKMAEAYSEIGMKGERRRGKGHDGLYQGLSTATKDTYDALHMQALPPRRAKRSGSGVKQTLNFDLLKLAGDVESNPGPGHMTEYKPTVRLATRDDVPRAVRTLAAAFADYPATRHTVDPDRHIERVTELQELFLTRVGLDIGKVWVADDGAAVAVWTTPESVEAGAVFAEIGPRMAELSGSRLAAQQQMEGLLAPHRPKEPAWFLATVGVSPDHQGKGLGSAVVLPGVEAAERAGVPAFLETSAPRNLPFYERLGFTVTADVEVPEGPRTWCMTRKPGA

SEQ ID NO: 6997 - protein, 1609 aa, Artificial Sequence
  Synthetic Polypeptide
MALPVTALLLPLALLLHAARPEVQLVESGGGLVQAGGSLRLSCAASGRTFSMGWFRQAPGKEREFVAAITYSGGSPYYADSVKGRFTISRDNAKNTVYLQMNSLKPEDTAVYYCAANPTYGSDWNAENWGQGTQVTVSSGTGGGGSGGGGSGGGGSEFDIQMTQSPSSLSASVGDRVTITCKASDHINNWLAWYQQKPGQAPKLLIYGATTLETGVPSRFSGSGSGTDYTLTISSLQPEDFATYYCQQSWNTPWTFGQGTKLEIKRLEDLKNVFPPEVAVFEPSEAEISHTQKATLVCLATGFYPDHVELSWWVNGKEVHSGVSTDPQPLKEQPALNDSRYCLSSRLRVSATFWQNPRNHFRCQVQFYGLSENDEWTQDRAKPVTQIVSAEAWGRADCGSTTPGERSSLPAFYPGTSGSCSGCGSLSLPLLAGLVAADAVASLLIVGAVFLCARPRRSPAQEDGKVYINMPGRGSTSRVKFSRSADAPAYQQGQNQLYNELNLGRREEYDVLDKRRGRDPEMGGKPQRRKNPQEGLYNELQKDKMAEAYSEIGMKGERRRGKGHDGLYQGLSTATKDTYDALHMQALPPRRAKRSGSGATNFSLLKQAGDVEENPGPMDWIWRILFLVGAATGAHSGPEVQLVESGGGLVQAGGSLRLSCAASGRTFTMGWFRQAPGKEREFVAAISLSPTLAYYADSVKGRFTISRDNAKNTVVLQMNSLKPEDTALYYCAADRKSVMSIRPDYWGQGTQVTVSSGSGGGGSGGGGSGGGGSFEQVQLQQPGAELVKPGASVKMSCKASGYAFSSYWINWMKQKPGQGLEWIGQIYPGDGDTNYNGKFKGRATLTADTSSSTAYMQLSSLTSEDSAVYFCARSITTVVGCAMDYWGQGTSVTVSSTRIQNPDPAVYQLRDSKSSDKSVCLFTDFDSQTNVSQSKDSDVYITDKTVLDMRSMDFKSNSAVAWSNKSDFACANAFNNSIIPEDTFFPSPESSCGTTPAAPPKAVLKLEPQWINVLQEDSVTLTCRGTHSPESDSIQWFHNGNLIPTHTQPSYRFKANNNDSGEYTCQTGQTSLSDPVHLTVLSEWLVLQTPHLEFQEGETIVLRCHSWKDKPLVKVTFFQNGKSKKFSRSDPNFSIPQANHSHSGDYHCTGNIGYTLYSSKPVTITVQAPSSSPMGIIVAVVTGIAVAAIVAAVVALIYCRKKRISALPGYPECREMGETLPEKPANPTNPDEADKVGAENTITYSLLMHPDALEEPDDQNRISSRRVKFSRSADAPAYQQGQNQLYNELNLGRREEYDVLDKRRGRDPEMGGKPQRRKNPQEGLYNELQKDKMAEAYSEIGMKGERRRGKGHDGLYQGLSTATKDTYDALHMQALPPRRAKRSGSGVKQTLNFDLLKLAGDVESNPGPGHMTEYKPTVRLATRDDVPRAVRTLAAAFADYPATRHTVDPDRHIERVTELQELFLTRVGLDIGKVWVADDGAAVAVWTTPESVEAGAVFAEIGPRMAELSGSRLAAQQQMEGLLAPHRPKEPAWFLATVGVSPDHQGKGLGSAVVLPGVEAAERAGVPAFLETSAPRNLPFYERLGFTVTADVEVPEGPRTWCMTRKPGA

SEQ ID NO: 6998 - protein, 1342 aa, Artificial Sequence
  Synthetic Polypeptide
MALPVTALLLPLALLLHAARPEVQLVESGGGLVQAGGSLRLSCAASGRTFSMGWFRQAPGKEREFVAAITYSGGSPYYADSVKGRFTISRDNAKNTVYLQMNSLKPEDTAVYYCAANPTYGSDWNAENWGQGTQVTVSSLEDLKNVFPPEVAVFEPSEAEISHTQKATLVCLATGFYPDHVELSWWVNGKEVHSGVSTDPQPLKEQPALNDSRYCLSSRLRVSATFWQNPRNHFRCQVQFYGLSENDEWTQDRAKPVTQIVSAEAWGRADCGSTTPGERSSLPAFYPGTSGSCSGCGSLSLPLLAGLVAADAVASLLIVGAVFLCARPRRSPAQEDGKVYINMPGRGSTSRVKFSRSADAPAYQQGQNQLYNELNLGRREEYDVLDKRRGRDPEMGGKPQRRKNPQEGLYNELQKDKMAEAYSEIGMKGERRRGKGHDGLYQGLSTATKDTYDALHMQALPPRRAKRSGSGATNFSLLKQAGDVEENPGPMDWIWRILFLVGAATGAHSGPEVQLVESGGGLVQAGGSLRLSCAASGRTFTMGWFRQAPGKEREFVAAISLSPTLAYYADSVKGRFTISRDNAKNTVVLQMNSLKPEDTALYYCAADRKSVMSIRPDYWGQGTQVTVSSTRIQNPDPAVYQLRDSKSSDKSVCLFTDFDSQTNVSQSKDSDVYITDKTVLDMRSMDFKSNSAVAWSNKSDFACANAFNNSIIPEDTFFPSPESSCGTTPAAPPKAVLKLEPQWINVLQEDSVTLTCRGTHSPESDSIQWFHNGNLIPTHTQPSYRFKANNNDSGEYTCQTGQTSLSDPVHLTVLSEWLVLQTPHLEFQEGETIVLRCHSWKDKPLVKVTFFQNGKSKKFSRSDPNFSIPQANHSHSGDYHCTGNIGYTLYSSKPVTITVQAPSSSPMGIIVAVVTGIAVAAIVAAVVALIYCRKKRISALPGYPECREMGETLPEKPANPTNPDEADKVGAENTITYSLLMHPDALEEPDDQNRISSRRVKFSRSADAPAYQQGQNQLYNELNLGRREEYDVLDKRRGRDPEMGGKPQRRKNPQEGLYNELQKDKMAEAYSEIGMKGERRRGKGHDGLYQGLSTATKDTYDALHMQALPPRRAKRSGSGVKQTLNFDLLKLAGDVESNPGPGHMTEYKPTVRLATRDDVPRAVRTLAAAFADYPATRHTVDPDRHIERVTELQELFLTRVGLDIGKVWVADDGAAVAVWTTPESVEAGAVFAEIGPRMAELSGSRLAAQQQMEGLLAPHRPKEPAWFLATVGVSPDHQGKGLGSAVVLPGVEAAERAGVPAFLETSAPRNLPFYERLGFTVTADVEVPEGPRTWCMTRKPGA

SEQ ID NO: 6999 - protein, 585 aa, Artificial Sequence; identical to SEQ ID NO: 4431
  Synthetic Polypeptide

SEQ ID NO: 7000 - protein, 457 aa, Artificial Sequence; identical to SEQ ID NO: 6712
  Synthetic Polypeptide

SEQ ID NO: 7001 - protein, 457 aa, Artificial Sequence; identical to SEQ ID NO: 6713
  Synthetic Polypeptide

SEQ ID NO: 7002 - protein, 331 aa, Artificial Sequence; identical to SEQ ID NO: 6714
  Synthetic Polypeptide

SEQ ID NO: 7003 - protein, 331 aa, Artificial Sequence; identical to SEQ ID NO: 6715
  Synthetic Polypeptide

SEQ ID NO: 7004 - protein, 331 aa, Artificial Sequence; identical to SEQ ID NO: 6716
  Synthetic Polypeptide

SEQ ID NO: 7005 - protein, 333 aa, Artificial Sequence; identical to SEQ ID NO: 6717
  Synthetic Polypeptide

SEQ ID NO: 7006 - protein, 341 aa, Artificial Sequence; identical to SEQ ID NO: 6718
  Synthetic Polypeptide

SEQ ID NO: 7007 - protein, 337 aa, Artificial Sequence; identical to SEQ ID NO: 6719
  Synthetic Polypeptide

SEQ ID NO: 7008 - protein, 332 aa, Artificial Sequence; identical to SEQ ID NO: 6720
  Synthetic Polypeptide

SEQ ID NO: 7009 - protein, 337 aa, Artificial Sequence; identical to SEQ ID NO: 6721
  Synthetic Polypeptide

SEQ ID NO: 7010 - protein, 271 aa, Artificial Sequence; identical to SEQ ID NO: 6722
  Synthetic Polypeptide

SEQ ID NO: 7011 - protein, 302 aa, Artificial Sequence; identical to SEQ ID NO: 6723
  Synthetic Polypeptide

SEQ ID NO: 7012 - protein, 303 aa, Artificial Sequence; identical to SEQ ID NO: 6724
  Synthetic Polypeptide

SEQ ID NO: 7013 - protein, 520 aa, Artificial Sequence; identical to SEQ ID NO: 6725
  Synthetic Polypeptide

SEQ ID NO: 7014 - protein, 400 aa, Artificial Sequence; identical to SEQ ID NO: 6726
  Synthetic Polypeptide

SEQ ID NO: 7015 - protein, 266 aa, Artificial Sequence; identical to SEQ ID NO: 6727
  Synthetic Polypeptide

SEQ ID NO: 7016 - protein, 241 aa, Artificial Sequence; identical to SEQ ID NO: 6728
  Synthetic Polypeptide

SEQ ID NO: 7017 - protein, 499 aa, Artificial Sequence; identical to SEQ ID NO: 6729
  Synthetic Polypeptide

SEQ ID NO: 7018 - protein, 499 aa, Artificial Sequence; identical to SEQ ID NO: 6730
  Synthetic Polypeptide

SEQ ID NO: 7019 - protein, 1301 aa, Artificial Sequence
  Synthetic Polypeptide
MALPVTALLLPLALLLHAARPDIQMTQSPSSLSASVGDRVTITCKASDHINNWLAWYQQKPGQAPKLLIYGATTLETGVPSRFSGSGSGTDYTLTISSLQPEDFATYYCQQSWNTPWTFGQGTKLEIKRLETPAAPPKAVLKLEPQWINVLQEDSVTLTCRGTHSPESDSIQWFHNGNLIPTHTQPSYRFKANNNDSGEYTCQTGQTSLSDPVHLTVLSEWLVLQTPHLEFQEGETIVLRCHSWKDKPLVKVTFFQNGKSKKFSRSDPNFSIPQANHSHSGDYHCTGNIGYTLYSSKPVTITVQAPSSSPMGIIVAVVTGIAVAAIVAAVVALIYCRKKRISALPGYPECREMGETLPEKPANPTNPDEADKVGAENTITYSLLMHPDALEEPDDQNRISTSRVKFSRSADAPAYQQGQNQLYNELNLGRREEYDVLDKRRGRDPEMGGKPQRRKNPQEGLYNELQKDKMAEAYSEIGMKGERRRGKGHDGLYQGLSTATKDTYDALHMQALPPRRAKRSGSGATNFSLLKQAGDVEENPGPMDWIWRILFLVGAATGAHSFEQVQLQQPGAELVKPGASVKMSCKASGYAFSSYWINWMKQKPGQGLEWIGQIYPGDGDTNYNGKFKGRATLTADTSSSTAYMQLSSLTSEDSAVYFCARSITTVVGCAMDYWGQGTSVTVSSTRTPAAPPKAVLKLEPQWINVLQEDSVTLTCRGTHSPESDSIQWFHNGNLIPTHTQPSYRFKANNNDSGEYTCQTGQTSLSDPVHLTVLSEWLVLQTPHLEFQEGETIVLRCHSWKDKPLVKVTFFQNGKSKKFSRSDPNFSIPQANHSHSGDYHCTGNIGYTLYSSKPVTITVQAPSSSPMGIIVAVVTGIAVAAIVAAVVALIYCRKKRISALPGYPECREMGETLPEKPANPTNPDEADKVGAENTITYSLLMHPDALEEPDDQNRISSRRVKFSRSADAPAYQQGQNQLYNELNLGRREEYDVLDKRRGRDPEMGGKPQRRKNPQEGLYNELQKDKMAEAYSEIGMKGERRRGKGHDGLYQGLSTATKDTYDALHMQALPPRRAKRSGSGVKQTLNFDLLKLAGDVESNPGPGHMTEYKPTVRLATRDDVPRAVRTLAAAFADYPATRHTVDPDRHIERVTELQELFLTRVGLDIGKVWVADDGAAVAVWTTPESVEAGAVFAEIGPRMAELSGSRLAAQQQMEGLLAPHRPKEPAWFLATVGVSPDHQGKGLGSAVVLPGVEAAERAGVPAFLETSAPRNLPFYERLGFTVTADVEVPEGPRTWCMTRKPGA

SEQ ID NO: 7020 - protein, 1353 aa, Artificial Sequence
  Synthetic Polypeptide
MALPVTALLLPLALLLHAARPACEVQLLESGGGLIQPGGSLRLSCAASGFTFSSHAMTWVRQAPGKGLEWVSAISGSGDYTHYADSVKGRFTISRDNSKNTVYLQMNSLRAEDSAVYYCAKDEDGGSLLGHRGQGTLVTVSSGTGGGGSGGGGSGGGGSEFGSLETPAAPPKAVLKLEPQWINVLQEDSVTLTCRGTHSPESDSIQWFHNGNLIPTHTQPSYRFKANNNDSGEYTCQTGQTSLSDPVHLTVLSEWLVLQTPHLEFQEGETIVLRCHSWKDKPLVKVTFFQNGKSKKFSRSDPNFSIPQANHSHSGDYHCTGNIGYTLYSSKPVTITVQAPSSSPMGIIVAVVTGIAVAAIVAAVVALIYCRKKRISALPGYPECREMGETLPEKPANPTNPDEADKVGAENTITYSLLMHPDALEEPDDQNRISTSRVKFSRSADAPAYQQGQNQLYNELNLGRREEYDVLDKRRGRDPEMGGKPQRRKNPQEGLYNELQKDKMAEAYSEIGMKGERRRGKGHDGLYQGLSTATKDTYDALHMQALPPRRAKRSGSGATNFSLLKQAGDVEENPGPMDWIWRILFLVGAATGAHSGPEVQLVESGGGLVQAGGSLRLSCAASGRTFSMGWFRQAPGKEREFVAAITYSGGSPYYADSVKGRFTISRDNAKNTVYLQMNSLKPEDTAVYYCAANPTYGSDWNAENWGQGTQVTVSSGSGGGGSGGGGSGGGGSFEGSTRTPAAPPKAVLKLEPQWINVLQEDSVTLTCRGTHSPESDSIQWFHNGNLIPTHTQPSYRFKANNNDSGEYTCQTGQTSLSDPVHLTVLSEWLVLQTPHLEFQEGETIVLRCHSWKDKPLVKVTFFQNGKSKKFSRSDPNFSIPQANHSHSGDYHCTGNIGYTLYSSKPVTITVQAPSSSPMGIIVAVVTGIAVAAIVAAVVALIYCRKKRISALPGYPECREMGETLPEKPANPTNPDEADKVGAENTITYSLLMHPDALEEPDDQNRISSRRVKFSRSADAPAYQQGQNQLYNELNLGRREEYDVLDKRRGRDPEMGGKPQRRKNPQEGLYNELQKDKMAEAYSEIGMKGERRRGKGHDGLYQGLSTATKDTYDALHMQALPPRRAKRSGSGVKQTLNFDLLKLAGDVESNPGPGHMTEYKPTVRLATRDDVPRAVRTLAAAFADYPATRHTVDPDRHIERVTELQELFLTRVGLDIGKVWVADDGAAVAVWTTPESVEAGAVFAEIGPRMAELSGSRLAAQQQMEGLLAPHRPKEPAWFLATVGVSPDHQGKGLGSAVVLPGVEAAERAGVPAFLETSAPRNLPFYERLGFTVTADVEVPEGPRTWCMTRKPGA

SEQ ID NO: 7021 - protein, 1503 aa, Artificial Sequence
  Synthetic Polypeptide
MALPVTALLLPLALLLHAARPDIQMTQSPSSLSASVGDRVTITCKASDHINNWLAWYQQKPGQAPKLLIYGATTLETGVPSRFSGSGSGTDYTLTISSLQPEDFATYYCQQSWNTPWTFGQGTKLEIKRLEGQPKANPTVTLFPPSSEELQANKATLVCLISDFYPGAVTVAWKADGSPVKAGVETTKPSKQSNNKYAASSYLSLTPEQWKSHRSYSCQVTHEGSTVEKTVAPTECSGSTPAAPPKAVLKLEPQWINVLQEDSVTLTCRGTHSPESDSIQWFHNGNLIPTHTQPSYRFKANNNDSGEYTCQTGQTSLSDPVHLTVLSEWLVLQTPHLEFQEGETIVLRCHSWKDKPLVKVTFFQNGKSKKFSRSDPNFSIPQANHSHSGDYHCTGNIGYTLYSSKPVTITVQAPSSSPMGIIVAVVTGIAVAAIVAAVVALIYCRKKRISALPGYPECREMGETLPEKPANPTNPDEADKVGAENTITYSLLMHPDALEEPDDQNRISTSRVKFSRSADAPAYQQGQNQLYNELNLGRREEYDVLDKRRGRDPEMGGKPQRRKNPQEGLYNELQKDKMAEAYSEIGMKGERRRGKGHDGLYQGLSTATKDTYDALHMQALPPRRAKRSGSGATNFSLLKQAGDVEENPGPMDWIWRILFLVGAATGAHSFEQVQLQQPGAELVKPGASVKMSCKASGYAFSSYWINWMKQKPGQGLEWIGQIYPGDGDTNYNGKFKGRATLTADTSSSTAYMQLSSLTSEDSAVYFCARSITTVVGCAMDYWGQGTSVTVSSTRASTKGPSVFPLAPSSKSTSGGTAALGCLVKDYFPEPVTVSWNSGALTSGVHTFPAVLQSSGLYSLSSVVTVPSSSLGTQTYICNVNHKPSNTKVDKRVEPKSCGTTPAAPPKAVLKLEPQWINVLQEDSVTLTCRGTHSPESDSIQWFHNGNLIPTHTQPSYRFKANNNDSGEYTCQTGQTSLSDPVHLTVLSEWLVLQTPHLEFQEGETIVLRCHSWKDKPLVKVTFFQNGKSKKFSRSDPNFSIPQANHSHSGDYHCTGNIGYTLYSSKPVTITVQAPSSSPMGIIVAVVTGIAVAAIVAAVVALIYCRKKRISALPGYPECREMGETLPEKPANPTNPDEADKVGAENTITYSLLMHPDALEEPDDQNRISSRRVKFSRSADAPAYQQGQNQLYNELNLGRREEYDVLDKRRGRDPEMGGKPQRRKNPQEGLYNELQKDKMAEAYSEIGMKGERRRGKGHDGLYQGLSTATKDTYDALHMQALPPRRAKRSGSGVKQTLNFDLLKLAGDVESNPGPGHMATYEVLCEVARKLGTDDREVVLFLLNVFIPQPTLAQLIGALRALKEEGRLTFPLLAECLFRAGRRDLLRDLLHLDPRFLERHLAGTMSYFSPYQLTVLHVDGELCARDIRSLIFLSKDTIGSRSTPQTFLHWVYCMENLDLLGPTDVDALMSMLRSLSRVDLQRQVQTLMGLHLSGPSHSQHYRHTP

SEQ ID NO: 7022 - protein, 1556 aa, Artificial Sequence
  Synthetic Polypeptide
MALPVTALLLPLALLLHAARPDIQMTQSPSSLSASVGDRVTITCKASDHINNWLAWYQQKPGQAPKLLIYGATTLETGVPSRFSGSGSGTDYTLTISSLQPEDFATYYCQQSWNTPWTFGQGTKLEIKRLEGQPKANPTVTLFPPSSEELQANKATLVCLISDFYPGAVTVAWKADGSPVKAGVETTKPSKQSNNKYAASSYLSLTPEQWKSHRSYSCQVTHEGSTVEKTVAPTECSGSTPAAPPKAVLKLEPQWINVLQEDSVTLTCRGTHSPESDSIQWFHNGNLIPTHTQPSYRFKANNNDSGEYTCQTGQTSLSDPVHLTVLSEWLVLQTPHLEFQEGETIVLRCHSWKDKPLVKVTFFQNGKSKKFSRSDPNFSIPQANHSHSGDYHCTGNIGYTLYSSKPVTITVQAPSSSPMGIIVAVVTGIAVAAIVAAVVALIYCRKKRISALPGYPECREMGETLPEKPANPTNPDEADKVGAENTITYSLLMHPDALEEPDDQNRISTSRVKFSRSADAPAYQQGQNQLYNELNLGRREEYDVLDKRRGRDPEMGGKPQRRKNPQEGLYNELQKDKMAEAYSEIGMKGERRRGKGHDGLYQGLSTATKDTYDALHMQALPPRRAKRSGSGATNFSLLKQAGDVEENPGPMDWIWRILFLVGAATGAHSFEQVQLQQPGAELVKPGASVKMSCKASGYAFSSYWINWMKQKPGQGLEWIGQIYPGDGDTNYNGKFKGRATLTADTSSSTAYMQLSSLTSEDSAVYFCARSITTVVGCAMDYWGQGTSVTVSSTRASTKGPSVFPLAPSSKSTSGGTAALGCLVKDYFPEPVTVSWNSGALTSGVHTFPAVLQSSGLYSLSSVVTVPSSSLGTQTYICNVNHKPSNTKVDKRVEPKSCGTTPAAPPKAVLKLEPQWINVLQEDSVTLTCRGTHSPESDSIQWFHNGNLIPTHTQPSYRFKANNNDSGEYTCQTGQTSLSDPVHLTVLSEWLVLQTPHLEFQEGETIVLRCHSWKDKPLVKVTFFQNGKSKKFSRSDPNFSIPQANHSHSGDYHCTGNIGYTLYSSKPVTITVQAPSSSPMGIIVAVVTGIAVAAIVAAVVALIYCRKKRISALPGYPECREMGETLPEKPANPTNPDEADKVGAENTITYSLLMHPDALEEPDDQNRISSRRVKFSRSADAPAYQQGQNQLYNELNLGRREEYDVLDKRRGRDPEMGGKPQRRKNPQEGLYNELQKDKMAEAYSEIGMKGERRRGKGHDGLYQGLSTATKDTYDALHMQALPPRRAKRSGSGVKQTLNFDLLKLAGDVESNPGPGHMSDSKEVPSLPFLRHLLEELDSHEDSLLLFLCHDAAPGCTTVTQALCSLSQQRKLTLAALVEMLYVLQRMDLLKSRFGLSKEGAEQLLGTSFLTRYRKLMVCVGEELDSSELRALRLFACNLNPSLSTALSESSRFVELVLALENVGLVSPSSVSVLADMLRTLRRLDLCQQLVEYEQQEQARYRYCYAASPSLPVRTLRRGHGASEHEQLCMPVQESSDSPELLRTPVQESSSDSPEQTT

SEQ ID NO: 7023 - protein, 1514 aa, Artificial Sequence
  Synthetic Polypeptide
MALPVTALLLPLALLLHAARPDIQMTQSPSSLSASVGDRVTITCKASDHINNWLAWYQQKPGQAPKLLIYGATTLETGVPSRFSGSGSGTDYTLTISSLQPEDFATYYCQQSWNTPWTFGQGTKLEIKRLEGQPKANPTVTLFPPSSEELQANKATLVCLISDFYPGAVTVAWKADGSPVKAGVETTKPSKQSNNKYAASSYLSLTPEQWKSHRSYSCQVTHEGSTVEKTVAPTECSGSTPAAPPKAVLKLEPQWINVLQEDSVTLTCRGTHSPESDSIQWFHNGNLIPTHTQPSYRFKANNNDSGEYTCQTGQTSLSDPVHLTVLSEWLVLQTPHLEFQEGETIVLRCHSWKDKPLVKVTFFQNGKSKKFSRSDPNFSIPQANHSHSGDYHCTGNIGYTLYSSKPVTITVQAPSSSPMGIIVAVVTGIAVAAIVAAVVALIYCRKKRISALPGYPECREMGETLPEKPANPTNPDEADKVGAENTITYSLLMHPDALEEPDDQNRISTSRVKFSRSADAPAYQQGQNQLYNELNLGRREEYDVLDKRRGRDPEMGGKPQRRKNPQEGLYNELQKDKMAEAYSEIGMKGERRRGKGHDGLYQGLSTATKDTYDALHMQALPPRRAKRSGSGATNFSLLKQAGDVEENPGPMDWIWRILFLVGAATGAHSFEQVQLQQPGAELVKPGASVKMSCKASGYAFSSYWINWMKQKPGQGLEWIGQIYPGDGDTNYNGKFKGRATLTADTSSSTAYMQLSSLTSEDSAVYFCARSITTVVGCAMDYWGQGTSVTVSSTRASTKGPSVFPLAPSSKSTSGGTAALGCLVKDYFPEPVTVSWNSGALTSGVHTFPAVLQSSGLYSLSSVVTVPSSSLGTQTYICNVNHKPSNTKVDKRVEPKSCGTTPAAPPKAVLKLEPQWINVLQEDSVTLTCRGTHSPESDSIQWFHNGNLIPTHTQPSYRFKANNNDSGEYTCQTGQTSLSDPVHLTVLSEWLVLQTPHLEFQEGETIVLRCHSWKDKPLVKVTFFQNGKSKKFSRSDPNFSIPQANHSHSGDYHCTGNIGYTLYSSKPVTITVQAPSSSPMGIIVAVVTGIAVAAIVAAVVALIYCRKKRISALPGYPECREMGETLPEKPANPTNPDEADKVGAENTITYSLLMHPDALEEPDDQNRISSRRVKFSRSADAPAYQQGQNQLYNELNLGRREEYDVLDKRRGRDPEMGGKPQRRKNPQEGLYNELQKDKMAEAYSEIGMKGERRRGKGHDGLYQGLSTATKDTYDALHMQALPPRRAKRSGSGVKQTLNFDLLKLAGDVESNPGPGHMTEYKPTVRLATRDDVPRAVRTLAAAFADYPATRHTVDPDRHIERVTELQELFLTRVGLDIGKVWVADDGAAVAVWTTPESVEAGAVFAEIGPRMAELSGSRLAAQQQMEGLLAPHRPKEPAWFLATVGVSPDHQGKGLGSAVVLPGVEAAERAGVPAFLETSAPRNLPFYERLGFTVTADVEVPEGPRTWCMTRKPGA

SEQ ID NO: 7024 - protein, 1651 aa, Artificial Sequence
  Synthetic Polypeptide
MALPVTALLLPLALLLHAARPEVQLVESGGGLVQAGGSLRLSCAASGRTFSMGWFRQAPGKEREFVAAITYSGGSPYYADSVKGRFTISRDNAKNTVYLQMNSLKPEDTAVYYCAANPTYGSDWNAENWGQGTQVTVSSGTGGGGSGGGGSGGGGSEFDIQMTQSPSSLSASVGDRVTITCKASDHINNWLAWYQQKPGQAPKLLIYGATTLETGVPSRFSGSGSGTDYTLTISSLQPEDFATYYCQQSWNTPWTFGQGTKLEIKRLEGQPKANPTVTLFPPSSEELQANKATLVCLISDFYPGAVTVAWKADGSPVKAGVETTKPSKQSNNKYAASSYLSLTPEQWKSHRSYSCQVTHEGSTVEKTVAPTECSGSTPAAPPKAVLKLEPQWINVLQEDSVTLTCRGTHSPESDSIQWFHNGNLIPTHTQPSYRFKANNNDSGEYTCQTGQTSLSDPVHLTVLSEWLVLQTPHLEFQEGETIVLRCHSWKDKPLVKVTFFQNGKSKKFSRSDPNFSIPQANHSHSGDYHCTGNIGYTLYSSKPVTITVQAPSSSPMGIIVAVVTGIAVAAIVAAVVALIYCRKKRISALPGYPECREMGETLPEKPANPTNPDEADKVGAENTITYSLLMHPDALEEPDDQNRISTSRVKFSRSADAPAYQQGQNQLYNELNLGRREEYDVLDKRRGRDPEMGGKPQRRKNPQEGLYNELQKDKMAEAYSEIGMKGERRRGKGHDGLYQGLSTATKDTYDALHMQALPPRRAKRSGSGATNFSLLKQAGDVEENPGPMDWIWRILFLVGAATGAHSFEQVQLQQPGAELVKPGASVKMSCKASGYAFSSYWINWMKQKPGQGLEWIGQIYPGDGDTNYNGKFKGRATLTADTSSSTAYMQLSSLTSEDSAVYFCARSITTVVGCAMDYWGQGTSVTVSSTRASTKGPSVFPLAPSSKSTSGGTAALGCLVKDYFPEPVTVSWNSGALTSGVHTFPAVLQSSGLYSLSSVVTVPSSSLGTQTYICNVNHKPSNTKVDKRVEPKSCGTTPAAPPKAVLKLEPQWINVLQEDSVTLTCRGTHSPESDSIQWFHNGNLIPTHTQPSYRFKANNNDSGEYTCQTGQTSLSDPVHLTVLSEWLVLQTPHLEFQEGETIVLRCHSWKDKPLVKVTFFQNGKSKKFSRSDPNFSIPQANHSHSGDYHCTGNIGYTLYSSKPVTITVQAPSSSPMGIIVAVVTGIAVAAIVAAVVALIYCRKKRISALPGYPECREMGETLPEKPANPTNPDEADKVGAENTITYSLLMHPDALEEPDDQNRISSRRVKFSRSADAPAYQQGQNQLYNELNLGRREEYDVLDKRRGRDPEMGGKPQRRKNPQEGLYNELQKDKMAEAYSEIGMKGERRRGKGHDGLYQGLSTATKDTYDALHMQALPPRRAKRSGSGVKQTLNFDLLKLAGDVESNPGPGHMTEYKPTVRLATRDDVPRAVRTLAAAFADYPATRHTVDPDRHIERVTELQELFLTRVGLDIGKVWVADDGAAVAVWTTPESVEAGAVFAEIGPRMAELSGSRLAAQQQMEGLLAPHRPKEPAWFLATVGVSPDHQGKGLGSAVVLPGVEAAERAGVPAFLETSAPRNLPFYERLGFTVTADVEVPEGPRTWCMTRKPGA

SEQ ID NO: 7025 - protein, 1788 aa, Artificial Sequence
  Synthetic Polypeptide
MALPVTALLLPLALLLHAARPEVQLVESGGGLVQAGGSLRLSCAASGRTFSMGWFRQAPGKEREFVAAITYSGGSPYYADSVKGRFTISRDNAKNTVYLQMNSLKPEDTAVYYCAANPTYGSDWNAENWGQGTQVTVSSGTGGGGSGGGGSGGGGSEFDIQMTQSPSSLSASVGDRVTITCKASDHINNWLAWYQQKPGQAPKLLIYGATTLETGVPSRFSGSGSGTDYTLTISSLQPEDFATYYCQQSWNTPWTFGQGTKLEIKRLEGQPKANPTVTLFPPSSEELQANKATLVCLISDFYPGAVTVAWKADGSPVKAGVETTKPSKQSNNKYAASSYLSLTPEQWKSHRSYSCQVTHEGSTVEKTVAPTECSGSTPAAPPKAVLKLEPQWINVLQEDSVTLTCRGTHSPESDSIQWFHNGNLIPTHTQPSYRFKANNNDSGEYTCQTGQTSLSDPVHLTVLSEWLVLQTPHLEFQEGETIVLRCHSWKDKPLVKVTFFQNGKSKKFSRSDPNFSIPQANHSHSGDYHCTGNIGYTLYSSKPVTITVQAPSSSPMGIIVAVVTGIAVAAIVAAVVALIYCRKKRISALPGYPECREMGETLPEKPANPTNPDEADKVGAENTITYSLLMHPDALEEPDDQNRISTSRVKFSRSADAPAYQQGQNQLYNELNLGRREEYDVLDKRRGRDPEMGGKPQRRKNPQEGLYNELQKDKMAEAYSEIGMKGERRRGKGHDGLYQGLSTATKDTYDALHMQALPPRRAKRSGSGATNFSLLKQAGDVEENPGPMDWIWRILFLVGAATGAHSGPEVQLVESGGGLVQAGGSLRLSCAASGRTFTMGWFRQAPGKEREFVAAISLSPTLAYYADSVKGRFTISRDNAKNTVVLQMNSLKPEDTALYYCAADRKSVMSIRPDYWGQGTQVTVSSGSGGGGSGGGGSGGGGSFEQVQLQQPGAELVKPGASVKMSCKASGYAFSSYWINWMKQKPGQGLEWIGQIYPGDGDTNYNGKFKGRATLTADTSSSTAYMQLSSLTSEDSAVYFCARSITTVVGCAMDYWGQGTSVTVSSTRASTKGPSVFPLAPSSKSTSGGTAALGCLVKDYFPEPVTVSWNSGALTSGVHTFPAVLQSSGLYSLSSVVTVPSSSLGTQTYICNVNHKPSNTKVDKRVEPKSCGTTPAAPPKAVLKLEPQWINVLQEDSVTLTCRGTHSPESDSIQWFHNGNLIPTHTQPSYRFKANNNDSGEYTCQTGQTSLSDPVHLTVLSEWLVLQTPHLEFQEGETIVLRCHSWKDKPLVKVTFFQNGKSKKFSRSDPNFSIPQANHSHSGDYHCTGNIGYTLYSSKPVTITVQAPSSSPMGIIVAVVTGIAVAAIVAAVVALIYCRKKRISALPGYPECREMGETLPEKPANPTNPDEADKVGAENTITYSLLMHPDALEEPDDQNRISSRRVKFSRSADAPAYQQGQNQLYNELNLGRREEYDVLDKRRGRDPEMGGKPQRRKNPQEGLYNELQKDKMAEAYSEIGMKGERRRGKGHDGLYQGLSTATKDTYDALHMQALPPRRAKRSGSGVKQTLNFDLLKLAGDVESNPGPGHMTEYKPTVRLATRDDVPRAVRTLAAAFADYPATRHTVDPDRHIERVTELQELFLTRVGLDIGKVWVADDGAAVAVWTTPESVEAGAVFAEIGPRMAELSGSRLAAQQQMEGLLAPHRPKEPAWFLATVGVSPDHQGKGLGSAVVLPGVEAAERAGVPAFLETSAPRNLPFYERLGFTVTADVEVPEGPRTWCMTRKPGA

SEQ ID NO: 7026 - protein, 1521 aa, Artificial Sequence
  Synthetic Polypeptide
MALPVTALLLPLALLLHAARPEVQLVESGGGLVQAGGSLRLSCAASGRTFSMGWFRQAPGKEREFVAAITYSGGSPYYADSVKGRFTISRDNAKNTVYLQMNSLKPEDTAVYYCAANPTYGSDWNAENWGQGTQVTVSSLEGQPKANPTVTLFPPSSEELQANKATLVCLISDFYPGAVTVAWKADGSPVKAGVETTKPSKQSNNKYAASSYLSLTPEQWKSHRSYSCQVTHEGSTVEKTVAPTECSGSTPAAPPKAVLKLEPQWINVLQEDSVTLTCRGTHSPESDSIQWFHNGNLIPTHTQPSYRFKANNNDSGEYTCQTGQTSLSDPVHLTVLSEWLVLQTPHLEFQEGETIVLRCHSWKDKPLVKVTFFQNGKSKKFSRSDPNFSIPQANHSHSGDYHCTGNIGYTLYSSKPVTITVQAPSSSPMGIIVAVVTGIAVAAIVAAVVALIYCRKKRISALPGYPECREMGETLPEKPANPTNPDEADKVGAENTITYSLLMHPDALEEPDDQNRISTSRVKFSRSADAPAYQQGQNQLYNELNLGRREEYDVLDKRRGRDPEMGGKPQRRKNPQEGLYNELQKDKMAEAYSEIGMKGERRRGKGHDGLYQGLSTATKDTYDALHMQALPPRRAKRSGSGATNFSLLKQAGDVEENPGPMDWIWRILFLVGAATGAHSGPEVQLVESGGGLVQAGGSLRLSCAASGRTFTMGWFRQAPGKEREFVAAISLSPTLAYYADSVKGRFTISRDNAKNTVVLQMNSLKPEDTALYYCAADRKSVMSIRPDYWGQGTQVTVSSTRASTKGPSVFPLAPSSKSTSGGTAALGCLVKDYFPEPVTVSWNSGALTSGVHTFPAVLQSSGLYSLSSVVTVPSSSLGTQTYICNVNHKPSNTKVDKRVEPKSCGTTPAAPPKAVLKLEPQWINVLQEDSVTLTCRGTHSPESDSIQWFHNGNLIPTHTQPSYRFKANNNDSGEYTCQTGQTSLSDPVHLTVLSEWLVLQTPHLEFQEGETIVLRCHSWKDKPLVKVTFFQNGKSKKFSRSDPNFSIPQANHSHSGDYHCTGNIGYTLYSSKPVTITVQAPSSSPMGIIVAVVTGIAVAAIVAAVVALIYCRKKRISALPGYPECREMGETLPEKPANPTNPDEADKVGAENTITYSLLMHPDALEEPDDQNRISSRRVKFSRSADAPAYQQGQNQLYNELNLGRREEYDVLDKRRGRDPEMGGKPQRRKNPQEGLYNELQKDKMAEAYSEIGMKGERRRGKGHDGLYQGLSTATKDTYDALHMQALPPRRAKRSGSGVKQTLNFDLLKLAGDVESNPGPGHMTEYKPTVRLATRDDVPRAVRTLAAAFADYPATRHTVDPDRHIERVTELQELFLTRVGLDIGKVWVADDGAAVAVWTTPESVEAGAVFAEIGPRMAELSGSRLAAQQQMEGLLAPHRPKEPAWFLATVGVSPDHQGKGLGSAVVLPGVEAAERAGVPAFLETSAPRNLPFYERLGFTVTADVEVPEGPRTWCMTRKPGA

SEQ ID NO: 7027 - protein, 1529 aa, Artificial Sequence
  Synthetic Polypeptide
MALPVTALLLPLALLLHAARPDIQMTQSPSSLSASVGDRVTITCKASDHINNWLAWYQQKPGQAPKLLIYGATTLETGVPSRFSGSGSGTDYTLTISSLQPEDFATYYCQQSWNTPWTFGQGTKLEIKRLEDLKNVFPPEVAVFEPSEAEISHTQKATLVCLATGFYPDHVELSWWVNGKEVHSGVSTDPQPLKEQPALNDSRYCLSSRLRVSATFWQNPRNHFRCQVQFYGLSENDEWTQDRAKPVTQIVSAEAWGRADCGSTPAAPPKAVLKLEPQWINVLQEDSVTLTCRGTHSPESDSIQWFHNGNLIPTHTQPSYRFKANNNDSGEYTCQTGQTSLSDPVHLTVLSEWLVLQTPHLEFQEGETIVLRCHSWKDKPLVKVTFFQNGKSKKFSRSDPNFSIPQANHSHSGDYHCTGNIGYTLYSSKPVTITVQAPSSSPMGIIVAVVTGIAVAAIVAAVVALIYCRKKRISALPGYPECREMGETLPEKPANPTNPDEADKVGAENTITYSLLMHPDALEEPDDQNRISTSRVKFSRSADAPAYQQGQNQLYNELNLGRREEYDVLDKRRGRDPEMGGKPQRRKNPQEGLYNELQKDKMAEAYSEIGMKGERRRGKGHDGLYQGLSTATKDTYDALHMQALPPRRAKRSGSGATNFSLLKQAGDVEENPGPMDWIWRILFLVGAATGAHSFEQVQLQQPGAELVKPGASVKMSCKASGYAFSSYWINWMKQKPGQGLEWIGQIYPGDGDTNYNGKFKGRATLTADTSSSTAYMQLSSLTSEDSAVYFCARSITTVVGCAMDYWGQGTSVTVSSTRIQNPDPAVYQLRDSKSSDKSVCLFTDFDSQTNVSQSKDSDVYITDKTVLDMRSMDFKSNSAVAWSNKSDFACANAFNNSIIPEDTFFPSPESSCGTTPAAPPKAVLKLEPQWINVLQEDSVTLTCRGTHSPESDSIQWFHNGNLIPTHTQPSYRFKANNNDSGEYTCQTGQTSLSDPVHLTVLSEWLVLQTPHLEFQEGETIVLRCHSWKDKPLVKVTFFQNGKSKKFSRSDPNFSIPQANHSHSGDYHCTGNIGYTLYSSKPVTITVQAPSSSPMGIIVAVVTGIAVAAIVAAVVALIYCRKKRISALPGYPECREMGETLPEKPANPTNPDEADKVGAENTITYSLLMHPDALEEPDDQNRISSRRVKFSRSADAPAYQQGQNQLYNELNLGRREEYDVLDKRRGRDPEMGGKPQRRKNPQEGLYNELQKDKMAEAYSEIGMKGERRRGKGHDGLYQGLSTATKDTYDALHMQALPPRRAKRSGSGVKQTLNFDLLKLAGDVESNPGPGHMTEYKPTVRLATRDDVPRAVRTLAAAFADYPATRHTVDPDRHIERVTELQELFLTRVGLDIGKVWVADDGAAVAVWTTPESVEAGAVFAEIGPRMAELSGSRLAAQQQMEGLLAPHRPKEPAWFLATVGVSPDHQGKGLGSAVVLPGVEAAERAGVPAFLETSAPRNLPFYERLGFTVTADVEVPEGPRTWCMTRKPGA

SEQ ID NO: 7028 - protein, 1666 aa, Artificial Sequence
  Synthetic Polypeptide
MALPVTALLLPLALLLHAARPEVQLVESGGGLVQAGGSLRLSCAASGRTFSMGWFRQAPGKEREFVAAITYSGGSPYYADSVKGRFTISRDNAKNTVYLQMNSLKPEDTAVYYCAANPTYGSDWNAENWGQGTQVTVSSGTGGGGSGGGGSGGGGSEFDIQMTQSPSSLSASVGDRVTITCKASDHINNWLAWYQQKPGQAPKLLIYGATTLETGVPSRFSGSGSGTDYTLTISSLQPEDFATYYCQQSWNTPWTFGQGTKLEIKRLEDLKNVFPPEVAVFEPSEAEISHTQKATLVCLATGFYPDHVELSWWVNGKEVHSGVSTDPQPLKEQPALNDSRYCLSSRLRVSATFWQNPRNHFRCQVQFYGLSENDEWTQDRAKPVTQIVSAEAWGRADCGSTPAAPPKAVLKLEPQWINVLQEDSVTLTCRGTHSPESDSIQWFHNGNLIPTHTQPSYRFKANNNDSGEYTCQTGQTSLSDPVHLTVLSEWLVLQTPHLEFQEGETIVLRCHSWKDKPLVKVTFFQNGKSKKFSRSDPNFSIPQANHSHSGDYHCTGNIGYTLYSSKPVTITVQAPSSSPMGIIVAVVTGIAVAAIVAAVVALIYCRKKRISALPGYPECREMGETLPEKPANPTNPDEADKVGAENTITYSLLMHPDALEEPDDQNRISTSRVKFSRSADAPAYQQGQNQLYNELNLGRREEYDVLDKRRGRDPEMGGKPQRRKNPQEGLYNELQKDKMAEAYSEIGMKGERRRGKGHDGLYQGLSTATKDTYDALHMQALPPRRAKRSGSGATNFSLLKQAGDVEENPGPMDWIWRILFLVGAATGAHSFEQVQLQQPGAELVKPGASVKMSCKASGYAFSSYWINWMKQKPGQGLEWIGQIYPGDGDTNYNGKFKGRATLTADTSSSTAYMQLSSLTSEDSAVYFCARSITTVVGCAMDYWGQGTSVTVSSTRIQNPDPAVYQLRDSKSSDKSVCLFTDFDSQTNVSQSKDSDVYITDKTVLDMRSMDFKSNSAVAWSNKSDFACANAFNNSIIPEDTFFPSPESSCGTTPAAPPKAVLKLEPQWINVLQEDSVTLTCRGTHSPESDSIQWFHNGNLIPTHTQPSYRFKANNNDSGEYTCQTGQTSLSDPVHLTVLSEWLVLQTPHLEFQEGETIVLRCHSWKDKPLVKVTFFQNGKSKKFSRSDPNFSIPQANHSHSGDYHCTGNIGYTLYSSKPVTITVQAPSSSPMGIIVAVVTGIAVAAIVAAVVALIYCRKKRISALPGYPECREMGETLPEKPANPTNPDEADKVGAENTITYSLLMHPDALEEPDDQNRISSRRVKFSRSADAPAYQQGQNQLYNELNLGRREEYDVLDKRRGRDPEMGGKPQRRKNPQEGLYNELQKDKMAEAYSEIGMKGERRRGKGHDGLYQGLSTATKDTYDALHMQALPPRRAKRSGSGVKQTLNFDLLKLAGDVESNPGPGHMTEYKPTVRLATRDDVPRAVRTLAAAFADYPATRHTVDPDRHIERVTELQELFLTRVGLDIGKVWVADDGAAVAVWTTPESVEAGAVFAEIGPRMAELSGSRLAAQQQMEGLLAPHRPKEPAWFLATVGVSPDHQGKGLGSAVVLPGVEAAERAGVPAFLETSAPRNLPFYERLGFTVTADVEVPEGPRTWCMTRKPGA

SEQ ID NO: 7029 - protein, 1803 aa, Artificial Sequence
  Synthetic Polypeptide
MALPVTALLLPLALLLHAARPEVQLVESGGGLVQAGGSLRLSCAASGRTFSMGWFRQAPGKEREFVAAITYSGGSPYYADSVKGRFTISRDNAKNTVYLQMNSLKPEDTAVYYCAANPTYGSDWNAENWGQGTQVTVSSGTGGGGSGGGGSGGGGSEFDIQMTQSPSSLSASVGDRVTITCKASDHINNWLAWYQQKPGQAPKLLIYGATTLETGVPSRFSGSGSGTDYTLTISSLQPEDFATYYCQQSWNTPWTFGQGTKLEIKRLEDLKNVFPPEVAVFEPSEAEISHTQKATLVCLATGFYPDHVELSWWVNGKEVHSGVSTDPQPLKEQPALNDSRYCLSSRLRVSATFWQNPRNHFRCQVQFYGLSENDEWTQDRAKPVTQIVSAEAWGRADCGSTPAAPPKAVLKLEPQWINVLQEDSVTLTCRGTHSPESDSIQWFHNGNLIPTHTQPSYRFKANNNDSGEYTCQTGQTSLSDPVHLTVLSEWLVLQTPHLEFQEGETIVLRCHSWKDKPLVKVTFFQNGKSKKFSRSDPNFSIPQANHSHSGDYHCTGNIGYTLYSSKPVTITVQAPSSSPMGIIVAVVTGIAVAAIVAAVVALIYCRKKRISALPGYPECREMGETLPEKPANPTNPDEADKVGAENTITYSLLMHPDALEEPDDQNRISTSRVKFSRSADAPAYQQGQNQLYNELNLGRREEYDVLDKRRGRDPEMGGKPQRRKNPQEGLYNELQKDKMAEAYSEIGMKGERRRGKGHDGLYQGLSTATKDTYDALHMQALPPRRAKRSGSGATNFSLLKQAGDVEENPGPMDWIWRILFLVGAATGAHSGPEVQLVESGGGLVQAGGSLRLSCAASGRTFTMGWFRQAPGKEREFVAAISLSPTLAYYADSVKGRFTISRDNAKNTVVLQMNSLKPEDTALYYCAADRKSVMSIRPDYWGQGTQVTVSSGSGGGGSGGGGSGGGGSFEQVQLQQPGAELVKPGASVKMSCKASGYAFSSYWINWMKQKPGQGLEWIGQIYPGDGDTNYNGKFKGRATLTADTSSSTAYMQLSSLTSEDSAVYFCARSITTVVGCAMDYWGQGTSVTVSSTRIQNPDPAVYQLRDSKSSDKSVCLFTDFDSQTNVSQSKDSDVYITDKTVLDMRSMDFKSNSAVAWSNKSDFACANAFNNSIIPEDTFFPSPESSCGTTPAAPPKAVLKLEPQWINVLQEDSVTLTCRGTHSPESDSIQWFHNGNLIPTHTQPSYRFKANNNDSGEYTCQTGQTSLSDPVHLTVLSEWLVLQTPHLEFQEGETIVLRCHSWKDKPLVKVTFFQNGKSKKFSRSDPNFSIPQANHSHSGDYHCTGNIGYTLYSSKPVTITVQAPSSSPMGIIVAVVTGIAVAAIVAAVVALIYCRKKRISALPGYPECREMGETLPEKPANPTNPDEADKVGAENTITYSLLMHPDALEEPDDQNRISSRRVKFSRSADAPAYQQGQNQLYNELNLGRREEYDVLDKRRGRDPEMGGKPQRRKNPQEGLYNELQKDKMAEAYSEIGMKGERRRGKGHDGLYQGLSTATKDTYDALHMQALPPRRAKRSGSGVKQTLNFDLLKLAGDVESNPGPGHMTEYKPTVRLATRDDVPRAVRTLAAAFADYPATRHTVDPDRHIERVTELQELFLTRVGLDIGKVWVADDGAAVAVWTTPESVEAGAVFAEIGPRMAELSGSRLAAQQQMEGLLAPHRPKEPAWFLATVGVSPDHQGKGLGSAVVLPGVEAAERAGVPAFLETSAPRNLPFYERLGFTVTADVEVPEGPRTWCMTRKPGA

SEQ ID NO: 7030 - protein, 1536 aa, Artificial Sequence
  Synthetic Polypeptide
MALPVTALLLPLALLLHAARPEVQLVESGGGLVQAGGSLRLSCAASGRTFSMGWFRQAPGKEREFVAAITYSGGSPYYADSVKGRFTISRDNAKNTVYLQMNSLKPEDTAVYYCAANPTYGSDWNAENWGQGTQVTVSSLEDLKNVFPPEVAVFEPSEAEISHTQKATLVCLATGFYPDHVELSWWVNGKEVHSGVSTDPQPLKEQPALNDSRYCLSSRLRVSATFWQNPRNHFRCQVQFYGLSENDEWTQDRAKPVTQIVSAEAWGRADCGSTPAAPPKAVLKLEPQWINVLQEDSVTLTCRGTHSPESDSIQWFHNGNLIPTHTQPSYRFKANNNDSGEYTCQTGQTSLSDPVHLTVLSEWLVLQTPHLEFQEGETIVLRCHSWKDKPLVKVTFFQNGKSKKFSRSDPNFSIPQANHSHSGDYHCTGNIGYTLYSSKPVTITVQAPSSSPMGIIVAVVTGIAVAAIVAAVVALIYCRKKRISALPGYPECREMGETLPEKPANPTNPDEADKVGAENTITYSLLMHPDALEEPDDQNRISTSRVKFSRSADAPAYQQGQNQLYNELNLGRREEYDVLDKRRGRDPEMGGKPQRRKNPQEGLYNELQKDKMAEAYSEIGMKGERRRGKGHDGLYQGLSTATKDTYDALHMQALPPRRAKRSGSGATNFSLLKQAGDVEENPGPMDWIWRILFLVGAATGAHSGPEVQLVESGGGLVQAGGSLRLSCAASGRTFTMGWFRQAPGKEREFVAAISLSPTLAYYADSVKGRFTISRDNAKNTVVLQMNSLKPEDTALYYCAADRKSVMSIRPDYWGQGTQVTVSSTRIQNPDPAVYQLRDSKSSDKSVCLFTDFDSQTNVSQSKDSDVYITDKTVLDMRSMDFKSNSAVAWSNKSDFACANAFNNSIIPEDTFFPSPESSCGTTPAAPPKAVLKLEPQWINVLQEDSVTLTCRGTHSPESDSIQWFHNGNLIPTHTQPSYRFKANNNDSGEYTCQTGQTSLSDPVHLTVLSEWLVLQTPHLEFQEGETIVLRCHSWKDKPLVKVTFFQNGKSKKFSRSDPNFSIPQANHSHSGDYHCTGNIGYTLYSSKPVTITVQAPSSSPMGIIVAVVTGIAVAAIVAAVVALIYCRKKRISALPGYPECREMGETLPEKPANPTNPDEADKVGAENTITYSLLMHPDALEEPDDQNRISSRRVKFSRSADAPAYQQGQNQLYNELNLGRREEYDVLDKRRGRDPEMGGKPQRRKNPQEGLYNELQKDKMAEAYSEIGMKGERRRGKGHDGLYQGLSTATKDTYDALHMQALPPRRAKRSGSGVKQTLNFDLLKLAGDVESNPGPGHMTEYKPTVRLATRDDVPRAVRTLAAAFADYPATRHTVDPDRHIERVTELQELFLTRVGLDIGKVWVADDGAAVAVWTTPESVEAGAVFAEIGPRMAELSGSRLAAQQQMEGLLAPHRPKEPAWFLATVGVSPDHQGKGLGSAVVLPGVEAAERAGVPAFLETSAPRNLPFYERLGFTVTADVEVPEGPRTWCMTRKPGA

SEQ ID NO: 7031 - protein, 779 aa, Artificial Sequence
  Synthetic Polypeptide
MALPVTALLLPLALLLHAARPACEVQLLESGGGLIQPGGSLRLSCAASGFTFSSHAMTWVRQAPGKGLEWVSAISGSGDYTHYADSVKGRFTISRDNSKNTVYLQMNSLRAEDSAVYYCAKDEDGGSLLGHRGQGTLVTVSSGTGGGGSGGGGSGGGGSEFGSLETPAAPPKAVLKLEPQWINVLQEDSVTLTCRGTHSPESDSIQWFHNGNLIPTHTQPSYRFKANNNDSGEYTCQTGQTSLSDPVHLTVLSEWLVLQTPHLEFQEGETIVLRCHSWKDKPLVKVTFFQNGKSKKFSRSDPNFSIPQANHSHSGDYHCTGNIGYTLYSSKPVTITVQAPSSSPMGIIVAVVTGIAVAAIVAAVVALIYCRKKRISALPGYPECREMGETLPEKPANPTNPDEADKVGAENTITYSLLMHPDALEEPDDQNRISTSRVKFSRSADAPAYQQGQNQLYNELNLGRREEYDVLDKRRGRDPEMGGKPQRRKNPQEGLYNELQKDKMAEAYSEIGMKGERRRGKGHDGLYQGLSTATKDTYDALHMQALPPRRAKRSGSGATNFSLLKQAGDVEENPGPTRGHMTEYKPTVRLATRDDVPRAVRTLAAAFADYPATRHTVDPDRHIERVTELQELFLTRVGLDIGKVWVADDGAAVAVWTTPESVEAGAVFAEIGPRMAELSGSRLAAQQQMEGLLAPHRPKEPAWFLATVGVSPDHQGKGLGSAVVLPGVEAAERAGVPAFLETSAPRNLPFYERLGFTVTADVEVPEGPRTWCMTRKPGA

SEQ ID NO: 7032 - protein, 651 aa, Artificial Sequence
  Synthetic Polypeptide
MALPVTALLLPLALLLHAARPDIQMTQSPSSLSASVGDRVTITCKASDHINNWLAWYQQKPGQAPKLLIYGATTLETGVPSRFSGSGSGTDYTLTISSLQPEDFATYYCQQSWNTPWTFGQGTKLEIKRGGGGSGGGGSGGGGSQVQLQQPGAELVKPGASVKMSCKASGYAFSSYWINWMKQKPGQGLEWIGQIYPGDGDTNYNGKFKGRATLTADTSSSTAYMQLSSLTSEDSAVYFCARSITTVVGCAMDYWGQGTSVTVSSTRTPAAPPKAVLKLEPQWINVLQEDSVTLTCRGTHSPESDSIQWFHNGNLIPTHTQPSYRFKANNNDSGEYTCQTGQTSLSDPVHLTVLSEWLVLQTPHLEFQEGETIVLRCHSWKDKPLVKVTFFQNGKSKKFSRSDPNFSIPQANHSHSGDYHCTGNIGYTLYSSKPVTITVQAPSSSPMGIIVAVVTGIAVAAIVAAVVALIYCRKKRISALPGYPECREMGETLPEKPANPTNPDEADKVGAENTITYSLLMHPDALEEPDDQNRISTSRVKFSRSADAPAYQQGQNQLYNELNLGRREEYDVLDKRRGRDPEMGGKPQRRKNPQEGLYNELQKDKMAEAYSEIGMKGERRRGKGHDGLYQGLSTATKDTYDALHMQALPPR

SEQ ID NO: 7033 - protein, 651 aa, Artificial Sequence
  Synthetic Polypeptide
MALPVTALLLPLALLLHAARPEIVLTQSPATLSLSPGERATLSCRASQSVSSYLAWYQQKPGQAPRLLIYDASNRATGIPARFSGSGSGTDFTLTISSLEPEDFAVYYCQQRSNWPITFGQGTRLEIKGGGGSGGGGSGGGGSEVQLVESGGGLVQPGRSLRLSCAASGFTFNDYAMHWVRQAPGKGLEWVSTISWNSGSIGYADSVKGRFTISRDNAKKSLYLQMNSLRAEDTALYYCAKDIQYGNYYYGMDVWGQGTTVTVSSTRTPAAPPKAVLKLEPQWINVLQEDSVTLTCRGTHSPESDSIQWFHNGNLIPTHTQPSYRFKANNNDSGEYTCQTGQTSLSDPVHLTVLSEWLVLQTPHLEFQEGETIVLRCHSWKDKPLVKVTFFQNGKSKKFSRSDPNFSIPQANHSHSGDYHCTGNIGYTLYSSKPVTITVQAPSSSPMGIIVAVVTGIAVAAIVAAVVALIYCRKKRISALPGYPECREMGETLPEKPANPTNPDEADKVGAENTITYSLLMHPDALEEPDDQNRISTSRVKFSRSADAPAYQQGQNQLYNELNLGRREEYDVLDKRRGRDPEMGGKPQRRKNPQEGLYNELQKDKMAEAYSEIGMKGERRRGKGHDGLYQGLSTATKDTYDALHMQALPPR

SEQ ID NO: 7034 - protein, 525 aa, Artificial Sequence
  Synthetic Polypeptide
MALPVTALLLPLALLLHAARPEVQLVESGGGLVQAGGSLRLSCAASGRTFSMGWFRQAPGKEREFVAAITYSGGSPYYADSVKGRFTISRDNAKNTVYLQMNSLKPEDTAVYYCAANPTYGSDWNAENWGQGTQVTVSSTRTPAAPPKAVLKLEPQWINVLQEDSVTLTCRGTHSPESDSIQWFHNGNLIPTHTQPSYRFKANNNDSGEYTCQTGQTSLSDPVHLTVLSEWLVLQTPHLEFQEGETIVLRCHSWKDKPLVKVTFFQNGKSKKFSRSDPNFSIPQANHSHSGDYHCTGNIGYTLYSSKPVTITVQAPSSSPMGIIVAVVTGIAVAAIVAAVVALIYCRKKRISALPGYPECREMGETLPEKPANPTNPDEADKVGAENTITYSLLMHPDALEEPDDQNRISTSRVKFSRSADAPAYQQGQNQLYNELNLGRREEYDVLDKRRGRDPEMGGKPQRRKNPQEGLYNELQKDKMAEAYSEIGMKGERRRGKGHDGLYQGLSTATKDTYDALHMQALPPR

SEQ ID NO: 7035 - protein, 525 aa, Artificial Sequence
  Synthetic Polypeptide
MALPVTALLLPLALLLHAARPQLQLQESGPGLVKPSETLSLTCTVSGGSISSGDYYWGWIRQPPGKGLEWIGHIYYSGATYYNPSLKSRVTISVDTSRNQFSLKLSSVTAADTAVYYCTRDDSSNWRSRGQGTLVTVSSTRTPAAPPKAVLKLEPQWINVLQEDSVTLTCRGTHSPESDSIQWFHNGNLIPTHTQPSYRFKANNNDSGEYTCQTGQTSLSDPVHLTVLSEWLVLQTPHLEFQEGETIVLRCHSWKDKPLVKVTFFQNGKSKKFSRSDPNFSIPQANHSHSGDYHCTGNIGYTLYSSKPVTITVQAPSSSPMGIIVAVVTGIAVAAIVAAVVALIYCRKKRISALPGYPECREMGETLPEKPANPTNPDEADKVGAENTITYSLLMHPDALEEPDDQNRISTSRVKFSRSADAPAYQQGQNQLYNELNLGRREEYDVLDKRRGRDPEMGGKPQRRKNPQEGLYNELQKDKMAEAYSEIGMKGERRRGKGHDGLYQGLSTATKDTYDALHMQALPPR

SEQ ID NO: 7036 - protein, 525 aa, Artificial Sequence
  Synthetic Polypeptide
MALPVTALLLPLALLLHAARPQLQLQESGPGLVKPSETLSLTCTVSGDSISSGDYYWGWIRQPPGKGLEWIGHIYYSGVTYYNPSLKSRVTISVDTSRNQFSLKLSSVTAADTAVYYCTREDSSNWRSRGQGTLVTVSSTRTPAAPPKAVLKLEPQWINVLQEDSVTLTCRGTHSPESDSIQWFHNGNLIPTHTQPSYRFKANNNDSGEYTCQTGQTSLSDPVHLTVLSEWLVLQTPHLEFQEGETIVLRCHSWKDKPLVKVTFFQNGKSKKFSRSDPNFSIPQANHSHSGDYHCTGNIGYTLYSSKPVTITVQAPSSSPMGIIVAVVTGIAVAAIVAAVVALIYCRKKRISALPGYPECREMGETLPEKPANPTNPDEADKVGAENTITYSLLMHPDALEEPDDQNRISTSRVKFSRSADAPAYQQGQNQLYNELNLGRREEYDVLDKRRGRDPEMGGKPQRRKNPQEGLYNELQKDKMAEAYSEIGMKGERRRGKGHDGLYQGLSTATKDTYDALHMQALPPR

SEQ ID NO: 7037 - protein, 527 aa, Artificial Sequence
  Synthetic Polypeptide
MALPVTALLLPLALLLHAARPEVQLQESGGGLVQPGGSLRLSCAASGRTFSSLFMGWFRQAPGKERELVAAISRYSLYTYYADSVKGRFTISADNAKNAVYLQMNSLKPEDTAVYYCASKLEYTSNDYDSWGQGTQVTVSSTRTPAAPPKAVLKLEPQWINVLQEDSVTLTCRGTHSPESDSIQWFHNGNLIPTHTQPSYRFKANNNDSGEYTCQTGQTSLSDPVHLTVLSEWLVLQTPHLEFQEGETIVLRCHSWKDKPLVKVTFFQNGKSKKFSRSDPNFSIPQANHSHSGDYHCTGNIGYTLYSSKPVTITVQAPSSSPMGIIVAVVTGIAVAAIVAAVVALIYCRKKRISALPGYPECREMGETLPEKPANPTNPDEADKVGAENTITYSLLMHPDALEEPDDQNRISTSRVKFSRSADAPAYQQGQNQLYNELNLGRREEYDVLDKRRGRDPEMGGKPQRRKNPQEGLYNELQKDKMAEAYSEIGMKGERRRGKGHDGLYQGLSTATKDTYDALHMQALPPR

SEQ ID NO: 7038 - protein, 535 aa, Artificial Sequence
  Synthetic Polypeptide
MALPVTALLLPLALLLHAARPEVQLVESGGGLVQPGGSLRLSCAASGFASDYYIIGWFRQAPGKEREGVSCISSRYANTNYADSVKGRFTISRDNAKNTVYLQMNSLKPEDTAVYYCAADTRRYTCPDIATMHRNFDSWGQGTLVTVSSTRTPAAPPKAVLKLEPQWINVLQEDSVTLTCRGTHSPESDSIQWFHNGNLIPTHTQPSYRFKANNNDSGEYTCQTGQTSLSDPVHLTVLSEWLVLQTPHLEFQEGETIVLRCHSWKDKPLVKVTFFQNGKSKKFSRSDPNFSIPQANHSHSGDYHCTGNIGYTLYSSKPVTITVQAPSSSPMGIIVAVVTGIAVAAIVAAVVALIYCRKKRISALPGYPECREMGETLPEKPANPTNPDEADKVGAENTITYSLLMHPDALEEPDDQNRISTSRVKFSRSADAPAYQQGQNQLYNELNLGRREEYDVLDKRRGRDPEMGGKPQRRKNPQEGLYNELQKDKMAEAYSEIGMKGERRRGKGHDGLYQGLSTATKDTYDALHMQALPPR

SEQ ID NO: 7039 - protein, 531 aa, Artificial Sequence
  Synthetic Polypeptide
MALPVTALLLPLALLLHAARPEVQLVESGGSLVQPGGSLRLSCAASGFTFDDYAMSWVRQVPGKGLEWVSSINWSGTHTDYADSVKGRFTISRNNANNTLYLQMNSLKSEDTAVYYCAKNWRDAGTTWFEKSGSAGQGTQVTVSSTRTPAAPPKAVLKLEPQWINVLQEDSVTLTCRGTHSPESDSIQWFHNGNLIPTHTQPSYRFKANNNDSGEYTCQTGQTSLSDPVHLTVLSEWLVLQTPHLEFQEGETIVLRCHSWKDKPLVKVTFFQNGKSKKFSRSDPNFSIPQANHSHSGDYHCTGNIGYTLYSSKPVTITVQAPSSSPMGIIVAVVTGIAVAAIVAAVVALIYCRKKRISALPGYPECREMGETLPEKPANPTNPDEADKVGAENTITYSLLMHPDALEEPDDQNRISTSRVKFSRSADAPAYQQGQNQLYNELNLGRREEYDVLDKRRGRDPEMGGKPQRRKNPQEGLYNELQKDKMAEAYSEIGMKGERRRGKGHDGLYQGLSTATKDTYDALHMQALPPR

SEQ ID NO: 7040 - protein, 526 aa, Artificial Sequence
  Synthetic Polypeptide
MALPVTALLLPLALLLHAARPEVQLVESGGGLVQPGGSLRLSCAASGFNIKDTCIGWVRRAPGKEEELVAKICKYSGHTRYADSVKGRFTISADTSKNTAYLQMNSLRAEDTAVYYCAAVSVRDGHYNYWGQGTTVTVSSTRTPAAPPKAVLKLEPQWINVLQEDSVTLTCRGTHSPESDSIQWFHNGNLIPTHTQPSYRFKANNNDSGEYTCQTGQTSLSDPVHLTVLSEWLVLQTPHLEFQEGETIVLRCHSWKDKPLVKVTFFQNGKSKKFSRSDPNFSIPQANHSHSGDYHCTGNIGYTLYSSKPVTITVQAPSSSPMGIIVAVVTGIAVAAIVAAVVALIYCRKKRISALPGYPECREMGETLPEKPANPTNPDEADKVGAENTITYSLLMHPDALEEPDDQNRISTSRVKFSRSADAPAYQQGQNQLYNELNLGRREEYDVLDKRRGRDPEMGGKPQRRKNPQEGLYNELQKDKMAEAYSEIGMKGERRRGKGHDGLYQGLSTATKDTYDALHMQALPPR

SEQ ID NO: 7041 - protein, 531 aa, Artificial Sequence
  Synthetic Polypeptide
MALPVTALLLPLALLLHAARPGSDLGIKLLFAAAKGQDDEVRILLAAGADVNAKDFEGYTPLHVAAYDGHLEIVEVLLKAGADVNAKDSQGRTPLHEAAYSGHLEIVEVLLKAGADVNAQDDAGETPADLAAAWGHEDIAEVLQKTRTPAAPPKAVLKLEPQWINVLQEDSVTLTCRGTHSPESDSIQWFHNGNLIPTHTQPSYRFKANNNDSGEYTCQTGQTSLSDPVHLTVLSEWLVLQTPHLEFQEGETIVLRCHSWKDKPLVKVTFFQNGKSKKFSRSDPNFSIPQANHSHSGDYHCTGNIGYTLYSSKPVTITVQAPSSSPMGIIVAVVTGIAVAAIVAAVVALIYCRKKRISALPGYPECREMGETLPEKPANPTNPDEADKVGAENTITYSLLMHPDALEEPDDQNRISTSRVKFSRSADAPAYQQGQNQLYNELNLGRREEYDVLDKRRGRDPEMGGKPQRRKNPQEGLYNELQKDKMAEAYSEIGMKGERRRGKGHDGLYQGLSTATKDTYDALHMQALPPR

SEQ ID NO: 7042 - protein, 465 aa, Artificial Sequence
  Synthetic Polypeptide
MALPVTALLLPLALLLHAARPVDNKFNKERYSAYYEIWQLPNLNVRQKAAFIGSLQDDPSQSANLLAEAKKLNDAQAPKTRTPAAPPKAVLKLEPQWINVLQEDSVTLTCRGTHSPESDSIQWFHNGNLIPTHTQPSYRFKANNNDSGEYTCQTGQTSLSDPVHLTVLSEWLVLQTPHLEFQEGETIVLRCHSWKDKPLVKVTFFQNGKSKKFSRSDPNFSIPQANHSHSGDYHCTGNIGYTLYSSKPVTITVQAPSSSPMGIIVAVVTGIAVAAIVAAVVALIYCRKKRISALPGYPECREMGETLPEKPANPTNPDEADKVGAENTITYSLLMHPDALEEPDDQNRISTSRVKFSRSADAPAYQQGQNQLYNELNLGRREEYDVLDKRRGRDPEMGGKPQRRKNPQEGLYNELQKDKMAEAYSEIGMKGERRRGKGHDGLYQGLSTATKDTYDALHMQALPPR

SEQ ID NO: 7043 - protein, 496 aa, Artificial Sequence
  Synthetic Polypeptide
MALPVTALLLPLALLLHAARPLPAPKNLVVSRVTEDSARLSWTAPDAAFDSFAIGYWEWDDDGEAIVLTVPGSERSYDLTGLKPGTEYPVYIAGVKGGQWSFPLSAIFTTTRTPAAPPKAVLKLEPQWINVLQEDSVTLTCRGTHSPESDSIQWFHNGNLIPTHTQPSYRFKANNNDSGEYTCQTGQTSLSDPVHLTVLSEWLVLQTPHLEFQEGETIVLRCHSWKDKPLVKVTFFQNGKSKKFSRSDPNFSIPQANHSHSGDYHCTGNIGYTLYSSKPVTITVQAPSSSPMGIIVAVVTGIAVAAIVAAVVALIYCRKKRISALPGYPECREMGETLPEKPANPTNPDEADKVGAENTITYSLLMHPDALEEPDDQNRISTSRVKFSRSADAPAYQQGQNQLYNELNLGRREEYDVLDKRRGRDPEMGGKPQRRKNPQEGLYNELQKDKMAEAYSEIGMKGERRRGKGHDGLYQGLSTATKDTYDALHMQALPPR

SEQ ID NO: 7044 - protein, 497 aa, Artificial Sequence
  Synthetic Polypeptide
MALPVTALLLPLALLLHAARPMLPAPKNLVVSRITEDSARLSWTAPDAAFDSFPIRYIETLIWGEAIWLDVPGSERSYDLTGLKPGTEYAVVITGVKGGRFSSPLVASFTTTRTPAAPPKAVLKLEPQWINVLQEDSVTLTCRGTHSPESDSIQWFHNGNLIPTHTQPSYRFKANNNDSGEYTCQTGQTSLSDPVHLTVLSEWLVLQTPHLEFQEGETIVLRCHSWKDKPLVKVTFFQNGKSKKFSRSDPNFSIPQANHSHSGDYHCTGNIGYTLYSSKPVTITVQAPSSSPMGIIVAVVTGIAVAAIVAAVVALIYCRKKRISALPGYPECREMGETLPEKPANPTNPDEADKVGAENTITYSLLMHPDALEEPDDQNRISTSRVKFSRSADAPAYQQGQNQLYNELNLGRREEYDVLDKRRGRDPEMGGKPQRRKNPQEGLYNELQKDKMAEAYSEIGMKGERRRGKGHDGLYQGLSTATKDTYDALHMQALPPR

SEQ ID NO: 7045 - protein, 714 aa, Artificial Sequence
  Synthetic Polypeptide
MALPVTALLLPLALLLHAARPMALPVTALLLPLALLLHAARPLFNQEVQIPLTESYCGPCPKNWICYKNNCYQFFDESKNWYESQASCMSQNASLLKVYSKEDQDLLKLVKSYHWMGLVHIPTNGSWQWEDGSILSPNLLTIIEMQKGDCALYASSFKGYIENCSTPNTYICMQRTVGGGGSGGGGSGGGGSDLFNQEVQIPLTESYCGPCPKNWICYKNNCYQFFDESKNWYESQASCMSQNASLLKVYSKEDQDLLKLVKSYHWMGLVHIPTNGSWQWEDGSILSPNLLTIIEMQKGDCALYASSFKGYIENCSTPNTYICMQRTVTRTPAAPPKAVLKLEPQWINVLQEDSVTLTCRGTHSPESDSIQWFHNGNLIPTHTQPSYRFKANNNDSGEYTCQTGQTSLSDPVHLTVLSEWLVLQTPHLEFQEGETIVLRCHSWKDKPLVKVTFFQNGKSKKFSRSDPNFSIPQANHSHSGDYHCTGNIGYTLYSSKPVTITVQAPSSSPMGIIVAVVTGIAVAAIVAAVVALIYCRKKRISALPGYPECREMGETLPEKPANPTNPDEADKVGAENTITYSLLMHPDALEEPDDQNRISTSRVKFSRSADAPAYQQGQNQLYNELNLGRREEYDVLDKRRGRDPEMGGKPQRRKNPQEGLYNELQKDKMAEAYSEIGMKGERRRGKGHDGLYQGLSTATKDTYDALHMQALPPR

SEQ ID NO: 7046 - protein, 594 aa, Artificial Sequence
  Synthetic Polypeptide
MALPVTALLLPLALLLHAARPMELTDLLLAAMLLAVARLTLSSPVAPACDPRLLNKLLRDSHLLHSRLSQCPDVDPLSIPVLLPAVDFSLGEWKTQTEQSKAQDILGAVSLLLEGVMAARGQLEPSCLSSLLGQLSGQVRLLLGALQGLLGTQLPLQGRTTAHKDPNALFLSLQQLLRGKVRFLLLVEGPTLCVRRTLPTTAVPSSTSTRTPAAPPKAVLKLEPQWINVLQEDSVTLTCRGTHSPESDSIQWFHNGNLIPTHTQPSYRFKANNNDSGEYTCQTGQTSLSDPVHLTVLSEWLVLQTPHLEFQEGETIVLRCHSWKDKPLVKVTFFQNGKSKKFSRSDPNFSIPQANHSHSGDYHCTGNIGYTLYSSKPVTITVQAPSSSPMGIIVAVVTGIAVAAIVAAVVALIYCRKKRISALPGYPECREMGETLPEKPANPTNPDEADKVGAENTITYSLLMHPDALEEPDDQNRISTSRVKFSRSADAPAYQQGQNQLYNELNLGRREEYDVLDKRRGRDPEMGGKPQRRKNPQEGLYNELQKDKMAEAYSEIGMKGERRRGKGHDGLYQGLSTATKDTYDALHMQALPPR

SEQ ID NO: 7047 - protein, 460 aa, Artificial Sequence
  Synthetic Polypeptide
MALPVTALLLPLALLLHAARPMDPDLEIRAAFLRQRNTALRTEVAELEQEVQRLENEVSQYETRYGPLGGGKTRTRTPAAPPKAVLKLEPQWINVLQEDSVTLTCRGTHSPESDSIQWFHNGNLIPTHTQPSYRFKANNNDSGEYTCQTGQTSLSDPVHLTVLSEWLVLQTPHLEFQEGETIVLRCHSWKDKPLVKVTFFQNGKSKKFSRSDPNFSIPQANHSHSGDYHCTGNIGYTLYSSKPVTITVQAPSSSPMGIIVAVVTGIAVAAIVAAVVALIYCRKKRISALPGYPECREMGETLPEKPANPTNPDEADKVGAENTITYSLLMHPDALEEPDDQNRISTSRVKFSRSADAPAYQQGQNQLYNELNLGRREEYDVLDKRRGRDPEMGGKPQRRKNPQEGLYNELQKDKMAEAYSEIGMKGERRRGKGHDGLYQGLSTATKDTYDALHMQALPPR

SEQ ID NO: 7048 - protein, 435 aa, Artificial Sequence
  Synthetic Polypeptide
MALPVTALLLPLALLLHAARPEVAALEKEVAALEKEVAALEKEVAALEKTRTPAAPPKAVLKLEPQWINVLQEDSVTLTCRGTHSPESDSIQWFHNGNLIPTHTQPSYRFKANNNDSGEYTCQTGQTSLSDPVHLTVLSEWLVLQTPHLEFQEGETIVLRCHSWKDKPLVKVTFFQNGKSKKFSRSDPNFSIPQANHSHSGDYHCTGNIGYTLYSSKPVTITVQAPSSSPMGIIVAVVTGIAVAAIVAAVVALIYCRKKRISALPGYPECREMGETLPEKPANPTNPDEADKVGAENTITYSLLMHPDALEEPDDQNRISTSRVKFSRSADAPAYQQGQNQLYNELNLGRREEYDVLDKRRGRDPEMGGKPQRRKNPQEGLYNELQKDKMAEAYSEIGMKGERRRGKGHDGLYQGLSTATKDTYDALHMQALPPR

SEQ ID NO: 7049 - protein, 693 aa, Artificial Sequence
  Synthetic Polypeptide
MALPVTALLLPLALLLHAARPLFNQEVQIPLTESYCGPCPKNWICYKNNCYQFFDESKNWYESQASCMSQNASLLKVYSKEDQDLLKLVKSAHWMGLVHIPTNGSWQWEDGSILSPNLLTIIEMQKGDCALYASSFKGFIENCSTPNTYICMQRTVGGGGSGGGGSGGGGSDLFNQEVQIPLTESYCGPCPKNWICYKNNCYQFFDESKNWYESQASCMSQNASLLKVYSKEDQDLLKLVKSAHWMGLVHIPTNGSWQWEDGSILSPNLLTIIEMQKGDCALYASSFKGFIENCSTPNTYICMQRTVTRTPAAPPKAVLKLEPQWINVLQEDSVTLTCRGTHSPESDSIQWFHNGNLIPTHTQPSYRFKANNNDSGEYTCQTGQTSLSDPVHLTVLSEWLVLQTPHLEFQEGETIVLRCHSWKDKPLVKVTFFQNGKSKKFSRSDPNFSIPQANHSHSGDYHCTGNIGYTLYSSKPVTITVQAPSSSPMGIIVAVVTGIAVAAIVAAVVALIYCRKKRISALPGYPECREMGETLPEKPANPTNPDEADKVGAENTITYSLLMHPDALEEPDDQNRISTSRVKFSRSADAPAYQQGQNQLYNELNLGRREEYDVLDKRRGRDPEMGGKPQRRKNPQEGLYNELQKDKMAEAYSEIGMKGERRRGKGHDGLYQGLSTATKDTYDALHMQALPPR

SEQ ID NO: 7050 - protein, 693 aa, Artificial Sequence
  Synthetic Polypeptide
MALPVTALLLPLALLLHAARPLFNQEVQIPLTESYCGPCPKNWICYKNNCYQFFDESKNWYESQASCMSQNASLLKVYSKEDQDLLKLVKSAHWMGLVHIPTNGSWQWEDGSILSPNLLTIIEMQKGDCALYASSFKGYIENCSTPNTYICMQRTVSGGGGSGGGGSGGGGDLFNQEVQIPLTESYCGPCPKNWICYKNNCYQFFDESKNWYESQASCMSQNASLLKVYSKEDQDLLKLVKSAHWMGLVHIPTNGSWQWEDGSILSPNLLTIIEMQKGDCALYASSFKGYIENCSTPNTYICMQRTVTRTPAAPPKAVLKLEPQWINVLQEDSVTLTCRGTHSPESDSIQWFHNGNLIPTHTQPSYRFKANNNDSGEYTCQTGQTSLSDPVHLTVLSEWLVLQTPHLEFQEGETIVLRCHSWKDKPLVKVTFFQNGKSKKFSRSDPNFSIPQANHSHSGDYHCTGNIGYTLYSSKPVTITVQAPSSSPMGIIVAVVTGIAVAAIVAAVVALIYCRKKRISALPGYPECREMGETLPEKPANPTNPDEADKVGAENTITYSLLMHPDALEEPDDQNRISTSRVKFSRSADAPAYQQGQNQLYNELNLGRREEYDVLDKRRGRDPEMGGKPQRRKNPQEGLYNELQKDKMAEAYSEIGMKGERRRGKGHDGLYQGLSTATKDTYDALHMQALPPR

SEQ ID NO: 7051 - protein, 1199 aa, Artificial Sequence
  Synthetic Polypeptide
MALPVTALLLPLALLLHAARPDIQMTQSPSSLSASVGDRVTITCKASDHINNWLAWYQQKPGQAPKLLIYGATTLETGVPSRFSGSGSGTDYTLTISSLQPEDFATYYCQQSWNTPWTFGQGTKLEIKRLETTPGERSSLPAFYPGTSGSCSGCGSLSLPLLAGLVAADAVASLLIVGAVFLCARPRRSPAQEDGKVYINMPGRGSTSRVKFSRSADAPAYQQGQNQLYNELNLGRREEYDVLDKRRGRDPEMGGKPQRRKNPQEGLYNELQKDKMAEAYSEIGMKGERRRGKGHDGLYQGLSTATKDTYDALHMQALPPRRAKRSGSGATNFSLLKQAGDVEENPGPMDWIWRILFLVGAATGAHSFEQVQLQQPGAELVKPGASVKMSCKASGYAFSSYWINWMKQKPGQGLEWIGQIYPGDGDTNYNGKFKGRATLTADTSSSTAYMQLSSLTSEDSAVYFCARSITTVVGCAMDYWGQGTSVTVSSTRQVVDTTKAVITLQPPWVSVFQEETVTLHCEVLHLPGSSSTQWFLNGTATQTSTPSYRITSASVNDSGEYRCQRGLSGRSDPIQLEIHRGWLLLQVSSRVFTEGEPLALRCHAWKDKLVYNVLYYRNGKAFKFFHWNSNLTILKTNISHNGTYHCSGMGKHRYTSAGISVTVKELFPAPVLNASVTSPLLEGNLVTLSCETKLLLQRPGLQLYFSFYMGSKTLRGRNTSSEYQILTARREDSGLYWCEAATEDGNVLKRSPELELQVLGLQLPTPVWFHVLFYLAVGIMFLVNTVLWVTIRKELKRKKKWDLEISLDSGHEKKVISSLQEDRHLEEELKCQEQKEEQLQEGVHRKEPQGATSSRRVKFSRSADAPAYQQGQNQLYNELNLGRREEYDVLDKRRGRDPEMGGKPQRRKNPQEGLYNELQKDKMAEAYSEIGMKGERRRGKGHDGLYQGLSTATKDTYDALHMQALPPRRAKRSGSGVKQTLNFDLLKLAGDVESNPGPGHMTEYKPTVRLATRDDVPRAVRTLAAAFADYPATRHTVDPDRHIERVTELQELFLTRVGLDIGKVWVADDGAAVAVWTTPESVEAGAVFAEIGPRMAELSGSRLAAQQQMEGLLAPHRPKEPAWFLATVGVSPDHQGKGLGSAVVLPGVEAAERAGVPAFLETSAPRNLPFYERLGFTVTADVEVPEGPRTWCMTRKPGA

SEQ ID NO: 7052 - protein, 1251 aa, Artificial Sequence
  Synthetic Polypeptide
MALPVTALLLPLALLLHAARPACEVQLLESGGGLIQPGGSLRLSCAASGFTFSSHAMTWVRQAPGKGLEWVSAISGSGDYTHYADSVKGRFTISRDNSKNTVYLQMNSLRAEDSAVYYCAKDEDGGSLLGHRGQGTLVTVSSGTGGGGSGGGGSGGGGSEFGSLETTPGERSSLPAFYPGTSGSCSGCGSLSLPLLAGLVAADAVASLLIVGAVFLCARPRRSPAQEDGKVYINMPGRGSTSRVKFSRSADAPAYQQGQNQLYNELNLGRREEYDVLDKRRGRDPEMGGKPQRRKNPQEGLYNELQKDKMAEAYSEIGMKGERRRGKGHDGLYQGLSTATKDTYDALHMQALPPRRAKRSGSGATNFSLLKQAGDVEENPGPMDWIWRILFLVGAATGAHSGPEVQLVESGGGLVQAGGSLRLSCAASGRTFSMGWFRQAPGKEREFVAAITYSGGSPYYADSVKGRFTISRDNAKNTVYLQMNSLKPEDTAVYYCAANPTYGSDWNAENWGQGTQVTVSSGSGGGGSGGGGSGGGGSFEGSTRQVVDTTKAVITLQPPWVSVFQEETVTLHCEVLHLPGSSSTQWFLNGTATQTSTPSYRITSASVNDSGEYRCQRGLSGRSDPIQLEIHRGWLLLQVSSRVFTEGEPLALRCHAWKDKLVYNVLYYRNGKAFKFFHWNSNLTILKTNISHNGTYHCSGMGKHRYTSAGISVTVKELFPAPVLNASVTSPLLEGNLVTLSCETKLLLQRPGLQLYFSFYMGSKTLRGRNTSSEYQILTARREDSGLYWCEAATEDGNVLKRSPELELQVLGLQLPTPVWFHVLFYLAVGIMFLVNTVLWVTIRKELKRKKKWDLEISLDSGHEKKVISSLQEDRHLEEELKCQEQKEEQLQEGVHRKEPQGATSSRRVKFSRSADAPAYQQGQNQLYNELNLGRREEYDVLDKRRGRDPEMGGKPQRRKNPQEGLYNELQKDKMAEAYSEIGMKGERRRGKGHDGLYQGLSTATKDTYDALHMQALPPRRAKRSGSGVKQTLNFDLLKLAGDVESNPGPGHMTEYKPTVRLATRDDVPRAVRTLAAAFADYPATRHTVDPDRHIERVTELQELFLTRVGLDIGKVWVADDGAAVAVWTTPESVEAGAVFAEIGPRMAELSGSRLAAQQQMEGLLAPHRPKEPAWFLATVGVSPDHQGKGLGSAVVLPGVEAAERAGVPAFLETSAPRNLPFYERLGFTVTADVEVPEGPRTWCMTRKPGA

SEQ ID NO: 7053 - protein, 1401 aa, Artificial Sequence
  Synthetic Polypeptide
MALPVTALLLPLALLLHAARPDIQMTQSPSSLSASVGDRVTITCKASDHINNWLAWYQQKPGQAPKLLIYGATTLETGVPSRFSGSGSGTDYTLTISSLQPEDFATYYCQQSWNTPWTFGQGTKLEIKRLEGQPKANPTVTLFPPSSEELQANKATLVCLISDFYPGAVTVAWKADGSPVKAGVETTKPSKQSNNKYAASSYLSLTPEQWKSHRSYSCQVTHEGSTVEKTVAPTECSGSTTPGERSSLPAFYPGTSGSCSGCGSLSLPLLAGLVAADAVASLLIVGAVFLCARPRRSPAQEDGKVYINMPGRGSTSRVKFSRSADAPAYQQGQNQLYNELNLGRREEYDVLDKRRGRDPEMGGKPQRRKNPQEGLYNELQKDKMAEAYSEIGMKGERRRGKGHDGLYQGLSTATKDTYDALHMQALPPRRAKRSGSGATNFSLLKQAGDVEENPGPMDWIWRILFLVGAATGAHSFEQVQLQQPGAELVKPGASVKMSCKASGYAFSSYWINWMKQKPGQGLEWIGQIYPGDGDTNYNGKFKGRATLTADTSSSTAYMQLSSLTSEDSAVYFCARSITTVVGCAMDYWGQGTSVTVSSTRASTKGPSVFPLAPSSKSTSGGTAALGCLVKDYFPEPVTVSWNSGALTSGVHTFPAVLQSSGLYSLSSVVTVPSSSLGTQTYICNVNHKPSNTKVDKRVEPKSCGTQVVDTTKAVITLQPPWVSVFQEETVTLHCEVLHLPGSSSTQWFLNGTATQTSTPSYRITSASVNDSGEYRCQRGLSGRSDPIQLEIHRGWLLLQVSSRVFTEGEPLALRCHAWKDKLVYNVLYYRNGKAFKFFHWNSNLTILKTNISHNGTYHCSGMGKHRYTSAGISVTVKELFPAPVLNASVTSPLLEGNLVTLSCETKLLLQRPGLQLYFSFYMGSKTLRGRNTSSEYQILTARREDSGLYWCEAATEDGNVLKRSPELELQVLGLQLPTPVWFHVLFYLAVGIMFLVNTVLWVTIRKELKRKKKWDLEISLDSGHEKKVISSLQEDRHLEEELKCQEQKEEQLQEGVHRKEPQGATSSRRVKFSRSADAPAYQQGQNQLYNELNLGRREEYDVLDKRRGRDPEMGGKPQRRKNPQEGLYNELQKDKMAEAYSEIGMKGERRRGKGHDGLYQGLSTATKDTYDALHMQALPPRRAKRSGSGVKQTLNFDLLKLAGDVESNPGPGHMATYEVLCEVARKLGTDDREVVLFLLNVFIPQPTLAQLIGALRALKEEGRLTFPLLAECLFRAGRRDLLRDLLHLDPRFLERHLAGTMSYFSPYQLTVLHVDGELCARDIRSLIFLSKDTIGSRSTPQTFLHWVYCMENLDLLGPTDVDALMSMLRSLSRVDLQRQVQTLMGLHLSGPSHSQHYRHTP

SEQ ID NO: 7054 - protein, 1454 aa, Artificial Sequence
  Synthetic Polypeptide
MALPVTALLLPLALLLHAARPDIQMTQSPSSLSASVGDRVTITCKASDHINNWLAWYQQKPGQAPKLLIYGATTLETGVPSRFSGSGSGTDYTLTISSLQPEDFATYYCQQSWNTPWTFGQGTKLEIKRLEGQPKANPTVTLFPPSSEELQANKATLVCLISDFYPGAVTVAWKADGSPVKAGVETTKPSKQSNNKYAASSYLSLTPEQWKSHRSYSCQVTHEGSTVEKTVAPTECSGSTTPGERSSLPAFYPGTSGSCSGCGSLSLPLLAGLVAADAVASLLIVGAVFLCARPRRSPAQEDGKVYINMPGRGSTSRVKFSRSADAPAYQQGQNQLYNELNLGRREEYDVLDKRRGRDPEMGGKPQRRKNPQEGLYNELQKDKMAEAYSEIGMKGERRRGKGHDGLYQGLSTATKDTYDALHMQALPPRRAKRSGSGATNFSLLKQAGDVEENPGPMDWIWRILFLVGAATGAHSFEQVQLQQPGAELVKPGASVKMSCKASGYAFSSYWINWMKQKPGQGLEWIGQIYPGDGDTNYNGKFKGRATLTADTSSSTAYMQLSSLTSEDSAVYFCARSITTVVGCAMDYWGQGTSVTVSSTRASTKGPSVFPLAPSSKSTSGGTAALGCLVKDYFPEPVTVSWNSGALTSGVHTFPAVLQSSGLYSLSSVVTVPSSSLGTQTYICNVNHKPSNTKVDKRVEPKSCGTQVVDTTKAVITLQPPWVSVFQEETVTLHCEVLHLPGSSSTQWFLNGTATQTSTPSYRITSASVNDSGEYRCQRGLSGRSDPIQLEIHRGWLLLQVSSRVFTEGEPLALRCHAWKDKLVYNVLYYRNGKAFKFFHWNSNLTILKTNISHNGTYHCSGMGKHRYTSAGISVTVKELFPAPVLNASVTSPLLEGNLVTLSCETKLLLQRPGLQLYFSFYMGSKTLRGRNTSSEYQILTARREDSGLYWCEAATEDGNVLKRSPELELQVLGLQLPTPVWFHVLFYLAVGIMFLVNTVLWVTIRKELKRKKKWDLEISLDSGHEKKVISSLQEDRHLEEELKCQEQKEEQLQEGVHRKEPQGATSSRRVKFSRSADAPAYQQGQNQLYNELNLGRREEYDVLDKRRGRDPEMGGKPQRRKNPQEGLYNELQKDKMAEAYSEIGMKGERRRGKGHDGLYQGLSTATKDTYDALHMQALPPRRAKRSGSGVKQTLNFDLLKLAGDVESNPGPGHMSDSKEVPSLPFLRHLLEELDSHEDSLLLFLCHDAAPGCTTVTQALCSLSQQRKLTLAALVEMLYVLQRMDLLKSRFGLSKEGAEQLLGTSFLTRYRKLMVCVGEELDSSELRALRLFACNLNPSLSTALSESSRFVELVLALENVGLVSPSSVSVLADMLRTLRRLDLCQQLVEYEQQEQARYRYCYAASPSLPVRTLRRGHGASEHEQLCMPVQESSDSPELLRTPVQESSSDSPEQTT

SEQ ID NO: 7055 - protein, 1412 aa, Artificial Sequence
  Synthetic Polypeptide
MALPVTALLLPLALLLHAARPDIQMTQSPSSLSASVGDRVTITCKASDHINNWLAWYQQKPGQAPKLLIYGATTLETGVPSRFSGSGSGTDYTLTISSLQPEDFATYYCQQSWNTPWTFGQGTKLEIKRLEGQPKANPTVTLFPPSSEELQANKATLVCLISDFYPGAVTVAWKADGSPVKAGVETTKPSKQSNNKYAASSYLSLTPEQWKSHRSYSCQVTHEGSTVEKTVAPTECSGSTTPGERSSLPAFYPGTSGSCSGCGSLSLPLLAGLVAADAVASLLIVGAVFLCARPRRSPAQEDGKVYINMPGRGSTSRVKFSRSADAPAYQQGQNQLYNELNLGRREEYDVLDKRRGRDPEMGGKPQRRKNPQEGLYNELQKDKMAEAYSEIGMKGERRRGKGHDGLYQGLSTATKDTYDALHMQALPPRRAKRSGSGATNFSLLKQAGDVEENPGPMDWIWRILFLVGAATGAHSFEQVQLQQPGAELVKPGASVKMSCKASGYAFSSYWINWMKQKPGQGLEWIGQIYPGDGDTNYNGKFKGRATLTADTSSSTAYMQLSSLTSEDSAVYFCARSITTVVGCAMDYWGQGTSVTVSSTRASTKGPSVFPLAPSSKSTSGGTAALGCLVKDYFPEPVTVSWNSGALTSGVHTFPAVLQSSGLYSLSSVVTVPSSSLGTQTYICNVNHKPSNTKVDKRVEPKSCGTQVVDTTKAVITLQPPWVSVFQEETVTLHCEVLHLPGSSSTQWFLNGTATQTSTPSYRITSASVNDSGEYRCQRGLSGRSDPIQLEIHRGWLLLQVSSRVFTEGEPLALRCHAWKDKLVYNVLYYRNGKAFKFFHWNSNLTILKTNISHNGTYHCSGMGKHRYTSAGISVTVKELFPAPVLNASVTSPLLEGNLVTLSCETKLLLQRPGLQLYFSFYMGSKTLRGRNTSSEYQILTARREDSGLYWCEAATEDGNVLKRSPELELQVLGLQLPTPVWFHVLFYLAVGIMFLVNTVLWVTIRKELKRKKKWDLEISLDSGHEKKVISSLQEDRHLEEELKCQEQKEEQLQEGVHRKEPQGATSSRRVKFSRSADAPAYQQGQNQLYNELNLGRREEYDVLDKRRGRDPEMGGKPQRRKNPQEGLYNELQKDKMAEAYSEIGMKGERRRGKGHDGLYQGLSTATKDTYDALHMQALPPRRAKRSGSGVKQTLNFDLLKLAGDVESNPGPGHMTEYKPTVRLATRDDVPRAVRTLAAAFADYPATRHTVDPDRHIERVTELQELFLTRVGLDIGKVWVADDGAAVAVWTTPESVEAGAVFAEIGPRMAELSGSRLAAQQQMEGLLAPHRPKEPAWFLATVGVSPDHQGKGLGSAVVLPGVEAAERAGVPAFLETSAPRNLPFYERLGFTVTADVEVPEGPRTWCMTRKPGA

SEQ ID NO: 7056 - protein, 1549 aa, Artificial Sequence
  Synthetic Polypeptide
MALPVTALLLPLALLLHAARPEVQLVESGGGLVQAGGSLRLSCAASGRTFSMGWFRQAPGKEREFVAAITYSGGSPYYADSVKGRFTISRDNAKNTVYLQMNSLKPEDTAVYYCAANPTYGSDWNAENWGQGTQVTVSSGTGGGGSGGGGSGGGGSEFDIQMTQSPSSLSASVGDRVTITCKASDHINNWLAWYQQKPGQAPKLLIYGATTLETGVPSRFSGSGSGTDYTLTISSLQPEDFATYYCQQSWNTPWTFGQGTKLEIKRLEGQPKANPTVTLFPPSSEELQANKATLVCLISDFYPGAVTVAWKADGSPVKAGVETTKPSKQSNNKYAASSYLSLTPEQWKSHRSYSCQVTHEGSTVEKTVAPTECSGSTTPGERSSLPAFYPGTSGSCSGCGSLSLPLLAGLVAADAVASLLIVGAVFLCARPRRSPAQEDGKVYINMPGRGSTSRVKFSRSADAPAYQQGQNQLYNELNLGRREEYDVLDKRRGRDPEMGGKPQRRKNPQEGLYNELQKDKMAEAYSEIGMKGERRRGKGHDGLYQGLSTATKDTYDALHMQALPPRRAKRSGSGATNFSLLKQAGDVEENPGPMDWIWRILFLVGAATGAHSFEQVQLQQPGAELVKPGASVKMSCKASGYAFSSYWINWMKQKPGQGLEWIGQIYPGDGDTNYNGKFKGRATLTADTSSSTAYMQLSSLTSEDSAVYFCARSITTVVGCAMDYWGQGTSVTVSSTRASTKGPSVFPLAPSSKSTSGGTAALGCLVKDYFPEPVTVSWNSGALTSGVHTFPAVLQSSGLYSLSSVVTVPSSSLGTQTYICNVNHKPSNTKVDKRVEPKSCGTQVVDTTKAVITLQPPWVSVFQEETVTLHCEVLHLPGSSSTQWFLNGTATQTSTPSYRITSASVNDSGEYRCQRGLSGRSDPIQLEIHRGWLLLQVSSRVFTEGEPLALRCHAWKDKLVYNVLYYRNGKAFKFFHWNSNLTILKTNISHNGTYHCSGMGKHRYTSAGISVTVKELFPAPVLNASVTSPLLEGNLVTLSCETKLLLQRPGLQLYFSFYMGSKTLRGRNTSSEYQILTARREDSGLYWCEAATEDGNVLKRSPELELQVLGLQLPTPVWFHVLFYLAVGIMFLVNTVLWVTIRKELKRKKKWDLEISLDSGHEKKVISSLQEDRHLEEELKCQEQKEEQLQEGVHRKEPQGATSSRRVKFSRSADAPAYQQGQNQLYNELNLGRREEYDVLDKRRGRDPEMGGKPQRRKNPQEGLYNELQKDKMAEAYSEIGMKGERRRGKGHDGLYQGLSTATKDTYDALHMQALPPRRAKRSGSGVKQTLNFDLLKLAGDVESNPGPGHMTEYKPTVRLATRDDVPRAVRTLAAAFADYPATRHTVDPDRHIERVTELQELFLTRVGLDIGKVWVADDGAAVAVWTTPESVEAGAVFAEIGPRMAELSGSRLAAQQQMEGLLAPHRPKEPAWFLATVGVSPDHQGKGLGSAVVLPGVEAAERAGVPAFLETSAPRNLPFYERLGFTVTADVEVPEGPRTWCMTRKPGA

SEQ ID NO: 7057 - protein, 1686 aa, Artificial Sequence
  Synthetic Polypeptide
MALPVTALLLPLALLLHAARPEVQLVESGGGLVQAGGSLRLSCAASGRTFSMGWFRQAPGKEREFVAAITYSGGSPYYADSVKGRFTISRDNAKNTVYLQMNSLKPEDTAVYYCAANPTYGSDWNAENWGQGTQVTVSSGTGGGGSGGGGSGGGGSEFDIQMTQSPSSLSASVGDRVTITCKASDHINNWLAWYQQKPGQAPKLLIYGATTLETGVPSRFSGSGSGTDYTLTISSLQPEDFATYYCQQSWNTPWTFGQGTKLEIKRLEGQPKANPTVTLFPPSSEELQANKATLVCLISDFYPGAVTVAWKADGSPVKAGVETTKPSKQSNNKYAASSYLSLTPEQWKSHRSYSCQVTHEGSTVEKTVAPTECSGSTTPGERSSLPAFYPGTSGSCSGCGSLSLPLLAGLVAADAVASLLIVGAVFLCARPRRSPAQEDGKVYINMPGRGSTSRVKFSRSADAPAYQQGQNQLYNELNLGRREEYDVLDKRRGRDPEMGGKPQRRKNPQEGLYNELQKDKMAEAYSEIGMKGERRRGKGHDGLYQGLSTATKDTYDALHMQALPPRRAKRSGSGATNFSLLKQAGDVEENPGPMDWIWRILFLVGAATGAHSGPEVQLVESGGGLVQAGGSLRLSCAASGRTFTMGWFRQAPGKEREFVAAISLSPTLAYYADSVKGRFTISRDNAKNTVVLQMNSLKPEDTALYYCAADRKSVMSIRPDYWGQGTQVTVSSGSGGGGSGGGGSGGGGSFEQVQLQQPGAELVKPGASVKMSCKASGYAFSSYWINWMKQKPGQGLEWIGQIYPGDGDTNYNGKFKGRATLTADTSSSTAYMQLSSLTSEDSAVYFCARSITTVVGCAMDYWGQGTSVTVSSTRASTKGPSVFPLAPSSKSTSGGTAALGCLVKDYFPEPVTVSWNSGALTSGVHTFPAVLQSSGLYSLSSVVTVPSSSLGTQTYICNVNHKPSNTKVDKRVEPKSCGTQVVDTTKAVITLQPPWVSVFQEETVTLHCEVLHLPGSSSTQWFLNGTATQTSTPSYRITSASVNDSGEYRCQRGLSGRSDPIQLEIHRGWLLLQVSSRVFTEGEPLALRCHAWKDKLVYNVLYYRNGKAFKFFHWNSNLTILKTNISHNGTYHCSGMGKHRYTSAGISVTVKELFPAPVLNASVTSPLLEGNLVTLSCETKLLLQRPGLQLYFSFYMGSKTLRGRNTSSEYQILTARREDSGLYWCEAATEDGNVLKRSPELELQVLGLQLPTPVWFHVLFYLAVGIMFLVNTVLWVTIRKELKRKKKWDLEISLDSGHEKKVISSLQEDRHLEEELKCQEQKEEQLQEGVHRKEPQGATSSRRVKFSRSADAPAYQQGQNQLYNELNLGRREEYDVLDKRRGRDPEMGGKPQRRKNPQEGLYNELQKDKMAEAYSEIGMKGERRRGKGHDGLYQGLSTATKDTYDALHMQALPPRRAKRSGSGVKQTLNFDLLKLAGDVESNPGPGHMTEYKPTVRLATRDDVPRAVRTLAAAFADYPATRHTVDPDRHIERVTELQELFLTRVGLDIGKVWVADDGAAVAVWTTPESVEAGAVFAEIGPRMAELSGSRLAAQQQMEGLLAPHRPKEPAWFLATVGVSPDHQGKGLGSAVVLPGVEAAERAGVPAFLETSAPRNLPFYERLGFTVTADVEVPEGPRTWCMTRKPGA

SEQ ID NO: 7058 - protein, 1419 aa, Artificial Sequence
  Synthetic Polypeptide
MALPVTALLLPLALLLHAARPEVQLVESGGGLVQAGGSLRLSCAASGRTFSMGWFRQAPGKEREFVAAITYSGGSPYYADSVKGRFTISRDNAKNTVYLQMNSLKPEDTAVYYCAANPTYGSDWNAENWGQGTQVTVSSLEGQPKANPTVTLFPPSSEELQANKATLVCLISDFYPGAVTVAWKADGSPVKAGVETTKPSKQSNNKYAASSYLSLTPEQWKSHRSYSCQVTHEGSTVEKTVAPTECSGSTTPGERSSLPAFYPGTSGSCSGCGSLSLPLLAGLVAADAVASLLIVGAVFLCARPRRSPAQEDGKVYINMPGRGSTSRVKFSRSADAPAYQQGQNQLYNELNLGRREEYDVLDKRRGRDPEMGGKPQRRKNPQEGLYNELQKDKMAEAYSEIGMKGERRRGKGHDGLYQGLSTATKDTYDALHMQALPPRRAKRSGSGATNFSLLKQAGDVEENPGPMDWIWRILFLVGAATGAHSGPEVQLVESGGGLVQAGGSLRLSCAASGRTFTMGWFRQAPGKEREFVAAISLSPTLAYYADSVKGRFTISRDNAKNTVVLQMNSLKPEDTALYYCAADRKSVMSIRPDYWGQGTQVTVSSTRASTKGPSVFPLAPSSKSTSGGTAALGCLVKDYFPEPVTVSWNSGALTSGVHTFPAVLQSSGLYSLSSVVTVPSSSLGTQTYICNVNHKPSNTKVDKRVEPKSCGTQVVDTTKAVITLQPPWVSVFQEETVTLHCEVLHLPGSSSTQWFLNGTATQTSTPSYRITSASVNDSGEYRCQRGLSGRSDPIQLEIHRGWLLLQVSSRVFTEGEPLALRCHAWKDKLVYNVLYYRNGKAFKFFHWNSNLTILKTNISHNGTYHCSGMGKHRYTSAGISVTVKELFPAPVLNASVTSPLLEGNLVTLSCETKLLLQRPGLQLYFSFYMGSKTLRGRNTSSEYQILTARREDSGLYWCEAATEDGNVLKRSPELELQVLGLQLPTPVWFHVLFYLAVGIMFLVNTVLWVTIRKELKRKKKWDLEISLDSGHEKKVISSLQEDRHLEEELKCQEQKEEQLQEGVHRKEPQGATSSRRVKFSRSADAPAYQQGQNQLYNELNLGRREEYDVLDKRRGRDPEMGGKPQRRKNPQEGLYNELQKDKMAEAYSEIGMKGERRRGKGHDGLYQGLSTATKDTYDALHMQALPPRRAKRSGSGVKQTLNFDLLKLAGDVESNPGPGHMTEYKPTVRLATRDDVPRAVRTLAAAFADYPATRHTVDPDRHIERVTELQELFLTRVGLDIGKVWVADDGAAVAVWTTPESVEAGAVFAEIGPRMAELSGSRLAAQQQMEGLLAPHRPKEPAWFLATVGVSPDHQGKGLGSAVVLPGVEAAERAGVPAFLETSAPRNLPFYERLGFTVTADVEVPEGPRTWCMTRKPGA

SEQ ID NO: 7059 - protein, 1427 aa, Artificial Sequence
  Synthetic Polypeptide
MALPVTALLLPLALLLHAARPDIQMTQSPSSLSASVGDRVTITCKASDHINNWLAWYQQKPGQAPKLLIYGATTLETGVPSRFSGSGSGTDYTLTISSLQPEDFATYYCQQSWNTPWTFGQGTKLEIKRLEDLKNVFPPEVAVFEPSEAEISHTQKATLVCLATGFYPDHVELSWWVNGKEVHSGVSTDPQPLKEQPALNDSRYCLSSRLRVSATFWQNPRNHFRCQVQFYGLSENDEWTQDRAKPVTQIVSAEAWGRADCGSTTPGERSSLPAFYPGTSGSCSGCGSLSLPLLAGLVAADAVASLLIVGAVFLCARPRRSPAQEDGKVYINMPGRGSTSRVKFSRSADAPAYQQGQNQLYNELNLGRREEYDVLDKRRGRDPEMGGKPQRRKNPQEGLYNELQKDKMAEAYSEIGMKGERRRGKGHDGLYQGLSTATKDTYDALHMQALPPRRAKRSGSGATNFSLLKQAGDVEENPGPMDWIWRILFLVGAATGAHSFEQVQLQQPGAELVKPGASVKMSCKASGYAFSSYWINWMKQKPGQGLEWIGQIYPGDGDTNYNGKFKGRATLTADTSSSTAYMQLSSLTSEDSAVYFCARSITTVVGCAMDYWGQGTSVTVSSTRIQNPDPAVYQLRDSKSSDKSVCLFTDFDSQTNVSQSKDSDVYITDKTVLDMRSMDFKSNSAVAWSNKSDFACANAFNNSIIPEDTFFPSPESSCGTQVVDTTKAVITLQPPWVSVFQEETVTLHCEVLHLPGSSSTQWFLNGTATQTSTPSYRITSASVNDSGEYRCQRGLSGRSDPIQLEIHRGWLLLQVSSRVFTEGEPLALRCHAWKDKLVYNVLYYRNGKAFKFFHWNSNLTILKTNISHNGTYHCSGMGKHRYTSAGISVTVKELFPAPVLNASVTSPLLEGNLVTLSCETKLLLQRPGLQLYFSFYMGSKTLRGRNTSSEYQILTARREDSGLYWCEAATEDGNVLKRSPELELQVLGLQLPTPVWFHVLFYLAVGIMFLVNTVLWVTIRKELKRKKKWDLEISLDSGHEKKVISSLQEDRHLEEELKCQEQKEEQLQEGVHRKEPQGATSSRRVKFSRSADAPAYQQGQNQLYNELNLGRREEYDVLDKRRGRDPEMGGKPQRRKNPQEGLYNELQKDKMAEAYSEIGMKGERRRGKGHDGLYQGLSTATKDTYDALHMQALPPRRAKRSGSGVKQTLNFDLLKLAGDVESNPGPGHMTEYKPTVRLATRDDVPRAVRTLAAAFADYPATRHTVDPDRHIERVTELQELFLTRVGLDIGKVWVADDGAAVAVWTTPESVEAGAVFAEIGPRMAELSGSRLAAQQQMEGLLAPHRPKEPAWFLATVGVSPDHQGKGLGSAVVLPGVEAAERAGVPAFLETSAPRNLPFYERLGFTVTADVEVPEGPRTWCMTRKPGA

SEQ ID NO: 7060 - protein, 1564 aa, Artificial Sequence
  Synthetic Polypeptide
MALPVTALLLPLALLLHAARPEVQLVESGGGLVQAGGSLRLSCAASGRTFSMGWFRQAPGKEREFVAAITYSGGSPYYADSVKGRFTISRDNAKNTVYLQMNSLKPEDTAVYYCAANPTYGSDWNAENWGQGTQVTVSSGTGGGGSGGGGSGGGGSEFDIQMTQSPSSLSASVGDRVTITCKASDHINNWLAWYQQKPGQAPKLLIYGATTLETGVPSRFSGSGSGTDYTLTISSLQPEDFATYYCQQSWNTPWTFGQGTKLEIKRLEDLKNVFPPEVAVFEPSEAEISHTQKATLVCLATGFYPDHVELSWWVNGKEVHSGVSTDPQPLKEQPALNDSRYCLSSRLRVSATFWQNPRNHFRCQVQFYGLSENDEWTQDRAKPVTQIVSAEAWGRADCGSTTPGERSSLPAFYPGTSGSCSGCGSLSLPLLAGLVAADAVASLLIVGAVFLCARPRRSPAQEDGKVYINMPGRGSTSRVKFSRSADAPAYQQGQNQLYNELNLGRREEYDVLDKRRGRDPEMGGKPQRRKNPQEGLYNELQKDKMAEAYSEIGMKGERRRGKGHDGLYQGLSTATKDTYDALHMQALPPRRAKRSGSGATNFSLLKQAGDVEENPGPMDWIWRILFLVGAATGAHSFEQVQLQQPGAELVKPGASVKMSCKASGYAFSSYWINWMKQKPGQGLEWIGQIYPGDGDTNYNGKFKGRATLTADTSSSTAYMQLSSLTSEDSAVYFCARSITTVVGCAMDYWGQGTSVTVSSTRIQNPDPAVYQLRDSKSSDKSVCLFTDFDSQTNVSQSKDSDVYITDKTVLDMRSMDFKSNSAVAWSNKSDFACANAFNNSIIPEDTFFPSPESSCGTQVVDTTKAVITLQPPWVSVFQEETVTLHCEVLHLPGSSSTQWFLNGTATQTSTPSYRITSASVNDSGEYRCQRGLSGRSDPIQLEIHRGWLLLQVSSRVFTEGEPLALRCHAWKDKLVYNVLYYRNGKAFKFFHWNSNLTILKTNISHNGTYHCSGMGKHRYTSAGISVTVKELFPAPVLNASVTSPLLEGNLVTLSCETKLLLQRPGLQLYFSFYMGSKTLRGRNTSSEYQILTARREDSGLYWCEAATEDGNVLKRSPELELQVLGLQLPTPVWFHVLFYLAVGIMFLVNTVLWVTIRKELKRKKKWDLEISLDSGHEKKVISSLQEDRHLEEELKCQEQKEEQLQEGVHRKEPQGATSSRRVKFSRSADAPAYQQGQNQLYNELNLGRREEYDVLDKRRGRDPEMGGKPQRRKNPQEGLYNELQKDKMAEAYSEIGMKGERRRGKGHDGLYQGLSTATKDTYDALHMQALPPRRAKRSGSGVKQTLNFDLLKLAGDVESNPGPGHMTEYKPTVRLATRDDVPRAVRTLAAAFADYPATRHTVDPDRHIERVTELQELFLTRVGLDIGKVWVADDGAAVAVWTTPESVEAGAVFAEIGPRMAELSGSRLAAQQQMEGLLAPHRPKEPAWFLATVGVSPDHQGKGLGSAVVLPGVEAAERAGVPAFLETSAPRNLPFYERLGFTVTADVEVPEGPRTWCMTRKPGA

SEQ ID NO: 7061 - protein, 1701 aa, Artificial Sequence
  Synthetic Polypeptide
MALPVTALLLPLALLLHAARPEVQLVESGGGLVQAGGSLRLSCAASGRTFSMGWFRQAPGKEREFVAAITYSGGSPYYADSVKGRFTISRDNAKNTVYLQMNSLKPEDTAVYYCAANPTYGSDWNAENWGQGTQVTVSSGTGGGGSGGGGSGGGGSEFDIQMTQSPSSLSASVGDRVTITCKASDHINNWLAWYQQKPGQAPKLLIYGATTLETGVPSRFSGSGSGTDYTLTISSLQPEDFATYYCQQSWNTPWTFGQGTKLEIKRLEDLKNVFPPEVAVFEPSEAEISHTQKATLVCLATGFYPDHVELSWWVNGKEVHSGVSTDPQPLKEQPALNDSRYCLSSRLRVSATFWQNPRNHFRCQVQFYGLSENDEWTQDRAKPVTQIVSAEAWGRADCGSTTPGERSSLPAFYPGTSGSCSGCGSLSLPLLAGLVAADAVASLLIVGAVFLCARPRRSPAQEDGKVYINMPGRGSTSRVKFSRSADAPAYQQGQNQLYNELNLGRREEYDVLDKRRGRDPEMGGKPQRRKNPQEGLYNELQKDKMAEAYSEIGMKGERRRGKGHDGLYQGLSTATKDTYDALHMQALPPRRAKRSGSGATNFSLLKQAGDVEENPGPMDWIWRILFLVGAATGAHSGPEVQLVESGGGLVQAGGSLRLSCAASGRTFTMGWFRQAPGKEREFVAAISLSPTLAYYADSVKGRFTISRDNAKNTVVLQMNSLKPEDTALYYCAADRKSVMSIRPDYWGQGTQVTVSSGSGGGGSGGGGSGGGGSFEQVQLQQPGAELVKPGASVKMSCKASGYAFSSYWINWMKQKPGQGLEWIGQIYPGDGDTNYNGKFKGRATLTADTSSSTAYMQLSSLTSEDSAVYFCARSITTVVGCAMDYWGQGTSVTVSSTRIQNPDPAVYQLRDSKSSDKSVCLFTDFDSQTNVSQSKDSDVYITDKTVLDMRSMDFKSNSAVAWSNKSDFACANAFNNSIIPEDTFFPSPESSCGTQVVDTTKAVITLQPPWVSVFQEETVTLHCEVLHLPGSSSTQWFLNGTATQTSTPSYRITSASVNDSGEYRCQRGLSGRSDPIQLEIHRGWLLLQVSSRVFTEGEPLALRCHAWKDKLVYNVLYYRNGKAFKFFHWNSNLTILKTNISHNGTYHCSGMGKHRYTSAGISVTVKELFPAPVLNASVTSPLLEGNLVTLSCETKLLLQRPGLQLYFSFYMGSKTLRGRNTSSEYQILTARREDSGLYWCEAATEDGNVLKRSPELELQVLGLQLPTPVWFHVLFYLAVGIMFLVNTVLWVTIRKELKRKKKWDLEISLDSGHEKKVISSLQEDRHLEEELKCQEQKEEQLQEGVHRKEPQGATSSRRVKFSRSADAPAYQQGQNQLYNELNLGRREEYDVLDKRRGRDPEMGGKPQRRKNPQEGLYNELQKDKMAEAYSEIGMKGERRRGKGHDGLYQGLSTATKDTYDALHMQALPPRRAKRSGSGVKQTLNFDLLKLAGDVESNPGPGHMTEYKPTVRLATRDDVPRAVRTLAAAFADYPATRHTVDPDRHIERVTELQELFLTRVGLDIGKVWVADDGAAVAVWTTPESVEAGAVFAEIGPRMAELSGSRLAAQQQMEGLLAPHRPKEPAWFLATVGVSPDHQGKGLGSAVVLPGVEAAERAGVPAFLETSAPRNLPFYERLGFTVTADVEVPEGPRTWCMTRKPGA

SEQ ID NO: 7062 - protein, 1434 aa, Artificial Sequence
  Synthetic Polypeptide
MALPVTALLLPLALLLHAARPEVQLVESGGGLVQAGGSLRLSCAASGRTFSMGWFRQAPGKEREFVAAITYSGGSPYYADSVKGRFTISRDNAKNTVYLQMNSLKPEDTAVYYCAANPTYGSDWNAENWGQGTQVTVSSLEDLKNVFPPEVAVFEPSEAEISHTQKATLVCLATGFYPDHVELSWWVNGKEVHSGVSTDPQPLKEQPALNDSRYCLSSRLRVSATFWQNPRNHFRCQVQFYGLSENDEWTQDRAKPVTQIVSAEAWGRADCGSTTPGERSSLPAFYPGTSGSCSGCGSLSLPLLAGLVAADAVASLLIVGAVFLCARPRRSPAQEDGKVYINMPGRGSTSRVKFSRSADAPAYQQGQNQLYNELNLGRREEYDVLDKRRGRDPEMGGKPQRRKNPQEGLYNELQKDKMAEAYSEIGMKGERRRGKGHDGLYQGLSTATKDTYDALHMQALPPRRAKRSGSGATNFSLLKQAGDVEENPGPMDWIWRILFLVGAATGAHSGPEVQLVESGGGLVQAGGSLRLSCAASGRTFTMGWFRQAPGKEREFVAAISLSPTLAYYADSVKGRFTISRDNAKNTVVLQMNSLKPEDTALYYCAADRKSVMSIRPDYWGQGTQVTVSSTRIQNPDPAVYQLRDSKSSDKSVCLFTDFDSQTNVSQSKDSDVYITDKTVLDMRSMDFKSNSAVAWSNKSDFACANAFNNSIIPEDTFFPSPESSCGTQVVDTTKAVITLQPPWVSVFQEETVTLHCEVLHLPGSSSTQWFLNGTATQTSTPSYRITSASVNDSGEYRCQRGLSGRSDPIQLEIHRGWLLLQVSSRVFTEGEPLALRCHAWKDKLVYNVLYYRNGKAFKFFHWNSNLTILKTNISHNGTYHCSGMGKHRYTSAGISVTVKELFPAPVLNASVTSPLLEGNLVTLSCETKLLLQRPGLQLYFSFYMGSKTLRGRNTSSEYQILTARREDSGLYWCEAATEDGNVLKRSPELELQVLGLQLPTPVWFHVLFYLAVGIMFLVNTVLWVTIRKELKRKKKWDLEISLDSGHEKKVISSLQEDRHLEEELKCQEQKEEQLQEGVHRKEPQGATSSRRVKFSRSADAPAYQQGQNQLYNELNLGRREEYDVLDKRRGRDPEMGGKPQRRKNPQEGLYNELQKDKMAEAYSEIGMKGERRRGKGHDGLYQGLSTATKDTYDALHMQALPPRRAKRSGSGVKQTLNFDLLKLAGDVESNPGPGHMTEYKPTVRLATRDDVPRAVRTLAAAFADYPATRHTVDPDRHIERVTELQELFLTRVGLDIGKVWVADDGAAVAVWTTPESVEAGAVFAEIGPRMAELSGSRLAAQQQMEGLLAPHRPKEPAWFLATVGVSPDHQGKGLGSAVVLPGVEAAERAGVPAFLETSAPRNLPFYERLGFTVTADVEVPEGPRTWCMTRKPGA

SEQ ID NO: 7063 - protein, 585 aa, Artificial Sequence; identical to SEQ ID NO: 4431
  Synthetic Polypeptide

SEQ ID NO: 7064 - protein, 457 aa, Artificial Sequence; identical to SEQ ID NO: 6712
  Synthetic Polypeptide

SEQ ID NO: 7065 - protein, 457 aa, Artificial Sequence; identical to SEQ ID NO: 6713
  Synthetic Polypeptide

SEQ ID NO: 7066 - protein, 331 aa, Artificial Sequence; identical to SEQ ID NO: 6714
  Synthetic Polypeptide

SEQ ID NO: 7067 - protein, 331 aa, Artificial Sequence; identical to SEQ ID NO: 6715
  Synthetic Polypeptide

SEQ ID NO: 7068 - protein, 331 aa, Artificial Sequence; identical to SEQ ID NO: 6716
  Synthetic Polypeptide

SEQ ID NO: 7069 - protein, 333 aa, Artificial Sequence; identical to SEQ ID NO: 6717
  Synthetic Polypeptide

SEQ ID NO: 7070 - protein, 341 aa, Artificial Sequence; identical to SEQ ID NO: 6718
  Synthetic Polypeptide

SEQ ID NO: 7071 - protein, 337 aa, Artificial Sequence; identical to SEQ ID NO: 6719
  Synthetic Polypeptide

SEQ ID NO: 7072 - protein, 332 aa, Artificial Sequence; identical to SEQ ID NO: 6720
  Synthetic Polypeptide

SEQ ID NO: 7073 - protein, 337 aa, Artificial Sequence; identical to SEQ ID NO: 6721
  Synthetic Polypeptide

SEQ ID NO: 7074 - protein, 271 aa, Artificial Sequence; identical to SEQ ID NO: 6722
  Synthetic Polypeptide

SEQ ID NO: 7075 - protein, 302 aa, Artificial Sequence; identical to SEQ ID NO: 6723
  Synthetic Polypeptide

SEQ ID NO: 7076 - protein, 303 aa, Artificial Sequence; identical to SEQ ID NO: 6724
  Synthetic Polypeptide

SEQ ID NO: 7077 - protein, 520 aa, Artificial Sequence; identical to SEQ ID NO: 6725
  Synthetic Polypeptide

SEQ ID NO: 7078 - protein, 400 aa, Artificial Sequence; identical to SEQ ID NO: 6726
  Synthetic Polypeptide

SEQ ID NO: 7079 - protein, 266 aa, Artificial Sequence; identical to SEQ ID NO: 6727
  Synthetic Polypeptide

SEQ ID NO: 7080 - protein, 241 aa, Artificial Sequence; identical to SEQ ID NO: 6728
  Synthetic Polypeptide

SEQ ID NO: 7081 - protein, 499 aa, Artificial Sequence; identical to SEQ ID NO: 6729
  Synthetic Polypeptide

SEQ ID NO: 7082 - protein, 499 aa, Artificial Sequence; identical to SEQ ID NO: 6730
  Synthetic Polypeptide

SEQ ID NO: 7083 - protein, 1485 aa, Artificial Sequence
  Synthetic Polypeptide
MALPVTALLLPLALLLHAARPDIQMTQSPSSLSASVGDRVTITCKASDHINNWLAWYQQKPGQAPKLLIYGATTLETGVPSRFSGSGSGTDYTLTISSLQPEDFATYYCQQSWNTPWTFGQGTKLEIKRLEQVVDTTKAVITLQPPWVSVFQEETVTLHCEVLHLPGSSSTQWFLNGTATQTSTPSYRITSASVNDSGEYRCQRGLSGRSDPIQLEIHRGWLLLQVSSRVFTEGEPLALRCHAWKDKLVYNVLYYRNGKAFKFFHWNSNLTILKTNISHNGTYHCSGMGKHRYTSAGISVTVKELFPAPVLNASVTSPLLEGNLVTLSCETKLLLQRPGLQLYFSFYMGSKTLRGRNTSSEYQILTARREDSGLYWCEAATEDGNVLKRSPELELQVLGLQLPTPVWFHVLFYLAVGIMFLVNTVLWVTIRKELKRKKKWDLEISLDSGHEKKVISSLQEDRHLEEELKCQEQKEEQLQEGVHRKEPQGATSTSRVKFSRSADAPAYQQGQNQLYNELNLGRREEYDVLDKRRGRDPEMGGKPQRRKNPQEGLYNELQKDKMAEAYSEIGMKGERRRGKGHDGLYQGLSTATKDTYDALHMQALPPRRAKRSGSGATNFSLLKQAGDVEENPGPMDWIWRILFLVGAATGAHSFEQVQLQQPGAELVKPGASVKMSCKASGYAFSSYWINWMKQKPGQGLEWIGQIYPGDGDTNYNGKFKGRATLTADTSSSTAYMQLSSLTSEDSAVYFCARSITTVVGCAMDYWGQGTSVTVSSTRQVVDTTKAVITLQPPWVSVFQEETVTLHCEVLHLPGSSSTQWFLNGTATQTSTPSYRITSASVNDSGEYRCQRGLSGRSDPIQLEIHRGWLLLQVSSRVFTEGEPLALRCHAWKDKLVYNVLYYRNGKAFKFFHWNSNLTILKTNISHNGTYHCSGMGKHRYTSAGISVTVKELFPAPVLNASVTSPLLEGNLVTLSCETKLLLQRPGLQLYFSFYMGSKTLRGRNTSSEYQILTARREDSGLYWCEAATEDGNVLKRSPELELQVLGLQLPTPVWFHVLFYLAVGIMFLVNTVLWVTIRKELKRKKKWDLEISLDSGHEKKVISSLQEDRHLEEELKCQEQKEEQLQEGVHRKEPQGATSSRRVKFSRSADAPAYQQGQNQLYNELNLGRREEYDVLDKRRGRDPEMGGKPQRRKNPQEGLYNELQKDKMAEAYSEIGMKGERRRGKGHDGLYQGLSTATKDTYDALHMQALPPRRAKRSGSGVKQTLNFDLLKLAGDVESNPGPGHMTEYKPTVRLATRDDVPRAVRTLAAAFADYPATRHTVDPDRHIERVTELQELFLTRVGLDIGKVWVADDGAAVAVWTTPESVEAGAVFAEIGPRMAELSGSRLAAQQQMEGLLAPHRPKEPAWFLATVGVSPDHQGKGLGSAVVLPGVEAAERAGVPAFLETSAPRNLPFYERLGFTVTADVEVPEGPRTWCMTRKPGA

SEQ ID NO: 7084 - protein, 1537 aa, Artificial Sequence
  Synthetic Polypeptide
MALPVTALLLPLALLLHAARPACEVQLLESGGGLIQPGGSLRLSCAASGFTFSSHAMTWVRQAPGKGLEWVSAISGSGDYTHYADSVKGRFTISRDNSKNTVYLQMNSLRAEDSAVYYCAKDEDGGSLLGHRGQGTLVTVSSGTGGGGSGGGGSGGGGSEFGSLEQVVDTTKAVITLQPPWVSVFQEETVTLHCEVLHLPGSSSTQWFLNGTATQTSTPSYRITSASVNDSGEYRCQRGLSGRSDPIQLEIHRGWLLLQVSSRVFTEGEPLALRCHAWKDKLVYNVLYYRNGKAFKFFHWNSNLTILKTNISHNGTYHCSGMGKHRYTSAGISVTVKELFPAPVLNASVTSPLLEGNLVTLSCETKLLLQRPGLQLYFSFYMGSKTLRGRNTSSEYQILTARREDSGLYWCEAATEDGNVLKRSPELELQVLGLQLPTPVWFHVLFYLAVGIMFLVNTVLWVTIRKELKRKKKWDLEISLDSGHEKKVISSLQEDRHLEEELKCQEQKEEQLQEGVHRKEPQGATSTSRVKFSRSADAPAYQQGQNQLYNELNLGRREEYDVLDKRRGRDPEMGGKPQRRKNPQEGLYNELQKDKMAEAYSEIGMKGERRRGKGHDGLYQGLSTATKDTYDALHMQALPPRRAKRSGSGATNFSLLKQAGDVEENPGPMDWIWRILFLVGAATGAHSGPEVQLVESGGGLVQAGGSLRLSCAASGRTFSMGWFRQAPGKEREFVAAITYSGGSPYYADSVKGRFTISRDNAKNTVYLQMNSLKPEDTAVYYCAANPTYGSDWNAENWGQGTQVTVSSGSGGGGSGGGGSGGGGSFEGSTRQVVDTTKAVITLQPPWVSVFQEETVTLHCEVLHLPGSSSTQWFLNGTATQTSTPSYRITSASVNDSGEYRCQRGLSGRSDPIQLEIHRGWLLLQVSSRVFTEGEPLALRCHAWKDKLVYNVLYYRNGKAFKFFHWNSNLTILKTNISHNGTYHCSGMGKHRYTSAGISVTVKELFPAPVLNASVTSPLLEGNLVTLSCETKLLLQRPGLQLYFSFYMGSKTLRGRNTSSEYQILTARREDSGLYWCEAATEDGNVLKRSPELELQVLGLQLPTPVWFHVLFYLAVGIMFLVNTVLWVTIRKELKRKKKWDLEISLDSGHEKKVISSLQEDRHLEEELKCQEQKEEQLQEGVHRKEPQGATSSRRVKFSRSADAPAYQQGQNQLYNELNLGRREEYDVLDKRRGRDPEMGGKPQRRKNPQEGLYNELQKDKMAEAYSEIGMKGERRRGKGHDGLYQGLSTATKDTYDALHMQALPPRRAKRSGSGVKQTLNFDLLKLAGDVESNPGPGHMTEYKPTVRLATRDDVPRAVRTLAAAFADYPATRHTVDPDRHIERVTELQELFLTRVGLDIGKVWVADDGAAVAVWTTPESVEAGAVFAEIGPRMAELSGSRLAAQQQMEGLLAPHRPKEPAWFLATVGVSPDHQGKGLGSAVVLPGVEAAERAGVPAFLETSAPRNLPFYERLGFTVTADVEVPEGPRTWCMTRKPGA

SEQ ID NO: 7085 - protein, 1687 aa, Artificial Sequence
  Synthetic Polypeptide
MALPVTALLLPLALLLHAARPDIQMTQSPSSLSASVGDRVTITCKASDHINNWLAWYQQKPGQAPKLLIYGATTLETGVPSRFSGSGSGTDYTLTISSLQPEDFATYYCQQSWNTPWTFGQGTKLEIKRLEGQPKANPTVTLFPPSSEELQANKATLVCLISDFYPGAVTVAWKADGSPVKAGVETTKPSKQSNNKYAASSYLSLTPEQWKSHRSYSCQVTHEGSTVEKTVAPTECSGSQVVDTTKAVITLQPPWVSVFQEETVTLHCEVLHLPGSSSTQWFLNGTATQTSTPSYRITSASVNDSGEYRCQRGLSGRSDPIQLEIHRGWLLLQVSSRVFTEGEPLALRCHAWKDKLVYNVLYYRNGKAFKFFHWNSNLTILKTNISHNGTYHCSGMGKHRYTSAGISVTVKELFPAPVLNASVTSPLLEGNLVTLSCETKLLLQRPGLQLYFSFYMGSKTLRGRNTSSEYQILTARREDSGLYWCEAATEDGNVLKRSPELELQVLGLQLPTPVWFHVLFYLAVGIMFLVNTVLWVTIRKELKRKKKWDLEISLDSGHEKKVISSLQEDRHLEEELKCQEQKEEQLQEGVHRKEPQGATSTSRVKFSRSADAPAYQQGQNQLYNELNLGRREEYDVLDKRRGRDPEMGGKPQRRKNPQEGLYNELQKDKMAEAYSEIGMKGERRRGKGHDGLYQGLSTATKDTYDALHMQALPPRRAKRSGSGATNFSLLKQAGDVEENPGPMDWIWRILFLVGAATGAHSFEQVQLQQPGAELVKPGASVKMSCKASGYAFSSYWINWMKQKPGQGLEWIGQIYPGDGDTNYNGKFKGRATLTADTSSSTAYMQLSSLTSEDSAVYFCARSITTVVGCAMDYWGQGTSVTVSSTRASTKGPSVFPLAPSSKSTSGGTAALGCLVKDYFPEPVTVSWNSGALTSGVHTFPAVLQSSGLYSLSSVVTVPSSSLGTQTYICNVNHKPSNTKVDKRVEPKSCGTQVVDTTKAVITLQPPWVSVFQEETVTLHCEVLHLPGSSSTQWFLNGTATQTSTPSYRITSASVNDSGEYRCQRGLSGRSDPIQLEIHRGWLLLQVSSRVFTEGEPLALRCHAWKDKLVYNVLYYRNGKAFKFFHWNSNLTILKTNISHNGTYHCSGMGKHRYTSAGISVTVKELFPAPVLNASVTSPLLEGNLVTLSCETKLLLQRPGLQLYFSFYMGSKTLRGRNTSSEYQILTARREDSGLYWCEAATEDGNVLKRSPELELQVLGLQLPTPVWFHVLFYLAVGIMFLVNTVLWVTIRKELKRKKKWDLEISLDSGHEKKVISSLQEDRHLEEELKCQEQKEEQLQEGVHRKEPQGATSSRRVKFSRSADAPAYQQGQNQLYNELNLGRREEYDVLDKRRGRDPEMGGKPQRRKNPQEGLYNELQKDKMAEAYSEIGMKGERRRGKGHDGLYQGLSTATKDTYDALHMQALPPRRAKRSGSGVKQTLNFDLLKLAGDVESNPGPGHMATYEVLCEVARKLGTDDREVVLFLLNVFIPQPTLAQLIGALRALKEEGRLTFPLLAECLFRAGRRDLLRDLLHLDPRFLERHLAGTMSYFSPYQLTVLHVDGELCARDIRSLIFLSKDTIGSRSTPQTFLHWVYCMENLDLLGPTDVDALMSMLRSLSRVDLQRQVQTLMGLHLSGPSHSQHYRHTP

SEQ ID NO: 7086 - protein, 1740 aa, Artificial Sequence
  Synthetic Polypeptide
MALPVTALLLPLALLLHAARPDIQMTQSPSSLSASVGDRVTITCKASDHINNWLAWYQQKPGQAPKLLIYGATTLETGVPSRFSGSGSGTDYTLTISSLQPEDFATYYCQQSWNTPWTFGQGTKLEIKRLEGQPKANPTVTLFPPSSEELQANKATLVCLISDFYPGAVTVAWKADGSPVKAGVETTKPSKQSNNKYAASSYLSLTPEQWKSHRSYSCQVTHEGSTVEKTVAPTECSGSQVVDTTKAVITLQPPWVSVFQEETVTLHCEVLHLPGSSSTQWFLNGTATQTSTPSYRITSASVNDSGEYRCQRGLSGRSDPIQLEIHRGWLLLQVSSRVFTEGEPLALRCHAWKDKLVYNVLYYRNGKAFKFFHWNSNLTILKTNISHNGTYHCSGMGKHRYTSAGISVTVKELFPAPVLNASVTSPLLEGNLVTLSCETKLLLQRPGLQLYFSFYMGSKTLRGRNTSSEYQILTARREDSGLYWCEAATEDGNVLKRSPELELQVLGLQLPTPVWFHVLFYLAVGIMFLVNTVLWVTIRKELKRKKKWDLEISLDSGHEKKVISSLQEDRHLEEELKCQEQKEEQLQEGVHRKEPQGATSTSRVKFSRSADAPAYQQGQNQLYNELNLGRREEYDVLDKRRGRDPEMGGKPQRRKNPQEGLYNELQKDKMAEAYSEIGMKGERRRGKGHDGLYQGLSTATKDTYDALHMQALPPRRAKRSGSGATNFSLLKQAGDVEENPGPMDWIWRILFLVGAATGAHSFEQVQLQQPGAELVKPGASVKMSCKASGYAFSSYWINWMKQKPGQGLEWIGQIYPGDGDTNYNGKFKGRATLTADTSSSTAYMQLSSLTSEDSAVYFCARSITTVVGCAMDYWGQGTSVTVSSTRASTKGPSVFPLAPSSKSTSGGTAALGCLVKDYFPEPVTVSWNSGALTSGVHTFPAVLQSSGLYSLSSVVTVPSSSLGTQTYICNVNHKPSNTKVDKRVEPKSCGTQVVDTTKAVITLQPPWVSVFQEETVTLHCEVLHLPGSSSTQWFLNGTATQTSTPSYRITSASVNDSGEYRCQRGLSGRSDPIQLEIHRGWLLLQVSSRVFTEGEPLALRCHAWKDKLVYNVLYYRNGKAFKFFHWNSNLTILKTNISHNGTYHCSGMGKHRYTSAGISVTVKELFPAPVLNASVTSPLLEGNLVTLSCETKLLLQRPGLQLYFSFYMGSKTLRGRNTSSEYQILTARREDSGLYWCEAATEDGNVLKRSPELELQVLGLQLPTPVWFHVLFYLAVGIMFLVNTVLWVTIRKELKRKKKWDLEISLDSGHEKKVISSLQEDRHLEEELKCQEQKEEQLQEGVHRKEPQGATSSRRVKFSRSADAPAYQQGQNQLYNELNLGRREEYDVLDKRRGRDPEMGGKPQRRKNPQEGLYNELQKDKMAEAYSEIGMKGERRRGKGHDGLYQGLSTATKDTYDALHMQALPPRRAKRSGSGVKQTLNFDLLKLAGDVESNPGPGHMSDSKEVPSLPFLRHLLEELDSHEDSLLLFLCHDAAPGCTTVTQALCSLSQQRKLTLAALVEMLYVLQRMDLLKSRFGLSKEGAEQLLGTSFLTRYRKLMVCVGEELDSSELRALRLFACNLNPSLSTALSESSRFVELVLALENVGLVSPSSVSVLADMLRTLRRLDLCQQLVEYEQQEQARYRYCYAASPSLPVRTLRRGHGASEHEQLCMPVQESSDSPELLRTPVQESSSDSPEQTT

SEQ ID NO: 7087 - protein, 1698 aa, Artificial Sequence
  Synthetic Polypeptide
MALPVTALLLPLALLLHAARPDIQMTQSPSSLSASVGDRVTITCKASDHINNWLAWYQQKPGQAPKLLIYGATTLETGVPSRFSGSGSGTDYTLTISSLQPEDFATYYCQQSWNTPWTFGQGTKLEIKRLEGQPKANPTVTLFPPSSEELQANKATLVCLISDFYPGAVTVAWKADGSPVKAGVETTKPSKQSNNKYAASSYLSLTPEQWKSHRSYSCQVTHEGSTVEKTVAPTECSGSQVVDTTKAVITLQPPWVSVFQEETVTLHCEVLHLPGSSSTQWFLNGTATQTSTPSYRITSASVNDSGEYRCQRGLSGRSDPIQLEIHRGWLLLQVSSRVFTEGEPLALRCHAWKDKLVYNVLYYRNGKAFKFFHWNSNLTILKTNISHNGTYHCSGMGKHRYTSAGISVTVKELFPAPVLNASVTSPLLEGNLVTLSCETKLLLQRPGLQLYFSFYMGSKTLRGRNTSSEYQILTARREDSGLYWCEAATEDGNVLKRSPELELQVLGLQLPTPVWFHVLFYLAVGIMFLVNTVLWVTIRKELKRKKKWDLEISLDSGHEKKVISSLQEDRHLEEELKCQEQKEEQLQEGVHRKEPQGATSTSRVKFSRSADAPAYQQGQNQLYNELNLGRREEYDVLDKRRGRDPEMGGKPQRRKNPQEGLYNELQKDKMAEAYSEIGMKGERRRGKGHDGLYQGLSTATKDTYDALHMQALPPRRAKRSGSGATNFSLLKQAGDVEENPGPMDWIWRILFLVGAATGAHSFEQVQLQQPGAELVKPGASVKMSCKASGYAFSSYWINWMKQKPGQGLEWIGQIYPGDGDTNYNGKFKGRATLTADTSSSTAYMQLSSLTSEDSAVYFCARSITTVVGCAMDYWGQGTSVTVSSTRASTKGPSVFPLAPSSKSTSGGTAALGCLVKDYFPEPVTVSWNSGALTSGVHTFPAVLQSSGLYSLSSVVTVPSSSLGTQTYICNVNHKPSNTKVDKRVEPKSCGTQVVDTTKAVITLQPPWVSVFQEETVTLHCEVLHLPGSSSTQWFLNGTATQTSTPSYRITSASVNDSGEYRCQRGLSGRSDPIQLEIHRGWLLLQVSSRVFTEGEPLALRCHAWKDKLVYNVLYYRNGKAFKFFHWNSNLTILKTNISHNGTYHCSGMGKHRYTSAGISVTVKELFPAPVLNASVTSPLLEGNLVTLSCETKLLLQRPGLQLYFSFYMGSKTLRGRNTSSEYQILTARREDSGLYWCEAATEDGNVLKRSPELELQVLGLQLPTPVWFHVLFYLAVGIMFLVNTVLWVTIRKELKRKKKWDLEISLDSGHEKKVISSLQEDRHLEEELKCQEQKEEQLQEGVHRKEPQGATSSRRVKFSRSADAPAYQQGQNQLYNELNLGRREEYDVLDKRRGRDPEMGGKPQRRKNPQEGLYNELQKDKMAEAYSEIGMKGERRRGKGHDGLYQGLSTATKDTYDALHMQALPPRRAKRSGSGVKQTLNFDLLKLAGDVESNPGPGHMTEYKPTVRLATRDDVPRAVRTLAAAFADYPATRHTVDPDRHIERVTELQELFLTRVGLDIGKVWVADDGAAVAVWTTPESVEAGAVFAEIGPRMAELSGSRLAAQQQMEGLLAPHRPKEPAWFLATVGVSPDHQGKGLGSAVVLPGVEAAERAGVPAFLETSAPRNLPFYERLGFTVTADVEVPEGPRTWCMTRKPGA

SEQ ID NO: 7088 - protein, 1835 aa, Artificial Sequence
  Synthetic Polypeptide
MALPVTALLLPLALLLHAARPEVQLVESGGGLVQAGGSLRLSCAASGRTFSMGWFRQAPGKEREFVAAITYSGGSPYYADSVKGRFTISRDNAKNTVYLQMNSLKPEDTAVYYCAANPTYGSDWNAENWGQGTQVTVSSGTGGGGSGGGGSGGGGSEFDIQMTQSPSSLSASVGDRVTITCKASDHINNWLAWYQQKPGQAPKLLIYGATTLETGVPSRFSGSGSGTDYTLTISSLQPEDFATYYCQQSWNTPWTFGQGTKLEIKRLEGQPKANPTVTLFPPSSEELQANKATLVCLISDFYPGAVTVAWKADGSPVKAGVETTKPSKQSNNKYAASSYLSLTPEQWKSHRSYSCQVTHEGSTVEKTVAPTECSGSQVVDTTKAVITLQPPWVSVFQEETVTLHCEVLHLPGSSSTQWFLNGTATQTSTPSYRITSASVNDSGEYRCQRGLSGRSDPIQLEIHRGWLLLQVSSRVFTEGEPLALRCHAWKDKLVYNVLYYRNGKAFKFFHWNSNLTILKTNISHNGTYHCSGMGKHRYTSAGISVTVKELFPAPVLNASVTSPLLEGNLVTLSCETKLLLQRPGLQLYFSFYMGSKTLRGRNTSSEYQILTARREDSGLYWCEAATEDGNVLKRSPELELQVLGLQLPTPVWFHVLFYLAVGIMFLVNTVLWVTIRKELKRKKKWDLEISLDSGHEKKVISSLQEDRHLEEELKCQEQKEEQLQEGVHRKEPQGATSTSRVKFSRSADAPAYQQGQNQLYNELNLGRREEYDVLDKRRGRDPEMGGKPQRRKNPQEGLYNELQKDKMAEAYSEIGMKGERRRGKGHDGLYQGLSTATKDTYDALHMQALPPRRAKRSGSGATNFSLLKQAGDVEENPGPMDWIWRILFLVGAATGAHSFEQVQLQQPGAELVKPGASVKMSCKASGYAFSSYWINWMKQKPGQGLEWIGQIYPGDGDTNYNGKFKGRATLTADTSSSTAYMQLSSLTSEDSAVYFCARSITTVVGCAMDYWGQGTSVTVSSTRASTKGPSVFPLAPSSKSTSGGTAALGCLVKDYFPEPVTVSWNSGALTSGVHTFPAVLQSSGLYSLSSVVTVPSSSLGTQTYICNVNHKPSNTKVDKRVEPKSCGTQVVDTTKAVITLQPPWVSVFQEETVTLHCEVLHLPGSSSTQWFLNGTATQTSTPSYRITSASVNDSGEYRCQRGLSGRSDPIQLEIHRGWLLLQVSSRVFTEGEPLALRCHAWKDKLVYNVLYYRNGKAFKFFHWNSNLTILKTNISHNGTYHCSGMGKHRYTSAGISVTVKELFPAPVLNASVTSPLLEGNLVTLSCETKLLLQRPGLQLYFSFYMGSKTLRGRNTSSEYQILTARREDSGLYWCEAATEDGNVLKRSPELELQVLGLQLPTPVWFHVLFYLAVGIMFLVNTVLWVTIRKELKRKKKWDLEISLDSGHEKKVISSLQEDRHLEEELKCQEQKEEQLQEGVHRKEPQGATSSRRVKFSRSADAPAYQQGQNQLYNELNLGRREEYDVLDKRRGRDPEMGGKPQRRKNPQEGLYNELQKDKMAEAYSEIGMKGERRRGKGHDGLYQGLSTATKDTYDALHMQALPPRRAKRSGSGVKQTLNFDLLKLAGDVESNPGPGHMTEYKPTVRLATRDDVPRAVRTLAAAFADYPATRHTVDPDRHIERVTELQELFLTRVGLDIGKVWVADDGAAVAVWTTPESVEAGAVFAEIGPRMAELSGSRLAAQQQMEGLLAPHRPKEPAWFLATVGVSPDHQGKGLGSAVVLPGVEAAERAGVPAFLETSAPRNLPFYERLGFTVTADVEVPEGPRTWCMTRKPGA

SEQ ID NO: 7089 - protein, 1972 aa, Artificial Sequence
  Synthetic Polypeptide
MALPVTALLLPLALLLHAARPEVQLVESGGGLVQAGGSLRLSCAASGRTFSMGWFRQAPGKEREFVAAITYSGGSPYYADSVKGRFTISRDNAKNTVYLQMNSLKPEDTAVYYCAANPTYGSDWNAENWGQGTQVTVSSGTGGGGSGGGGSGGGGSEFDIQMTQSPSSLSASVGDRVTITCKASDHINNWLAWYQQKPGQAPKLLIYGATTLETGVPSRFSGSGSGTDYTLTISSLQPEDFATYYCQQSWNTPWTFGQGTKLEIKRLEGQPKANPTVTLFPPSSEELQANKATLVCLISDFYPGAVTVAWKADGSPVKAGVETTKPSKQSNNKYAASSYLSLTPEQWKSHRSYSCQVTHEGSTVEKTVAPTECSGSQVVDTTKAVITLQPPWVSVFQEETVTLHCEVLHLPGSSSTQWFLNGTATQTSTPSYRITSASVNDSGEYRCQRGLSGRSDPIQLEIHRGWLLLQVSSRVFTEGEPLALRCHAWKDKLVYNVLYYRNGKAFKFFHWNSNLTILKTNISHNGTYHCSGMGKHRYTSAGISVTVKELFPAPVLNASVTSPLLEGNLVTLSCETKLLLQRPGLQLYFSFYMGSKTLRGRNTSSEYQILTARREDSGLYWCEAATEDGNVLKRSPELELQVLGLQLPTPVWFHVLFYLAVGIMFLVNTVLWVTIRKELKRKKKWDLEISLDSGHEKKVISSLQEDRHLEEELKCQEQKEEQLQEGVHRKEPQGATSTSRVKFSRSADAPAYQQGQNQLYNELNLGRREEYDVLDKRRGRDPEMGGKPQRRKNPQEGLYNELQKDKMAEAYSEIGMKGERRRGKGHDGLYQGLSTATKDTYDALHMQALPPRRAKRSGSGATNFSLLKQAGDVEENPGPMDWIWRILFLVGAATGAHSGPEVQLVESGGGLVQAGGSLRLSCAASGRTFTMGWFRQAPGKEREFVAAISLSPTLAYYADSVKGRFTISRDNAKNTVVLQMNSLKPEDTALYYCAADRKSVMSIRPDYWGQGTQVTVSSGSGGGGSGGGGSGGGGSFEQVQLQQPGAELVKPGASVKMSCKASGYAFSSYWINWMKQKPGQGLEWIGQIYPGDGDTNYNGKFKGRATLTADTSSSTAYMQLSSLTSEDSAVYFCARSITTVVGCAMDYWGQGTSVTVSSTRASTKGPSVFPLAPSSKSTSGGTAALGCLVKDYFPEPVTVSWNSGALTSGVHTFPAVLQSSGLYSLSSVVTVPSSSLGTQTYICNVNHKPSNTKVDKRVEPKSCGTQVVDTTKAVITLQPPWVSVFQEETVTLHCEVLHLPGSSSTQWFLNGTATQTSTPSYRITSASVNDSGEYRCQRGLSGRSDPIQLEIHRGWLLLQVSSRVFTEGEPLALRCHAWKDKLVYNVLYYRNGKAFKFFHWNSNLTILKTNISHNGTYHCSGMGKHRYTSAGISVTVKELFPAPVLNASVTSPLLEGNLVTLSCETKLLLQRPGLQLYFSFYMGSKTLRGRNTSSEYQILTARREDSGLYWCEAATEDGNVLKRSPELELQVLGLQLPTPVWFHVLFYLAVGIMFLVNTVLWVTIRKELKRKKKWDLEISLDSGHEKKVISSLQEDRHLEEELKCQEQKEEQLQEGVHRKEPQGATSSRRVKFSRSADAPAYQQGQNQLYNELNLGRREEYDVLDKRRGRDPEMGGKPQRRKNPQEGLYNELQKDKMAEAYSEIGMKGERRRGKGHDGLYQGLSTATKDTYDALHMQALPPRRAKRSGSGVKQTLNFDLLKLAGDVESNPGPGHMTEYKPTVRLATRDDVPRAVRTLAAAFADYPATRHTVDPDRHIERVTELQELFLTRVGLDIGKVWVADDGAAVAVWTTPESVEAGAVFAEIGPRMAELSGSRLAAQQQMEGLLAPHRPKEPAWFLATVGVSPDHQGKGLGSAVVLPGVEAAERAGVPAFLETSAPRNLPFYERLGFTVTADVEVPEGPRTWCMTRKPGA

SEQ ID NO: 7090 - protein, 1705 aa, Artificial Sequence
  Synthetic Polypeptide
MALPVTALLLPLALLLHAARPEVQLVESGGGLVQAGGSLRLSCAASGRTFSMGWFRQAPGKEREFVAAITYSGGSPYYADSVKGRFTISRDNAKNTVYLQMNSLKPEDTAVYYCAANPTYGSDWNAENWGQGTQVTVSSLEGQPKANPTVTLFPPSSEELQANKATLVCLISDFYPGAVTVAWKADGSPVKAGVETTKPSKQSNNKYAASSYLSLTPEQWKSHRSYSCQVTHEGSTVEKTVAPTECSGSQVVDTTKAVITLQPPWVSVFQEETVTLHCEVLHLPGSSSTQWFLNGTATQTSTPSYRITSASVNDSGEYRCQRGLSGRSDPIQLEIHRGWLLLQVSSRVFTEGEPLALRCHAWKDKLVYNVLYYRNGKAFKFFHWNSNLTILKTNISHNGTYHCSGMGKHRYTSAGISVTVKELFPAPVLNASVTSPLLEGNLVTLSCETKLLLQRPGLQLYFSFYMGSKTLRGRNTSSEYQILTARREDSGLYWCEAATEDGNVLKRSPELELQVLGLQLPTPVWFHVLFYLAVGIMFLVNTVLWVTIRKELKRKKKWDLEISLDSGHEKKVISSLQEDRHLEEELKCQEQKEEQLQEGVHRKEPQGATSTSRVKFSRSADAPAYQQGQNQLYNELNLGRREEYDVLDKRRGRDPEMGGKPQRRKNPQEGLYNELQKDKMAEAYSEIGMKGERRRGKGHDGLYQGLSTATKDTYDALHMQALPPRRAKRSGSGATNFSLLKQAGDVEENPGPMDWIWRILFLVGAATGAHSGPEVQLVESGGGLVQAGGSLRLSCAASGRTFTMGWFRQAPGKEREFVAAISLSPTLAYYADSVKGRFTISRDNAKNTVVLQMNSLKPEDTALYYCAADRKSVMSIRPDYWGQGTQVTVSSTRASTKGPSVFPLAPSSKSTSGGTAALGCLVKDYFPEPVTVSWNSGALTSGVHTFPAVLQSSGLYSLSSVVTVPSSSLGTQTYICNVNHKPSNTKVDKRVEPKSCGTQVVDTTKAVITLQPPWVSVFQEETVTLHCEVLHLPGSSSTQWFLNGTATQTSTPSYRITSASVNDSGEYRCQRGLSGRSDPIQLEIHRGWLLLQVSSRVFTEGEPLALRCHAWKDKLVYNVLYYRNGKAFKFFHWNSNLTILKTNISHNGTYHCSGMGKHRYTSAGISVTVKELFPAPVLNASVTSPLLEGNLVTLSCETKLLLQRPGLQLYFSFYMGSKTLRGRNTSSEYQILTARREDSGLYWCEAATEDGNVLKRSPELELQVLGLQLPTPVWFHVLFYLAVGIMFLVNTVLWVTIRKELKRKKKWDLEISLDSGHEKKVISSLQEDRHLEEELKCQEQKEEQLQEGVHRKEPQGATSSRRVKFSRSADAPAYQQGQNQLYNELNLGRREEYDVLDKRRGRDPEMGGKPQRRKNPQEGLYNELQKDKMAEAYSEIGMKGERRRGKGHDGLYQGLSTATKDTYDALHMQALPPRRAKRSGSGVKQTLNFDLLKLAGDVESNPGPGHMTEYKPTVRLATRDDVPRAVRTLAAAFADYPATRHTVDPDRHIERVTELQELFLTRVGLDIGKVWVADDGAAVAVWTTPESVEAGAVFAEIGPRMAELSGSRLAAQQQMEGLLAPHRPKEPAWFLATVGVSPDHQGKGLGSAVVLPGVEAAERAGVPAFLETSAPRNLPFYERLGFTVTADVEVPEGPRTWCMTRKPGA

SEQ ID NO: 7091 - protein, 1713 aa, Artificial Sequence
  Synthetic Polypeptide
MALPVTALLLPLALLLHAARPDIQMTQSPSSLSASVGDRVTITCKASDHINNWLAWYQQKPGQAPKLLIYGATTLETGVPSRFSGSGSGTDYTLTISSLQPEDFATYYCQQSWNTPWTFGQGTKLEIKRLEDLKNVFPPEVAVFEPSEAEISHTQKATLVCLATGFYPDHVELSWWVNGKEVHSGVSTDPQPLKEQPALNDSRYCLSSRLRVSATFWQNPRNHFRCQVQFYGLSENDEWTQDRAKPVTQIVSAEAWGRADCGSQVVDTTKAVITLQPPWVSVFQEETVTLHCEVLHLPGSSSTQWFLNGTATQTSTPSYRITSASVNDSGEYRCQRGLSGRSDPIQLEIHRGWLLLQVSSRVFTEGEPLALRCHAWKDKLVYNVLYYRNGKAFKFFHWNSNLTILKTNISHNGTYHCSGMGKHRYTSAGISVTVKELFPAPVLNASVTSPLLEGNLVTLSCETKLLLQRPGLQLYFSFYMGSKTLRGRNTSSEYQILTARREDSGLYWCEAATEDGNVLKRSPELELQVLGLQLPTPVWFHVLFYLAVGIMFLVNTVLWVTIRKELKRKKKWDLEISLDSGHEKKVISSLQEDRHLEEELKCQEQKEEQLQEGVHRKEPQGATSTSRVKFSRSADAPAYQQGQNQLYNELNLGRREEYDVLDKRRGRDPEMGGKPQRRKNPQEGLYNELQKDKMAEAYSEIGMKGERRRGKGHDGLYQGLSTATKDTYDALHMQALPPRRAKRSGSGATNFSLLKQAGDVEENPGPMDWIWRILFLVGAATGAHSFEQVQLQQPGAELVKPGASVKMSCKASGYAFSSYWINWMKQKPGQGLEWIGQIYPGDGDTNYNGKFKGRATLTADTSSSTAYMQLSSLTSEDSAVYFCARSITTVVGCAMDYWGQGTSVTVSSTRIQNPDPAVYQLRDSKSSDKSVCLFTDFDSQTNVSQSKDSDVYITDKTVLDMRSMDFKSNSAVAWSNKSDFACANAFNNSIIPEDTFFPSPESSCGTQVVDTTKAVITLQPPWVSVFQEETVTLHCEVLHLPGSSSTQWFLNGTATQTSTPSYRITSASVNDSGEYRCQRGLSGRSDPIQLEIHRGWLLLQVSSRVFTEGEPLALRCHAWKDKLVYNVLYYRNGKAFKFFHWNSNLTILKTNISHNGTYHCSGMGKHRYTSAGISVTVKELFPAPVLNASVTSPLLEGNLVTLSCETKLLLQRPGLQLYFSFYMGSKTLRGRNTSSEYQILTARREDSGLYWCEAATEDGNVLKRSPELELQVLGLQLPTPVWFHVLFYLAVGIMFLVNTVLWVTIRKELKRKKKWDLEISLDSGHEKKVISSLQEDRHLEEELKCQEQKEEQLQEGVHRKEPQGATSSRRVKFSRSADAPAYQQGQNQLYNELNLGRREEYDVLDKRRGRDPEMGGKPQRRKNPQEGLYNELQKDKMAEAYSEIGMKGERRRGKGHDGLYQGLSTATKDTYDALHMQALPPRRAKRSGSGVKQTLNFDLLKLAGDVESNPGPGHMTEYKPTVRLATRDDVPRAVRTLAAAFADYPATRHTVDPDRHIERVTELQELFLTRVGLDIGKVWVADDGAAVAVWTTPESVEAGAVFAEIGPRMAELSGSRLAAQQQMEGLLAPHRPKEPAWFLATVGVSPDHQGKGLGSAVVLPGVEAAERAGVPAFLETSAPRNLPFYERLGFTVTADVEVPEGPRTWCMTRKPGA

SEQ ID NO: 7092 - protein, 1850 aa, Artificial Sequence
  Synthetic Polypeptide
MALPVTALLLPLALLLHAARPEVQLVESGGGLVQAGGSLRLSCAASGRTFSMGWFRQAPGKEREFVAAITYSGGSPYYADSVKGRFTISRDNAKNTVYLQMNSLKPEDTAVYYCAANPTYGSDWNAENWGQGTQVTVSSGTGGGGSGGGGSGGGGSEFDIQMTQSPSSLSASVGDRVTITCKASDHINNWLAWYQQKPGQAPKLLIYGATTLETGVPSRFSGSGSGTDYTLTISSLQPEDFATYYCQQSWNTPWTFGQGTKLEIKRLEDLKNVFPPEVAVFEPSEAEISHTQKATLVCLATGFYPDHVELSWWVNGKEVHSGVSTDPQPLKEQPALNDSRYCLSSRLRVSATFWQNPRNHFRCQVQFYGLSENDEWTQDRAKPVTQIVSAEAWGRADCGSQVVDTTKAVITLQPPWVSVFQEETVTLHCEVLHLPGSSSTQWFLNGTATQTSTPSYRITSASVNDSGEYRCQRGLSGRSDPIQLEIHRGWLLLQVSSRVFTEGEPLALRCHAWKDKLVYNVLYYRNGKAFKFFHWNSNLTILKTNISHNGTYHCSGMGKHRYTSAGISVTVKELFPAPVLNASVTSPLLEGNLVTLSCETKLLLQRPGLQLYFSFYMGSKTLRGRNTSSEYQILTARREDSGLYWCEAATEDGNVLKRSPELELQVLGLQLPTPVWFHVLFYLAVGIMFLVNTVLWVTIRKELKRKKKWDLEISLDSGHEKKVISSLQEDRHLEEELKCQEQKEEQLQEGVHRKEPQGATSTSRVKFSRSADAPAYQQGQNQLYNELNLGRREEYDVLDKRRGRDPEMGGKPQRRKNPQEGLYNELQKDKMAEAYSEIGMKGERRRGKGHDGLYQGLSTATKDTYDALHMQALPPRRAKRSGSGATNFSLLKQAGDVEENPGPMDWIWRILFLVGAATGAHSFEQVQLQQPGAELVKPGASVKMSCKASGYAFSSYWINWMKQKPGQGLEWIGQIYPGDGDTNYNGKFKGRATLTADTSSSTAYMQLSSLTSEDSAVYFCARSITTVVGCAMDYWGQGTSVTVSSTRIQNPDPAVYQLRDSKSSDKSVCLFTDFDSQTNVSQSKDSDVYITDKTVLDMRSMDFKSNSAVAWSNKSDFACANAFNNSIIPEDTFFPSPESSCGTQVVDTTKAVITLQPPWVSVFQEETVTLHCEVLHLPGSSSTQWFLNGTATQTSTPSYRITSASVNDSGEYRCQRGLSGRSDPIQLEIHRGWLLLQVSSRVFTEGEPLALRCHAWKDKLVYNVLYYRNGKAFKFFHWNSNLTILKTNISHNGTYHCSGMGKHRYTSAGISVTVKELFPAPVLNASVTSPLLEGNLVTLSCETKLLLQRPGLQLYFSFYMGSKTLRGRNTSSEYQILTARREDSGLYWCEAATEDGNVLKRSPELELQVLGLQLPTPVWFHVLFYLAVGIMFLVNTVLWVTIRKELKRKKKWDLEISLDSGHEKKVISSLQEDRHLEEELKCQEQKEEQLQEGVHRKEPQGATSSRRVKFSRSADAPAYQQGQNQLYNELNLGRREEYDVLDKRRGRDPEMGGKPQRRKNPQEGLYNELQKDKMAEAYSEIGMKGERRRGKGHDGLYQGLSTATKDTYDALHMQALPPRRAKRSGSGVKQTLNFDLLKLAGDVESNPGPGHMTEYKPTVRLATRDDVPRAVRTLAAAFADYPATRHTVDPDRHIERVTELQELFLTRVGLDIGKVWVADDGAAVAVWTTPESVEAGAVFAEIGPRMAELSGSRLAAQQQMEGLLAPHRPKEPAWFLATVGVSPDHQGKGLGSAVVLPGVEAAERAGVPAFLETSAPRNLPFYERLGFTVTADVEVPEGPRTWCMTRKPGA

SEQ ID NO: 7093 - protein, 1987 aa, Artificial Sequence
  Synthetic Polypeptide
MALPVTALLLPLALLLHAARPEVQLVESGGGLVQAGGSLRLSCAASGRTFSMGWFRQAPGKEREFVAAITYSGGSPYYADSVKGRFTISRDNAKNTVYLQMNSLKPEDTAVYYCAANPTYGSDWNAENWGQGTQVTVSSGTGGGGSGGGGSGGGGSEFDIQMTQSPSSLSASVGDRVTITCKASDHINNWLAWYQQKPGQAPKLLIYGATTLETGVPSRFSGSGSGTDYTLTISSLQPEDFATYYCQQSWNTPWTFGQGTKLEIKRLEDLKNVFPPEVAVFEPSEAEISHTQKATLVCLATGFYPDHVELSWWVNGKEVHSGVSTDPQPLKEQPALNDSRYCLSSRLRVSATFWQNPRNHFRCQVQFYGLSENDEWTQDRAKPVTQIVSAEAWGRADCGSQVVDTTKAVITLQPPWVSVFQEETVTLHCEVLHLPGSSSTQWFLNGTATQTSTPSYRITSASVNDSGEYRCQRGLSGRSDPIQLEIHRGWLLLQVSSRVFTEGEPLALRCHAWKDKLVYNVLYYRNGKAFKFFHWNSNLTILKTNISHNGTYHCSGMGKHRYTSAGISVTVKELFPAPVLNASVTSPLLEGNLVTLSCETKLLLQRPGLQLYFSFYMGSKTLRGRNTSSEYQILTARREDSGLYWCEAATEDGNVLKRSPELELQVLGLQLPTPVWFHVLFYLAVGIMFLVNTVLWVTIRKELKRKKKWDLEISLDSGHEKKVISSLQEDRHLEEELKCQEQKEEQLQEGVHRKEPQGATSTSRVKFSRSADAPAYQQGQNQLYNELNLGRREEYDVLDKRRGRDPEMGGKPQRRKNPQEGLYNELQKDKMAEAYSEIGMKGERRRGKGHDGLYQGLSTATKDTYDALHMQALPPRRAKRSGSGATNFSLLKQAGDVEENPGPMDWIWRILFLVGAATGAHSGPEVQLVESGGGLVQAGGSLRLSCAASGRTFTMGWFRQAPGKEREFVAAISLSPTLAYYADSVKGRFTISRDNAKNTVVLQMNSLKPEDTALYYCAADRKSVMSIRPDYWGQGTQVTVSSGSGGGGSGGGGSGGGGSFEQVQLQQPGAELVKPGASVKMSCKASGYAFSSYWINWMKQKPGQGLEWIGQIYPGDGDTNYNGKFKGRATLTADTSSSTAYMQLSSLTSEDSAVYFCARSITTVVGCAMDYWGQGTSVTVSSTRIQNPDPAVYQLRDSKSSDKSVCLFTDFDSQTNVSQSKDSDVYITDKTVLDMRSMDFKSNSAVAWSNKSDFACANAFNNSIIPEDTFFPSPESSCGTQVVDTTKAVITLQPPWVSVFQEETVTLHCEVLHLPGSSSTQWFLNGTATQTSTPSYRITSASVNDSGEYRCQRGLSGRSDPIQLEIHRGWLLLQVSSRVFTEGEPLALRCHAWKDKLVYNVLYYRNGKAFKFFHWNSNLTILKTNISHNGTYHCSGMGKHRYTSAGISVTVKELFPAPVLNASVTSPLLEGNLVTLSCETKLLLQRPGLQLYFSFYMGSKTLRGRNTSSEYQILTARREDSGLYWCEAATEDGNVLKRSPELELQVLGLQLPTPVWFHVLFYLAVGIMFLVNTVLWVTIRKELKRKKKWDLEISLDSGHEKKVISSLQEDRHLEEELKCQEQKEEQLQEGVHRKEPQGATSSRRVKFSRSADAPAYQQGQNQLYNELNLGRREEYDVLDKRRGRDPEMGGKPQRRKNPQEGLYNELQKDKMAEAYSEIGMKGERRRGKGHDGLYQGLSTATKDTYDALHMQALPPRRAKRSGSGVKQTLNFDLLKLAGDVESNPGPGHMTEYKPTVRLATRDDVPRAVRTLAAAFADYPATRHTVDPDRHIERVTELQELFLTRVGLDIGKVWVADDGAAVAVWTTPESVEAGAVFAEIGPRMAELSGSRLAAQQQMEGLLAPHRPKEPAWFLATVGVSPDHQGKGLGSAVVLPGVEAAERAGVPAFLETSAPRNLPFYERLGFTVTADVEVPEGPRTWCMTRKPGA

SEQ ID NO: 7094 - protein, 1720 aa, Artificial Sequence
  Synthetic Polypeptide
MALPVTALLLPLALLLHAARPEVQLVESGGGLVQAGGSLRLSCAASGRTFSMGWFRQAPGKEREFVAAITYSGGSPYYADSVKGRFTISRDNAKNTVYLQMNSLKPEDTAVYYCAANPTYGSDWNAENWGQGTQVTVSSLEDLKNVFPPEVAVFEPSEAEISHTQKATLVCLATGFYPDHVELSWWVNGKEVHSGVSTDPQPLKEQPALNDSRYCLSSRLRVSATFWQNPRNHFRCQVQFYGLSENDEWTQDRAKPVTQIVSAEAWGRADCGSQVVDTTKAVITLQPPWVSVFQEETVTLHCEVLHLPGSSSTQWFLNGTATQTSTPSYRITSASVNDSGEYRCQRGLSGRSDPIQLEIHRGWLLLQVSSRVFTEGEPLALRCHAWKDKLVYNVLYYRNGKAFKFFHWNSNLTILKTNISHNGTYHCSGMGKHRYTSAGISVTVKELFPAPVLNASVTSPLLEGNLVTLSCETKLLLQRPGLQLYFSFYMGSKTLRGRNTSSEYQILTARREDSGLYWCEAATEDGNVLKRSPELELQVLGLQLPTPVWFHVLFYLAVGIMFLVNTVLWVTIRKELKRKKKWDLEISLDSGHEKKVISSLQEDRHLEEELKCQEQKEEQLQEGVHRKEPQGATSTSRVKFSRSADAPAYQQGQNQLYNELNLGRREEYDVLDKRRGRDPEMGGKPQRRKNPQEGLYNELQKDKMAEAYSEIGMKGERRRGKGHDGLYQGLSTATKDTYDALHMQALPPRRAKRSGSGATNFSLLKQAGDVEENPGPMDWIWRILFLVGAATGAHSGPEVQLVESGGGLVQAGGSLRLSCAASGRTFTMGWFRQAPGKEREFVAAISLSPTLAYYADSVKGRFTISRDNAKNTVVLQMNSLKPEDTALYYCAADRKSVMSIRPDYWGQGTQVTVSSTRIQNPDPAVYQLRDSKSSDKSVCLFTDFDSQTNVSQSKDSDVYITDKTVLDMRSMDFKSNSAVAWSNKSDFACANAFNNSIIPEDTFFPSPESSCGTQVVDTTKAVITLQPPWVSVFQEETVTLHCEVLHLPGSSSTQWFLNGTATQTSTPSYRITSASVNDSGEYRCQRGLSGRSDPIQLEIHRGWLLLQVSSRVFTEGEPLALRCHAWKDKLVYNVLYYRNGKAFKFFHWNSNLTILKTNISHNGTYHCSGMGKHRYTSAGISVTVKELFPAPVLNASVTSPLLEGNLVTLSCETKLLLQRPGLQLYFSFYMGSKTLRGRNTSSEYQILTARREDSGLYWCEAATEDGNVLKRSPELELQVLGLQLPTPVWFHVLFYLAVGIMFLVNTVLWVTIRKELKRKKKWDLEISLDSGHEKKVISSLQEDRHLEEELKCQEQKEEQLQEGVHRKEPQGATSSRRVKFSRSADAPAYQQGQNQLYNELNLGRREEYDVLDKRRGRDPEMGGKPQRRKNPQEGLYNELQKDKMAEAYSEIGMKGERRRGKGHDGLYQGLSTATKDTYDALHMQALPPRRAKRSGSGVKQTLNFDLLKLAGDVESNPGPGHMTEYKPTVRLATRDDVPRAVRTLAAAFADYPATRHTVDPDRHIERVTELQELFLTRVGLDIGKVWVADDGAAVAVWTTPESVEAGAVFAEIGPRMAELSGSRLAAQQQMEGLLAPHRPKEPAWFLATVGVSPDHQGKGLGSAVVLPGVEAAERAGVPAFLETSAPRNLPFYERLGFTVTADVEVPEGPRTWCMTRKPGA

SEQ ID NO: 7095 - protein, 871 aa, Artificial Sequence
  Synthetic Polypeptide
MALPVTALLLPLALLLHAARPACEVQLLESGGGLIQPGGSLRLSCAASGFTFSSHAMTWVRQAPGKGLEWVSAISGSGDYTHYADSVKGRFTISRDNSKNTVYLQMNSLRAEDSAVYYCAKDEDGGSLLGHRGQGTLVTVSSGTGGGGSGGGGSGGGGSEFGSLEQVVDTTKAVITLQPPWVSVFQEETVTLHCEVLHLPGSSSTQWFLNGTATQTSTPSYRITSASVNDSGEYRCQRGLSGRSDPIQLEIHRGWLLLQVSSRVFTEGEPLALRCHAWKDKLVYNVLYYRNGKAFKFFHWNSNLTILKTNISHNGTYHCSGMGKHRYTSAGISVTVKELFPAPVLNASVTSPLLEGNLVTLSCETKLLLQRPGLQLYFSFYMGSKTLRGRNTSSEYQILTARREDSGLYWCEAATEDGNVLKRSPELELQVLGLQLPTPVWFHVLFYLAVGIMFLVNTVLWVTIRKELKRKKKWDLEISLDSGHEKKVISSLQEDRHLEEELKCQEQKEEQLQEGVHRKEPQGATSTSRVKFSRSADAPAYQQGQNQLYNELNLGRREEYDVLDKRRGRDPEMGGKPQRRKNPQEGLYNELQKDKMAEAYSEIGMKGERRRGKGHDGLYQGLSTATKDTYDALHMQALPPRRAKRSGSGATNFSLLKQAGDVEENPGPTRGHMTEYKPTVRLATRDDVPRAVRTLAAAFADYPATRHTVDPDRHIERVTELQELFLTRVGLDIGKVWVADDGAAVAVWTTPESVEAGAVFAEIGPRMAELSGSRLAAQQQMEGLLAPHRPKEPAWFLATVGVSPDHQGKGLGSAVVLPGVEAAERAGVPAFLETSAPRNLPFYERLGFTVTADVEVPEGPRTWCMTRKPGA

SEQ ID NO: 7096 - protein, 743 aa, Artificial Sequence
  Synthetic Polypeptide
MALPVTALLLPLALLLHAARPDIQMTQSPSSLSASVGDRVTITCKASDHINNWLAWYQQKPGQAPKLLIYGATTLETGVPSRFSGSGSGTDYTLTISSLQPEDFATYYCQQSWNTPWTFGQGTKLEIKRGGGGSGGGGSGGGGSQVQLQQPGAELVKPGASVKMSCKASGYAFSSYWINWMKQKPGQGLEWIGQIYPGDGDTNYNGKFKGRATLTADTSSSTAYMQLSSLTSEDSAVYFCARSITTVVGCAMDYWGQGTSVTVSSTRQVVDTTKAVITLQPPWVSVFQEETVTLHCEVLHLPGSSSTQWFLNGTATQTSTPSYRITSASVNDSGEYRCQRGLSGRSDPIQLEIHRGWLLLQVSSRVFTEGEPLALRCHAWKDKLVYNVLYYRNGKAFKFFHWNSNLTILKTNISHNGTYHCSGMGKHRYTSAGISVTVKELFPAPVLNASVTSPLLEGNLVTLSCETKLLLQRPGLQLYFSFYMGSKTLRGRNTSSEYQILTARREDSGLYWCEAATEDGNVLKRSPELELQVLGLQLPTPVWFHVLFYLAVGIMFLVNTVLWVTIRKELKRKKKWDLEISLDSGHEKKVISSLQEDRHLEEELKCQEQKEEQLQEGVHRKEPQGATSTSRVKFSRSADAPAYQQGQNQLYNELNLGRREEYDVLDKRRGRDPEMGGKPQRRKNPQEGLYNELQKDKMAEAYSEIGMKGERRRGKGHDGLYQGLSTATKDTYDALHMQALPPR

SEQ ID NO: 7097 - protein, 743 aa, Artificial Sequence
  Synthetic Polypeptide
MALPVTALLLPLALLLHAARPEIVLTQSPATLSLSPGERATLSCRASQSVSSYLAWYQQKPGQAPRLLIYDASNRATGIPARFSGSGSGTDFTLTISSLEPEDFAVYYCQQRSNWPITFGQGTRLEIKGGGGSGGGGSGGGGSEVQLVESGGGLVQPGRSLRLSCAASGFTFNDYAMHWVRQAPGKGLEWVSTISWNSGSIGYADSVKGRFTISRDNAKKSLYLQMNSLRAEDTALYYCAKDIQYGNYYYGMDVWGQGTTVTVSSTRQVVDTTKAVITLQPPWVSVFQEETVTLHCEVLHLPGSSSTQWFLNGTATQTSTPSYRITSASVNDSGEYRCQRGLSGRSDPIQLEIHRGWLLLQVSSRVFTEGEPLALRCHAWKDKLVYNVLYYRNGKAFKFFHWNSNLTILKTNISHNGTYHCSGMGKHRYTSAGISVTVKELFPAPVLNASVTSPLLEGNLVTLSCETKLLLQRPGLQLYFSFYMGSKTLRGRNTSSEYQILTARREDSGLYWCEAATEDGNVLKRSPELELQVLGLQLPTPVWFHVLFYLAVGIMFLVNTVLWVTIRKELKRKKKWDLEISLDSGHEKKVISSLQEDRHLEEELKCQEQKEEQLQEGVHRKEPQGATSTSRVKFSRSADAPAYQQGQNQLYNELNLGRREEYDVLDKRRGRDPEMGGKPQRRKNPQEGLYNELQKDKMAEAYSEIGMKGERRRGKGHDGLYQGLSTATKDTYDALHMQALPPR

SEQ ID NO: 7098 - protein, 617 aa, Artificial Sequence
  Synthetic Polypeptide
MALPVTALLLPLALLLHAARPEVQLVESGGGLVQAGGSLRLSCAASGRTFSMGWFRQAPGKEREFVAAITYSGGSPYYADSVKGRFTISRDNAKNTVYLQMNSLKPEDTAVYYCAANPTYGSDWNAENWGQGTQVTVSSTRQVVDTTKAVITLQPPWVSVFQEETVTLHCEVLHLPGSSSTQWFLNGTATQTSTPSYRITSASVNDSGEYRCQRGLSGRSDPIQLEIHRGWLLLQVSSRVFTEGEPLALRCHAWKDKLVYNVLYYRNGKAFKFFHWNSNLTILKTNISHNGTYHCSGMGKHRYTSAGISVTVKELFPAPVLNASVTSPLLEGNLVTLSCETKLLLQRPGLQLYFSFYMGSKTLRGRNTSSEYQILTARREDSGLYWCEAATEDGNVLKRSPELELQVLGLQLPTPVWFHVLFYLAVGIMFLVNTVLWVTIRKELKRKKKWDLEISLDSGHEKKVISSLQEDRHLEEELKCQEQKEEQLQEGVHRKEPQGATSTSRVKFSRSADAPAYQQGQNQLYNELNLGRREEYDVLDKRRGRDPEMGGKPQRRKNPQEGLYNELQKDKMAEAYSEIGMKGERRRGKGHDGLYQGLSTATKDTYDALHMQALPPR

SEQ ID NO: 7099 - protein, 617 aa, Artificial Sequence
  Synthetic Polypeptide
MALPVTALLLPLALLLHAARPQLQLQESGPGLVKPSETLSLTCTVSGGSISSGDYYWGWIRQPPGKGLEWIGHIYYSGATYYNPSLKSRVTISVDTSRNQFSLKLSSVTAADTAVYYCTRDDSSNWRSRGQGTLVTVSSTRQVVDTTKAVITLQPPWVSVFQEETVTLHCEVLHLPGSSSTQWFLNGTATQTSTPSYRITSASVNDSGEYRCQRGLSGRSDPIQLEIHRGWLLLQVSSRVFTEGEPLALRCHAWKDKLVYNVLYYRNGKAFKFFHWNSNLTILKTNISHNGTYHCSGMGKHRYTSAGISVTVKELFPAPVLNASVTSPLLEGNLVTLSCETKLLLQRPGLQLYFSFYMGSKTLRGRNTSSEYQILTARREDSGLYWCEAATEDGNVLKRSPELELQVLGLQLPTPVWFHVLFYLAVGIMFLVNTVLWVTIRKELKRKKKWDLEISLDSGHEKKVISSLQEDRHLEEELKCQEQKEEQLQEGVHRKEPQGATSTSRVKFSRSADAPAYQQGQNQLYNELNLGRREEYDVLDKRRGRDPEMGGKPQRRKNPQEGLYNELQKDKMAEAYSEIGMKGERRRGKGHDGLYQGLSTATKDTYDALHMQALPPR

SEQ ID NO: 7100 - protein, 617 aa, Artificial Sequence
  Synthetic Polypeptide
MALPVTALLLPLALLLHAARPQLQLQESGPGLVKPSETLSLTCTVSGDSISSGDYYWGWIRQPPGKGLEWIGHIYYSGVTYYNPSLKSRVTISVDTSRNQFSLKLSSVTAADTAVYYCTREDSSNWRSRGQGTLVTVSSTRQVVDTTKAVITLQPPWVSVFQEETVTLHCEVLHLPGSSSTQWFLNGTATQTSTPSYRITSASVNDSGEYRCQRGLSGRSDPIQLEIHRGWLLLQVSSRVFTEGEPLALRCHAWKDKLVYNVLYYRNGKAFKFFHWNSNLTILKTNISHNGTYHCSGMGKHRYTSAGISVTVKELFPAPVLNASVTSPLLEGNLVTLSCETKLLLQRPGLQLYFSFYMGSKTLRGRNTSSEYQILTARREDSGLYWCEAATEDGNVLKRSPELELQVLGLQLPTPVWFHVLFYLAVGIMFLVNTVLWVTIRKELKRKKKWDLEISLDSGHEKKVISSLQEDRHLEEELKCQEQKEEQLQEGVHRKEPQGATSTSRVKFSRSADAPAYQQGQNQLYNELNLGRREEYDVLDKRRGRDPEMGGKPQRRKNPQEGLYNELQKDKMAEAYSEIGMKGERRRGKGHDGLYQGLSTATKDTYDALHMQALPPR

SEQ ID NO: 7101 - protein, 619 aa, Artificial Sequence
  Synthetic Polypeptide
MALPVTALLLPLALLLHAARPEVQLQESGGGLVQPGGSLRLSCAASGRTFSSLFMGWFRQAPGKERELVAAISRYSLYTYYADSVKGRFTISADNAKNAVYLQMNSLKPEDTAVYYCASKLEYTSNDYDSWGQGTQVTVSSTRQVVDTTKAVITLQPPWVSVFQEETVTLHCEVLHLPGSSSTQWFLNGTATQTSTPSYRITSASVNDSGEYRCQRGLSGRSDPIQLEIHRGWLLLQVSSRVFTEGEPLALRCHAWKDKLVYNVLYYRNGKAFKFFHWNSNLTILKTNISHNGTYHCSGMGKHRYTSAGISVTVKELFPAPVLNASVTSPLLEGNLVTLSCETKLLLQRPGLQLYFSFYMGSKTLRGRNTSSEYQILTARREDSGLYWCEAATEDGNVLKRSPELELQVLGLQLPTPVWFHVLFYLAVGIMFLVNTVLWVTIRKELKRKKKWDLEISLDSGHEKKVISSLQEDRHLEEELKCQEQKEEQLQEGVHRKEPQGATSTSRVKFSRSADAPAYQQGQNQLYNELNLGRREEYDVLDKRRGRDPEMGGKPQRRKNPQEGLYNELQKDKMAEAYSEIGMKGERRRGKGHDGLYQGLSTATKDTYDALHMQALPPR

SEQ ID NO: 7102 - protein, 627 aa, Artificial Sequence
  Synthetic Polypeptide
MALPVTALLLPLALLLHAARPEVQLVESGGGLVQPGGSLRLSCAASGFASDYYIIGWFRQAPGKEREGVSCISSRYANTNYADSVKGRFTISRDNAKNTVYLQMNSLKPEDTAVYYCAADTRRYTCPDIATMHRNFDSWGQGTLVTVSSTRQVVDTTKAVITLQPPWVSVFQEETVTLHCEVLHLPGSSSTQWFLNGTATQTSTPSYRITSASVNDSGEYRCQRGLSGRSDPIQLEIHRGWLLLQVSSRVFTEGEPLALRCHAWKDKLVYNVLYYRNGKAFKFFHWNSNLTILKTNISHNGTYHCSGMGKHRYTSAGISVTVKELFPAPVLNASVTSPLLEGNLVTLSCETKLLLQRPGLQLYFSFYMGSKTLRGRNTSSEYQILTARREDSGLYWCEAATEDGNVLKRSPELELQVLGLQLPTPVWFHVLFYLAVGIMFLVNTVLWVTIRKELKRKKKWDLEISLDSGHEKKVISSLQEDRHLEEELKCQEQKEEQLQEGVHRKEPQGATSTSRVKFSRSADAPAYQQGQNQLYNELNLGRREEYDVLDKRRGRDPEMGGKPQRRKNPQEGLYNELQKDKMAEAYSEIGMKGERRRGKGHDGLYQGLSTATKDTYDALHMQALPPR

SEQ ID NO: 7103 - protein, 623 aa, Artificial Sequence
  Synthetic Polypeptide
MALPVTALLLPLALLLHAARPEVQLVESGGSLVQPGGSLRLSCAASGFTFDDYAMSWVRQVPGKGLEWVSSINWSGTHTDYADSVKGRFTISRNNANNTLYLQMNSLKSEDTAVYYCAKNWRDAGTTWFEKSGSAGQGTQVTVSSTRQVVDTTKAVITLQPPWVSVFQEETVTLHCEVLHLPGSSSTQWFLNGTATQTSTPSYRITSASVNDSGEYRCQRGLSGRSDPIQLEIHRGWLLLQVSSRVFTEGEPLALRCHAWKDKLVYNVLYYRNGKAFKFFHWNSNLTILKTNISHNGTYHCSGMGKHRYTSAGISVTVKELFPAPVLNASVTSPLLEGNLVTLSCETKLLLQRPGLQLYFSFYMGSKTLRGRNTSSEYQILTARREDSGLYWCEAATEDGNVLKRSPELELQVLGLQLPTPVWFHVLFYLAVGIMFLVNTVLWVTIRKELKRKKKWDLEISLDSGHEKKVISSLQEDRHLEEELKCQEQKEEQLQEGVHRKEPQGATSTSRVKFSRSADAPAYQQGQNQLYNELNLGRREEYDVLDKRRGRDPEMGGKPQRRKNPQEGLYNELQKDKMAEAYSEIGMKGERRRGKGHDGLYQGLSTATKDTYDALHMQALPPR

SEQ ID NO: 7104 - protein, 618 aa, Artificial Sequence
  Synthetic Polypeptide
MALPVTALLLPLALLLHAARPEVQLVESGGGLVQPGGSLRLSCAASGFNIKDTCIGWVRRAPGKEEELVAKICKYSGHTRYADSVKGRFTISADTSKNTAYLQMNSLRAEDTAVYYCAAVSVRDGHYNYWGQGTTVTVSSTRQVVDTTKAVITLQPPWVSVFQEETVTLHCEVLHLPGSSSTQWFLNGTATQTSTPSYRITSASVNDSGEYRCQRGLSGRSDPIQLEIHRGWLLLQVSSRVFTEGEPLALRCHAWKDKLVYNVLYYRNGKAFKFFHWNSNLTILKTNISHNGTYHCSGMGKHRYTSAGISVTVKELFPAPVLNASVTSPLLEGNLVTLSCETKLLLQRPGLQLYFSFYMGSKTLRGRNTSSEYQILTARREDSGLYWCEAATEDGNVLKRSPELELQVLGLQLPTPVWFHVLFYLAVGIMFLVNTVLWVTIRKELKRKKKWDLEISLDSGHEKKVISSLQEDRHLEEELKCQEQKEEQLQEGVHRKEPQGATSTSRVKFSRSADAPAYQQGQNQLYNELNLGRREEYDVLDKRRGRDPEMGGKPQRRKNPQEGLYNELQKDKMAEAYSEIGMKGERRRGKGHDGLYQGLSTATKDTYDALHMQALPPR

SEQ ID NO: 7105 - protein, 623 aa, Artificial Sequence
  Synthetic Polypeptide
MALPVTALLLPLALLLHAARPGSDLGIKLLFAAAKGQDDEVRILLAAGADVNAKDFEGYTPLHVAAYDGHLEIVEVLLKAGADVNAKDSQGRTPLHEAAYSGHLEIVEVLLKAGADVNAQDDAGETPADLAAAWGHEDIAEVLQKTRQVVDTTKAVITLQPPWVSVFQEETVTLHCEVLHLPGSSSTQWFLNGTATQTSTPSYRITSASVNDSGEYRCQRGLSGRSDPIQLEIHRGWLLLQVSSRVFTEGEPLALRCHAWKDKLVYNVLYYRNGKAFKFFHWNSNLTILKTNISHNGTYHCSGMGKHRYTSAGISVTVKELFPAPVLNASVTSPLLEGNLVTLSCETKLLLQRPGLQLYFSFYMGSKTLRGRNTSSEYQILTARREDSGLYWCEAATEDGNVLKRSPELELQVLGLQLPTPVWFHVLFYLAVGIMFLVNTVLWVTIRKELKRKKKWDLEISLDSGHEKKVISSLQEDRHLEEELKCQEQKEEQLQEGVHRKEPQGATSTSRVKFSRSADAPAYQQGQNQLYNELNLGRREEYDVLDKRRGRDPEMGGKPQRRKNPQEGLYNELQKDKMAEAYSEIGMKGERRRGKGHDGLYQGLSTATKDTYDALHMQALPPR

SEQ ID NO: 7106 - protein, 557 aa, Artificial Sequence
  Synthetic Polypeptide
MALPVTALLLPLALLLHAARPVDNKFNKERYSAYYEIWQLPNLNVRQKAAFIGSLQDDPSQSANLLAEAKKLNDAQAPKTRQVVDTTKAVITLQPPWVSVFQEETVTLHCEVLHLPGSSSTQWFLNGTATQTSTPSYRITSASVNDSGEYRCQRGLSGRSDPIQLEIHRGWLLLQVSSRVFTEGEPLALRCHAWKDKLVYNVLYYRNGKAFKFFHWNSNLTILKTNISHNGTYHCSGMGKHRYTSAGISVTVKELFPAPVLNASVTSPLLEGNLVTLSCETKLLLQRPGLQLYFSFYMGSKTLRGRNTSSEYQILTARREDSGLYWCEAATEDGNVLKRSPELELQVLGLQLPTPVWFHVLFYLAVGIMFLVNTVLWVTIRKELKRKKKWDLEISLDSGHEKKVISSLQEDRHLEEELKCQEQKEEQLQEGVHRKEPQGATSTSRVKFSRSADAPAYQQGQNQLYNELNLGRREEYDVLDKRRGRDPEMGGKPQRRKNPQEGLYNELQKDKMAEAYSEIGMKGERRRGKGHDGLYQGLSTATKDTYDALHMQALPPR

SEQ ID NO: 7107 - protein, 588 aa, Artificial Sequence
  Synthetic Polypeptide
MALPVTALLLPLALLLHAARPLPAPKNLVVSRVTEDSARLSWTAPDAAFDSFAIGYWEWDDDGEAIVLTVPGSERSYDLTGLKPGTEYPVYIAGVKGGQWSFPLSAIFTTTRQVVDTTKAVITLQPPWVSVFQEETVTLHCEVLHLPGSSSTQWFLNGTATQTSTPSYRITSASVNDSGEYRCQRGLSGRSDPIQLEIHRGWLLLQVSSRVFTEGEPLALRCHAWKDKLVYNVLYYRNGKAFKFFHWNSNLTILKTNISHNGTYHCSGMGKHRYTSAGISVTVKELFPAPVLNASVTSPLLEGNLVTLSCETKLLLQRPGLQLYFSFYMGSKTLRGRNTSSEYQILTARREDSGLYWCEAATEDGNVLKRSPELELQVLGLQLPTPVWFHVLFYLAVGIMFLVNTVLWVTIRKELKRKKKWDLEISLDSGHEKKVISSLQEDRHLEEELKCQEQKEEQLQEGVHRKEPQGATSTSRVKFSRSADAPAYQQGQNQLYNELNLGRREEYDVLDKRRGRDPEMGGKPQRRKNPQEGLYNELQKDKMAEAYSEIGMKGERRRGKGHDGLYQGLSTATKDTYDALHMQALPPR

SEQ ID NO: 7108 - protein, 589 aa, Artificial Sequence
  Synthetic Polypeptide
MALPVTALLLPLALLLHAARPMLPAPKNLVVSRITEDSARLSWTAPDAAFDSFPIRYIETLIWGEAIWLDVPGSERSYDLTGLKPGTEYAVVITGVKGGRFSSPLVASFTTTRQVVDTTKAVITLQPPWVSVFQEETVTLHCEVLHLPGSSSTQWFLNGTATQTSTPSYRITSASVNDSGEYRCQRGLSGRSDPIQLEIHRGWLLLQVSSRVFTEGEPLALRCHAWKDKLVYNVLYYRNGKAFKFFHWNSNLTILKTNISHNGTYHCSGMGKHRYTSAGISVTVKELFPAPVLNASVTSPLLEGNLVTLSCETKLLLQRPGLQLYFSFYMGSKTLRGRNTSSEYQILTARREDSGLYWCEAATEDGNVLKRSPELELQVLGLQLPTPVWFHVLFYLAVGIMFLVNTVLWVTIRKELKRKKKWDLEISLDSGHEKKVISSLQEDRHLEEELKCQEQKEEQLQEGVHRKEPQGATSTSRVKFSRSADAPAYQQGQNQLYNELNLGRREEYDVLDKRRGRDPEMGGKPQRRKNPQEGLYNELQKDKMAEAYSEIGMKGERRRGKGHDGLYQGLSTATKDTYDALHMQALPPR

SEQ ID NO: 7109 - protein, 806 aa, Artificial Sequence
  Synthetic Polypeptide
MALPVTALLLPLALLLHAARPMALPVTALLLPLALLLHAARPLFNQEVQIPLTESYCGPCPKNWICYKNNCYQFFDESKNWYESQASCMSQNASLLKVYSKEDQDLLKLVKSYHWMGLVHIPTNGSWQWEDGSILSPNLLTIIEMQKGDCALYASSFKGYIENCSTPNTYICMQRTVGGGGSGGGGSGGGGSDLFNQEVQIPLTESYCGPCPKNWICYKNNCYQFFDESKNWYESQASCMSQNASLLKVYSKEDQDLLKLVKSYHWMGLVHIPTNGSWQWEDGSILSPNLLTIIEMQKGDCALYASSFKGYIENCSTPNTYICMQRTVTRQVVDTTKAVITLQPPWVSVFQEETVTLHCEVLHLPGSSSTQWFLNGTATQTSTPSYRITSASVNDSGEYRCQRGLSGRSDPIQLEIHRGWLLLQVSSRVFTEGEPLALRCHAWKDKLVYNVLYYRNGKAFKFFHWNSNLTILKTNISHNGTYHCSGMGKHRYTSAGISVTVKELFPAPVLNASVTSPLLEGNLVTLSCETKLLLQRPGLQLYFSFYMGSKTLRGRNTSSEYQILTARREDSGLYWCEAATEDGNVLKRSPELELQVLGLQLPTPVWFHVLFYLAVGIMFLVNTVLWVTIRKELKRKKKWDLEISLDSGHEKKVISSLQEDRHLEEELKCQEQKEEQLQEGVHRKEPQGATSTSRVKFSRSADAPAYQQGQNQLYNELNLGRREEYDVLDKRRGRDPEMGGKPQRRKNPQEGLYNELQKDKMAEAYSEIGMKGERRRGKGHDGLYQGLSTATKDTYDALHMQALPPR

SEQ ID NO: 7110 - protein, 686 aa, Artificial Sequence
  Synthetic Polypeptide
MALPVTALLLPLALLLHAARPMELTDLLLAAMLLAVARLTLSSPVAPACDPRLLNKLLRDSHLLHSRLSQCPDVDPLSIPVLLPAVDFSLGEWKTQTEQSKAQDILGAVSLLLEGVMAARGQLEPSCLSSLLGQLSGQVRLLLGALQGLLGTQLPLQGRTTAHKDPNALFLSLQQLLRGKVRFLLLVEGPTLCVRRTLPTTAVPSSTSTRQVVDTTKAVITLQPPWVSVFQEETVTLHCEVLHLPGSSSTQWFLNGTATQTSTPSYRITSASVNDSGEYRCQRGLSGRSDPIQLEIHRGWLLLQVSSRVFTEGEPLALRCHAWKDKLVYNVLYYRNGKAFKFFHWNSNLTILKTNISHNGTYHCSGMGKHRYTSAGISVTVKELFPAPVLNASVTSPLLEGNLVTLSCETKLLLQRPGLQLYFSFYMGSKTLRGRNTSSEYQILTARREDSGLYWCEAATEDGNVLKRSPELELQVLGLQLPTPVWFHVLFYLAVGIMFLVNTVLWVTIRKELKRKKKWDLEISLDSGHEKKVISSLQEDRHLEEELKCQEQKEEQLQEGVHRKEPQGATSTSRVKFSRSADAPAYQQGQNQLYNELNLGRREEYDVLDKRRGRDPEMGGKPQRRKNPQEGLYNELQKDKMAEAYSEIGMKGERRRGKGHDGLYQGLSTATKDTYDALHMQALPPR

SEQ ID NO: 7111 - protein, 552 aa, Artificial Sequence
  Synthetic Polypeptide
MALPVTALLLPLALLLHAARPMDPDLEIRAAFLRQRNTALRTEVAELEQEVQRLENEVSQYETRYGPLGGGKTRTRQVVDTTKAVITLQPPWVSVFQEETVTLHCEVLHLPGSSSTQWFLNGTATQTSTPSYRITSASVNDSGEYRCQRGLSGRSDPIQLEIHRGWLLLQVSSRVFTEGEPLALRCHAWKDKLVYNVLYYRNGKAFKFFHWNSNLTILKTNISHNGTYHCSGMGKHRYTSAGISVTVKELFPAPVLNASVTSPLLEGNLVTLSCETKLLLQRPGLQLYFSFYMGSKTLRGRNTSSEYQILTARREDSGLYWCEAATEDGNVLKRSPELELQVLGLQLPTPVWFHVLFYLAVGIMFLVNTVLWVTIRKELKRKKKWDLEISLDSGHEKKVISSLQEDRHLEEELKCQEQKEEQLQEGVHRKEPQGATSTSRVKFSRSADAPAYQQGQNQLYNELNLGRREEYDVLDKRRGRDPEMGGKPQRRKNPQEGLYNELQKDKMAEAYSEIGMKGERRRGKGHDGLYQGLSTATKDTYDALHMQALPPR

SEQ ID NO: 7112 - protein, 527 aa, Artificial Sequence
  Synthetic Polypeptide
MALPVTALLLPLALLLHAARPEVAALEKEVAALEKEVAALEKEVAALEKTRQVVDTTKAVITLQPPWVSVFQEETVTLHCEVLHLPGSSSTQWFLNGTATQTSTPSYRITSASVNDSGEYRCQRGLSGRSDPIQLEIHRGWLLLQVSSRVFTEGEPLALRCHAWKDKLVYNVLYYRNGKAFKFFHWNSNLTILKTNISHNGTYHCSGMGKHRYTSAGISVTVKELFPAPVLNASVTSPLLEGNLVTLSCETKLLLQRPGLQLYFSFYMGSKTLRGRNTSSEYQILTARREDSGLYWCEAATEDGNVLKRSPELELQVLGLQLPTPVWFHVLFYLAVGIMFLVNTVLWVTIRKELKRKKKWDLEISLDSGHEKKVISSLQEDRHLEEELKCQEQKEEQLQEGVHRKEPQGATSTSRVKFSRSADAPAYQQGQNQLYNELNLGRREEYDVLDKRRGRDPEMGGKPQRRKNPQEGLYNELQKDKMAEAYSEIGMKGERRRGKGHDGLYQGLSTATKDTYDALHMQALPPR

SEQ ID NO: 7113 - protein, 785 aa, Artificial Sequence
  Synthetic Polypeptide
MALPVTALLLPLALLLHAARPLFNQEVQIPLTESYCGPCPKNWICYKNNCYQFFDESKNWYESQASCMSQNASLLKVYSKEDQDLLKLVKSAHWMGLVHIPTNGSWQWEDGSILSPNLLTIIEMQKGDCALYASSFKGFIENCSTPNTYICMQRTVGGGGSGGGGSGGGGSDLFNQEVQIPLTESYCGPCPKNWICYKNNCYQFFDESKNWYESQASCMSQNASLLKVYSKEDQDLLKLVKSAHWMGLVHIPTNGSWQWEDGSILSPNLLTIIEMQKGDCALYASSFKGFIENCSTPNTYICMQRTVTRQVVDTTKAVITLQPPWVSVFQEETVTLHCEVLHLPGSSSTQWFLNGTATQTSTPSYRITSASVNDSGEYRCQRGLSGRSDPIQLEIHRGWLLLQVSSRVFTEGEPLALRCHAWKDKLVYNVLYYRNGKAFKFFHWNSNLTILKTNISHNGTYHCSGMGKHRYTSAGISVTVKELFPAPVLNASVTSPLLEGNLVTLSCETKLLLQRPGLQLYFSFYMGSKTLRGRNTSSEYQILTARREDSGLYWCEAATEDGNVLKRSPELELQVLGLQLPTPVWFHVLFYLAVGIMFLVNTVLWVTIRKELKRKKKWDLEISLDSGHEKKVISSLQEDRHLEEELKCQEQKEEQLQEGVHRKEPQGATSTSRVKFSRSADAPAYQQGQNQLYNELNLGRREEYDVLDKRRGRDPEMGGKPQRRKNPQEGLYNELQKDKMAEAYSEIGMKGERRRGKGHDGLYQGLSTATKDTYDALHMQALPPR

SEQ ID NO: 7114 - protein, 785 aa, Artificial Sequence
  Synthetic Polypeptide
MALPVTALLLPLALLLHAARPLFNQEVQIPLTESYCGPCPKNWICYKNNCYQFFDESKNWYESQASCMSQNASLLKVYSKEDQDLLKLVKSAHWMGLVHIPTNGSWQWEDGSILSPNLLTIIEMQKGDCALYASSFKGYIENCSTPNTYICMQRTVSGGGGSGGGGSGGGGDLFNQEVQIPLTESYCGPCPKNWICYKNNCYQFFDESKNWYESQASCMSQNASLLKVYSKEDQDLLKLVKSAHWMGLVHIPTNGSWQWEDGSILSPNLLTIIEMQKGDCALYASSFKGYIENCSTPNTYICMQRTVTRQVVDTTKAVITLQPPWVSVFQEETVTLHCEVLHLPGSSSTQWFLNGTATQTSTPSYRITSASVNDSGEYRCQRGLSGRSDPIQLEIHRGWLLLQVSSRVFTEGEPLALRCHAWKDKLVYNVLYYRNGKAFKFFHWNSNLTILKTNISHNGTYHCSGMGKHRYTSAGISVTVKELFPAPVLNASVTSPLLEGNLVTLSCETKLLLQRPGLQLYFSFYMGSKTLRGRNTSSEYQILTARREDSGLYWCEAATEDGNVLKRSPELELQVLGLQLPTPVWFHVLFYLAVGIMFLVNTVLWVTIRKELKRKKKWDLEISLDSGHEKKVISSLQEDRHLEEELKCQEQKEEQLQEGVHRKEPQGATSTSRVKFSRSADAPAYQQGQNQLYNELNLGRREEYDVLDKRRGRDPEMGGKPQRRKNPQEGLYNELQKDKMAEAYSEIGMKGERRRGKGHDGLYQGLSTATKDTYDALHMQALPPR

SEQ ID NO: 7115 - skipped

SEQ ID NO: 7116 - DNA, 91 bp, Artificial Sequence
  Synthetic Polynucleotide
ctcgagtaatctagagcttgtgattttgtttagggcggaaaaataaattttcctttgtttttccacatcggtgccttcacatatacaagcc

SEQ ID NO: 7117 - DNA, 699 bp, Artificial Sequence
  Synthetic Polynucleotide
atgtaccggatgcagctgctgagctgtatcgccctgtctctggccctggtcacaaatagcgcccctaccagcagcagcaccaagaaaacccagctgcaactggaacacctcctgctggacctccagatgatcctgaacggcatcaacaactacaagaaccccaagctgacccggatgctgaccttcaagttctacatgcccaagaaggccaccgagctgaagcacctccagtgcctggaagaggaactgaagcccctggaagaagtgctgaatctggcccagagcaagaacttccacctgaggccaagggacctgatctccaacatcaacgtgatcgtgctggaactgaaaggcagcgagacaaccttcatgtgcgagtacgccgacgagacagctaccatcgtggaatttctgaatcggtggatcaccttctgccagagcatcatcagcaccctgacacatatgttgcagatggctgggcagtgctcccaaaatgaatattttgacagtttgttgcatgcttgcataccttgtcaacttcgatgttcttctaatactcctcctctaacatgtcagcgttattgtaatgcaagtgtgaccaattcagtgaaaggaacgaatgcgattctctggacctgtttgggactgagcttaataatttctttggcagttttcgtgctaatgtttttgctaaggaag

SEQ ID NO: 7118 - DNA, 291 bp, Artificial Sequence
  Synthetic Polynucleotide
atggattggatatggaggatactttttctcgtgggggcagcaaccggggctcattccttgcagatggctgggcagtgctcccaaaatgaatattttgacagtttgttgcacgcttgcataccttgtcaacttcgatgttcttctaatactcctcctctaacatgtcagcgttattgtaatgcaagtgtgaccaattcagtgaaaggaacgaatgcgattctctggacctgtttgggactgagcttaataatttctttggcagttttcgtgctaatgtttttgctaaggaag

SEQ ID NO: 7119 - DNA, 1131 bp, Artificial Sequence
  Synthetic Polynucleotide
atggcctcctatccttgtcaccagcacgccagcgcattcgatcaggccgctagaagcagaggccacagcaacagaagaacagccctgcggcctcggagacagcaagaggctacagaagttcggctggaacagaagatgcccacactgctgcgggtgtacatcgacggacctcacggcatgggcaagaccaccacaacacagctgctggtggccctgggaagcagagatgacatcgtgtacgtgcccgagcctatgacctactggcaggttctgggagccagcgagacaatcgccaacatctacaccacacagcaccggctggatcagggcgaaatttctgctggcgacgccgccgtggttatgacatctgcccagatcacaatgggaatgccctacgccgtgaccgatgctgtgctggctcctcatgttggcggagaggccggatcttctcatgctcctccaccagctctgaccctgatcttcgacagacaccctatcgccgctctgctgtgttatcctgccgccagatacctgatgggcagcatgacacctcaggccgtgctggctttcgtggccctgattcctcctacactgcccggcaccaatatcgtgctgggagccctgcctgaggaccggcacattgatagactggctaagagacagcggcctggcgagagactggatctggctatgctggccgccatcagaagagtgtacggcctgctggctaacaccgtgcggtatcttcaaggcggcggatcttggtgggaagattggggacagctgagcggcacagcagttcctccacaaggtgccgagcctcagtctaacgctggacccagacctcacatcggcgacaccctgtttaccctgttcagagcccctgaactgctggcccctaacggcgacctgtacaacgttttcgcctgggctctcgacgtgctggcaaaaagactgcggcccatgcacgtgttcatcctggactacgatcagtcccctgccggctgtagagatgccctgctgcaactgacaagcggcatggtgcagacccacgtgacaacacctggcagcatccccaccatttgcgatctggcccggaccttcgctagagagatgggcgaagctaactaa

SEQ ID NO: 7120 - DNA, 930 bp, Artificial Sequence
  Synthetic Polynucleotide
atggctctgcctagacggcctcctacactgaccagagtgtacctggatggccctttcggcatcggcaagaccagcatcctgaacgccatgccagatcacacccctgacggcgctcctatcctgaaggtgtacgagcccatgaagtactggcggtgccagagcactgatctggtggtggccgctaacgagacacccgagagaagaagaggcggagccctgagcagattccagagcgacatgattatggcctccatccaggccagattcgccgatccttacctgctgttccacgaacggctgagcagcaagtgccggggcaagatcgagatttgcgacacccctgccatcatcctgatgctggacagacatcctgtggccgccatcctgtgcttccccatcacaagatacctgctgggcgagtacagcctggaaatgctgatctcctccatcatcagactgcccctggaaagccccggctgcaatctgaccgtgaccatcctgcctgacgagaaagaacacgtgaaccggatctgctccagagacagacctggcgagacagccgaccggaacatgctgagaacactgaacgccgtgtacgccagcctggtggacacagtgaagtacgccaacctgacatgcccctatgagaaagaaagctgggagatggaatggctgggcctgccttggtttgaggaaagcctgctggaagagttcatcagcagaccccggcctgtgatctgtagcagaacccggatgcctctggacagaaccctgctggctatcttcaagcggaaagagctgtgcagcgagaacggcgagctgctgacacagtacagctggattctgtggggcctgctgaccaagctgcacaccatcaacgtggaactgttcgacatcagcggcatgtctcggagagagtgcgctacactt

SEQ ID NO: 7121 - DNA, 1065 bp, Artificial Sequence
  Synthetic Polynucleotide
atggggagtagcaagagcaagcctaaggaccccagccaacgcgcctccagaatcctgtggcacgaaatgtggcatgaaggactggaagaggccagcagactgtacttcggcgagagaaacgtgaagggcatgttcgaggtgctggaacccctgcacgccatgatggaaagaggccctcagacactgaaagaaaccagcttcaaccaggcttacggcagggacctgatggaagcccaagagtggtgccggaagtacatgaagtccggcaatgtgaaggacctgctgcaagcctgggacctgtactaccacgtgttccggcggatcagcaagttggagtatagcggcggaggcagcctggaaggcgttcaggtggaaacaatcagccctggcgacggcagaacattccctaagaggggccagacctgcgtggtgcactacaccggaatgctggaagatggcaagaagttcgacagcagccgggacagaaacaagcccttcaagttcatgctgggcaagcaagaagtgattcgcggctgggaagagggcgtcgcacagatgtctgttggacagagagccaagctgaccatctctcccgactacgcctatggcgctacaggacaccctggcatcattcctccacacgccacactggtgttcgacgtggaactgctgaagctggaatctggcggaggtggaagcggaggcggaggatctggtggtggtggatctggccatatggaccctttcctggtgctgctgcacagcgttagcagcagcctgtctagcagcgagctgaccgagctgaagttcctgtgtctgggcagagtgggcaagagaaagctggaaagagtgcagagcggcctggacctgttctccatgctgctggaacagaacgatctggaacccggccacaccgagctgctgagagaactgctggcttccctgagaaggcacgacctgctgagaagagtggacgattttgaagccggcgctgctgctggtgcagctcctggcgaagaggatctgtgtgccgccttcaacgtgatctgcgacaacgtgggaaag

SEQ ID NO: 7122 - DNA, 42 bp, Artificial Sequence
  Synthetic Polynucleotide
atggggagtagcaagagcaagcctaaggaccccagccaacgc

SEQ ID NO: 7123 - skipped

SEQ ID NO: 7124 - DNA, 327 bp, Artificial Sequence
  Synthetic Polynucleotide
gaccctttcctggtgctgctgcacagcgttagcagcagcctgtctagcagcgagctgaccgagctgaagttcctgtgtctgggcagagtgggcaagagaaagctggaaagagtgcagagcggcctggacctgttctccatgctgctggaacagaacgatctggaacccggccacaccgagctgctgagagaactgctggcttccctgagaaggcacgacctgctgagaagagtggacgattttgaagccggcgctgctgctggtgcagctcctggcgaagaggatctgtgtgccgccttcaacgtgatctgcgacaacgtgggaaag

SEQ ID NO: 7125 - DNA, 699 bp, Artificial Sequence
  Synthetic Polynucleotide
atggacaaccagggcgtgatctacagcgacctgaacctgcctcctaatcctaagcggcagcagagaaagcccaagggcaacaagagcagcatcctggctaccgagcaagagatcacctacgccgagctgaacctccagaaggccagccaggatttccagggcaacgacaagacctaccactgcaaggacctgcctagcgcacccgagaagctgatcgttggcatcctgggcatcatctgcctgatcctgatggcctccgtggtcaccatcgtggtcatccccagcacactgatccagcggcacaacaacagcagcctgaacaccagaacacagaaggcccggcactgcggccactgtcctgaagagtggatcacatacagcaacagctgctactacatcggcaaagagcggcggacctgggaagaatctctgctggcctgcaccagcaagaacagctccctgctgagcatcgacaacgaggaagagatgaagttcctgtccatcatcagccccagcagctggatcggcgtgttcagaaactccagccaccatccttgggtcaccatgaacggcctggccttcaagcacgaaatcaaggacagcgacaacgccgaactgaattgcgccgtgctgcaagtgaaccggctgaagtctgcccagtgtggcagcagcatcatctatcactgcaagcacaagctg

SEQ ID NO: 7126 - DNA, 537 bp, Artificial Sequence
  Synthetic Polynucleotide
atggccgtgttcaagaccacactgtggcggctgatctctggcaccctgggcatcatctgtctgagcctgatgtccacactgggcatcctgctgaagaacagcttcaccaagctgagcatcgagcccgccttcacacccggacctaacatcgaactccagaaggacagcgactgctgctcctgccaagagaaatgggtcggatacagatgcaactgctacttcatcagcagcgagcagaaaacctggaacgagagcagacacctgtgcgccagccagaagtctagcctgctccagctccagaacaccgacgagctggacttcatgtccagcagccagcagttctactggatcggcctgagctacagcgaggaacacacagcttggctgtgggagaatggcagcgccctgagccagtacctgtttcctagcttcgagacattcaacaccaagaactgtatcgcctacaatcccaacggcaacgccctggatgagagctgcgaggacaagaatcggtacatctgcaagcagcagctgatc

SEQ ID NO: 7127 - DNA, 693 bp, Artificial Sequence
  Synthetic Polynucleotide
atgagcaagcagagaggcaccttcagcgaggtgtcactggctcaggaccccaagagacagcagagaaagcccaagggcaacaagagcagcatcagcggcaccgagcaagagattttccaggtggaactgaacctgcaaaaccccagcctgaaccaccagggcatcgacaaaatctacgactgccagggcctgctgcctcctccagaaaaactgacagccgaggtgctgggcatcatctgcatcgtgctgatggctaccgtgctgaaaacgattgtgctgatcccattcctggaacagaacaacagcagccccaacacacggacccagaaggccagacactgcggccactgtcctgaggaatggatcacctacagcaacagctgctactacatcggcaaagagcggcggacctgggaagaatctctgctggcctgcaccagcaagaacagctccctgctgtccatcgacaacgaggaagagatgaagttcctggcctccatcctgcctagcagctggatcggcgtgttcagaaactccagccaccatccttgggtcaccatcaacggcctggccttcaagcacaagatcaaggacagcgacaacgccgagctgaactgcgctgtgctgcaagtgaaccggctgaagtctgcccagtgtggcagcagcatgatctaccactgcaagcacaaactg

SEQ ID NO: 7128 - DNA, 693 bp, Artificial Sequence; identical to SEQ ID NO: 7127
  Synthetic Polynucleotide

SEQ ID NO: 7129 - DNA, 771 bp, Artificial Sequence
  Synthetic Polynucleotide
atgaacaagcagcggggcaccttcagcgaagtgtctctggctcaggaccccaagcctcagcagagaaagcccaagggcaacaagagcagcatcagcggcaccgagcaagagattttccaggtggaactgaacctccagaacgccagcctgaaccaccagggcatcgacaaaatctacgactgccagggcctgctgcctcctccagaaaaactgacagccgaggtgctgggcatcatctgcatcgtgctgatggctaccgtgctgaaaacgattgtgctgatcccattcctggaacagaacaacagcagccccaacacacggacccagaaggctagaccttgcggacactgtcccgaggaatggatcacctacagcaacagctgctactacatcggcaaagagcggcggacctgggaagagtctcttcaggcttgcgccagcaagaacagcagctccctgctgtccatcgacaacgaggaagagatgaagttcctggcctccatcctgcctagcagctggatcggcgtgttcagaaacagctcccaccatccttgggtcaccatcaacggcctggccttcaagcacgaaatcaaggacagcgaccacgccgagagaaactgcgccatgcttcatgtgcggggcctgatctccgatcagtgtggcagcagcagaatcatcgtgtccatcagcttcaggatcaaggccctggaactggccgtgcaccagatcaagttctacatctgctccaaccggaacgacattatgatcgcc

SEQ ID NO: 7130 - DNA, 771 bp, Artificial Sequence; identical to SEQ ID NO: 7129
  Synthetic Polynucleotide

SEQ ID NO: 7131 - DNA, 216 bp, Artificial Sequence
  Synthetic Polynucleotide
aagatcgaagtgatgtaccctcctccttacctggacaacgagaagtccaacggcaccatcatccacgtgaagggcaagcacctgtgtccttctccactgttccccggacctagcaagcctttctgggtgctcgttgttgttggcggcgtgctggcctgttacagcctgctggttaccgtggccttcatcatcttttgggtccgaagcaagcggagc

SEQ ID NO: 7132 - DNA, 75 bp, Artificial Sequence
  Synthetic Polynucleotide
aaaattgaagttatgtatcctcctccttacctagacaatgagaagagcaatggaaccattatccatgtgaaaggg

SEQ ID NO: 7133 - DNA, 681 bp, Artificial Sequence
  Synthetic Polynucleotide
atgtaccggatgcagctgctgagctgtatcgccctgtctctggccctggtcacaaatagcgcccctaccagcagcagcaccaagaaaacccagctgcaactggaacacctcctgctggacctccagatgatcctgaacggcatcaacaactacaagaaccccaagctgacccggatgctgaccttcaagttctacatgcccaagaaggccaccgagctgaagcacctccagtgcctggaagaggaactgaagcccctggaagaagtgctgaatctggcccagagcaagaacttccacctgaggccaagggacctgatctccaacatcaacgtgatcgtgctggaactgaaaggcagcgagacaaccttcatgtgcgagtacgccgacgagacagctaccatcgtggaatttctgaatcggtggatcaccttctgccagagcatcatcagcaccctgacaacgcgtgccaagcctacaacaacccctgctcctagacctcctacaccagctcctacaatcgccagccagcctctgtctctcagacccgaagcctgtagaccagctgctggcggagctgtgcataccagaggactggatttcgcctgcgacatctacatctgggctcctctggctggcacatgtggcgttctgctgctgtccctggtcatcaccctgtactgt

SEQ ID NO: 7134 - DNA, 675 bp, Artificial Sequence
  Synthetic Polynucleotide
atgtaccggatgcagctgctgagctgtatcgccctgtctctggccctggtcacaaatagcgcccctaccagcagcagcaccaagaaaacccagctgcaactggaacacctcctgctggacctccagatgatcctgaacggcatcaacaactacaagaaccccaagctgaccgccatgctgaccaagaagttctacatgcccaagaaggccaccgagctgaagcacctccagtgcctggaagaggaactgaagcccctggaagaagtgctgaatctggcccagagcaagaacttccacctgaggccaagggacctgatctccaacatcaacgtgatcgtgctggaactgaaaggcagcgagacaaccttcatgtgcgagtacgccgacgagacagctaccatcgtggaatttctgaatcggtggatcaccttctgcgccagcatcatcagcaccctgacaaagatcgaagtgatgtaccctcctccttacctggacaacgagaagtccaacggcaccatcatccacgtgaagggcaagcacctgtgtccttctccactgttccccggacctagcaagcctttctgggtgctcgttgttgttggcggcgtgctggcctgttacagcctgctggttaccgtggccttcatcatcttttgggtccgaagcaagcggagc

SEQ ID NO: 7135 - DNA, 675 bp, Artificial Sequence
  Synthetic Polynucleotide
atgtaccggatgcagctgctgagctgtatcgccctgtctctggccctggtcacaaatagcgcccctaccagcagcagcaccaagaaaacccagctgcaactggaacacctcctgctggacctccagatgatcctgaacggcatcaacaactacaagaaccccaagctgaccgagatgctgaccgccaagttctacatgcccaagaaggccaccgagctgaagcacctccagtgcctggaagaggaactgaagcccctggaagaagtgctgaatctggcccagagcaagaacttccacctgaggccaagggacctgatctccaacatcaacgtgatcgtgctggaactgaaaggcagcgagacaaccttcatgtgcgagtacgccgacgagacagctaccatcgtggaatttctgaatcggtggatcaccttctgccagagcatcatcagcaccctgacaaagatcgaagtgatgtaccctcctccttacctggacaacgagaagtccaacggcaccatcatccacgtgaagggcaagcacctgtgtccttctccactgttccccggacctagcaagcctttctgggtgctcgttgttgttggcggcgtgctggcctgttacagcctgctggttaccgtggccttcatcatcttttgggtccgaagcaagcggagc

SEQ ID NO: 7136 - DNA, 675 bp, Artificial Sequence
  Synthetic Polynucleotide
atgtaccggatgcagctgctgagctgtatcgccctgtctctggccctggtcacaaatagcgcccctaccagcagcagcaccaagaaaacccagctgcaactggaacacctcctgctggacctccagatgatcctgaacggcatcaacaactacaagaaccccaagctgaccgagatgctgaccgccaagttctacatgcccaagaaggccaccgagctgaagcacctccagtgcctggaagaggaactgaagcccctggaagaagtgctgaatctggcccagagcaagaacttccacctgaggccaagggacctgatctccaacatcaacgtggccgtgctggaactgaaaggcagcgagacaaccttcatgtgcgagtacgccgacgagacagctaccatcgtggaatttctgaatcggtggatcaccttctgccagagcatcatcagcaccctgacaaagatcgaagtgatgtaccctcctccttacctggacaacgagaagtccaacggcaccatcatccacgtgaagggcaagcacctgtgtccttctccactgttccccggacctagcaagcctttctgggtgctcgttgttgttggcggcgtgctggcctgttacagcctgctggttaccgtggccttcatcatcttttgggtccgaagcaagcggagc

SEQ ID NO: 7137 - DNA, 675 bp, Artificial Sequence
  Synthetic Polynucleotide
atgtaccggatgcagctgctgagctgtatcgccctgtctctggccctggtcacaaatagcgcccctgccagcagcagcaccaagaaaacccagctgcaactggaacacctcctgctggacctccagatgatcctgaacggcatcaacaactacaagaaccccaagctgacccggatgctgaccgccaagttcgccatgcccaagaaggccaccgagctgaagcacctccagtgcctggaagaggaactgaagcccctggaagaagtgctgaatggggcccagagcaagaacttccacctgaggccaagggacctgatctccaacatcaacgtgatcgtgctggaactgaaaggcagcgagacaaccttcatgtgcgagtacgccgacgagacagctaccatcgtggaatttctgaatcggtggatcaccttcggccagagcatcatcagcaccctgacaaagatcgaagtgatgtaccctcctccttacctggacaacgagaagtccaacggcaccatcatccacgtgaagggcaagcacctgtgtccttctccactgttccccggacctagcaagcctttctgggtgctcgttgttgttggcggcgtgctggcctgttacagcctgctggttaccgtggccttcatcatcttttgggtccgaagcaagcggagc

SEQ ID NO: 7138 - DNA, 618 bp, Artificial Sequence
  Synthetic Polynucleotide
atgtaccggatgcagctgctgagctgtatcgccctgtctctggccctggtcacaaatagcaactgggttaacgtgatctccgacctgaagaagatcgaggacctgatccagtccatgcacatcgacgccacactgtacaccgagagcgacgtgcaccctagctgtaaagtgaccgccatgaagtgctttctgctggaactgcaagtgatctccctggaaagcggcgacgccagcatccacgacaccgtgaagaacctgattatcctggctaacaacagcctgagcagcaacggcaacgtgaccgagtccggctgtaaagagtgcgaggaactggaagagaagaatatcaaagagttcctccagagcttcgtgcacatcgtgcagatgttcatcaacaccagcaagatcgaagtgatgtaccctcctccttacctggacaacgagaagtccaacggcaccatcatccacgtgaagggcaagcacctgtgtccttctccactgttccccggacctagcaagcctttctgggtgctcgttgttgttggcggcgtgctggcctgttacagcctgctggttaccgtggccttcatcatcttttgggtccgaagcaagcggagc

SEQ ID NO: 7139 - DNA, 618 bp, Artificial Sequence
  Synthetic Polynucleotide
atgtaccggatgcagctgctgagctgtatcgccctgtctctggccctggtcacaaatagcaactgggttaacgtgatctccagcctgaagaagatcgaggacctgatccagtccatgcacatcgacgccacactgtacaccgagagcgacgtgcaccctagctgtaaagtgaccgccatgaagtgctttctgctggaactgcaagtgatctccctggaaagcggcgacgccagcatccacgacaccgtggaaaacctgattatcctggctaacaacagcctgagcagcaacggcaacgtgaccgagtccggctgtaaagagtgcgaggaactggaagagaagaatatcaaagagttcctccagagcttcgtgcacatcgtgcagatgttcatcaacaccagcaagatcgaagtgatgtaccctcctccttacctggacaacgagaagtccaacggcaccatcatccacgtgaagggcaagcacctgtgtccttctccactgttccccggacctagcaagcctttctgggtgctcgttgttgttggcggcgtgctggcctgttacagcctgctggttaccgtggccttcatcatcttttgggtccgaagcaagcggagc

SEQ ID NO: 7140 - DNA, 618 bp, Artificial Sequence
  Synthetic Polynucleotide
atgtaccggatgcagctgctgagctgtatcgccctgtctctggccctggtcacaaatagcaactgggttaacgtgatctccgacctgaagaagatcgaggacctgatccagtccatgcacatcgacgccacactgtacaccgagagcgacgtgcaccctagctgtaaagtgaccgccatgaagtgctttctgctggaactgcaagtgatctccctggaaagcggcgacgccagcatccacgacaccgtggaaaacctgattatccgggctaacaacagcctgagcagcaacggcaacgtgaccgagtccggctgtaaagagtgcgaggaactggaagagaagaatatcaaagagttcctccagagcttcgtgcacatcgtgcagatgttcatcaacaccagcaagatcgaagtgatgtaccctcctccttacctggacaacgagaagtccaacggcaccatcatccacgtgaagggcaagcacctgtgtccttctccactgttccccggacctagcaagcctttctgggtgctcgttgttgttggcggcgtgctggcctgttacagcctgctggttaccgtggccttcatcatcttttgggtccgaagcaagcggagc

SEQ ID NO: 7141 - DNA, 459 bp, Artificial Sequence
  Synthetic Polynucleotide
atgtaccggatgcagctgctgagctgtatcgccctgtctctggccctggtcacaaatagcgcccctaccagcagcagcaccaagaaaacccagctgcaactggaacacctcctgctggacctccagatgatcctgaacggcatcaacaactacaagaaccccaagctgacccggatgctgaccttcaagttctacatgcccaagaaggccaccgagctgaagcacctccagtgcctggaagaggaactgaagcccctggaagaagtgctgaatctggcccagagcaagaacttccacctgaggccaagggacctgatctccaacatcaacgtgatcgtgctggaactgaaaggcagcgagacaaccttcatgtgcgagtacgccgacgagacagctaccatcgtggaatttctgaatcggtggatcaccttctgccagagcatcatcagcaccctgaca

SEQ ID NO: 7142 - DNA, 459 bp, Artificial Sequence
  Synthetic Polynucleotide
atgtaccggatgcagctgctgagctgtatcgccctgtctctggccctggtcacaaatagcgcccctaccagcagcagcaccaagaaaacccagctgcaactggaacacctcctgctggacctccagatgatcctgaacggcatcaacaactacaagaaccccaagctgaccgccatgctgaccaagaagttctacatgcccaagaaggccaccgagctgaagcacctccagtgcctggaagaggaactgaagcccctggaagaagtgctgaatctggcccagagcaagaacttccacctgaggccaagggacctgatctccaacatcaacgtgatcgtgctggaactgaaaggcagcgagacaaccttcatgtgcgagtacgccgacgagacagctaccatcgtggaatttctgaatcggtggatcaccttctgcgccagcatcatcagcaccctgaca

SEQ ID NO: 7143 - DNA, 459 bp, Artificial Sequence
  Synthetic Polynucleotide
atgtaccggatgcagctgctgagctgtatcgccctgtctctggccctggtcacaaatagcgcccctaccagcagcagcaccaagaaaacccagctgcaactggaacacctcctgctggacctccagatgatcctgaacggcatcaacaactacaagaaccccaagctgaccgagatgctgaccgccaagttctacatgcccaagaaggccaccgagctgaagcacctccagtgcctggaagaggaactgaagcccctggaagaagtgctgaatctggcccagagcaagaacttccacctgaggccaagggacctgatctccaacatcaacgtgatcgtgctggaactgaaaggcagcgagacaaccttcatgtgcgagtacgccgacgagacagctaccatcgtggaatttctgaatcggtggatcaccttctgccagagcatcatcagcaccctgaca

SEQ ID NO: 7144 - DNA, 459 bp, Artificial Sequence
  Synthetic Polynucleotide
atgtaccggatgcagctgctgagctgtatcgccctgtctctggccctggtcacaaatagcgcccctaccagcagcagcaccaagaaaacccagctgcaactggaacacctcctgctggacctccagatgatcctgaacggcatcaacaactacaagaaccccaagctgaccgagatgctgaccgccaagttctacatgcccaagaaggccaccgagctgaagcacctccagtgcctggaagaggaactgaagcccctggaagaagtgctgaatctggcccagagcaagaacttccacctgaggccaagggacctgatctccaacatcaacgtggccgtgctggaactgaaaggcagcgagacaaccttcatgtgcgagtacgccgacgagacagctaccatcgtggaatttctgaatcggtggatcaccttctgccagagcatcatcagcaccctgaca

SEQ ID NO: 7145 - DNA, 459 bp, Artificial Sequence
  Synthetic Polynucleotide
atgtaccggatgcagctgctgagctgtatcgccctgtctctggccctggtcacaaatagcgcccctgccagcagcagcaccaagaaaacccagctgcaactggaacacctcctgctggacctccagatgatcctgaacggcatcaacaactacaagaaccccaagctgacccggatgctgaccgccaagttcgccatgcccaagaaggccaccgagctgaagcacctccagtgcctggaagaggaactgaagcccctggaagaagtgctgaatggggcccagagcaagaacttccacctgaggccaagggacctgatctccaacatcaacgtgatcgtgctggaactgaaaggcagcgagacaaccttcatgtgcgagtacgccgacgagacagctaccatcgtggaatttctgaatcggtggatcaccttcggccagagcatcatcagcaccctgaca

SEQ ID NO: 7146 - DNA, 486 bp, Artificial Sequence
  Synthetic Polynucleotide
atgagaatcagcaagccccacctgagatccatcagcatccagtgctacctgtgcctgctgctgaacagccactttctgacagaggccggcatccacgtgttcatcctgggctgtttttctgccggcctgcctaagaccgaggccaactgggttaacgtgatctccgacctgaagaagatcgaggacctgatccagtccatgcacatcgacgccacactgtacaccgagagcgacgtgcaccctagctgtaaagtgaccgccatgaagtgctttctgctggaactgcaagtgatctccctggaaagcggcgacgccagcatccacgacaccgtggaaaacctgattatcctggctaacaacagcctgagcagcaacggcaacgtgaccgagtccggctgtaaagagtgcgaggaactggaagagaagaatatcaaagagttcctccagagcttcgtgcacatcgtgcagatgttcatcaacaccagc

SEQ ID NO: 7147 - DNA, 402 bp, Artificial Sequence
  Synthetic Polynucleotide
atgtaccggatgcagctgctgagctgtatcgccctgtctctggccctggtcacaaatagcaactgggttaacgtgatctccgacctgaagaagatcgaggacctgatccagtccatgcacatcgacgccacactgtacaccgagagcgacgtgcaccctagctgtaaagtgaccgccatgaagtgctttctgctggaactgcaagtgatctccctggaaagcggcgacgccagcatccacgacaccgtgaagaacctgattatcctggctaacaacagcctgagcagcaacggcaacgtgaccgagtccggctgtaaagagtgcgaggaactggaagagaagaatatcaaagagttcctccagagcttcgtgcacatcgtgcagatgttcatcaacaccagc

SEQ ID NO: 7148 - DNA, 402 bp, Artificial Sequence
  Synthetic Polynucleotide
atgtaccggatgcagctgctgagctgtatcgccctgtctctggccctggtcacaaatagcaactgggttaacgtgatctccagcctgaagaagatcgaggacctgatccagtccatgcacatcgacgccacactgtacaccgagagcgacgtgcaccctagctgtaaagtgaccgccatgaagtgctttctgctggaactgcaagtgatctccctggaaagcggcgacgccagcatccacgacaccgtggaaaacctgattatcctggctaacaacagcctgagcagcaacggcaacgtgaccgagtccggctgtaaagagtgcgaggaactggaagagaagaatatcaaagagttcctccagagcttcgtgcacatcgtgcagatgttcatcaacaccagc

SEQ ID NO: 7149 - DNA, 402 bp, Artificial Sequence
  Synthetic Polynucleotide
atgtaccggatgcagctgctgagctgtatcgccctgtctctggccctggtcacaaatagcaactgggttaacgtgatctccgacctgaagaagatcgaggacctgatccagtccatgcacatcgacgccacactgtacaccgagagcgacgtgcaccctagctgtaaagtgaccgccatgaagtgctttctgctggaactgcaagtgatctccctggaaagcggcgacgccagcatccacgacaccgtggaaaacctgattatccgggctaacaacagcctgagcagcaacggcaacgtgaccgagtccggctgtaaagagtgcgaggaactggaagagaagaatatcaaagagttcctccagagcttcgtgcacatcgtgcagatgttcatcaacaccagc

SEQ ID NO: 7150 - DNA, 534 bp, Artificial Sequence
  Synthetic Polynucleotide
atggccttaccagtgaccgccttgctcctgccgctggccttgctgctccacgccgccaggccgtacttcggcaagctggaaagcaagctgtccgtgattcggaacctgaacgaccaggtgctgttcatcgaccagggcaacagacccctgttcgaggacatgaccgacagcgactgtagagacaacgcccctcggaccatcttcatcatcagcatgtacaaggacagccagcctagaggcatggccgtgaccatctctgtgaagtgcgagaagatcagcaccctgagctgcgagaacaagatcatcagcttcaaagagatgaacccgccggacaacatcaaggacaccaagagcgacatcatattcttccagcggagcgtgcccggccacgacaacaagatgcagtttgagagcagcagctacgagggctacttcctggcctgcgagaaagagcgggacctgttcaagctgatcctgaagaaagaggacgaactgggcgaccgcagcatcatgttcaccgtgcagaacgaggac

SEQ ID NO: 7151 - DNA, 699 bp, Artificial Sequence; identical to SEQ ID NO: 7117
  Synthetic Polynucleotide

SEQ ID NO: 7152 - DNA, 699 bp, Artificial Sequence
  Synthetic Polynucleotide
atgtaccggatgcagctgctgagctgtatcgccctgtctctggccctggtcacaaatagcgcccctaccagcagcagcaccaagaaaacccagctgcaactggaacacctcctgctggacctccagatgatcctgaacggcatcaacaactacaagaaccccaagctgaccgccatgctgaccaagaagttctacatgcccaagaaggccaccgagctgaagcacctccagtgcctggaagaggaactgaagcccctggaagaagtgctgaatctggcccagagcaagaacttccacctgaggccaagggacctgatctccaacatcaacgtgatcgtgctggaactgaaaggcagcgagacaaccttcatgtgcgagtacgccgacgagacagctaccatcgtggaatttctgaatcggtggatcaccttctgcgccagcatcatcagcaccctgacacatatgttgcagatggctgggcagtgctcccaaaatgaatattttgacagtttgttgcatgcttgcataccttgtcaacttcgatgttcttctaatactcctcctctaacatgtcagcgttattgtaatgcaagtgtgaccaattcagtgaaaggaacgaatgcgattctctggacctgtttgggactgagcttaataatttctttggcagttttcgtgctaatgtttttgctaaggaag

SEQ ID NO: 7153 - DNA, 699 bp, Artificial Sequence
  Synthetic Polynucleotide
atgtaccggatgcagctgctgagctgtatcgccctgtctctggccctggtcacaaatagcgcccctaccagcagcagcaccaagaaaacccagctgcaactggaacacctcctgctggacctccagatgatcctgaacggcatcaacaactacaagaaccccaagctgaccgagatgctgaccgccaagttctacatgcccaagaaggccaccgagctgaagcacctccagtgcctggaagaggaactgaagcccctggaagaagtgctgaatctggcccagagcaagaacttccacctgaggccaagggacctgatctccaacatcaacgtgatcgtgctggaactgaaaggcagcgagacaaccttcatgtgcgagtacgccgacgagacagctaccatcgtggaatttctgaatcggtggatcaccttctgccagagcatcatcagcaccctgacacatatgttgcagatggctgggcagtgctcccaaaatgaatattttgacagtttgttgcatgcttgcataccttgtcaacttcgatgttcttctaatactcctcctctaacatgtcagcgttattgtaatgcaagtgtgaccaattcagtgaaaggaacgaatgcgattctctggacctgtttgggactgagcttaataatttctttggcagttttcgtgctaatgtttttgctaaggaag

SEQ ID NO: 7154 - DNA, 699 bp, Artificial Sequence
  Synthetic Polynucleotide
atgtaccggatgcagctgctgagctgtatcgccctgtctctggccctggtcacaaatagcgcccctaccagcagcagcaccaagaaaacccagctgcaactggaacacctcctgctggacctccagatgatcctgaacggcatcaacaactacaagaaccccaagctgaccgagatgctgaccgccaagttctacatgcccaagaaggccaccgagctgaagcacctccagtgcctggaagaggaactgaagcccctggaagaagtgctgaatctggcccagagcaagaacttccacctgaggccaagggacctgatctccaacatcaacgtggccgtgctggaactgaaaggcagcgagacaaccttcatgtgcgagtacgccgacgagacagctaccatcgtggaatttctgaatcggtggatcaccttctgccagagcatcatcagcaccctgacacatatgttgcagatggctgggcagtgctcccaaaatgaatattttgacagtttgttgcatgcttgcataccttgtcaacttcgatgttcttctaatactcctcctctaacatgtcagcgttattgtaatgcaagtgtgaccaattcagtgaaaggaacgaatgcgattctctggacctgtttgggactgagcttaataatttctttggcagttttcgtgctaatgtttttgctaaggaag

SEQ ID NO: 7155 - DNA, 699 bp, Artificial Sequence
  Synthetic Polynucleotide
atgtaccggatgcagctgctgagctgtatcgccctgtctctggccctggtcacaaatagcgcccctgccagcagcagcaccaagaaaacccagctgcaactggaacacctcctgctggacctccagatgatcctgaacggcatcaacaactacaagaaccccaagctgacccggatgctgaccgccaagttcgccatgcccaagaaggccaccgagctgaagcacctccagtgcctggaagaggaactgaagcccctggaagaagtgctgaatggggcccagagcaagaacttccacctgaggccaagggacctgatctccaacatcaacgtgatcgtgctggaactgaaaggcagcgagacaaccttcatgtgcgagtacgccgacgagacagctaccatcgtggaatttctgaatcggtggatcaccttcggccagagcatcatcagcaccctgacacatatgttgcagatggctgggcagtgctcccaaaatgaatattttgacagtttgttgcatgcttgcataccttgtcaacttcgatgttcttctaatactcctcctctaacatgtcagcgttattgtaatgcaagtgtgaccaattcagtgaaaggaacgaatgcgattctctggacctgtttgggactgagcttaataatttctttggcagttttcgtgctaatgtttttgctaaggaag

SEQ ID NO: 7156 - DNA, 726 bp, Artificial Sequence
  Synthetic Polynucleotide
atgagaatcagcaagccccacctgagatccatcagcatccagtgctacctgtgcctgctgctgaacagccactttctgacagaggccggcatccacgtgttcatcctgggctgtttttctgccggcctgcctaagaccgaggccaactgggttaacgtgatctccgacctgaagaagatcgaggacctgatccagtccatgcacatcgacgccacactgtacaccgagagcgacgtgcaccctagctgtaaagtgaccgccatgaagtgctttctgctggaactgcaagtgatctccctggaaagcggcgacgccagcatccacgacaccgtggaaaacctgattatcctggctaacaacagcctgagcagcaacggcaacgtgaccgagtccggctgtaaagagtgcgaggaactggaagagaagaatatcaaagagttcctccagagcttcgtgcacatcgtgcagatgttcatcaacaccagccatatgttgcagatggctgggcagtgctcccaaaatgaatattttgacagtttgttgcatgcttgcataccttgtcaacttcgatgttcttctaatactcctcctctaacatgtcagcgttattgtaatgcaagtgtgaccaattcagtgaaaggaacgaatgcgattctctggacctgtttgggactgagcttaataatttctttggcagttttcgtgctaatgtttttgctaaggaag

SEQ ID NO: 7157 - DNA, 726 bp, Artificial Sequence
  Synthetic Polynucleotide
atgagaatcagcaagccccacctgagatccatcagcatccagtgctacctgtgcctgctgctgaacagccactttctgacagaggccggcatccacgtgttcatcctgggctgtttttctgccggcctgcctaagaccgaggccaactgggttaacgtgatctccgacctgaagaagatcgaggacctgatccagtccatgcacatcgacgccacactgtacaccgagagcgacgtgcaccctagctgtaaagtgaccgccatgaagtgctttctgctggaactgcaagtgatctccctggaaagcggcgacgccagcatccacgacaccgtgaagaacctgattatcctggctaacaacagcctgagcagcaacggcaacgtgaccgagtccggctgtaaagagtgcgaggaactggaagagaagaatatcaaagagttcctccagagcttcgtgcacatcgtgcagatgttcatcaacaccagccatatgttgcagatggctgggcagtgctcccaaaatgaatattttgacagtttgttgcatgcttgcataccttgtcaacttcgatgttcttctaatactcctcctctaacatgtcagcgttattgtaatgcaagtgtgaccaattcagtgaaaggaacgaatgcgattctctggacctgtttgggactgagcttaataatttctttggcagttttcgtgctaatgtttttgctaaggaag

SEQ ID NO: 7158 - DNA, 1641 bp, Artificial Sequence
  Synthetic Polynucleotide
atgtaccggatgcagctgctgagctgtatcgccctgtctctggccctggtcacaaatagcgcccctaccagcagcagcaccaagaaaacccagctgcaactggaacacctcctgctggacctccagatgatcctgaacggcatcaacaactacaagaaccccaagctgacccggatgctgaccttcaagttctacatgcccaagaaggccaccgagctgaagcacctccagtgcctggaagaggaactgaagcccctggaagaagtgctgaatctggcccagagcaagaacttccacctgaggccaagggacctgatctccaacatcaacgtgatcgtgctggaactgaaaggcagcgagacaaccttcatgtgcgagtacgccgacgagacagctaccatcgtggaatttctgaatcggtggatcaccttctgccagagcatcatcagcaccctgacacatatgttcccacaggatcgacccttcgaggacacctgtcatggaaaccccagccactactatgacaaggctgtcaggaggtgctgttaccgctgccccatggggctgttcccgacacagcagtgcccacagaggcctactgactgcaggaagcagtgtgagcctgactactacctggatgaggccgaccgctgtacagcctgcgtgacttgttctcgagacgacctcgtggagaagacgccgtgtgcatggaactcctcccgtgtctgcgaatgtcgacccggcatgttctgttccacgtctgccgtcaactcctgtgcccgctgcttcttccattctgtctgtccggcagggatgattgtcaagttcccaggcacggcgcagaagaacacggtctgtgagccggcttccccaggggtcagccctgcctgtgccagcccagagaactgcaaggaaccctccagtggcaccatcccccaggccaagcccaccccggtgtccccagcaacctccagtgccagcaccatgcctgtaagagggggcacccgcctcgcccaggaagctgcttctaaactgacgagggctcccgactctccctcctctgtgggaaggcctagttcagatccaggtctgtccccaacacagccatgcccagaggggtctggtgattgcagaaagcagtgtgagcccgactactacctggacgaggccggccgctgcacggcctgcgtgagctgttctcgagatgaccttgtggagaagacgccatgtgcatggaactcctcccgcacctgcgaatgtcgacctggcatgatctgtgccacatcagccaccaactcctgtgcccgctgtgtcccctacccaatctgtgcagcagagacggtcaccaagccccaggatatggctgagaaggacaccacctttgaggcgccacccctggggacccagccggactgcaaccccaccccagagaatggcgaggcgcctgccagcaccagccccactcagagcttgctggtggactcccaggccagtaagacgctgcccatcccaaccagcgctcccgtcgctctctcctccacggggaagcccgttctggatgcagggccagtgctcttctgggtgatcctggtgttggttgtggtggtcggctccagcgccttcctcctgtgccaccggagg

SEQ ID NO: 7159 - DNA, 693 bp, Artificial Sequence
  Synthetic Polynucleotide
atgcaggacgaggaacggtacatgaccctgaacgtgcagagcaagaagcggagcagcgcccagacaagccagctgaccttcaaggactacagcgtgaccctgcactggtacaagatcctgctgggcatcagcggcaccgtgaacggaatcctgacactgaccctgatctccctgattctgctggtgtctcagggcgtgctgctgaagtgtcagaagggcagctgtagcaacgccacacagtacgaggataccggcgacctgaaagtgaacaacggcaccagacggaacatcagcaacaaggacctgtgcgccagcagatccgccgatcagacagtgctgtgtcagagcgagtggctgaagtaccagggcaagtgctactggttcagcaacgagatgaagtcttggagcgacagctacgtgtactgcctggaaagaaagagccacctcctgattatccacgaccagctggaaatggccttcatccagaagaacctgcggcagctgaactacgtgtggatcggcctgaacttcaccagcctgaagatgacctggacctgggtggacggcagccctatcgacagcaagattttcttcatcaagggacccgccaaagagaacagctgcgccgccatcaaagagagcaaaatcttcagcgagacatgcagcagcgtgttcaagtggatctgccagtac

SEQ ID NO: 7160 - DNA, 1926 bp, Artificial Sequence
  Synthetic Polynucleotide
atggactggatttggcgcatccttttccttgtcggcgctgctaccggcgcccattccgggcccgaagtgcagctggttgaatctggcggaggactggttcaggctggcggatctctgagactgtcttgtgccgccagcggcagaacctttagcatgggctggtttagacaggcccctggcaaagagagagagttcgtcgccgccatcacatactctggcggcagcccttactacgccgactctgtgaagggcagattcaccatcagccgggacaacgccaagaacaccgtgtacctccagatgaacagcctgaagcctgaggacaccgccgtgtactactgcgccgccaatccaacatacggcagcgactggaacgccgagaattggggccagggaacccaagtgacagtgtctagcggatccggcggcggaggatctggcggaggcggatctgggggcggaggctctttcgaagacatccagatgacacagagccctagcagcctgtctgccagcgtgggagacagagtgaccatcacatgcaaggccagcgaccacatcaacaactggctggcctggtatcagcagaagcctggacaggcccctaagctgctgatctacggcgctaccacactggaaacaggcgtgcccagcagattttctggcagcggctctggcaccgactacaccctgacaatatccagcctccagcctgaggacttcgccacctactactgtcagcagagctggaacaccccttggacattcggccagggcaccaagctggaaatcaagagaggcggaggcggaagtggaggcggaggatctggcggcggaggctctcaagttcagcttcaacagcctggcgctgagctggtcaaacctggcgcttctgtgaagatgagctgcaaagccagcggctacgccttcagcagctactggatcaactggatgaagcagaaacccggccagggactcgaatggatcggccaaatctatcccggcgacggcgacaccaactacaacggcaagttcaagggcagagccacactgaccgccgatacctctagcagcacagcctacatgcagctgagcagcctgaccagcgaagatagcgccgtgtacttctgtgcccggtccatcacaacagtcgtgggctgcgctatggactattggggccagggaacaagcgtgaccgtgtctagtacgcgtggaatgaggactgaggatcttcccaaagctgtcgtctttctcgaaccccaatggtatcgggtgctcgaaaaagactctgtgacactgaaatgccaaggggcctactctcccgaggacaactccacacagtggtttcataatgagtccctcatcagctctcaggccagctcttatttcattgatgccgctacagtggacgactccggcgagtatcggtgtcagaccaatctgtctacactgtctgaccccgtgcagcttgaggtccacattggatggttgctcttgcaagccccacgctgggttttcaaagaggaagatccaatccatctgcggtgccacagctggaaaaacaccgctctccacaaagtcacatacctgcaaaatggcaaaggacgcaaatacttccatcacaattccgatttttacattccgaaggctaccctgaaagacagcggcagctatttctgccggggactcgtcggctccaagaatgtgtcctccgaaaccgtgaatatcacgattacccaaggactggctgtgcctacaatctctagcttctttccgcctggataccaagtctccttctgtcttgtgatggtcctcctgtttgctgtggacacaggactgtacttttccgtgaaaacgaacatccgcagctccacacgcgattggaaagatcacaagtttaaatggcgcaaagatccccaggacaag

SEQ ID NO: 7161 - DNA, 1761 bp, Artificial Sequence
  Synthetic Polynucleotide
atggactggatttggcgcatccttttccttgtcggcgctgctaccggcgcccattccgggcccgaagtgcagctggttgaatctggcggaggactggttcaggctggcggatctctgagactgtcttgtgccgccagcggcagaacctttagcatgggctggtttagacaggcccctggcaaagagagagagttcgtcgccgccatcacatactctggcggcagcccttactacgccgactctgtgaagggcagattcaccatcagccgggacaacgccaagaacaccgtgtacctccagatgaacagcctgaagcctgaggacaccgccgtgtactactgcgccgccaatccaacatacggcagcgactggaacgccgagaattggggccagggaacccaagtgacagtgtctagcggatccggcggcggaggatctggcggaggcggatctgggggcggaggctctttcgaagacatccagatgacacagagccctagcagcctgtctgccagcgtgggagacagagtgaccatcacatgcaaggccagcgaccacatcaacaactggctggcctggtatcagcagaagcctggacaggcccctaagctgctgatctacggcgctaccacactggaaacaggcgtgcccagcagattttctggcagcggctctggcaccgactacaccctgacaatatccagcctccagcctgaggacttcgccacctactactgtcagcagagctggaacaccccttggacattcggccagggcaccaagctggaaatcaagagaggcggaggcggaagtggaggcggaggatctggcggcggaggctctcaagttcagcttcaacagcctggcgctgagctggtcaaacctggcgcttctgtgaagatgagctgcaaagccagcggctacgccttcagcagctactggatcaactggatgaagcagaaacccggccagggactcgaatggatcggccaaatctatcccggcgacggcgacaccaactacaacggcaagttcaagggcagagccacactgaccgccgatacctctagcagcacagcctacatgcagctgagcagcctgaccagcgaagatagcgccgtgtacttctgtgcccggtccatcacaacagtcgtgggctgcgctatggactattggggccagggaacaagcgtgaccgtgtctagtacgcgtctgtgggtttcacagcctccagagatcagaaccctggaaggcagcagcgccttcctgccttgcagcttcaatgcctctcagggcagactggctatcggcagcgtgacctggttcagagatgaggtggtgcccggcaaagaagtgcggaacggcacccctgagtttagaggaaggctggcccctctggcctccagcagatttctgcacgatcaccaggccgagctgcacatcagagatgtgcgaggacacgacgccagcatctacgtgtgcagagtggaagtgctcggcctcggagttggcacaggcaatggaacaagactggtggtggaaaaagagcaccctcagctcggagccggaacagtgctgcttctgagagccggcttttacgccgtgtcctttctgtctgtggccgtgggcagcaccgtgtactatcagggcaagtgcctgacctggaagggacctagaaggcaactgcctgctgtggtgcctgctcctttgcctcctccatgtggaagctctgcccatctgctgccacctgttccaggcgga

SEQ ID NO: 7162 - DNA, 1977 bp, Artificial Sequence
  Synthetic Polynucleotide
atggactggatttggcgcatccttttccttgtcggcgctgctaccggcgcccattccgggcccgaagtgcagctggttgaatctggcggaggactggttcaggctggcggatctctgagactgtcttgtgccgccagcggcagaacctttagcatgggctggtttagacaggcccctggcaaagagagagagttcgtcgccgccatcacatactctggcggcagcccttactacgccgactctgtgaagggcagattcaccatcagccgggacaacgccaagaacaccgtgtacctccagatgaacagcctgaagcctgaggacaccgccgtgtactactgcgccgccaatccaacatacggcagcgactggaacgccgagaattggggccagggaacccaagtgacagtgtctagcggatccggcggcggaggatctggcggaggcggatctgggggcggaggctctttcgaagacatccagatgacacagagccctagcagcctgtctgccagcgtgggagacagagtgaccatcacatgcaaggccagcgaccacatcaacaactggctggcctggtatcagcagaagcctggacaggcccctaagctgctgatctacggcgctaccacactggaaacaggcgtgcccagcagattttctggcagcggctctggcaccgactacaccctgacaatatccagcctccagcctgaggacttcgccacctactactgtcagcagagctggaacaccccttggacattcggccagggcaccaagctggaaatcaagagaggcggaggcggaagtggaggcggaggatctggcggcggaggctctcaagttcagcttcaacagcctggcgctgagctggtcaaacctggcgcttctgtgaagatgagctgcaaagccagcggctacgccttcagcagctactggatcaactggatgaagcagaaacccggccagggactcgaatggatcggccaaatctatcccggcgacggcgacaccaactacaacggcaagttcaagggcagagccacactgaccgccgatacctctagcagcacagcctacatgcagctgagcagcctgaccagcgaagatagcgccgtgtacttctgtgcccggtccatcacaacagtcgtgggctgcgctatggactattggggccagggaacaagcgtgaccgtgtctagtacgcgtcagtctaaagcccaggtgctgcaatctgtggccggacagacactgacagtgcggtgtcagtatcctcctaccggcagcctgtacgagaagaaaggctggtgcaaagaggccagcgcactcgtctgtatcagactggtcaccagcagcaagccccggacaatggcatggaccagcagattcaccatctgggacgatcccgacgccggcttctttaccgtgaccatgaccgacctgagagaagaggacagcggccactactggtgccggatctacagacccagcgacaacagcgtgtccaagagcgtgcggttctacctggtggtgtctcctgcctctgccagcacacagacaagctggaccccacgcgatctggtgtctagccagactcagacccagagctgtgtgcctcctacagctggtgctagacaggcccctgagagcccttctacaatccccgttccaagccagcctcagaacagcacactcagacctggacctgccgctcctattgctctggtgcctgtgttttgtggcctgctggtggctaagagcctggtgctgtctgccctgcttgtttggtggggagacatctggtggaaaaccatgatggaactgcggagcctggacacccagaaggccacctgtcatctccagcaagtgaccgatctgccctggacctctgtgtcaagccccgtggaaagagagatcctgtaccacaccgtggctcggaccaagatcagcgacgacgatgatgagcacaccctt

SEQ ID NO: 7163 - DNA, 2061 bp, Artificial Sequence
  Synthetic Polynucleotide
atggactggatttggcgcatccttttccttgtcggcgctgctaccggcgcccattccgggcccgaagtgcagctggttgaatctggcggaggactggttcaggctggcggatctctgagactgtcttgtgccgccagcggcagaacctttagcatgggctggtttagacaggcccctggcaaagagagagagttcgtcgccgccatcacatactctggcggcagcccttactacgccgactctgtgaagggcagattcaccatcagccgggacaacgccaagaacaccgtgtacctccagatgaacagcctgaagcctgaggacaccgccgtgtactactgcgccgccaatccaacatacggcagcgactggaacgccgagaattggggccagggaacccaagtgacagtgtctagcggatccggcggcggaggatctggcggaggcggatctgggggcggaggctctttcgaagacatccagatgacacagagccctagcagcctgtctgccagcgtgggagacagagtgaccatcacatgcaaggccagcgaccacatcaacaactggctggcctggtatcagcagaagcctggacaggcccctaagctgctgatctacggcgctaccacactggaaacaggcgtgcccagcagattttctggcagcggctctggcaccgactacaccctgacaatatccagcctccagcctgaggacttcgccacctactactgtcagcagagctggaacaccccttggacattcggccagggcaccaagctggaaatcaagagaggcggaggcggaagtggaggcggaggatctggcggcggaggctctcaagttcagcttcaacagcctggcgctgagctggtcaaacctggcgcttctgtgaagatgagctgcaaagccagcggctacgccttcagcagctactggatcaactggatgaagcagaaacccggccagggactcgaatggatcggccaaatctatcccggcgacggcgacaccaactacaacggcaagttcaagggcagagccacactgaccgccgatacctctagcagcacagcctacatgcagctgagcagcctgaccagcgaagatagcgccgtgtacttctgtgcccggtccatcacaacagtcgtgggctgcgctatggactattggggccagggaacaagcgtgaccgtgtctagtacgcgtcagcagcagacactgcccaagcctttcatttgggccgagcctcacttcatggtgcccaaagaaaagcaagtgaccatctgctgccagggcaactacggcgctgtggaataccagctgcacttcgagggaagcctgttcgccgtggacagacctaagcctcctgagcggatcaacaaggtgcagttctacatccccgacatgaacagccggatggccggacagtacagctgcatctatagagtgggcgagctttggagcgagcccagcaatctgctggatctggtggtcaccgagatgtacgacacccctacactgagcgtgcaccccggacctgaagtgatctctggcgagaaagtgaccttctactgtcggctggataccgccaccagcatgtttctgctgctcaaagaaggccggtccagccacgtgcagcgcggatatggaaaagtgcaggccgagtttcccctgggacctgtgacaacagcccacagaggcacctacagatgcttcggcagctacaacaaccacgcttggagcttccctagcgagcccgtgaagttgcttgtgaccggcgacatcgagaacaccagtctggcccctgaggaccctacctttcctgccgatacctggggcacctacctgctgaccacagagacaggactccagaaagatcacgccctgtgggaccacacagcccagaacctgctgagaatgggcctcgcctttctggtgctggttgccctcgtgtggttcctggtggaagattggctgagccggaagcggacaagagagagagccagcagagcctctacctgggagggaagaagaaggctgaacacccagacactt

SEQ ID NO: 7164 - DNA, 1488 bp, Artificial Sequence
  Synthetic Polynucleotide
atggactggatttggcgcatccttttccttgtcggcgctgctaccggcgcccattccgggcccgaagtgcagctggttgaatctggcggaggactggttcaggctggcggatctctgagactgtcttgtgccgccagcggcagaacctttagcatgggctggtttagacaggcccctggcaaagagagagagttcgtcgccgccatcacatactctggcggcagcccttactacgccgactctgtgaagggcagattcaccatcagccgggacaacgccaagaacaccgtgtacctccagatgaacagcctgaagcctgaggacaccgccgtgtactactgcgccgccaatccaacatacggcagcgactggaacgccgagaattggggccagggaacccaagtgacagtgtctagcggatccggcggcggaggatctggcggaggcggatctgggggcggaggctctttcgaagacatccagatgacacagagccctagcagcctgtctgccagcgtgggagacagagtgaccatcacatgcaaggccagcgaccacatcaacaactggctggcctggtatcagcagaagcctggacaggcccctaagctgctgatctacggcgctaccacactggaaacaggcgtgcccagcagattttctggcagcggctctggcaccgactacaccctgacaatatccagcctccagcctgaggacttcgccacctactactgtcagcagagctggaacaccccttggacattcggccagggcaccaagctggaaatcaagagaggcggaggcggaagtggaggcggaggatctggcggcggaggctctcaagttcagcttcaacagcctggcgctgagctggtcaaacctggcgcttctgtgaagatgagctgcaaagccagcggctacgccttcagcagctactggatcaactggatgaagcagaaacccggccagggactcgaatggatcggccaaatctatcccggcgacggcgacaccaactacaacggcaagttcaagggcagagccacactgaccgccgatacctctagcagcacagcctacatgcagctgagcagcctgaccagcgaagatagcgccgtgtacttctgtgcccggtccatcacaacagtcgtgggctgcgctatggactattggggccagggaacaagcgtgaccgtgtctagtacgcgtaaaattgaagttatgtatcctcctccttacctagacaatgagaagagcaatggaaccattatccatgtgaaagggacgcggattacccaaggactggctgtgcctacaatctctagcttctttccgcctggataccaagtctccttctgtcttgtgatggtcctcctgtttgctgtggacacaggactgtacttttccgtgaaaacgaacatccgcagctccacacgcgattggaaagatcacaagtttaaatggcgcaaagatccccaggacaag

SEQ ID NO: 7165 - DNA, 1518 bp, Artificial Sequence
  Synthetic Polynucleotide
atggactggatttggcgcatccttttccttgtcggcgctgctaccggcgcccattccgggcccgaagtgcagctggttgaatctggcggaggactggttcaggctggcggatctctgagactgtcttgtgccgccagcggcagaacctttagcatgggctggtttagacaggcccctggcaaagagagagagttcgtcgccgccatcacatactctggcggcagcccttactacgccgactctgtgaagggcagattcaccatcagccgggacaacgccaagaacaccgtgtacctccagatgaacagcctgaagcctgaggacaccgccgtgtactactgcgccgccaatccaacatacggcagcgactggaacgccgagaattggggccagggaacccaagtgacagtgtctagcggatccggcggcggaggatctggcggaggcggatctgggggcggaggctctttcgaagacatccagatgacacagagccctagcagcctgtctgccagcgtgggagacagagtgaccatcacatgcaaggccagcgaccacatcaacaactggctggcctggtatcagcagaagcctggacaggcccctaagctgctgatctacggcgctaccacactggaaacaggcgtgcccagcagattttctggcagcggctctggcaccgactacaccctgacaatatccagcctccagcctgaggacttcgccacctactactgtcagcagagctggaacaccccttggacattcggccagggcaccaagctggaaatcaagagaggcggaggcggaagtggaggcggaggatctggcggcggaggctctcaagttcagcttcaacagcctggcgctgagctggtcaaacctggcgcttctgtgaagatgagctgcaaagccagcggctacgccttcagcagctactggatcaactggatgaagcagaaacccggccagggactcgaatggatcggccaaatctatcccggcgacggcgacaccaactacaacggcaagttcaagggcagagccacactgaccgccgatacctctagcagcacagcctacatgcagctgagcagcctgaccagcgaagatagcgccgtgtacttctgtgcccggtccatcacaacagtcgtgggctgcgctatggactattggggccagggaacaagcgtgaccgtgtctagtacgcgtaaaattgaagttatgtatcctcctccttacctagacaatgagaagagcaatggaaccattatccatgtgaaagggacgcgggtggaaaaagagcaccctcagctcggagccggaacagtgctgcttctgagagccggcttttacgccgtgtcctttctgtctgtggccgtgggcagcaccgtgtactatcagggcaagtgcctgacctggaagggacctagaaggcaactgcctgctgtggtgcctgctcctttgcctcctccatgtggaagctctgcccatctgctgccacctgttccaggcgga

SEQ ID NO: 7166 - DNA, 1761 bp, Artificial Sequence
  Synthetic Polynucleotide
atggactggatttggcgcatccttttccttgtcggcgctgctaccggcgcccattccgggcccgaagtgcagctggttgaatctggcggaggactggttcaggctggcggatctctgagactgtcttgtgccgccagcggcagaacctttagcatgggctggtttagacaggcccctggcaaagagagagagttcgtcgccgccatcacatactctggcggcagcccttactacgccgactctgtgaagggcagattcaccatcagccgggacaacgccaagaacaccgtgtacctccagatgaacagcctgaagcctgaggacaccgccgtgtactactgcgccgccaatccaacatacggcagcgactggaacgccgagaattggggccagggaacccaagtgacagtgtctagcggatccggcggcggaggatctggcggaggcggatctgggggcggaggctctttcgaagacatccagatgacacagagccctagcagcctgtctgccagcgtgggagacagagtgaccatcacatgcaaggccagcgaccacatcaacaactggctggcctggtatcagcagaagcctggacaggcccctaagctgctgatctacggcgctaccacactggaaacaggcgtgcccagcagattttctggcagcggctctggcaccgactacaccctgacaatatccagcctccagcctgaggacttcgccacctactactgtcagcagagctggaacaccccttggacattcggccagggcaccaagctggaaatcaagagaggcggaggcggaagtggaggcggaggatctggcggcggaggctctcaagttcagcttcaacagcctggcgctgagctggtcaaacctggcgcttctgtgaagatgagctgcaaagccagcggctacgccttcagcagctactggatcaactggatgaagcagaaacccggccagggactcgaatggatcggccaaatctatcccggcgacggcgacaccaactacaacggcaagttcaagggcagagccacactgaccgccgatacctctagcagcacagcctacatgcagctgagcagcctgaccagcgaagatagcgccgtgtacttctgtgcccggtccatcacaacagtcgtgggctgcgctatggactattggggccagggaacaagcgtgaccgtgtctagtacgcgtaaaattgaagttatgtatcctcctccttacctagacaatgagaagagcaatggaaccattatccatgtgaaagggacgcggaagagcgtgcggttctacctggtggtgtctcctgcctctgccagcacacagacaagctggaccccacgcgatctggtgtctagccagactcagacccagagctgtgtgcctcctacagctggtgctagacaggcccctgagagcccttctacaatccccgttccaagccagcctcagaacagcacactcagacctggacctgccgctcctattgctctggtgcctgtgttttgtggcctgctggtggctaagagcctggtgctgtctgccctgcttgtttggtggggagacatctggtggaaaaccatgatggaactgcggagcctggacacccagaaggccacctgtcatctccagcaagtgaccgatctgccctggacctctgtgtcaagccccgtggaaagagagatcctgtaccacaccgtggctcggaccaagatcagcgacgacgatgatgagcacaccctt

SEQ ID NO: 7167 - DNA, 1572 bp, Artificial Sequence
  Synthetic Polynucleotide
atggactggatttggcgcatccttttccttgtcggcgctgctaccggcgcccattccgggcccgaagtgcagctggttgaatctggcggaggactggttcaggctggcggatctctgagactgtcttgtgccgccagcggcagaacctttagcatgggctggtttagacaggcccctggcaaagagagagagttcgtcgccgccatcacatactctggcggcagcccttactacgccgactctgtgaagggcagattcaccatcagccgggacaacgccaagaacaccgtgtacctccagatgaacagcctgaagcctgaggacaccgccgtgtactactgcgccgccaatccaacatacggcagcgactggaacgccgagaattggggccagggaacccaagtgacagtgtctagcggatccggcggcggaggatctggcggaggcggatctgggggcggaggctctttcgaagacatccagatgacacagagccctagcagcctgtctgccagcgtgggagacagagtgaccatcacatgcaaggccagcgaccacatcaacaactggctggcctggtatcagcagaagcctggacaggcccctaagctgctgatctacggcgctaccacactggaaacaggcgtgcccagcagattttctggcagcggctctggcaccgactacaccctgacaatatccagcctccagcctgaggacttcgccacctactactgtcagcagagctggaacaccccttggacattcggccagggcaccaagctggaaatcaagagaggcggaggcggaagtggaggcggaggatctggcggcggaggctctcaagttcagcttcaacagcctggcgctgagctggtcaaacctggcgcttctgtgaagatgagctgcaaagccagcggctacgccttcagcagctactggatcaactggatgaagcagaaacccggccagggactcgaatggatcggccaaatctatcccggcgacggcgacaccaactacaacggcaagttcaagggcagagccacactgaccgccgatacctctagcagcacagcctacatgcagctgagcagcctgaccagcgaagatagcgccgtgtacttctgtgcccggtccatcacaacagtcgtgggctgcgctatggactattggggccagggaacaagcgtgaccgtgtctagtacgcgtaaaattgaagttatgtatcctcctccttacctagacaatgagaagagcaatggaaccattatccatgtgaaagggacgcggggcgacatcgagaacaccagtctggcccctgaggaccctacctttcctgccgatacctggggcacctacctgctgaccacagagacaggactccagaaagatcacgccctgtgggaccacacagcccagaacctgctgagaatgggcctcgcctttctggtgctggttgccctcgtgtggttcctggtggaagattggctgagccggaagcggacaagagagagagccagcagagcctctacctgggagggaagaagaaggctgaacacccagacactt

SEQ ID NO: 7168 - DNA, 1515 bp, Artificial Sequence
  Synthetic Polynucleotide
atggactggatttggcgcatccttttccttgtcggcgctgctaccggcgcccattccgggcccgaagtgcagctggttgaatctggcggaggactggttcaggctggcggatctctgagactgtcttgtgccgccagcggcagaacctttagcatgggctggtttagacaggcccctggcaaagagagagagttcgtcgccgccatcacatactctggcggcagcccttactacgccgactctgtgaagggcagattcaccatcagccgggacaacgccaagaacaccgtgtacctccagatgaacagcctgaagcctgaggacaccgccgtgtactactgcgccgccaatccaacatacggcagcgactggaacgccgagaattggggccagggaacccaagtgacagtgtctagcggatccggcggcggaggatctggcggaggcggatctgggggcggaggctctttcgaagacatccagatgacacagagccctagcagcctgtctgccagcgtgggagacagagtgaccatcacatgcaaggccagcgaccacatcaacaactggctggcctggtatcagcagaagcctggacaggcccctaagctgctgatctacggcgctaccacactggaaacaggcgtgcccagcagattttctggcagcggctctggcaccgactacaccctgacaatatccagcctccagcctgaggacttcgccacctactactgtcagcagagctggaacaccccttggacattcggccagggcaccaagctggaaatcaagagaggcggaggcggaagtggaggcggaggatctggcggcggaggctctcaagttcagcttcaacagcctggcgctgagctggtcaaacctggcgcttctgtgaagatgagctgcaaagccagcggctacgccttcagcagctactggatcaactggatgaagcagaaacccggccagggactcgaatggatcggccaaatctatcccggcgacggcgacaccaactacaacggcaagttcaagggcagagccacactgaccgccgatacctctagcagcacagcctacatgcagctgagcagcctgaccagcgaagatagcgccgtgtacttctgtgcccggtccatcacaacagtcgtgggctgcgctatggactattggggccagggaacaagcgtgaccgtgtctagtacgcgtaaaattgaagttatgtatcctcctccttacctagacaatgagaagagcaatggaaccattatccatgtgaaagggacgcggacaacacctggcgagagaagtagcctgcctgccttctatcctggcaccagcggctcttgttctggctgtggatctctgagcctgcctctgctggctggactggttgctgctgatgctgtggcctctctgctgattgtgggagccgtgttcctgtgcgccagacctagaagaagccccgctcaagaggacggcaaggtgtacatcaacatgcccggcagagga

SEQ ID NO: 7169 - DNA, 1722 bp, Artificial Sequence
  Synthetic Polynucleotide
atggactggatttggcgcatccttttccttgtcggcgctgctaccggcgcccattccgggcccgaagtgcagctggttgaatctggcggaggactggttcaggctggcggatctctgagactgtcttgtgccgccagcggcagaacctttagcatgggctggtttagacaggcccctggcaaagagagagagttcgtcgccgccatcacatactctggcggcagcccttactacgccgactctgtgaagggcagattcaccatcagccgggacaacgccaagaacaccgtgtacctccagatgaacagcctgaagcctgaggacaccgccgtgtactactgcgccgccaatccaacatacggcagcgactggaacgccgagaattggggccagggaacccaagtgacagtgtctagcggatccggcggcggaggatctggcggaggcggatctgggggcggaggctctttcgaagacatccagatgacacagagccctagcagcctgtctgccagcgtgggagacagagtgaccatcacatgcaaggccagcgaccacatcaacaactggctggcctggtatcagcagaagcctggacaggcccctaagctgctgatctacggcgctaccacactggaaacaggcgtgcccagcagattttctggcagcggctctggcaccgactacaccctgacaatatccagcctccagcctgaggacttcgccacctactactgtcagcagagctggaacaccccttggacattcggccagggcaccaagctggaaatcaagagaggcggaggcggaagtggaggcggaggatctggcggcggaggctctcaagttcagcttcaacagcctggcgctgagctggtcaaacctggcgcttctgtgaagatgagctgcaaagccagcggctacgccttcagcagctactggatcaactggatgaagcagaaacccggccagggactcgaatggatcggccaaatctatcccggcgacggcgacaccaactacaacggcaagttcaagggcagagccacactgaccgccgatacctctagcagcacagcctacatgcagctgagcagcctgaccagcgaagatagcgccgtgtacttctgtgcccggtccatcacaacagtcgtgggctgcgctatggactattggggccagggaacaagcgtgaccgtgtctagtacgcgtaaaattgaagttatgtatcctcctccttacctagacaatgagaagagcaatggaaccattatccatgtgaaagggacgcggcagagcttcggcctgctggaccccaagctgtgctacctgctggatggcatcctgttcatctacggcgtgatcctgaccgccctgttcctgagagtgaagttcagcagaagcgccgacgcccctgcctaccagcagggacagaaccaactgtacaacgagctgaacctgggcagacgggaagagtacgacgtgctggacaagcggagaggcagggaccctgagatgggcggaaagccccagcggagaaagaacccccaggaaggactgtataacgaactccagaaagacaagatggccgaagcctacagcgagatcggcatgaagggcgagcggagaagaggcaagggccacgatggcctgtaccagggcctgagcaccgccaccaaggacacctatgacgccctgcacatgcaggccctgcctccaaga

SEQ ID NO: 7170 - DNA, 1584 bp, Artificial Sequence
  Synthetic Polynucleotide
atggactggatttggcgcatccttttccttgtcggcgctgctaccggcgcccattccgggcccgaagtgcagctggttgaatctggcggaggactggttcaggctggcggatctctgagactgtcttgtgccgccagcggcagaacctttagcatgggctggtttagacaggcccctggcaaagagagagagttcgtcgccgccatcacatactctggcggcagcccttactacgccgactctgtgaagggcagattcaccatcagccgggacaacgccaagaacaccgtgtacctccagatgaacagcctgaagcctgaggacaccgccgtgtactactgcgccgccaatccaacatacggcagcgactggaacgccgagaattggggccagggaacccaagtgacagtgtctagcggatccggcggcggaggatctggcggaggcggatctgggggcggaggctctttcgaagacatccagatgacacagagccctagcagcctgtctgccagcgtgggagacagagtgaccatcacatgcaaggccagcgaccacatcaacaactggctggcctggtatcagcagaagcctggacaggcccctaagctgctgatctacggcgctaccacactggaaacaggcgtgcccagcagattttctggcagcggctctggcaccgactacaccctgacaatatccagcctccagcctgaggacttcgccacctactactgtcagcagagctggaacaccccttggacattcggccagggcaccaagctggaaatcaagagaggcggaggcggaagtggaggcggaggatctggcggcggaggctctcaagttcagcttcaacagcctggcgctgagctggtcaaacctggcgcttctgtgaagatgagctgcaaagccagcggctacgccttcagcagctactggatcaactggatgaagcagaaacccggccagggactcgaatggatcggccaaatctatcccggcgacggcgacaccaactacaacggcaagttcaagggcagagccacactgaccgccgatacctctagcagcacagcctacatgcagctgagcagcctgaccagcgaagatagcgccgtgtacttctgtgcccggtccatcacaacagtcgtgggctgcgctatggactattggggccagggaacaagcgtgaccgtgtctagtacgcgtaaaattgaagttatgtatcctcctccttacctagacaatgagaagagcaatggaaccattatccatgtgaaagggacgcgggtggctgaaggcaaaacagataatcagtacacactcttcgttgccggcggaaccgtgctgctcctgctctttgtgattagcatcacaacgattatcgtcatcttcctcaaccgcaggcggagaagagagaggcgcgatctgttcaccgagtcttgggatacacagaaagctccgaacaactatcggagccctatctccaccggacagcccacaaatcagtctatggacgacacacgcgaggacatctatgtcaattaccccactttttctaggcggcctaagaccagagtg

SEQ ID NO: 7171 - DNA, 420 bp, Artificial Sequence; identical to SEQ ID NO: 1047
  Synthetic Polynucleotide

SEQ ID NO: 7172 - DNA, 417 bp, Artificial Sequence
  Synthetic Polynucleotide
cagaaccctgatcctgccgtgtaccagctgcgggatagcaagagcagcgacaagagcgtgtgtctgttcaccgacttcgacagccagaccaacgtgtcccagagcaaggactccgacgtgtacatcaccgataagtgcgtgctggacatgcggagcatggacttcaagagcaactccgccgtggcctggtccaacaagtccgatttcgcctgcgccaacgccttcaacaacagcattatccccgaggacacattcttcccaagccccgagagcagctgcgacgtgaagctggtggaaaagagcttcgagacagacaccaacctgaacttccagaacctgagcgtgatcggcttcagaatcctgctgctgaaagtggccggctttaacctgctgatgaccctgcggctgtggtccagc

SEQ ID NO: 7173 - DNA, 414 bp, Artificial Sequence
  Synthetic Polynucleotide
aaccctgatcctgccgtgtaccagctgcgggatagcaagagcagcgacaagagcgtgtgtctgttcaccgacttcgacagccagaccaacgtgtcccagagcaaggactccgacgtgtacatcaccgataagtgcgtgctggacatgcggagcatggacttcaagagcaactccgccgtggcctggtccaacaagtccgatttcgcctgcgccaacgccttcaacaacagcattatccccgaggacacattcttcccaagccccgagagcagctgcgacgtgaagctggtggaaaagagcttcgagacagacaccaacctgaacttccagaacctgagcgtgatcggcttcagaatcctgctgctgaaagtggccggctttaacctgctgatgaccctgcggctgtggtccagc

SEQ ID NO: 7174 - DNA, 411 bp, Artificial Sequence; identical to SEQ ID NO: 1048
  Synthetic Polynucleotide

SEQ ID NO: 7175 - DNA, 408 bp, Artificial Sequence; identical to SEQ ID NO: 1103
  Synthetic Polynucleotide

SEQ ID NO: 7176 - DNA, 405 bp, Artificial Sequence
  Synthetic Polynucleotide
cctgccgtgtaccagctgcgggatagcaagagcagcgacaagagcgtgtgtctgttcaccgacttcgacagccagaccaacgtgtcccagagcaaggactccgacgtgtacatcaccgataagtgcgtgctggacatgcggagcatggacttcaagagcaactccgccgtggcctggtccaacaagtccgatttcgcctgcgccaacgccttcaacaacagcattatccccgaggacacattcttcccaagccccgagagcagctgcgacgtgaagctggtggaaaagagcttcgagacagacaccaacctgaacttccagaacctgagcgtgatcggcttcagaatcctgctgctgaaagtggccggctttaacctgctgatgaccctgcggctgtggtccagc

SEQ ID NO: 7177 - DNA, 402 bp, Artificial Sequence; identical to SEQ ID NO: 1104
  Synthetic Polynucleotide

SEQ ID NO: 7178 - DNA, 399 bp, Artificial Sequence
  Synthetic Polynucleotide
gtgtaccagctgcgggatagcaagagcagcgacaagagcgtgtgtctgttcaccgacttcgacagccagaccaacgtgtcccagagcaaggactccgacgtgtacatcaccgataagtgcgtgctggacatgcggagcatggacttcaagagcaactccgccgtggcctggtccaacaagtccgatttcgcctgcgccaacgccttcaacaacagcattatccccgaggacacattcttcccaagccccgagagcagctgcgacgtgaagctggtggaaaagagcttcgagacagacaccaacctgaacttccagaacctgagcgtgatcggcttcagaatcctgctgctgaaagtggccggctttaacctgctgatgaccctgcggctgtggtccagc

SEQ ID NO: 7179 - DNA, 396 bp, Artificial Sequence
  Synthetic Polynucleotide
taccagctgcgggatagcaagagcagcgacaagagcgtgtgtctgttcaccgacttcgacagccagaccaacgtgtcccagagcaaggactccgacgtgtacatcaccgataagtgcgtgctggacatgcggagcatggacttcaagagcaactccgccgtggcctggtccaacaagtccgatttcgcctgcgccaacgccttcaacaacagcattatccccgaggacacattcttcccaagccccgagagcagctgcgacgtgaagctggtggaaaagagcttcgagacagacaccaacctgaacttccagaacctgagcgtgatcggcttcagaatcctgctgctgaaagtggccggctttaacctgctgatgaccctgcggctgtggtccagc

SEQ ID NO: 7180 - DNA, 393 bp, Artificial Sequence
  Synthetic Polynucleotide
cagctgcgggatagcaagagcagcgacaagagcgtgtgtctgttcaccgacttcgacagccagaccaacgtgtcccagagcaaggactccgacgtgtacatcaccgataagtgcgtgctggacatgcggagcatggacttcaagagcaactccgccgtggcctggtccaacaagtccgatttcgcctgcgccaacgccttcaacaacagcattatccccgaggacacattcttcccaagccccgagagcagctgcgacgtgaagctggtggaaaagagcttcgagacagacaccaacctgaacttccagaacctgagcgtgatcggcttcagaatcctgctgctgaaagtggccggctttaacctgctgatgaccctgcggctgtggtccagc

SEQ ID NO: 7181 - DNA, 390 bp, Artificial Sequence; identical to SEQ ID NO: 1105
  Synthetic Polynucleotide

SEQ ID NO: 7182 - DNA, 387 bp, Artificial Sequence
  Synthetic Polynucleotide
cgggatagcaagagcagcgacaagagcgtgtgtctgttcaccgacttcgacagccagaccaacgtgtcccagagcaaggactccgacgtgtacatcaccgataagtgcgtgctggacatgcggagcatggacttcaagagcaactccgccgtggcctggtccaacaagtccgatttcgcctgcgccaacgccttcaacaacagcattatccccgaggacacattcttcccaagccccgagagcagctgcgacgtgaagctggtggaaaagagcttcgagacagacaccaacctgaacttccagaacctgagcgtgatcggcttcagaatcctgctgctgaaagtggccggctttaacctgctgatgaccctgcggctgtggtccagc

SEQ ID NO: 7183 - DNA, 384 bp, Artificial Sequence
  Synthetic Polynucleotide
gatagcaagagcagcgacaagagcgtgtgtctgttcaccgacttcgacagccagaccaacgtgtcccagagcaaggactccgacgtgtacatcaccgataagtgcgtgctggacatgcggagcatggacttcaagagcaactccgccgtggcctggtccaacaagtccgatttcgcctgcgccaacgccttcaacaacagcattatccccgaggacacattcttcccaagccccgagagcagctgcgacgtgaagctggtggaaaagagcttcgagacagacaccaacctgaacttccagaacctgagcgtgatcggcttcagaatcctgctgctgaaagtggccggctttaacctgctgatgaccctgcggctgtggtccagc

SEQ ID NO: 7184 - DNA, 381 bp, Artificial Sequence; identical to SEQ ID NO: 1106
  Synthetic Polynucleotide

SEQ ID NO: 7185 - DNA, 378 bp, Artificial Sequence
  Synthetic Polynucleotide
aagagcagcgacaagagcgtgtgtctgttcaccgacttcgacagccagaccaacgtgtcccagagcaaggactccgacgtgtacatcaccgataagtgcgtgctggacatgcggagcatggacttcaagagcaactccgccgtggcctggtccaacaagtccgatttcgcctgcgccaacgccttcaacaacagcattatccccgaggacacattcttcccaagccccgagagcagctgcgacgtgaagctggtggaaaagagcttcgagacagacaccaacctgaacttccagaacctgagcgtgatcggcttcagaatcctgctgctgaaagtggccggctttaacctgctgatgaccctgcggctgtggtccagc

SEQ ID NO: 7186 - DNA, 375 bp, Artificial Sequence
  Synthetic Polynucleotide
agcagcgacaagagcgtgtgtctgttcaccgacttcgacagccagaccaacgtgtcccagagcaaggactccgacgtgtacatcaccgataagtgcgtgctggacatgcggagcatggacttcaagagcaactccgccgtggcctggtccaacaagtccgatttcgcctgcgccaacgccttcaacaacagcattatccccgaggacacattcttcccaagccccgagagcagctgcgacgtgaagctggtggaaaagagcttcgagacagacaccaacctgaacttccagaacctgagcgtgatcggcttcagaatcctgctgctgaaagtggccggctttaacctgctgatgaccctgcggctgtggtccagc

SEQ ID NO: 7187 - DNA, 372 bp, Artificial Sequence
  Synthetic Polynucleotide
agcgacaagagcgtgtgtctgttcaccgacttcgacagccagaccaacgtgtcccagagcaaggactccgacgtgtacatcaccgataagtgcgtgctggacatgcggagcatggacttcaagagcaactccgccgtggcctggtccaacaagtccgatttcgcctgcgccaacgccttcaacaacagcattatccccgaggacacattcttcccaagccccgagagcagctgcgacgtgaagctggtggaaaagagcttcgagacagacaccaacctgaacttccagaacctgagcgtgatcggcttcagaatcctgctgctgaaagtggccggctttaacctgctgatgaccctgcggctgtggtccagc

SEQ ID NO: 7188 - DNA, 369 bp, Artificial Sequence; identical to SEQ ID NO: 1107
  Synthetic Polynucleotide

SEQ ID NO: 7189 - DNA, 366 bp, Artificial Sequence
  Synthetic Polynucleotide
aagagcgtgtgtctgttcaccgacttcgacagccagaccaacgtgtcccagagcaaggactccgacgtgtacatcaccgataagtgcgtgctggacatgcggagcatggacttcaagagcaactccgccgtggcctggtccaacaagtccgatttcgcctgcgccaacgccttcaacaacagcattatccccgaggacacattcttcccaagccccgagagcagctgcgacgtgaagctggtggaaaagagcttcgagacagacaccaacctgaacttccagaacctgagcgtgatcggcttcagaatcctgctgctgaaagtggccggctttaacctgctgatgaccctgcggctgtggtccagc

SEQ ID NO: 7190 - DNA, 363 bp, Artificial Sequence
  Synthetic Polynucleotide
agcgtgtgtctgttcaccgacttcgacagccagaccaacgtgtcccagagcaaggactccgacgtgtacatcaccgataagtgcgtgctggacatgcggagcatggacttcaagagcaactccgccgtggcctggtccaacaagtccgatttcgcctgcgccaacgccttcaacaacagcattatccccgaggacacattcttcccaagccccgagagcagctgcgacgtgaagctggtggaaaagagcttcgagacagacaccaacctgaacttccagaacctgagcgtgatcggcttcagaatcctgctgctgaaagtggccggctttaacctgctgatgaccctgcggctgtggtccagc

SEQ ID NO: 7191 - DNA, 360 bp, Artificial Sequence
  Synthetic Polynucleotide
gtgtgtctgttcaccgacttcgacagccagaccaacgtgtcccagagcaaggactccgacgtgtacatcaccgataagtgcgtgctggacatgcggagcatggacttcaagagcaactccgccgtggcctggtccaacaagtccgatttcgcctgcgccaacgccttcaacaacagcattatccccgaggacacattcttcccaagccccgagagcagctgcgacgtgaagctggtggaaaagagcttcgagacagacaccaacctgaacttccagaacctgagcgtgatcggcttcagaatcctgctgctgaaagtggccggctttaacctgctgatgaccctgcggctgtggtccagc

SEQ ID NO: 7192 - DNA, 357 bp, Artificial Sequence
  Synthetic Polynucleotide
tgtctgttcaccgacttcgacagccagaccaacgtgtcccagagcaaggactccgacgtgtacatcaccgataagtgcgtgctggacatgcggagcatggacttcaagagcaactccgccgtggcctggtccaacaagtccgatttcgcctgcgccaacgccttcaacaacagcattatccccgaggacacattcttcccaagccccgagagcagctgcgacgtgaagctggtggaaaagagcttcgagacagacaccaacctgaacttccagaacctgagcgtgatcggcttcagaatcctgctgctgaaagtggccggctttaacctgctgatgaccctgcggctgtggtccagc

SEQ ID NO: 7193 - DNA, 354 bp, Artificial Sequence
  Synthetic Polynucleotide
ctgttcaccgacttcgacagccagaccaacgtgtcccagagcaaggactccgacgtgtacatcaccgataagtgcgtgctggacatgcggagcatggacttcaagagcaactccgccgtggcctggtccaacaagtccgatttcgcctgcgccaacgccttcaacaacagcattatccccgaggacacattcttcccaagccccgagagcagctgcgacgtgaagctggtggaaaagagcttcgagacagacaccaacctgaacttccagaacctgagcgtgatcggcttcagaatcctgctgctgaaagtggccggctttaacctgctgatgaccctgcggctgtggtccagc

SEQ ID NO: 7194 - DNA, 351 bp, Artificial Sequence
  Synthetic Polynucleotide
ttcaccgacttcgacagccagaccaacgtgtcccagagcaaggactccgacgtgtacatcaccgataagtgcgtgctggacatgcggagcatggacttcaagagcaactccgccgtggcctggtccaacaagtccgatttcgcctgcgccaacgccttcaacaacagcattatccccgaggacacattcttcccaagccccgagagcagctgcgacgtgaagctggtggaaaagagcttcgagacagacaccaacctgaacttccagaacctgagcgtgatcggcttcagaatcctgctgctgaaagtggccggctttaacctgctgatgaccctgcggctgtggtccagc

SEQ ID NO: 7195 - DNA, 348 bp, Artificial Sequence
  Synthetic Polynucleotide
accgacttcgacagccagaccaacgtgtcccagagcaaggactccgacgtgtacatcaccgataagtgcgtgctggacatgcggagcatggacttcaagagcaactccgccgtggcctggtccaacaagtccgatttcgcctgcgccaacgccttcaacaacagcattatccccgaggacacattcttcccaagccccgagagcagctgcgacgtgaagctggtggaaaagagcttcgagacagacaccaacctgaacttccagaacctgagcgtgatcggcttcagaatcctgctgctgaaagtggccggctttaacctgctgatgaccctgcggctgtggtccagc

SEQ ID NO: 7196 - DNA, 345 bp, Artificial Sequence
  Synthetic Polynucleotide
gacttcgacagccagaccaacgtgtcccagagcaaggactccgacgtgtacatcaccgataagtgcgtgctggacatgcggagcatggacttcaagagcaactccgccgtggcctggtccaacaagtccgatttcgcctgcgccaacgccttcaacaacagcattatccccgaggacacattcttcccaagccccgagagcagctgcgacgtgaagctggtggaaaagagcttcgagacagacaccaacctgaacttccagaacctgagcgtgatcggcttcagaatcctgctgctgaaagtggccggctttaacctgctgatgaccctgcggctgtggtccagc

SEQ ID NO: 7197 - DNA, 342 bp, Artificial Sequence; identical to SEQ ID NO: 1108
  Synthetic Polynucleotide

SEQ ID NO: 7198 - DNA, 339 bp, Artificial Sequence
  Synthetic Polynucleotide
gacagccagaccaacgtgtcccagagcaaggactccgacgtgtacatcaccgataagtgcgtgctggacatgcggagcatggacttcaagagcaactccgccgtggcctggtccaacaagtccgatttcgcctgcgccaacgccttcaacaacagcattatccccgaggacacattcttcccaagccccgagagcagctgcgacgtgaagctggtggaaaagagcttcgagacagacaccaacctgaacttccagaacctgagcgtgatcggcttcagaatcctgctgctgaaagtggccggctttaacctgctgatgaccctgcggctgtggtccagc

SEQ ID NO: 7199 - DNA, 336 bp, Artificial Sequence
  Synthetic Polynucleotide
agccagaccaacgtgtcccagagcaaggactccgacgtgtacatcaccgataagtgcgtgctggacatgcggagcatggacttcaagagcaactccgccgtggcctggtccaacaagtccgatttcgcctgcgccaacgccttcaacaacagcattatccccgaggacacattcttcccaagccccgagagcagctgcgacgtgaagctggtggaaaagagcttcgagacagacaccaacctgaacttccagaacctgagcgtgatcggcttcagaatcctgctgctgaaagtggccggctttaacctgctgatgaccctgcggctgtggtccagc

SEQ ID NO: 7200 - DNA, 333 bp, Artificial Sequence
  Synthetic Polynucleotide
cagaccaacgtgtcccagagcaaggactccgacgtgtacatcaccgataagtgcgtgctggacatgcggagcatggacttcaagagcaactccgccgtggcctggtccaacaagtccgatttcgcctgcgccaacgccttcaacaacagcattatccccgaggacacattcttcccaagccccgagagcagctgcgacgtgaagctggtggaaaagagcttcgagacagacaccaacctgaacttccagaacctgagcgtgatcggcttcagaatcctgctgctgaaagtggccggctttaacctgctgatgaccctgcggctgtggtccagc

SEQ ID NO: 7201 - DNA, 330 bp, Artificial Sequence
  Synthetic Polynucleotide
accaacgtgtcccagagcaaggactccgacgtgtacatcaccgataagtgcgtgctggacatgcggagcatggacttcaagagcaactccgccgtggcctggtccaacaagtccgatttcgcctgcgccaacgccttcaacaacagcattatccccgaggacacattcttcccaagccccgagagcagctgcgacgtgaagctggtggaaaagagcttcgagacagacaccaacctgaacttccagaacctgagcgtgatcggcttcagaatcctgctgctgaaagtggccggctttaacctgctgatgaccctgcggctgtggtccagc

SEQ ID NO: 7202 - DNA, 327 bp, Artificial Sequence
  Synthetic Polynucleotide
aacgtgtcccagagcaaggactccgacgtgtacatcaccgataagtgcgtgctggacatgcggagcatggacttcaagagcaactccgccgtggcctggtccaacaagtccgatttcgcctgcgccaacgccttcaacaacagcattatccccgaggacacattcttcccaagccccgagagcagctgcgacgtgaagctggtggaaaagagcttcgagacagacaccaacctgaacttccagaacctgagcgtgatcggcttcagaatcctgctgctgaaagtggccggctttaacctgctgatgaccctgcggctgtggtccagc

SEQ ID NO: 7203 - DNA, 324 bp, Artificial Sequence; identical to SEQ ID NO: 1109
  Synthetic Polynucleotide

SEQ ID NO: 7204 - DNA, 321 bp, Artificial Sequence
  Synthetic Polynucleotide
tcccagagcaaggactccgacgtgtacatcaccgataagtgcgtgctggacatgcggagcatggacttcaagagcaactccgccgtggcctggtccaacaagtccgatttcgcctgcgccaacgccttcaacaacagcattatccccgaggacacattcttcccaagccccgagagcagctgcgacgtgaagctggtggaaaagagcttcgagacagacaccaacctgaacttccagaacctgagcgtgatcggcttcagaatcctgctgctgaaagtggccggctttaacctgctgatgaccctgcggctgtggtccagc

SEQ ID NO: 7205 - DNA, 318 bp, Artificial Sequence
  Synthetic Polynucleotide
cagagcaaggactccgacgtgtacatcaccgataagtgcgtgctggacatgcggagcatggacttcaagagcaactccgccgtggcctggtccaacaagtccgatttcgcctgcgccaacgccttcaacaacagcattatccccgaggacacattcttcccaagccccgagagcagctgcgacgtgaagctggtggaaaagagcttcgagacagacaccaacctgaacttccagaacctgagcgtgatcggcttcagaatcctgctgctgaaagtggccggctttaacctgctgatgaccctgcggctgtggtccagc

SEQ ID NO: 7206 - DNA, 315 bp, Artificial Sequence
  Synthetic Polynucleotide
agcaaggactccgacgtgtacatcaccgataagtgcgtgctggacatgcggagcatggacttcaagagcaactccgccgtggcctggtccaacaagtccgatttcgcctgcgccaacgccttcaacaacagcattatccccgaggacacattcttcccaagccccgagagcagctgcgacgtgaagctggtggaaaagagcttcgagacagacaccaacctgaacttccagaacctgagcgtgatcggcttcagaatcctgctgctgaaagtggccggctttaacctgctgatgaccctgcggctgtggtccagc

SEQ ID NO: 7207 - DNA, 312 bp, Artificial Sequence
  Synthetic Polynucleotide
aaggactccgacgtgtacatcaccgataagtgcgtgctggacatgcggagcatggacttcaagagcaactccgccgtggcctggtccaacaagtccgatttcgcctgcgccaacgccttcaacaacagcattatccccgaggacacattcttcccaagccccgagagcagctgcgacgtgaagctggtggaaaagagcttcgagacagacaccaacctgaacttccagaacctgagcgtgatcggcttcagaatcctgctgctgaaagtggccggctttaacctgctgatgaccctgcggctgtggtccagc

SEQ ID NO: 7208 - DNA, 309 bp, Artificial Sequence
  Synthetic Polynucleotide
gactccgacgtgtacatcaccgataagtgcgtgctggacatgcggagcatggacttcaagagcaactccgccgtggcctggtccaacaagtccgatttcgcctgcgccaacgccttcaacaacagcattatccccgaggacacattcttcccaagccccgagagcagctgcgacgtgaagctggtggaaaagagcttcgagacagacaccaacctgaacttccagaacctgagcgtgatcggcttcagaatcctgctgctgaaagtggccggctttaacctgctgatgaccctgcggctgtggtccagc

SEQ ID NO: 7209 - DNA, 306 bp, Artificial Sequence
  Synthetic Polynucleotide
tccgacgtgtacatcaccgataagtgcgtgctggacatgcggagcatggacttcaagagcaactccgccgtggcctggtccaacaagtccgatttcgcctgcgccaacgccttcaacaacagcattatccccgaggacacattcttcccaagccccgagagcagctgcgacgtgaagctggtggaaaagagcttcgagacagacaccaacctgaacttccagaacctgagcgtgatcggcttcagaatcctgctgctgaaagtggccggctttaacctgctgatgaccctgcggctgtggtccagc

SEQ ID NO: 7210 - DNA, 303 bp, Artificial Sequence
  Synthetic Polynucleotide
gacgtgtacatcaccgataagtgcgtgctggacatgcggagcatggacttcaagagcaactccgccgtggcctggtccaacaagtccgatttcgcctgcgccaacgccttcaacaacagcattatccccgaggacacattcttcccaagccccgagagcagctgcgacgtgaagctggtggaaaagagcttcgagacagacaccaacctgaacttccagaacctgagcgtgatcggcttcagaatcctgctgctgaaagtggccggctttaacctgctgatgaccctgcggctgtggtccagc

SEQ ID NO: 7211 - DNA, 300 bp, Artificial Sequence
  Synthetic Polynucleotide
gtgtacatcaccgataagtgcgtgctggacatgcggagcatggacttcaagagcaactccgccgtggcctggtccaacaagtccgatttcgcctgcgccaacgccttcaacaacagcattatccccgaggacacattcttcccaagccccgagagcagctgcgacgtgaagctggtggaaaagagcttcgagacagacaccaacctgaacttccagaacctgagcgtgatcggcttcagaatcctgctgctgaaagtggccggctttaacctgctgatgaccctgcggctgtggtccagc

SEQ ID NO: 7212 - DNA, 297 bp, Artificial Sequence
  Synthetic Polynucleotide
tacatcaccgataagtgcgtgctggacatgcggagcatggacttcaagagcaactccgccgtggcctggtccaacaagtccgatttcgcctgcgccaacgccttcaacaacagcattatccccgaggacacattcttcccaagccccgagagcagctgcgacgtgaagctggtggaaaagagcttcgagacagacaccaacctgaacttccagaacctgagcgtgatcggcttcagaatcctgctgctgaaagtggccggctttaacctgctgatgaccctgcggctgtggtccagc

SEQ ID NO: 7213 - DNA, 294 bp, Artificial Sequence
  Synthetic Polynucleotide
atcaccgataagtgcgtgctggacatgcggagcatggacttcaagagcaactccgccgtggcctggtccaacaagtccgatttcgcctgcgccaacgccttcaacaacagcattatccccgaggacacattcttcccaagccccgagagcagctgcgacgtgaagctggtggaaaagagcttcgagacagacaccaacctgaacttccagaacctgagcgtgatcggcttcagaatcctgctgctgaaagtggccggctttaacctgctgatgaccctgcggctgtggtccagc

SEQ ID NO: 7214 - DNA, 291 bp, Artificial Sequence
  Synthetic Polynucleotide
accgataagtgcgtgctggacatgcggagcatggacttcaagagcaactccgccgtggcctggtccaacaagtccgatttcgcctgcgccaacgccttcaacaacagcattatccccgaggacacattcttcccaagccccgagagcagctgcgacgtgaagctggtggaaaagagcttcgagacagacaccaacctgaacttccagaacctgagcgtgatcggcttcagaatcctgctgctgaaagtggccggctttaacctgctgatgaccctgcggctgtggtccagc

SEQ ID NO: 7215 - DNA, 288 bp, Artificial Sequence
  Synthetic Polynucleotide
gataagtgcgtgctggacatgcggagcatggacttcaagagcaactccgccgtggcctggtccaacaagtccgatttcgcctgcgccaacgccttcaacaacagcattatccccgaggacacattcttcccaagccccgagagcagctgcgacgtgaagctggtggaaaagagcttcgagacagacaccaacctgaacttccagaacctgagcgtgatcggcttcagaatcctgctgctgaaagtggccggctttaacctgctgatgaccctgcggctgtggtccagc

SEQ ID NO: 7216 - DNA, 282 bp, Artificial Sequence; identical to SEQ ID NO: 1110
  Synthetic Polynucleotide

SEQ ID NO: 7217 - DNA, 279 bp, Artificial Sequence
  Synthetic Polynucleotide
gtgctggacatgcggagcatggacttcaagagcaactccgccgtggcctggtccaacaagtccgatttcgcctgcgccaacgccttcaacaacagcattatccccgaggacacattcttcccaagccccgagagcagctgcgacgtgaagctggtggaaaagagcttcgagacagacaccaacctgaacttccagaacctgagcgtgatcggcttcagaatcctgctgctgaaagtggccggctttaacctgctgatgaccctgcggctgtggtccagc

SEQ ID NO: 7218 - DNA, 276 bp, Artificial Sequence
  Synthetic Polynucleotide
ctggacatgcggagcatggacttcaagagcaactccgccgtggcctggtccaacaagtccgatttcgcctgcgccaacgccttcaacaacagcattatccccgaggacacattcttcccaagccccgagagcagctgcgacgtgaagctggtggaaaagagcttcgagacagacaccaacctgaacttccagaacctgagcgtgatcggcttcagaatcctgctgctgaaagtggccggctttaacctgctgatgaccctgcggctgtggtccagc

SEQ ID NO: 7219 - DNA, 273 bp, Artificial Sequence
  Synthetic Polynucleotide
gacatgcggagcatggacttcaagagcaactccgccgtggcctggtccaacaagtccgatttcgcctgcgccaacgccttcaacaacagcattatccccgaggacacattcttcccaagccccgagagcagctgcgacgtgaagctggtggaaaagagcttcgagacagacaccaacctgaacttccagaacctgagcgtgatcggcttcagaatcctgctgctgaaagtggccggctttaacctgctgatgaccctgcggctgtggtccagc

SEQ ID NO: 7220 - DNA, 270 bp, Artificial Sequence
  Synthetic Polynucleotide
atgcggagcatggacttcaagagcaactccgccgtggcctggtccaacaagtccgatttcgcctgcgccaacgccttcaacaacagcattatccccgaggacacattcttcccaagccccgagagcagctgcgacgtgaagctggtggaaaagagcttcgagacagacaccaacctgaacttccagaacctgagcgtgatcggcttcagaatcctgctgctgaaagtggccggctttaacctgctgatgaccctgcggctgtggtccagc

SEQ ID NO: 7221 - DNA, 267 bp, Artificial Sequence
  Synthetic Polynucleotide
cggagcatggacttcaagagcaactccgccgtggcctggtccaacaagtccgatttcgcctgcgccaacgccttcaacaacagcattatccccgaggacacattcttcccaagccccgagagcagctgcgacgtgaagctggtggaaaagagcttcgagacagacaccaacctgaacttccagaacctgagcgtgatcggcttcagaatcctgctgctgaaagtggccggctttaacctgctgatgaccctgcggctgtggtccagc

SEQ ID NO: 7222 - DNA, 264 bp, Artificial Sequence; identical to SEQ ID NO: 1111
  Synthetic Polynucleotide

SEQ ID NO: 7223 - DNA, 261 bp, Artificial Sequence
  Synthetic Polynucleotide
atggacttcaagagcaactccgccgtggcctggtccaacaagtccgatttcgcctgcgccaacgccttcaacaacagcattatccccgaggacacattcttcccaagccccgagagcagctgcgacgtgaagctggtggaaaagagcttcgagacagacaccaacctgaacttccagaacctgagcgtgatcggcttcagaatcctgctgctgaaagtggccggctttaacctgctgatgaccctgcggctgtggtccagc

SEQ ID NO: 7224 - DNA, 258 bp, Artificial Sequence
  Synthetic Polynucleotide
gacttcaagagcaactccgccgtggcctggtccaacaagtccgatttcgcctgcgccaacgccttcaacaacagcattatccccgaggacacattcttcccaagccccgagagcagctgcgacgtgaagctggtggaaaagagcttcgagacagacaccaacctgaacttccagaacctgagcgtgatcggcttcagaatcctgctgctgaaagtggccggctttaacctgctgatgaccctgcggctgtggtccagc

SEQ ID NO: 7225 - DNA, 255 bp, Artificial Sequence
  Synthetic Polynucleotide
ttcaagagcaactccgccgtggcctggtccaacaagtccgatttcgcctgcgccaacgccttcaacaacagcattatccccgaggacacattcttcccaagccccgagagcagctgcgacgtgaagctggtggaaaagagcttcgagacagacaccaacctgaacttccagaacctgagcgtgatcggcttcagaatcctgctgctgaaagtggccggctttaacctgctgatgaccctgcggctgtggtccagc

SEQ ID NO: 7226 - DNA, 252 bp, Artificial Sequence
  Synthetic Polynucleotide
aagagcaactccgccgtggcctggtccaacaagtccgatttcgcctgcgccaacgccttcaacaacagcattatccccgaggacacattcttcccaagccccgagagcagctgcgacgtgaagctggtggaaaagagcttcgagacagacaccaacctgaacttccagaacctgagcgtgatcggcttcagaatcctgctgctgaaagtggccggctttaacctgctgatgaccctgcggctgtggtccagc

SEQ ID NO: 7227 - DNA, 249 bp, Artificial Sequence
  Synthetic Polynucleotide
agcaactccgccgtggcctggtccaacaagtccgatttcgcctgcgccaacgccttcaacaacagcattatccccgaggacacattcttcccaagccccgagagcagctgcgacgtgaagctggtggaaaagagcttcgagacagacaccaacctgaacttccagaacctgagcgtgatcggcttcagaatcctgctgctgaaagtggccggctttaacctgctgatgaccctgcggctgtggtccagc

SEQ ID NO: 7228 - DNA, 246 bp, Artificial Sequence
  Synthetic Polynucleotide
aactccgccgtggcctggtccaacaagtccgatttcgcctgcgccaacgccttcaacaacagcattatccccgaggacacattcttcccaagccccgagagcagctgcgacgtgaagctggtggaaaagagcttcgagacagacaccaacctgaacttccagaacctgagcgtgatcggcttcagaatcctgctgctgaaagtggccggctttaacctgctgatgaccctgcggctgtggtccagc

SEQ ID NO: 7229 - DNA, 243 bp, Artificial Sequence
  Synthetic Polynucleotide
tccgccgtggcctggtccaacaagtccgatttcgcctgcgccaacgccttcaacaacagcattatccccgaggacacattcttcccaagccccgagagcagctgcgacgtgaagctggtggaaaagagcttcgagacagacaccaacctgaacttccagaacctgagcgtgatcggcttcagaatcctgctgctgaaagtggccggctttaacctgctgatgaccctgcggctgtggtccagc

SEQ ID NO: 7230 - DNA, 240 bp, Artificial Sequence
  Synthetic Polynucleotide
gccgtggcctggtccaacaagtccgatttcgcctgcgccaacgccttcaacaacagcattatccccgaggacacattcttcccaagccccgagagcagctgcgacgtgaagctggtggaaaagagcttcgagacagacaccaacctgaacttccagaacctgagcgtgatcggcttcagaatcctgctgctgaaagtggccggctttaacctgctgatgaccctgcggctgtggtccagc

SEQ ID NO: 7231 - DNA, 237 bp, Artificial Sequence
  Synthetic Polynucleotide
gtggcctggtccaacaagtccgatttcgcctgcgccaacgccttcaacaacagcattatccccgaggacacattcttcccaagccccgagagcagctgcgacgtgaagctggtggaaaagagcttcgagacagacaccaacctgaacttccagaacctgagcgtgatcggcttcagaatcctgctgctgaaagtggccggctttaacctgctgatgaccctgcggctgtggtccagc

SEQ ID NO: 7232 - DNA, 234 bp, Artificial Sequence
  Synthetic Polynucleotide
gcctggtccaacaagtccgatttcgcctgcgccaacgccttcaacaacagcattatccccgaggacacattcttcccaagccccgagagcagctgcgacgtgaagctggtggaaaagagcttcgagacagacaccaacctgaacttccagaacctgagcgtgatcggcttcagaatcctgctgctgaaagtggccggctttaacctgctgatgaccctgcggctgtggtccagc

SEQ ID NO: 7233 - DNA, 231 bp, Artificial Sequence
  Synthetic Polynucleotide
tggtccaacaagtccgatttcgcctgcgccaacgccttcaacaacagcattatccccgaggacacattcttcccaagccccgagagcagctgcgacgtgaagctggtggaaaagagcttcgagacagacaccaacctgaacttccagaacctgagcgtgatcggcttcagaatcctgctgctgaaagtggccggctttaacctgctgatgaccctgcggctgtggtccagc

SEQ ID NO: 7234 - DNA, 228 bp, Artificial Sequence
  Synthetic Polynucleotide
tccaacaagtccgatttcgcctgcgccaacgccttcaacaacagcattatccccgaggacacattcttcccaagccccgagagcagctgcgacgtgaagctggtggaaaagagcttcgagacagacaccaacctgaacttccagaacctgagcgtgatcggcttcagaatcctgctgctgaaagtggccggctttaacctgctgatgaccctgcggctgtggtccagc

SEQ ID NO: 7235 - DNA, 225 bp, Artificial Sequence
  Synthetic Polynucleotide
aacaagtccgatttcgcctgcgccaacgccttcaacaacagcattatccccgaggacacattcttcccaagccccgagagcagctgcgacgtgaagctggtggaaaagagcttcgagacagacaccaacctgaacttccagaacctgagcgtgatcggcttcagaatcctgctgctgaaagtggccggctttaacctgctgatgaccctgcggctgtggtccagc

SEQ ID NO: 7236 - DNA, 222 bp, Artificial Sequence
  Synthetic Polynucleotide
aagtccgatttcgcctgcgccaacgccttcaacaacagcattatccccgaggacacattcttcccaagccccgagagcagctgcgacgtgaagctggtggaaaagagcttcgagacagacaccaacctgaacttccagaacctgagcgtgatcggcttcagaatcctgctgctgaaagtggccggctttaacctgctgatgaccctgcggctgtggtccagc

SEQ ID NO: 7237 - DNA, 219 bp, Artificial Sequence
  Synthetic Polynucleotide
tccgatttcgcctgcgccaacgccttcaacaacagcattatccccgaggacacattcttcccaagccccgagagcagctgcgacgtgaagctggtggaaaagagcttcgagacagacaccaacctgaacttccagaacctgagcgtgatcggcttcagaatcctgctgctgaaagtggccggctttaacctgctgatgaccctgcggctgtggtccagc

SEQ ID NO: 7238 - DNA, 216 bp, Artificial Sequence
  Synthetic Polynucleotide
gatttcgcctgcgccaacgccttcaacaacagcattatccccgaggacacattcttcccaagccccgagagcagctgcgacgtgaagctggtggaaaagagcttcgagacagacaccaacctgaacttccagaacctgagcgtgatcggcttcagaatcctgctgctgaaagtggccggctttaacctgctgatgaccctgcggctgtggtccagc

SEQ ID NO: 7239 - DNA, 213 bp, Artificial Sequence
  Synthetic Polynucleotide
ttcgcctgcgccaacgccttcaacaacagcattatccccgaggacacattcttcccaagccccgagagcagctgcgacgtgaagctggtggaaaagagcttcgagacagacaccaacctgaacttccagaacctgagcgtgatcggcttcagaatcctgctgctgaaagtggccggctttaacctgctgatgaccctgcggctgtggtccagc

SEQ ID NO: 7240 - DNA, 210 bp, Artificial Sequence
  Synthetic Polynucleotide
gcctgcgccaacgccttcaacaacagcattatccccgaggacacattcttcccaagccccgagagcagctgcgacgtgaagctggtggaaaagagcttcgagacagacaccaacctgaacttccagaacctgagcgtgatcggcttcagaatcctgctgctgaaagtggccggctttaacctgctgatgaccctgcggctgtggtccagc

SEQ ID NO: 7241 - DNA, 207 bp, Artificial Sequence
  Synthetic Polynucleotide
tgcgccaacgccttcaacaacagcattatccccgaggacacattcttcccaagccccgagagcagctgcgacgtgaagctggtggaaaagagcttcgagacagacaccaacctgaacttccagaacctgagcgtgatcggcttcagaatcctgctgctgaaagtggccggctttaacctgctgatgaccctgcggctgtggtccagc

SEQ ID NO: 7242 - DNA, 204 bp, Artificial Sequence
  Synthetic Polynucleotide
gccaacgccttcaacaacagcattatccccgaggacacattcttcccaagccccgagagcagctgcgacgtgaagctggtggaaaagagcttcgagacagacaccaacctgaacttccagaacctgagcgtgatcggcttcagaatcctgctgctgaaagtggccggctttaacctgctgatgaccctgcggctgtggtccagc

SEQ ID NO: 7243 - DNA, 201 bp, Artificial Sequence
  Synthetic Polynucleotide
aacgccttcaacaacagcattatccccgaggacacattcttcccaagccccgagagcagctgcgacgtgaagctggtggaaaagagcttcgagacagacaccaacctgaacttccagaacctgagcgtgatcggcttcagaatcctgctgctgaaagtggccggctttaacctgctgatgaccctgcggctgtggtccagc

SEQ ID NO: 7244 - DNA, 198 bp, Artificial Sequence
  Synthetic Polynucleotide
gccttcaacaacagcattatccccgaggacacattcttcccaagccccgagagcagctgcgacgtgaagctggtggaaaagagcttcgagacagacaccaacctgaacttccagaacctgagcgtgatcggcttcagaatcctgctgctgaaagtggccggctttaacctgctgatgaccctgcggctgtggtccagc

SEQ ID NO: 7245 - DNA, 195 bp, Artificial Sequence
  Synthetic Polynucleotide
ttcaacaacagcattatccccgaggacacattcttcccaagccccgagagcagctgcgacgtgaagctggtggaaaagagcttcgagacagacaccaacctgaacttccagaacctgagcgtgatcggcttcagaatcctgctgctgaaagtggccggctttaacctgctgatgaccctgcggctgtggtccagc

SEQ ID NO: 7246 - DNA, 192 bp, Artificial Sequence
  Synthetic Polynucleotide
aacaacagcattatccccgaggacacattcttcccaagccccgagagcagctgcgacgtgaagctggtggaaaagagcttcgagacagacaccaacctgaacttccagaacctgagcgtgatcggcttcagaatcctgctgctgaaagtggccggctttaacctgctgatgaccctgcggctgtggtccagc

SEQ ID NO: 7247 - DNA, 189 bp, Artificial Sequence
  Synthetic Polynucleotide
aacagcattatccccgaggacacattcttcccaagccccgagagcagctgcgacgtgaagctggtggaaaagagcttcgagacagacaccaacctgaacttccagaacctgagcgtgatcggcttcagaatcctgctgctgaaagtggccggctttaacctgctgatgaccctgcggctgtggtccagc

SEQ ID NO: 7248 - DNA, 186 bp, Artificial Sequence
  Synthetic Polynucleotide
agcattatccccgaggacacattcttcccaagccccgagagcagctgcgacgtgaagctggtggaaaagagcttcgagacagacaccaacctgaacttccagaacctgagcgtgatcggcttcagaatcctgctgctgaaagtggccggctttaacctgctgatgaccctgcggctgtggtccagc

SEQ ID NO: 7249 - DNA, 183 bp, Artificial Sequence
  Synthetic Polynucleotide
attatccccgaggacacattcttcccaagccccgagagcagctgcgacgtgaagctggtggaaaagagcttcgagacagacaccaacctgaacttccagaacctgagcgtgatcggcttcagaatcctgctgctgaaagtggccggctttaacctgctgatgaccctgcggctgtggtccagc

SEQ ID NO: 7250 - DNA, 180 bp, Artificial Sequence; identical to SEQ ID NO: 1112
  Synthetic Polynucleotide

SEQ ID NO: 7251 - DNA, 177 bp, Artificial Sequence
  Synthetic Polynucleotide
cccgaggacacattcttcccaagccccgagagcagctgcgacgtgaagctggtggaaaagagcttcgagacagacaccaacctgaacttccagaacctgagcgtgatcggcttcagaatcctgctgctgaaagtggccggctttaacctgctgatgaccctgcggctgtggtccagc

SEQ ID NO: 7252 - DNA, 174 bp, Artificial Sequence
  Synthetic Polynucleotide
gaggacacattcttcccaagccccgagagcagctgcgacgtgaagctggtggaaaagagcttcgagacagacaccaacctgaacttccagaacctgagcgtgatcggcttcagaatcctgctgctgaaagtggccggctttaacctgctgatgaccctgcggctgtggtccagc

SEQ ID NO: 7253 - DNA, 171 bp, Artificial Sequence
  Synthetic Polynucleotide
gacacattcttcccaagccccgagagcagctgcgacgtgaagctggtggaaaagagcttcgagacagacaccaacctgaacttccagaacctgagcgtgatcggcttcagaatcctgctgctgaaagtggccggctttaacctgctgatgaccctgcggctgtggtccagc

SEQ ID NO: 7254 - DNA, 168 bp, Artificial Sequence
  Synthetic Polynucleotide
acattcttcccaagccccgagagcagctgcgacgtgaagctggtggaaaagagcttcgagacagacaccaacctgaacttccagaacctgagcgtgatcggcttcagaatcctgctgctgaaagtggccggctttaacctgctgatgaccctgcggctgtggtccagc

SEQ ID NO: 7255 - DNA, 165 bp, Artificial Sequence
  Synthetic Polynucleotide
ttcttcccaagccccgagagcagctgcgacgtgaagctggtggaaaagagcttcgagacagacaccaacctgaacttccagaacctgagcgtgatcggcttcagaatcctgctgctgaaagtggccggctttaacctgctgatgaccctgcggctgtggtccagc

SEQ ID NO: 7256 - DNA, 162 bp, Artificial Sequence
  Synthetic Polynucleotide
ttcccaagccccgagagcagctgcgacgtgaagctggtggaaaagagcttcgagacagacaccaacctgaacttccagaacctgagcgtgatcggcttcagaatcctgctgctgaaagtggccggctttaacctgctgatgaccctgcggctgtggtccagc

SEQ ID NO: 7257 - DNA, 159 bp, Artificial Sequence
  Synthetic Polynucleotide
ccaagccccgagagcagctgcgacgtgaagctggtggaaaagagcttcgagacagacaccaacctgaacttccagaacctgagcgtgatcggcttcagaatcctgctgctgaaagtggccggctttaacctgctgatgaccctgcggctgtggtccagc

SEQ ID NO: 7258 - DNA, 156 bp, Artificial Sequence
  Synthetic Polynucleotide
agccccgagagcagctgcgacgtgaagctggtggaaaagagcttcgagacagacaccaacctgaacttccagaacctgagcgtgatcggcttcagaatcctgctgctgaaagtggccggctttaacctgctgatgaccctgcggctgtggtccagc

SEQ ID NO: 7259 - DNA, 153 bp, Artificial Sequence
  Synthetic Polynucleotide
cccgagagcagctgcgacgtgaagctggtggaaaagagcttcgagacagacaccaacctgaacttccagaacctgagcgtgatcggcttcagaatcctgctgctgaaagtggccggctttaacctgctgatgaccctgcggctgtggtccagc

SEQ ID NO: 7260 - DNA, 150 bp, Artificial Sequence; identical to SEQ ID NO: 1113
  Synthetic Polynucleotide

SEQ ID NO: 7261 - DNA, 147 bp, Artificial Sequence
  Synthetic Polynucleotide
agcagctgcgacgtgaagctggtggaaaagagcttcgagacagacaccaacctgaacttccagaacctgagcgtgatcggcttcagaatcctgctgctgaaagtggccggctttaacctgctgatgaccctgcggctgtggtccagc

SEQ ID NO: 7262 - DNA, 144 bp, Artificial Sequence
  Synthetic Polynucleotide
agctgcgacgtgaagctggtggaaaagagcttcgagacagacaccaacctgaacttccagaacctgagcgtgatcggcttcagaatcctgctgctgaaagtggccggctttaacctgctgatgaccctgcggctgtggtccagc

SEQ ID NO: 7263 - DNA, 141 bp, Artificial Sequence
  Synthetic Polynucleotide
tgcgacgtgaagctggtggaaaagagcttcgagacagacaccaacctgaacttccagaacctgagcgtgatcggcttcagaatcctgctgctgaaagtggccggctttaacctgctgatgaccctgcggctgtggtccagc

SEQ ID NO: 7264 - DNA, 138 bp, Artificial Sequence
  Synthetic Polynucleotide
gacgtgaagctggtggaaaagagcttcgagacagacaccaacctgaacttccagaacctgagcgtgatcggcttcagaatcctgctgctgaaagtggccggctttaacctgctgatgaccctgcggctgtggtccagc

SEQ ID NO: 7265 - DNA, 135 bp, Artificial Sequence
  Synthetic Polynucleotide
gtgaagctggtggaaaagagcttcgagacagacaccaacctgaacttccagaacctgagcgtgatcggcttcagaatcctgctgctgaaagtggccggctttaacctgctgatgaccctgcggctgtggtccagc

SEQ ID NO: 7266 - DNA, 132 bp, Artificial Sequence
  Synthetic Polynucleotide
aagctggtggaaaagagcttcgagacagacaccaacctgaacttccagaacctgagcgtgatcggcttcagaatcctgctgctgaaagtggccggctttaacctgctgatgaccctgcggctgtggtccagc

SEQ ID NO: 7267 - DNA, 129 bp, Artificial Sequence
  Synthetic Polynucleotide
ctggtggaaaagagcttcgagacagacaccaacctgaacttccagaacctgagcgtgatcggcttcagaatcctgctgctgaaagtggccggctttaacctgctgatgaccctgcggctgtggtccagc

SEQ ID NO: 7268 - DNA, 126 bp, Artificial Sequence
  Synthetic Polynucleotide
gtggaaaagagcttcgagacagacaccaacctgaacttccagaacctgagcgtgatcggcttcagaatcctgctgctgaaagtggccggctttaacctgctgatgaccctgcggctgtggtccagc

SEQ ID NO: 7269 - DNA, 123 bp, Artificial Sequence
  Synthetic Polynucleotide
gaaaagagcttcgagacagacaccaacctgaacttccagaacctgagcgtgatcggcttcagaatcctgctgctgaaagtggccggctttaacctgctgatgaccctgcggctgtggtccagc

SEQ ID NO: 7270 - DNA, 120 bp, Artificial Sequence
  Synthetic Polynucleotide
aagagcttcgagacagacaccaacctgaacttccagaacctgagcgtgatcggcttcagaatcctgctgctgaaagtggccggctttaacctgctgatgaccctgcggctgtggtccagc

SEQ ID NO: 7271 - DNA, 117 bp, Artificial Sequence
  Synthetic Polynucleotide
agcttcgagacagacaccaacctgaacttccagaacctgagcgtgatcggcttcagaatcctgctgctgaaagtggccggctttaacctgctgatgaccctgcggctgtggtccagc

SEQ ID NO: 7272 - DNA, 537 bp, Artificial Sequence; identical to SEQ ID NO: 1059
  Synthetic Polynucleotide

SEQ ID NO: 7273 - DNA, 534 bp, Artificial Sequence
  Synthetic Polynucleotide
gacctgaagaacgtgttcccacctgaggtggccgtgttcgagcctagcgaggccgagatcagccacacccagaaagccaccctcgtgtgcctggctaccggcttctaccccgaccatgtggaactgtcttggtgggtcaacggcaaagaggtgcacagcggcgtgtgtaccgacccccagccactgaaagaacagcccgccctgaacgacagccggtactgcctgagcagcagactgagagtgtccgccaccttctggcagaacccccggaaccacttcagatgccaggtgcagttctacggcctgagcgagaacgacgagtggacccaggacagagccaagcccgtgacccagatcgtgtctgccgaagcctggggcagagccgattgcggctttaccagcgagagctaccagcagggcgtgctgagcgccaccatcctgtacgagatcctgctgggcaaggccaccctgtacgccgtgctggtgtctgccctggtgctgatggctatggtcaagcggaaggacagccgggga

SEQ ID NO: 7274 - DNA, 531 bp, Artificial Sequence
  Synthetic Polynucleotide
ctgaagaacgtgttcccacctgaggtggccgtgttcgagcctagcgaggccgagatcagccacacccagaaagccaccctcgtgtgcctggctaccggcttctaccccgaccatgtggaactgtcttggtgggtcaacggcaaagaggtgcacagcggcgtgtgtaccgacccccagccactgaaagaacagcccgccctgaacgacagccggtactgcctgagcagcagactgagagtgtccgccaccttctggcagaacccccggaaccacttcagatgccaggtgcagttctacggcctgagcgagaacgacgagtggacccaggacagagccaagcccgtgacccagatcgtgtctgccgaagcctggggcagagccgattgcggctttaccagcgagagctaccagcagggcgtgctgagcgccaccatcctgtacgagatcctgctgggcaaggccaccctgtacgccgtgctggtgtctgccctggtgctgatggctatggtcaagcggaaggacagccgggga

SEQ ID NO: 7275 - DNA, 528 bp, Artificial Sequence; identical to SEQ ID NO: 1115
  Synthetic Polynucleotide

SEQ ID NO: 7276 - DNA, 525 bp, Artificial Sequence; identical to SEQ ID NO: 1116
  Synthetic Polynucleotide

SEQ ID NO: 7277 - DNA, 522 bp, Artificial Sequence
  Synthetic Polynucleotide
gtgttcccacctgaggtggccgtgttcgagcctagcgaggccgagatcagccacacccagaaagccaccctcgtgtgcctggctaccggcttctaccccgaccatgtggaactgtcttggtgggtcaacggcaaagaggtgcacagcggcgtgtgtaccgacccccagccactgaaagaacagcccgccctgaacgacagccggtactgcctgagcagcagactgagagtgtccgccaccttctggcagaacccccggaaccacttcagatgccaggtgcagttctacggcctgagcgagaacgacgagtggacccaggacagagccaagcccgtgacccagatcgtgtctgccgaagcctggggcagagccgattgcggctttaccagcgagagctaccagcagggcgtgctgagcgccaccatcctgtacgagatcctgctgggcaaggccaccctgtacgccgtgctggtgtctgccctggtgctgatggctatggtcaagcggaaggacagccgggga

SEQ ID NO: 7278 - DNA, 519 bp, Artificial Sequence; identical to SEQ ID NO: 1117
  Synthetic Polynucleotide

SEQ ID NO: 7279 - DNA, 516 bp, Artificial Sequence
  Synthetic Polynucleotide
ccacctgaggtggccgtgttcgagcctagcgaggccgagatcagccacacccagaaagccaccctcgtgtgcctggctaccggcttctaccccgaccatgtggaactgtcttggtgggtcaacggcaaagaggtgcacagcggcgtgtgtaccgacccccagccactgaaagaacagcccgccctgaacgacagccggtactgcctgagcagcagactgagagtgtccgccaccttctggcagaacccccggaaccacttcagatgccaggtgcagttctacggcctgagcgagaacgacgagtggacccaggacagagccaagcccgtgacccagatcgtgtctgccgaagcctggggcagagccgattgcggctttaccagcgagagctaccagcagggcgtgctgagcgccaccatcctgtacgagatcctgctgggcaaggccaccctgtacgccgtgctggtgtctgccctggtgctgatggctatggtcaagcggaaggacagccgggga

SEQ ID NO: 7280 - DNA, 513 bp, Artificial Sequence
  Synthetic Polynucleotide
cctgaggtggccgtgttcgagcctagcgaggccgagatcagccacacccagaaagccaccctcgtgtgcctggctaccggcttctaccccgaccatgtggaactgtcttggtgggtcaacggcaaagaggtgcacagcggcgtgtgtaccgacccccagccactgaaagaacagcccgccctgaacgacagccggtactgcctgagcagcagactgagagtgtccgccaccttctggcagaacccccggaaccacttcagatgccaggtgcagttctacggcctgagcgagaacgacgagtggacccaggacagagccaagcccgtgacccagatcgtgtctgccgaagcctggggcagagccgattgcggctttaccagcgagagctaccagcagggcgtgctgagcgccaccatcctgtacgagatcctgctgggcaaggccaccctgtacgccgtgctggtgtctgccctggtgctgatggctatggtcaagcggaaggacagccgggga

SEQ ID NO: 7281 - DNA, 510 bp, Artificial Sequence
  Synthetic Polynucleotide
gaggtggccgtgttcgagcctagcgaggccgagatcagccacacccagaaagccaccctcgtgtgcctggctaccggcttctaccccgaccatgtggaactgtcttggtgggtcaacggcaaagaggtgcacagcggcgtgtgtaccgacccccagccactgaaagaacagcccgccctgaacgacagccggtactgcctgagcagcagactgagagtgtccgccaccttctggcagaacccccggaaccacttcagatgccaggtgcagttctacggcctgagcgagaacgacgagtggacccaggacagagccaagcccgtgacccagatcgtgtctgccgaagcctggggcagagccgattgcggctttaccagcgagagctaccagcagggcgtgctgagcgccaccatcctgtacgagatcctgctgggcaaggccaccctgtacgccgtgctggtgtctgccctggtgctgatggctatggtcaagcggaaggacagccgggga

SEQ ID NO: 7282 - DNA, 507 bp, Artificial Sequence; identical to SEQ ID NO: 1118
  Synthetic Polynucleotide

SEQ ID NO: 7283 - DNA, 504 bp, Artificial Sequence
  Synthetic Polynucleotide
gccgtgttcgagcctagcgaggccgagatcagccacacccagaaagccaccctcgtgtgcctggctaccggcttctaccccgaccatgtggaactgtcttggtgggtcaacggcaaagaggtgcacagcggcgtgtgtaccgacccccagccactgaaagaacagcccgccctgaacgacagccggtactgcctgagcagcagactgagagtgtccgccaccttctggcagaacccccggaaccacttcagatgccaggtgcagttctacggcctgagcgagaacgacgagtggacccaggacagagccaagcccgtgacccagatcgtgtctgccgaagcctggggcagagccgattgcggctttaccagcgagagctaccagcagggcgtgctgagcgccaccatcctgtacgagatcctgctgggcaaggccaccctgtacgccgtgctggtgtctgccctggtgctgatggctatggtcaagcggaaggacagccgggga

SEQ ID NO: 7284 - DNA, 501 bp, Artificial Sequence
  Synthetic Polynucleotide
gtgttcgagcctagcgaggccgagatcagccacacccagaaagccaccctcgtgtgcctggctaccggcttctaccccgaccatgtggaactgtcttggtgggtcaacggcaaagaggtgcacagcggcgtgtgtaccgacccccagccactgaaagaacagcccgccctgaacgacagccggtactgcctgagcagcagactgagagtgtccgccaccttctggcagaacccccggaaccacttcagatgccaggtgcagttctacggcctgagcgagaacgacgagtggacccaggacagagccaagcccgtgacccagatcgtgtctgccgaagcctggggcagagccgattgcggctttaccagcgagagctaccagcagggcgtgctgagcgccaccatcctgtacgagatcctgctgggcaaggccaccctgtacgccgtgctggtgtctgccctggtgctgatggctatggtcaagcggaaggacagccgggga

SEQ ID NO: 7285 - DNA, 498 bp, Artificial Sequence
  Synthetic Polynucleotide
ttcgagcctagcgaggccgagatcagccacacccagaaagccaccctcgtgtgcctggctaccggcttctaccccgaccatgtggaactgtcttggtgggtcaacggcaaagaggtgcacagcggcgtgtgtaccgacccccagccactgaaagaacagcccgccctgaacgacagccggtactgcctgagcagcagactgagagtgtccgccaccttctggcagaacccccggaaccacttcagatgccaggtgcagttctacggcctgagcgagaacgacgagtggacccaggacagagccaagcccgtgacccagatcgtgtctgccgaagcctggggcagagccgattgcggctttaccagcgagagctaccagcagggcgtgctgagcgccaccatcctgtacgagatcctgctgggcaaggccaccctgtacgccgtgctggtgtctgccctggtgctgatggctatggtcaagcggaaggacagccgggga

SEQ ID NO: 7286 - DNA, 495 bp, Artificial Sequence
  Synthetic Polynucleotide
gagcctagcgaggccgagatcagccacacccagaaagccaccctcgtgtgcctggctaccggcttctaccccgaccatgtggaactgtcttggtgggtcaacggcaaagaggtgcacagcggcgtgtgtaccgacccccagccactgaaagaacagcccgccctgaacgacagccggtactgcctgagcagcagactgagagtgtccgccaccttctggcagaacccccggaaccacttcagatgccaggtgcagttctacggcctgagcgagaacgacgagtggacccaggacagagccaagcccgtgacccagatcgtgtctgccgaagcctggggcagagccgattgcggctttaccagcgagagctaccagcagggcgtgctgagcgccaccatcctgtacgagatcctgctgggcaaggccaccctgtacgccgtgctggtgtctgccctggtgctgatggctatggtcaagcggaaggacagccgggga

SEQ ID NO: 7287 - DNA, 492 bp, Artificial Sequence; identical to SEQ ID NO: 1119
  Synthetic Polynucleotide

SEQ ID NO: 7288 - DNA, 489 bp, Artificial Sequence
  Synthetic Polynucleotide
agcgaggccgagatcagccacacccagaaagccaccctcgtgtgcctggctaccggcttctaccccgaccatgtggaactgtcttggtgggtcaacggcaaagaggtgcacagcggcgtgtgtaccgacccccagccactgaaagaacagcccgccctgaacgacagccggtactgcctgagcagcagactgagagtgtccgccaccttctggcagaacccccggaaccacttcagatgccaggtgcagttctacggcctgagcgagaacgacgagtggacccaggacagagccaagcccgtgacccagatcgtgtctgccgaagcctggggcagagccgattgcggctttaccagcgagagctaccagcagggcgtgctgagcgccaccatcctgtacgagatcctgctgggcaaggccaccctgtacgccgtgctggtgtctgccctggtgctgatggctatggtcaagcggaaggacagccgggga

SEQ ID NO: 7289 - DNA, 486 bp, Artificial Sequence
  Synthetic Polynucleotide
gaggccgagatcagccacacccagaaagccaccctcgtgtgcctggctaccggcttctaccccgaccatgtggaactgtcttggtgggtcaacggcaaagaggtgcacagcggcgtgtgtaccgacccccagccactgaaagaacagcccgccctgaacgacagccggtactgcctgagcagcagactgagagtgtccgccaccttctggcagaacccccggaaccacttcagatgccaggtgcagttctacggcctgagcgagaacgacgagtggacccaggacagagccaagcccgtgacccagatcgtgtctgccgaagcctggggcagagccgattgcggctttaccagcgagagctaccagcagggcgtgctgagcgccaccatcctgtacgagatcctgctgggcaaggccaccctgtacgccgtgctggtgtctgccctggtgctgatggctatggtcaagcggaaggacagccgggga

SEQ ID NO: 7290 - DNA, 483 bp, Artificial Sequence; identical to SEQ ID NO: 1120
  Synthetic Polynucleotide

SEQ ID NO: 7291 - DNA, 480 bp, Artificial Sequence
  Synthetic Polynucleotide
gagatcagccacacccagaaagccaccctcgtgtgcctggctaccggcttctaccccgaccatgtggaactgtcttggtgggtcaacggcaaagaggtgcacagcggcgtgtgtaccgacccccagccactgaaagaacagcccgccctgaacgacagccggtactgcctgagcagcagactgagagtgtccgccaccttctggcagaacccccggaaccacttcagatgccaggtgcagttctacggcctgagcgagaacgacgagtggacccaggacagagccaagcccgtgacccagatcgtgtctgccgaagcctggggcagagccgattgcggctttaccagcgagagctaccagcagggcgtgctgagcgccaccatcctgtacgagatcctgctgggcaaggccaccctgtacgccgtgctggtgtctgccctggtgctgatggctatggtcaagcggaaggacagccgggga

SEQ ID NO: 7292 - DNA, 477 bp, Artificial Sequence
  Synthetic Polynucleotide
atcagccacacccagaaagccaccctcgtgtgcctggctaccggcttctaccccgaccatgtggaactgtcttggtgggtcaacggcaaagaggtgcacagcggcgtgtgtaccgacccccagccactgaaagaacagcccgccctgaacgacagccggtactgcctgagcagcagactgagagtgtccgccaccttctggcagaacccccggaaccacttcagatgccaggtgcagttctacggcctgagcgagaacgacgagtggacccaggacagagccaagcccgtgacccagatcgtgtctgccgaagcctggggcagagccgattgcggctttaccagcgagagctaccagcagggcgtgctgagcgccaccatcctgtacgagatcctgctgggcaaggccaccctgtacgccgtgctggtgtctgccctggtgctgatggctatggtcaagcggaaggacagccgggga

SEQ ID NO: 7293 - DNA, 474 bp, Artificial Sequence
  Synthetic Polynucleotide
agccacacccagaaagccaccctcgtgtgcctggctaccggcttctaccccgaccatgtggaactgtcttggtgggtcaacggcaaagaggtgcacagcggcgtgtgtaccgacccccagccactgaaagaacagcccgccctgaacgacagccggtactgcctgagcagcagactgagagtgtccgccaccttctggcagaacccccggaaccacttcagatgccaggtgcagttctacggcctgagcgagaacgacgagtggacccaggacagagccaagcccgtgacccagatcgtgtctgccgaagcctggggcagagccgattgcggctttaccagcgagagctaccagcagggcgtgctgagcgccaccatcctgtacgagatcctgctgggcaaggccaccctgtacgccgtgctggtgtctgccctggtgctgatggctatggtcaagcggaaggacagccgggga

SEQ ID NO: 7294 - DNA, 471 bp, Artificial Sequence
  Synthetic Polynucleotide
cacacccagaaagccaccctcgtgtgcctggctaccggcttctaccccgaccatgtggaactgtcttggtgggtcaacggcaaagaggtgcacagcggcgtgtgtaccgacccccagccactgaaagaacagcccgccctgaacgacagccggtactgcctgagcagcagactgagagtgtccgccaccttctggcagaacccccggaaccacttcagatgccaggtgcagttctacggcctgagcgagaacgacgagtggacccaggacagagccaagcccgtgacccagatcgtgtctgccgaagcctggggcagagccgattgcggctttaccagcgagagctaccagcagggcgtgctgagcgccaccatcctgtacgagatcctgctgggcaaggccaccctgtacgccgtgctggtgtctgccctggtgctgatggctatggtcaagcggaaggacagccgggga

SEQ ID NO: 7295 - DNA, 468 bp, Artificial Sequence
  Synthetic Polynucleotide
acccagaaagccaccctcgtgtgcctggctaccggcttctaccccgaccatgtggaactgtcttggtgggtcaacggcaaagaggtgcacagcggcgtgtgtaccgacccccagccactgaaagaacagcccgccctgaacgacagccggtactgcctgagcagcagactgagagtgtccgccaccttctggcagaacccccggaaccacttcagatgccaggtgcagttctacggcctgagcgagaacgacgagtggacccaggacagagccaagcccgtgacccagatcgtgtctgccgaagcctggggcagagccgattgcggctttaccagcgagagctaccagcagggcgtgctgagcgccaccatcctgtacgagatcctgctgggcaaggccaccctgtacgccgtgctggtgtctgccctggtgctgatggctatggtcaagcggaaggacagccgggga

SEQ ID NO: 7296 - DNA, 465 bp, Artificial Sequence
  Synthetic Polynucleotide
cagaaagccaccctcgtgtgcctggctaccggcttctaccccgaccatgtggaactgtcttggtgggtcaacggcaaagaggtgcacagcggcgtgtgtaccgacccccagccactgaaagaacagcccgccctgaacgacagccggtactgcctgagcagcagactgagagtgtccgccaccttctggcagaacccccggaaccacttcagatgccaggtgcagttctacggcctgagcgagaacgacgagtggacccaggacagagccaagcccgtgacccagatcgtgtctgccgaagcctggggcagagccgattgcggctttaccagcgagagctaccagcagggcgtgctgagcgccaccatcctgtacgagatcctgctgggcaaggccaccctgtacgccgtgctggtgtctgccctggtgctgatggctatggtcaagcggaaggacagccgggga

SEQ ID NO: 7297 - DNA, 462 bp, Artificial Sequence
  Synthetic Polynucleotide
aaagccaccctcgtgtgcctggctaccggcttctaccccgaccatgtggaactgtcttggtgggtcaacggcaaagaggtgcacagcggcgtgtgtaccgacccccagccactgaaagaacagcccgccctgaacgacagccggtactgcctgagcagcagactgagagtgtccgccaccttctggcagaacccccggaaccacttcagatgccaggtgcagttctacggcctgagcgagaacgacgagtggacccaggacagagccaagcccgtgacccagatcgtgtctgccgaagcctggggcagagccgattgcggctttaccagcgagagctaccagcagggcgtgctgagcgccaccatcctgtacgagatcctgctgggcaaggccaccctgtacgccgtgctggtgtctgccctggtgctgatggctatggtcaagcggaaggacagccgggga

SEQ ID NO: 7298 - DNA, 459 bp, Artificial Sequence
  Synthetic Polynucleotide
gccaccctcgtgtgcctggctaccggcttctaccccgaccatgtggaactgtcttggtgggtcaacggcaaagaggtgcacagcggcgtgtgtaccgacccccagccactgaaagaacagcccgccctgaacgacagccggtactgcctgagcagcagactgagagtgtccgccaccttctggcagaacccccggaaccacttcagatgccaggtgcagttctacggcctgagcgagaacgacgagtggacccaggacagagccaagcccgtgacccagatcgtgtctgccgaagcctggggcagagccgattgcggctttaccagcgagagctaccagcagggcgtgctgagcgccaccatcctgtacgagatcctgctgggcaaggccaccctgtacgccgtgctggtgtctgccctggtgctgatggctatggtcaagcggaaggacagccgggga

SEQ ID NO: 7299 - DNA, 456 bp, Artificial Sequence
  Synthetic Polynucleotide
accctcgtgtgcctggctaccggcttctaccccgaccatgtggaactgtcttggtgggtcaacggcaaagaggtgcacagcggcgtgtgtaccgacccccagccactgaaagaacagcccgccctgaacgacagccggtactgcctgagcagcagactgagagtgtccgccaccttctggcagaacccccggaaccacttcagatgccaggtgcagttctacggcctgagcgagaacgacgagtggacccaggacagagccaagcccgtgacccagatcgtgtctgccgaagcctggggcagagccgattgcggctttaccagcgagagctaccagcagggcgtgctgagcgccaccatcctgtacgagatcctgctgggcaaggccaccctgtacgccgtgctggtgtctgccctggtgctgatggctatggtcaagcggaaggacagccgggga

SEQ ID NO: 7300 - DNA, 453 bp, Artificial Sequence
  Synthetic Polynucleotide
ctcgtgtgcctggctaccggcttctaccccgaccatgtggaactgtcttggtgggtcaacggcaaagaggtgcacagcggcgtgtgtaccgacccccagccactgaaagaacagcccgccctgaacgacagccggtactgcctgagcagcagactgagagtgtccgccaccttctggcagaacccccggaaccacttcagatgccaggtgcagttctacggcctgagcgagaacgacgagtggacccaggacagagccaagcccgtgacccagatcgtgtctgccgaagcctggggcagagccgattgcggctttaccagcgagagctaccagcagggcgtgctgagcgccaccatcctgtacgagatcctgctgggcaaggccaccctgtacgccgtgctggtgtctgccctggtgctgatggctatggtcaagcggaaggacagccgggga

SEQ ID NO: 7301 - DNA, 450 bp, Artificial Sequence
  Synthetic Polynucleotide
gtgtgcctggctaccggcttctaccccgaccatgtggaactgtcttggtgggtcaacggcaaagaggtgcacagcggcgtgtgtaccgacccccagccactgaaagaacagcccgccctgaacgacagccggtactgcctgagcagcagactgagagtgtccgccaccttctggcagaacccccggaaccacttcagatgccaggtgcagttctacggcctgagcgagaacgacgagtggacccaggacagagccaagcccgtgacccagatcgtgtctgccgaagcctggggcagagccgattgcggctttaccagcgagagctaccagcagggcgtgctgagcgccaccatcctgtacgagatcctgctgggcaaggccaccctgtacgccgtgctggtgtctgccctggtgctgatggctatggtcaagcggaaggacagccgggga

SEQ ID NO: 7302 - DNA, 447 bp, Artificial Sequence; identical to SEQ ID NO: 1121
  Synthetic Polynucleotide

SEQ ID NO: 7303 - DNA, 444 bp, Artificial Sequence
  Synthetic Polynucleotide
ctggctaccggcttctaccccgaccatgtggaactgtcttggtgggtcaacggcaaagaggtgcacagcggcgtgtgtaccgacccccagccactgaaagaacagcccgccctgaacgacagccggtactgcctgagcagcagactgagagtgtccgccaccttctggcagaacccccggaaccacttcagatgccaggtgcagttctacggcctgagcgagaacgacgagtggacccaggacagagccaagcccgtgacccagatcgtgtctgccgaagcctggggcagagccgattgcggctttaccagcgagagctaccagcagggcgtgctgagcgccaccatcctgtacgagatcctgctgggcaaggccaccctgtacgccgtgctggtgtctgccctggtgctgatggctatggtcaagcggaaggacagccgggga

SEQ ID NO: 7304 - DNA, 441 bp, Artificial Sequence
  Synthetic Polynucleotide
gctaccggcttctaccccgaccatgtggaactgtcttggtgggtcaacggcaaagaggtgcacagcggcgtgtgtaccgacccccagccactgaaagaacagcccgccctgaacgacagccggtactgcctgagcagcagactgagagtgtccgccaccttctggcagaacccccggaaccacttcagatgccaggtgcagttctacggcctgagcgagaacgacgagtggacccaggacagagccaagcccgtgacccagatcgtgtctgccgaagcctggggcagagccgattgcggctttaccagcgagagctaccagcagggcgtgctgagcgccaccatcctgtacgagatcctgctgggcaaggccaccctgtacgccgtgctggtgtctgccctggtgctgatggctatggtcaagcggaaggacagccgggga

SEQ ID NO: 7305 - DNA, 438 bp, Artificial Sequence
  Synthetic Polynucleotide
accggcttctaccccgaccatgtggaactgtcttggtgggtcaacggcaaagaggtgcacagcggcgtgtgtaccgacccccagccactgaaagaacagcccgccctgaacgacagccggtactgcctgagcagcagactgagagtgtccgccaccttctggcagaacccccggaaccacttcagatgccaggtgcagttctacggcctgagcgagaacgacgagtggacccaggacagagccaagcccgtgacccagatcgtgtctgccgaagcctggggcagagccgattgcggctttaccagcgagagctaccagcagggcgtgctgagcgccaccatcctgtacgagatcctgctgggcaaggccaccctgtacgccgtgctggtgtctgccctggtgctgatggctatggtcaagcggaaggacagccgggga

SEQ ID NO: 7306 - DNA, 435 bp, Artificial Sequence
  Synthetic Polynucleotide
ggcttctaccccgaccatgtggaactgtcttggtgggtcaacggcaaagaggtgcacagcggcgtgtgtaccgacccccagccactgaaagaacagcccgccctgaacgacagccggtactgcctgagcagcagactgagagtgtccgccaccttctggcagaacccccggaaccacttcagatgccaggtgcagttctacggcctgagcgagaacgacgagtggacccaggacagagccaagcccgtgacccagatcgtgtctgccgaagcctggggcagagccgattgcggctttaccagcgagagctaccagcagggcgtgctgagcgccaccatcctgtacgagatcctgctgggcaaggccaccctgtacgccgtgctggtgtctgccctggtgctgatggctatggtcaagcggaaggacagccgggga

SEQ ID NO: 7307 - DNA, 432 bp, Artificial Sequence
  Synthetic Polynucleotide
ttctaccccgaccatgtggaactgtcttggtgggtcaacggcaaagaggtgcacagcggcgtgtgtaccgacccccagccactgaaagaacagcccgccctgaacgacagccggtactgcctgagcagcagactgagagtgtccgccaccttctggcagaacccccggaaccacttcagatgccaggtgcagttctacggcctgagcgagaacgacgagtggacccaggacagagccaagcccgtgacccagatcgtgtctgccgaagcctggggcagagccgattgcggctttaccagcgagagctaccagcagggcgtgctgagcgccaccatcctgtacgagatcctgctgggcaaggccaccctgtacgccgtgctggtgtctgccctggtgctgatggctatggtcaagcggaaggacagccgggga

SEQ ID NO: 7308 - DNA, 429 bp, Artificial Sequence
  Synthetic Polynucleotide
taccccgaccatgtggaactgtcttggtgggtcaacggcaaagaggtgcacagcggcgtgtgtaccgacccccagccactgaaagaacagcccgccctgaacgacagccggtactgcctgagcagcagactgagagtgtccgccaccttctggcagaacccccggaaccacttcagatgccaggtgcagttctacggcctgagcgagaacgacgagtggacccaggacagagccaagcccgtgacccagatcgtgtctgccgaagcctggggcagagccgattgcggctttaccagcgagagctaccagcagggcgtgctgagcgccaccatcctgtacgagatcctgctgggcaaggccaccctgtacgccgtgctggtgtctgccctggtgctgatggctatggtcaagcggaaggacagccgggga

SEQ ID NO: 7309 - DNA, 426 bp, Artificial Sequence
  Synthetic Polynucleotide
cccgaccatgtggaactgtcttggtgggtcaacggcaaagaggtgcacagcggcgtgtgtaccgacccccagccactgaaagaacagcccgccctgaacgacagccggtactgcctgagcagcagactgagagtgtccgccaccttctggcagaacccccggaaccacttcagatgccaggtgcagttctacggcctgagcgagaacgacgagtggacccaggacagagccaagcccgtgacccagatcgtgtctgccgaagcctggggcagagccgattgcggctttaccagcgagagctaccagcagggcgtgctgagcgccaccatcctgtacgagatcctgctgggcaaggccaccctgtacgccgtgctggtgtctgccctggtgctgatggctatggtcaagcggaaggacagccgggga

SEQ ID NO: 7310 - DNA, 423 bp, Artificial Sequence
  Synthetic Polynucleotide
gaccatgtggaactgtcttggtgggtcaacggcaaagaggtgcacagcggcgtgtgtaccgacccccagccactgaaagaacagcccgccctgaacgacagccggtactgcctgagcagcagactgagagtgtccgccaccttctggcagaacccccggaaccacttcagatgccaggtgcagttctacggcctgagcgagaacgacgagtggacccaggacagagccaagcccgtgacccagatcgtgtctgccgaagcctggggcagagccgattgcggctttaccagcgagagctaccagcagggcgtgctgagcgccaccatcctgtacgagatcctgctgggcaaggccaccctgtacgccgtgctggtgtctgccctggtgctgatggctatggtcaagcggaaggacagccgggga

SEQ ID NO: 7311 - DNA, 420 bp, Artificial Sequence
  Synthetic Polynucleotide
catgtggaactgtcttggtgggtcaacggcaaagaggtgcacagcggcgtgtgtaccgacccccagccactgaaagaacagcccgccctgaacgacagccggtactgcctgagcagcagactgagagtgtccgccaccttctggcagaacccccggaaccacttcagatgccaggtgcagttctacggcctgagcgagaacgacgagtggacccaggacagagccaagcccgtgacccagatcgtgtctgccgaagcctggggcagagccgattgcggctttaccagcgagagctaccagcagggcgtgctgagcgccaccatcctgtacgagatcctgctgggcaaggccaccctgtacgccgtgctggtgtctgccctggtgctgatggctatggtcaagcggaaggacagccgggga

SEQ ID NO: 7312 - DNA, 417 bp, Artificial Sequence
  Synthetic Polynucleotide
gtggaactgtcttggtgggtcaacggcaaagaggtgcacagcggcgtgtgtaccgacccccagccactgaaagaacagcccgccctgaacgacagccggtactgcctgagcagcagactgagagtgtccgccaccttctggcagaacccccggaaccacttcagatgccaggtgcagttctacggcctgagcgagaacgacgagtggacccaggacagagccaagcccgtgacccagatcgtgtctgccgaagcctggggcagagccgattgcggctttaccagcgagagctaccagcagggcgtgctgagcgccaccatcctgtacgagatcctgctgggcaaggccaccctgtacgccgtgctggtgtctgccctggtgctgatggctatggtcaagcggaaggacagccgggga

SEQ ID NO: 7313 - DNA, 414 bp, Artificial Sequence
  Synthetic Polynucleotide
gaactgtcttggtgggtcaacggcaaagaggtgcacagcggcgtgtgtaccgacccccagccactgaaagaacagcccgccctgaacgacagccggtactgcctgagcagcagactgagagtgtccgccaccttctggcagaacccccggaaccacttcagatgccaggtgcagttctacggcctgagcgagaacgacgagtggacccaggacagagccaagcccgtgacccagatcgtgtctgccgaagcctggggcagagccgattgcggctttaccagcgagagctaccagcagggcgtgctgagcgccaccatcctgtacgagatcctgctgggcaaggccaccctgtacgccgtgctggtgtctgccctggtgctgatggctatggtcaagcggaaggacagccgggga

SEQ ID NO: 7314 - DNA, 411 bp, Artificial Sequence; identical to SEQ ID NO: 1122
  Synthetic Polynucleotide

SEQ ID NO: 7315 - DNA, 408 bp, Artificial Sequence
  Synthetic Polynucleotide
tcttggtgggtcaacggcaaagaggtgcacagcggcgtgtgtaccgacccccagccactgaaagaacagcccgccctgaacgacagccggtactgcctgagcagcagactgagagtgtccgccaccttctggcagaacccccggaaccacttcagatgccaggtgcagttctacggcctgagcgagaacgacgagtggacccaggacagagccaagcccgtgacccagatcgtgtctgccgaagcctggggcagagccgattgcggctttaccagcgagagctaccagcagggcgtgctgagcgccaccatcctgtacgagatcctgctgggcaaggccaccctgtacgccgtgctggtgtctgccctggtgctgatggctatggtcaagcggaaggacagccgggga

SEQ ID NO: 7316 - DNA, 405 bp, Artificial Sequence
  Synthetic Polynucleotide
tggtgggtcaacggcaaagaggtgcacagcggcgtgtgtaccgacccccagccactgaaagaacagcccgccctgaacgacagccggtactgcctgagcagcagactgagagtgtccgccaccttctggcagaacccccggaaccacttcagatgccaggtgcagttctacggcctgagcgagaacgacgagtggacccaggacagagccaagcccgtgacccagatcgtgtctgccgaagcctggggcagagccgattgcggctttaccagcgagagctaccagcagggcgtgctgagcgccaccatcctgtacgagatcctgctgggcaaggccaccctgtacgccgtgctggtgtctgccctggtgctgatggctatggtcaagcggaaggacagccgggga

SEQ ID NO: 7317 - DNA, 402 bp, Artificial Sequence
  Synthetic Polynucleotide
tgggtcaacggcaaagaggtgcacagcggcgtgtgtaccgacccccagccactgaaagaacagcccgccctgaacgacagccggtactgcctgagcagcagactgagagtgtccgccaccttctggcagaacccccggaaccacttcagatgccaggtgcagttctacggcctgagcgagaacgacgagtggacccaggacagagccaagcccgtgacccagatcgtgtctgccgaagcctggggcagagccgattgcggctttaccagcgagagctaccagcagggcgtgctgagcgccaccatcctgtacgagatcctgctgggcaaggccaccctgtacgccgtgctggtgtctgccctggtgctgatggctatggtcaagcggaaggacagccgggga

SEQ ID NO: 7318 - DNA, 399 bp, Artificial Sequence
  Synthetic Polynucleotide
gtcaacggcaaagaggtgcacagcggcgtgtgtaccgacccccagccactgaaagaacagcccgccctgaacgacagccggtactgcctgagcagcagactgagagtgtccgccaccttctggcagaacccccggaaccacttcagatgccaggtgcagttctacggcctgagcgagaacgacgagtggacccaggacagagccaagcccgtgacccagatcgtgtctgccgaagcctggggcagagccgattgcggctttaccagcgagagctaccagcagggcgtgctgagcgccaccatcctgtacgagatcctgctgggcaaggccaccctgtacgccgtgctggtgtctgccctggtgctgatggctatggtcaagcggaaggacagccgggga

SEQ ID NO: 7319 - DNA, 396 bp, Artificial Sequence
  Synthetic Polynucleotide
aacggcaaagaggtgcacagcggcgtgtgtaccgacccccagccactgaaagaacagcccgccctgaacgacagccggtactgcctgagcagcagactgagagtgtccgccaccttctggcagaacccccggaaccacttcagatgccaggtgcagttctacggcctgagcgagaacgacgagtggacccaggacagagccaagcccgtgacccagatcgtgtctgccgaagcctggggcagagccgattgcggctttaccagcgagagctaccagcagggcgtgctgagcgccaccatcctgtacgagatcctgctgggcaaggccaccctgtacgccgtgctggtgtctgccctggtgctgatggctatggtcaagcggaaggacagccgggga

SEQ ID NO: 7320 - DNA, 393 bp, Artificial Sequence
  Synthetic Polynucleotide
ggcaaagaggtgcacagcggcgtgtgtaccgacccccagccactgaaagaacagcccgccctgaacgacagccggtactgcctgagcagcagactgagagtgtccgccaccttctggcagaacccccggaaccacttcagatgccaggtgcagttctacggcctgagcgagaacgacgagtggacccaggacagagccaagcccgtgacccagatcgtgtctgccgaagcctggggcagagccgattgcggctttaccagcgagagctaccagcagggcgtgctgagcgccaccatcctgtacgagatcctgctgggcaaggccaccctgtacgccgtgctggtgtctgccctggtgctgatggctatggtcaagcggaaggacagccgggga

SEQ ID NO: 7321 - DNA, 390 bp, Artificial Sequence
  Synthetic Polynucleotide
aaagaggtgcacagcggcgtgtgtaccgacccccagccactgaaagaacagcccgccctgaacgacagccggtactgcctgagcagcagactgagagtgtccgccaccttctggcagaacccccggaaccacttcagatgccaggtgcagttctacggcctgagcgagaacgacgagtggacccaggacagagccaagcccgtgacccagatcgtgtctgccgaagcctggggcagagccgattgcggctttaccagcgagagctaccagcagggcgtgctgagcgccaccatcctgtacgagatcctgctgggcaaggccaccctgtacgccgtgctggtgtctgccctggtgctgatggctatggtcaagcggaaggacagccgggga

SEQ ID NO: 7322 - DNA, 387 bp, Artificial Sequence
  Synthetic Polynucleotide
gaggtgcacagcggcgtgtgtaccgacccccagccactgaaagaacagcccgccctgaacgacagccggtactgcctgagcagcagactgagagtgtccgccaccttctggcagaacccccggaaccacttcagatgccaggtgcagttctacggcctgagcgagaacgacgagtggacccaggacagagccaagcccgtgacccagatcgtgtctgccgaagcctggggcagagccgattgcggctttaccagcgagagctaccagcagggcgtgctgagcgccaccatcctgtacgagatcctgctgggcaaggccaccctgtacgccgtgctggtgtctgccctggtgctgatggctatggtcaagcggaaggacagccgggga

SEQ ID NO: 7323 - DNA, 384 bp, Artificial Sequence; identical to SEQ ID NO: 1123
  Synthetic Polynucleotide

SEQ ID NO: 7324 - DNA, 381 bp, Artificial Sequence
  Synthetic Polynucleotide
cacagcggcgtgtgtaccgacccccagccactgaaagaacagcccgccctgaacgacagccggtactgcctgagcagcagactgagagtgtccgccaccttctggcagaacccccggaaccacttcagatgccaggtgcagttctacggcctgagcgagaacgacgagtggacccaggacagagccaagcccgtgacccagatcgtgtctgccgaagcctggggcagagccgattgcggctttaccagcgagagctaccagcagggcgtgctgagcgccaccatcctgtacgagatcctgctgggcaaggccaccctgtacgccgtgctggtgtctgccctggtgctgatggctatggtcaagcggaaggacagccgggga

SEQ ID NO: 7325 - DNA, 378 bp, Artificial Sequence
  Synthetic Polynucleotide
agcggcgtgtgtaccgacccccagccactgaaagaacagcccgccctgaacgacagccggtactgcctgagcagcagactgagagtgtccgccaccttctggcagaacccccggaaccacttcagatgccaggtgcagttctacggcctgagcgagaacgacgagtggacccaggacagagccaagcccgtgacccagatcgtgtctgccgaagcctggggcagagccgattgcggctttaccagcgagagctaccagcagggcgtgctgagcgccaccatcctgtacgagatcctgctgggcaaggccaccctgtacgccgtgctggtgtctgccctggtgctgatggctatggtcaagcggaaggacagccgggga

SEQ ID NO: 7326 - DNA, 375 bp, Artificial Sequence
  Synthetic Polynucleotide
ggcgtgtgtaccgacccccagccactgaaagaacagcccgccctgaacgacagccggtactgcctgagcagcagactgagagtgtccgccaccttctggcagaacccccggaaccacttcagatgccaggtgcagttctacggcctgagcgagaacgacgagtggacccaggacagagccaagcccgtgacccagatcgtgtctgccgaagcctggggcagagccgattgcggctttaccagcgagagctaccagcagggcgtgctgagcgccaccatcctgtacgagatcctgctgggcaaggccaccctgtacgccgtgctggtgtctgccctggtgctgatggctatggtcaagcggaaggacagccgggga

SEQ ID NO: 7327 - DNA, 372 bp, Artificial Sequence
  Synthetic Polynucleotide
gtgtgtaccgacccccagccactgaaagaacagcccgccctgaacgacagccggtactgcctgagcagcagactgagagtgtccgccaccttctggcagaacccccggaaccacttcagatgccaggtgcagttctacggcctgagcgagaacgacgagtggacccaggacagagccaagcccgtgacccagatcgtgtctgccgaagcctggggcagagccgattgcggctttaccagcgagagctaccagcagggcgtgctgagcgccaccatcctgtacgagatcctgctgggcaaggccaccctgtacgccgtgctggtgtctgccctggtgctgatggctatggtcaagcggaaggacagccgggga

SEQ ID NO: 7328 - DNA, 369 bp, Artificial Sequence; identical to SEQ ID NO: 1124
  Synthetic Polynucleotide

SEQ ID NO: 7329 - DNA, 366 bp, Artificial Sequence
  Synthetic Polynucleotide
accgacccccagccactgaaagaacagcccgccctgaacgacagccggtactgcctgagcagcagactgagagtgtccgccaccttctggcagaacccccggaaccacttcagatgccaggtgcagttctacggcctgagcgagaacgacgagtggacccaggacagagccaagcccgtgacccagatcgtgtctgccgaagcctggggcagagccgattgcggctttaccagcgagagctaccagcagggcgtgctgagcgccaccatcctgtacgagatcctgctgggcaaggccaccctgtacgccgtgctggtgtctgccctggtgctgatggctatggtcaagcggaaggacagccgggga

SEQ ID NO: 7330 - DNA, 363 bp, Artificial Sequence
  Synthetic Polynucleotide
gacccccagccactgaaagaacagcccgccctgaacgacagccggtactgcctgagcagcagactgagagtgtccgccaccttctggcagaacccccggaaccacttcagatgccaggtgcagttctacggcctgagcgagaacgacgagtggacccaggacagagccaagcccgtgacccagatcgtgtctgccgaagcctggggcagagccgattgcggctttaccagcgagagctaccagcagggcgtgctgagcgccaccatcctgtacgagatcctgctgggcaaggccaccctgtacgccgtgctggtgtctgccctggtgctgatggctatggtcaagcggaaggacagccgggga

SEQ ID NO: 7331 - DNA, 360 bp, Artificial Sequence
  Synthetic Polynucleotide
ccccagccactgaaagaacagcccgccctgaacgacagccggtactgcctgagcagcagactgagagtgtccgccaccttctggcagaacccccggaaccacttcagatgccaggtgcagttctacggcctgagcgagaacgacgagtggacccaggacagagccaagcccgtgacccagatcgtgtctgccgaagcctggggcagagccgattgcggctttaccagcgagagctaccagcagggcgtgctgagcgccaccatcctgtacgagatcctgctgggcaaggccaccctgtacgccgtgctggtgtctgccctggtgctgatggctatggtcaagcggaaggacagccgggga

SEQ ID NO: 7332 - DNA, 357 bp, Artificial Sequence
  Synthetic Polynucleotide
cagccactgaaagaacagcccgccctgaacgacagccggtactgcctgagcagcagactgagagtgtccgccaccttctggcagaacccccggaaccacttcagatgccaggtgcagttctacggcctgagcgagaacgacgagtggacccaggacagagccaagcccgtgacccagatcgtgtctgccgaagcctggggcagagccgattgcggctttaccagcgagagctaccagcagggcgtgctgagcgccaccatcctgtacgagatcctgctgggcaaggccaccctgtacgccgtgctggtgtctgccctggtgctgatggctatggtcaagcggaaggacagccgggga

SEQ ID NO: 7333 - DNA, 354 bp, Artificial Sequence
  Synthetic Polynucleotide
ccactgaaagaacagcccgccctgaacgacagccggtactgcctgagcagcagactgagagtgtccgccaccttctggcagaacccccggaaccacttcagatgccaggtgcagttctacggcctgagcgagaacgacgagtggacccaggacagagccaagcccgtgacccagatcgtgtctgccgaagcctggggcagagccgattgcggctttaccagcgagagctaccagcagggcgtgctgagcgccaccatcctgtacgagatcctgctgggcaaggccaccctgtacgccgtgctggtgtctgccctggtgctgatggctatggtcaagcggaaggacagccgggga

SEQ ID NO: 7334 - DNA, 351 bp, Artificial Sequence
  Synthetic Polynucleotide
ctgaaagaacagcccgccctgaacgacagccggtactgcctgagcagcagactgagagtgtccgccaccttctggcagaacccccggaaccacttcagatgccaggtgcagttctacggcctgagcgagaacgacgagtggacccaggacagagccaagcccgtgacccagatcgtgtctgccgaagcctggggcagagccgattgcggctttaccagcgagagctaccagcagggcgtgctgagcgccaccatcctgtacgagatcctgctgggcaaggccaccctgtacgccgtgctggtgtctgccctggtgctgatggctatggtcaagcggaaggacagccgggga

SEQ ID NO: 7335 - DNA, 348 bp, Artificial Sequence
  Synthetic Polynucleotide
aaagaacagcccgccctgaacgacagccggtactgcctgagcagcagactgagagtgtccgccaccttctggcagaacccccggaaccacttcagatgccaggtgcagttctacggcctgagcgagaacgacgagtggacccaggacagagccaagcccgtgacccagatcgtgtctgccgaagcctggggcagagccgattgcggctttaccagcgagagctaccagcagggcgtgctgagcgccaccatcctgtacgagatcctgctgggcaaggccaccctgtacgccgtgctggtgtctgccctggtgctgatggctatggtcaagcggaaggacagccgggga

SEQ ID NO: 7336 - DNA, 345 bp, Artificial Sequence; identical to SEQ ID NO: 1125
  Synthetic Polynucleotide

SEQ ID NO: 7337 - DNA, 342 bp, Artificial Sequence
  Synthetic Polynucleotide
cagcccgccctgaacgacagccggtactgcctgagcagcagactgagagtgtccgccaccttctggcagaacccccggaaccacttcagatgccaggtgcagttctacggcctgagcgagaacgacgagtggacccaggacagagccaagcccgtgacccagatcgtgtctgccgaagcctggggcagagccgattgcggctttaccagcgagagctaccagcagggcgtgctgagcgccaccatcctgtacgagatcctgctgggcaaggccaccctgtacgccgtgctggtgtctgccctggtgctgatggctatggtcaagcggaaggacagccgggga

SEQ ID NO: 7338 - DNA, 339 bp, Artificial Sequence
  Synthetic Polynucleotide
cccgccctgaacgacagccggtactgcctgagcagcagactgagagtgtccgccaccttctggcagaacccccggaaccacttcagatgccaggtgcagttctacggcctgagcgagaacgacgagtggacccaggacagagccaagcccgtgacccagatcgtgtctgccgaagcctggggcagagccgattgcggctttaccagcgagagctaccagcagggcgtgctgagcgccaccatcctgtacgagatcctgctgggcaaggccaccctgtacgccgtgctggtgtctgccctggtgctgatggctatggtcaagcggaaggacagccgggga

SEQ ID NO: 7339 - DNA, 336 bp, Artificial Sequence
  Synthetic Polynucleotide
gccctgaacgacagccggtactgcctgagcagcagactgagagtgtccgccaccttctggcagaacccccggaaccacttcagatgccaggtgcagttctacggcctgagcgagaacgacgagtggacccaggacagagccaagcccgtgacccagatcgtgtctgccgaagcctggggcagagccgattgcggctttaccagcgagagctaccagcagggcgtgctgagcgccaccatcctgtacgagatcctgctgggcaaggccaccctgtacgccgtgctggtgtctgccctggtgctgatggctatggtcaagcggaaggacagccgggga

SEQ ID NO: 7340 - DNA, 333 bp, Artificial Sequence
  Synthetic Polynucleotide
ctgaacgacagccggtactgcctgagcagcagactgagagtgtccgccaccttctggcagaacccccggaaccacttcagatgccaggtgcagttctacggcctgagcgagaacgacgagtggacccaggacagagccaagcccgtgacccagatcgtgtctgccgaagcctggggcagagccgattgcggctttaccagcgagagctaccagcagggcgtgctgagcgccaccatcctgtacgagatcctgctgggcaaggccaccctgtacgccgtgctggtgtctgccctggtgctgatggctatggtcaagcggaaggacagccgggga

SEQ ID NO: 7341 - DNA, 330 bp, Artificial Sequence
  Synthetic Polynucleotide
aacgacagccggtactgcctgagcagcagactgagagtgtccgccaccttctggcagaacccccggaaccacttcagatgccaggtgcagttctacggcctgagcgagaacgacgagtggacccaggacagagccaagcccgtgacccagatcgtgtctgccgaagcctggggcagagccgattgcggctttaccagcgagagctaccagcagggcgtgctgagcgccaccatcctgtacgagatcctgctgggcaaggccaccctgtacgccgtgctggtgtctgccctggtgctgatggctatggtcaagcggaaggacagccgggga

SEQ ID NO: 7342 - DNA, 327 bp, Artificial Sequence
  Synthetic Polynucleotide
gacagccggtactgcctgagcagcagactgagagtgtccgccaccttctggcagaacccccggaaccacttcagatgccaggtgcagttctacggcctgagcgagaacgacgagtggacccaggacagagccaagcccgtgacccagatcgtgtctgccgaagcctggggcagagccgattgcggctttaccagcgagagctaccagcagggcgtgctgagcgccaccatcctgtacgagatcctgctgggcaaggccaccctgtacgccgtgctggtgtctgccctggtgctgatggctatggtcaagcggaaggacagccgggga

SEQ ID NO: 7343 - DNA, 324 bp, Artificial Sequence
  Synthetic Polynucleotide
agccggtactgcctgagcagcagactgagagtgtccgccaccttctggcagaacccccggaaccacttcagatgccaggtgcagttctacggcctgagcgagaacgacgagtggacccaggacagagccaagcccgtgacccagatcgtgtctgccgaagcctggggcagagccgattgcggctttaccagcgagagctaccagcagggcgtgctgagcgccaccatcctgtacgagatcctgctgggcaaggccaccctgtacgccgtgctggtgtctgccctggtgctgatggctatggtcaagcggaaggacagccgggga

SEQ ID NO: 7344 - DNA, 321 bp, Artificial Sequence
  Synthetic Polynucleotide
cggtactgcctgagcagcagactgagagtgtccgccaccttctggcagaacccccggaaccacttcagatgccaggtgcagttctacggcctgagcgagaacgacgagtggacccaggacagagccaagcccgtgacccagatcgtgtctgccgaagcctggggcagagccgattgcggctttaccagcgagagctaccagcagggcgtgctgagcgccaccatcctgtacgagatcctgctgggcaaggccaccctgtacgccgtgctggtgtctgccctggtgctgatggctatggtcaagcggaaggacagccgggga

SEQ ID NO: 7345 - DNA, 318 bp, Artificial Sequence
  Synthetic Polynucleotide
tactgcctgagcagcagactgagagtgtccgccaccttctggcagaacccccggaaccacttcagatgccaggtgcagttctacggcctgagcgagaacgacgagtggacccaggacagagccaagcccgtgacccagatcgtgtctgccgaagcctggggcagagccgattgcggctttaccagcgagagctaccagcagggcgtgctgagcgccaccatcctgtacgagatcctgctgggcaaggccaccctgtacgccgtgctggtgtctgccctggtgctgatggctatggtcaagcggaaggacagccgggga

SEQ ID NO: 7346 - DNA, 315 bp, Artificial Sequence
  Synthetic Polynucleotide
tgcctgagcagcagactgagagtgtccgccaccttctggcagaacccccggaaccacttcagatgccaggtgcagttctacggcctgagcgagaacgacgagtggacccaggacagagccaagcccgtgacccagatcgtgtctgccgaagcctggggcagagccgattgcggctttaccagcgagagctaccagcagggcgtgctgagcgccaccatcctgtacgagatcctgctgggcaaggccaccctgtacgccgtgctggtgtctgccctggtgctgatggctatggtcaagcggaaggacagccgggga

SEQ ID NO: 7347 - DNA, 312 bp, Artificial Sequence
  Synthetic Polynucleotide
ctgagcagcagactgagagtgtccgccaccttctggcagaacccccggaaccacttcagatgccaggtgcagttctacggcctgagcgagaacgacgagtggacccaggacagagccaagcccgtgacccagatcgtgtctgccgaagcctggggcagagccgattgcggctttaccagcgagagctaccagcagggcgtgctgagcgccaccatcctgtacgagatcctgctgggcaaggccaccctgtacgccgtgctggtgtctgccctggtgctgatggctatggtcaagcggaaggacagccgggga

SEQ ID NO: 7348 - DNA, 309 bp, Artificial Sequence
  Synthetic Polynucleotide
agcagcagactgagagtgtccgccaccttctggcagaacccccggaaccacttcagatgccaggtgcagttctacggcctgagcgagaacgacgagtggacccaggacagagccaagcccgtgacccagatcgtgtctgccgaagcctggggcagagccgattgcggctttaccagcgagagctaccagcagggcgtgctgagcgccaccatcctgtacgagatcctgctgggcaaggccaccctgtacgccgtgctggtgtctgccctggtgctgatggctatggtcaagcggaaggacagccgggga

SEQ ID NO: 7349 - DNA, 306 bp, Artificial Sequence
  Synthetic Polynucleotide
agcagactgagagtgtccgccaccttctggcagaacccccggaaccacttcagatgccaggtgcagttctacggcctgagcgagaacgacgagtggacccaggacagagccaagcccgtgacccagatcgtgtctgccgaagcctggggcagagccgattgcggctttaccagcgagagctaccagcagggcgtgctgagcgccaccatcctgtacgagatcctgctgggcaaggccaccctgtacgccgtgctggtgtctgccctggtgctgatggctatggtcaagcggaaggacagccgggga

SEQ ID NO: 7350 - DNA, 303 bp, Artificial Sequence
  Synthetic Polynucleotide
agactgagagtgtccgccaccttctggcagaacccccggaaccacttcagatgccaggtgcagttctacggcctgagcgagaacgacgagtggacccaggacagagccaagcccgtgacccagatcgtgtctgccgaagcctggggcagagccgattgcggctttaccagcgagagctaccagcagggcgtgctgagcgccaccatcctgtacgagatcctgctgggcaaggccaccctgtacgccgtgctggtgtctgccctggtgctgatggctatggtcaagcggaaggacagccgggga

SEQ ID NO: 7351 - DNA, 300 bp, Artificial Sequence
  Synthetic Polynucleotide
ctgagagtgtccgccaccttctggcagaacccccggaaccacttcagatgccaggtgcagttctacggcctgagcgagaacgacgagtggacccaggacagagccaagcccgtgacccagatcgtgtctgccgaagcctggggcagagccgattgcggctttaccagcgagagctaccagcagggcgtgctgagcgccaccatcctgtacgagatcctgctgggcaaggccaccctgtacgccgtgctggtgtctgccctggtgctgatggctatggtcaagcggaaggacagccgggga

SEQ ID NO: 7352 - DNA, 297 bp, Artificial Sequence
  Synthetic Polynucleotide
agagtgtccgccaccttctggcagaacccccggaaccacttcagatgccaggtgcagttctacggcctgagcgagaacgacgagtggacccaggacagagccaagcccgtgacccagatcgtgtctgccgaagcctggggcagagccgattgcggctttaccagcgagagctaccagcagggcgtgctgagcgccaccatcctgtacgagatcctgctgggcaaggccaccctgtacgccgtgctggtgtctgccctggtgctgatggctatggtcaagcggaaggacagccgggga

SEQ ID NO: 7353 - DNA, 294 bp, Artificial Sequence
  Synthetic Polynucleotide
gtgtccgccaccttctggcagaacccccggaaccacttcagatgccaggtgcagttctacggcctgagcgagaacgacgagtggacccaggacagagccaagcccgtgacccagatcgtgtctgccgaagcctggggcagagccgattgcggctttaccagcgagagctaccagcagggcgtgctgagcgccaccatcctgtacgagatcctgctgggcaaggccaccctgtacgccgtgctggtgtctgccctggtgctgatggctatggtcaagcggaaggacagccgggga

SEQ ID NO: 7354 - DNA, 291 bp, Artificial Sequence
  Synthetic Polynucleotide
tccgccaccttctggcagaacccccggaaccacttcagatgccaggtgcagttctacggcctgagcgagaacgacgagtggacccaggacagagccaagcccgtgacccagatcgtgtctgccgaagcctggggcagagccgattgcggctttaccagcgagagctaccagcagggcgtgctgagcgccaccatcctgtacgagatcctgctgggcaaggccaccctgtacgccgtgctggtgtctgccctggtgctgatggctatggtcaagcggaaggacagccgggga

SEQ ID NO: 7355 - DNA, 288 bp, Artificial Sequence
  Synthetic Polynucleotide
gccaccttctggcagaacccccggaaccacttcagatgccaggtgcagttctacggcctgagcgagaacgacgagtggacccaggacagagccaagcccgtgacccagatcgtgtctgccgaagcctggggcagagccgattgcggctttaccagcgagagctaccagcagggcgtgctgagcgccaccatcctgtacgagatcctgctgggcaaggccaccctgtacgccgtgctggtgtctgccctggtgctgatggctatggtcaagcggaaggacagccgggga

SEQ ID NO: 7356 - DNA, 285 bp, Artificial Sequence
  Synthetic Polynucleotide
accttctggcagaacccccggaaccacttcagatgccaggtgcagttctacggcctgagcgagaacgacgagtggacccaggacagagccaagcccgtgacccagatcgtgtctgccgaagcctggggcagagccgattgcggctttaccagcgagagctaccagcagggcgtgctgagcgccaccatcctgtacgagatcctgctgggcaaggccaccctgtacgccgtgctggtgtctgccctggtgctgatggctatggtcaagcggaaggacagccgggga

SEQ ID NO: 7357 - DNA, 282 bp, Artificial Sequence
  Synthetic Polynucleotide
ttctggcagaacccccggaaccacttcagatgccaggtgcagttctacggcctgagcgagaacgacgagtggacccaggacagagccaagcccgtgacccagatcgtgtctgccgaagcctggggcagagccgattgcggctttaccagcgagagctaccagcagggcgtgctgagcgccaccatcctgtacgagatcctgctgggcaaggccaccctgtacgccgtgctggtgtctgccctggtgctgatggctatggtcaagcggaaggacagccgggga

SEQ ID NO: 7358 - DNA, 279 bp, Artificial Sequence
  Synthetic Polynucleotide
tggcagaacccccggaaccacttcagatgccaggtgcagttctacggcctgagcgagaacgacgagtggacccaggacagagccaagcccgtgacccagatcgtgtctgccgaagcctggggcagagccgattgcggctttaccagcgagagctaccagcagggcgtgctgagcgccaccatcctgtacgagatcctgctgggcaaggccaccctgtacgccgtgctggtgtctgccctggtgctgatggctatggtcaagcggaaggacagccgggga

SEQ ID NO: 7359 - DNA, 276 bp, Artificial Sequence
  Synthetic Polynucleotide
cagaacccccggaaccacttcagatgccaggtgcagttctacggcctgagcgagaacgacgagtggacccaggacagagccaagcccgtgacccagatcgtgtctgccgaagcctggggcagagccgattgcggctttaccagcgagagctaccagcagggcgtgctgagcgccaccatcctgtacgagatcctgctgggcaaggccaccctgtacgccgtgctggtgtctgccctggtgctgatggctatggtcaagcggaaggacagccgggga

SEQ ID NO: 7360 - DNA, 273 bp, Artificial Sequence
  Synthetic Polynucleotide
aacccccggaaccacttcagatgccaggtgcagttctacggcctgagcgagaacgacgagtggacccaggacagagccaagcccgtgacccagatcgtgtctgccgaagcctggggcagagccgattgcggctttaccagcgagagctaccagcagggcgtgctgagcgccaccatcctgtacgagatcctgctgggcaaggccaccctgtacgccgtgctggtgtctgccctggtgctgatggctatggtcaagcggaaggacagccgggga

SEQ ID NO: 7361 - DNA, 270 bp, Artificial Sequence
  Synthetic Polynucleotide
ccccggaaccacttcagatgccaggtgcagttctacggcctgagcgagaacgacgagtggacccaggacagagccaagcccgtgacccagatcgtgtctgccgaagcctggggcagagccgattgcggctttaccagcgagagctaccagcagggcgtgctgagcgccaccatcctgtacgagatcctgctgggcaaggccaccctgtacgccgtgctggtgtctgccctggtgctgatggctatggtcaagcggaaggacagccgggga

SEQ ID NO: 7362 - DNA, 267 bp, Artificial Sequence
  Synthetic Polynucleotide
cggaaccacttcagatgccaggtgcagttctacggcctgagcgagaacgacgagtggacccaggacagagccaagcccgtgacccagatcgtgtctgccgaagcctggggcagagccgattgcggctttaccagcgagagctaccagcagggcgtgctgagcgccaccatcctgtacgagatcctgctgggcaaggccaccctgtacgccgtgctggtgtctgccctggtgctgatggctatggtcaagcggaaggacagccgggga

SEQ ID NO: 7363 - DNA, 264 bp, Artificial Sequence
  Synthetic Polynucleotide
aaccacttcagatgccaggtgcagttctacggcctgagcgagaacgacgagtggacccaggacagagccaagcccgtgacccagatcgtgtctgccgaagcctggggcagagccgattgcggctttaccagcgagagctaccagcagggcgtgctgagcgccaccatcctgtacgagatcctgctgggcaaggccaccctgtacgccgtgctggtgtctgccctggtgctgatggctatggtcaagcggaaggacagccgggga

SEQ ID NO: 7364 - DNA, 261 bp, Artificial Sequence
  Synthetic Polynucleotide
cacttcagatgccaggtgcagttctacggcctgagcgagaacgacgagtggacccaggacagagccaagcccgtgacccagatcgtgtctgccgaagcctggggcagagccgattgcggctttaccagcgagagctaccagcagggcgtgctgagcgccaccatcctgtacgagatcctgctgggcaaggccaccctgtacgccgtgctggtgtctgccctggtgctgatggctatggtcaagcggaaggacagccgggga

SEQ ID NO: 7365 - DNA, 258 bp, Artificial Sequence
  Synthetic Polynucleotide
ttcagatgccaggtgcagttctacggcctgagcgagaacgacgagtggacccaggacagagccaagcccgtgacccagatcgtgtctgccgaagcctggggcagagccgattgcggctttaccagcgagagctaccagcagggcgtgctgagcgccaccatcctgtacgagatcctgctgggcaaggccaccctgtacgccgtgctggtgtctgccctggtgctgatggctatggtcaagcggaaggacagccgggga

SEQ ID NO: 7366 - DNA, 255 bp, Artificial Sequence
  Synthetic Polynucleotide
agatgccaggtgcagttctacggcctgagcgagaacgacgagtggacccaggacagagccaagcccgtgacccagatcgtgtctgccgaagcctggggcagagccgattgcggctttaccagcgagagctaccagcagggcgtgctgagcgccaccatcctgtacgagatcctgctgggcaaggccaccctgtacgccgtgctggtgtctgccctggtgctgatggctatggtcaagcggaaggacagccgggga

SEQ ID NO: 7367 - DNA, 252 bp, Artificial Sequence
  Synthetic Polynucleotide
tgccaggtgcagttctacggcctgagcgagaacgacgagtggacccaggacagagccaagcccgtgacccagatcgtgtctgccgaagcctggggcagagccgattgcggctttaccagcgagagctaccagcagggcgtgctgagcgccaccatcctgtacgagatcctgctgggcaaggccaccctgtacgccgtgctggtgtctgccctggtgctgatggctatggtcaagcggaaggacagccgggga

SEQ ID NO: 7368 - DNA, 249 bp, Artificial Sequence
  Synthetic Polynucleotide
caggtgcagttctacggcctgagcgagaacgacgagtggacccaggacagagccaagcccgtgacccagatcgtgtctgccgaagcctggggcagagccgattgcggctttaccagcgagagctaccagcagggcgtgctgagcgccaccatcctgtacgagatcctgctgggcaaggccaccctgtacgccgtgctggtgtctgccctggtgctgatggctatggtcaagcggaaggacagccgggga

SEQ ID NO: 7369 - DNA, 246 bp, Artificial Sequence
  Synthetic Polynucleotide
gtgcagttctacggcctgagcgagaacgacgagtggacccaggacagagccaagcccgtgacccagatcgtgtctgccgaagcctggggcagagccgattgcggctttaccagcgagagctaccagcagggcgtgctgagcgccaccatcctgtacgagatcctgctgggcaaggccaccctgtacgccgtgctggtgtctgccctggtgctgatggctatggtcaagcggaaggacagccgggga

SEQ ID NO: 7370 - DNA, 243 bp, Artificial Sequence
  Synthetic Polynucleotide
cagttctacggcctgagcgagaacgacgagtggacccaggacagagccaagcccgtgacccagatcgtgtctgccgaagcctggggcagagccgattgcggctttaccagcgagagctaccagcagggcgtgctgagcgccaccatcctgtacgagatcctgctgggcaaggccaccctgtacgccgtgctggtgtctgccctggtgctgatggctatggtcaagcggaaggacagccgggga

SEQ ID NO: 7371 - DNA, 240 bp, Artificial Sequence
  Synthetic Polynucleotide
ttctacggcctgagcgagaacgacgagtggacccaggacagagccaagcccgtgacccagatcgtgtctgccgaagcctggggcagagccgattgcggctttaccagcgagagctaccagcagggcgtgctgagcgccaccatcctgtacgagatcctgctgggcaaggccaccctgtacgccgtgctggtgtctgccctggtgctgatggctatggtcaagcggaaggacagccgggga

SEQ ID NO: 7372 - DNA, 237 bp, Artificial Sequence
  Synthetic Polynucleotide
tacggcctgagcgagaacgacgagtggacccaggacagagccaagcccgtgacccagatcgtgtctgccgaagcctggggcagagccgattgcggctttaccagcgagagctaccagcagggcgtgctgagcgccaccatcctgtacgagatcctgctgggcaaggccaccctgtacgccgtgctggtgtctgccctggtgctgatggctatggtcaagcggaaggacagccgggga

SEQ ID NO: 7373 - DNA, 234 bp, Artificial Sequence
  Synthetic Polynucleotide
ggcctgagcgagaacgacgagtggacccaggacagagccaagcccgtgacccagatcgtgtctgccgaagcctggggcagagccgattgcggctttaccagcgagagctaccagcagggcgtgctgagcgccaccatcctgtacgagatcctgctgggcaaggccaccctgtacgccgtgctggtgtctgccctggtgctgatggctatggtcaagcggaaggacagccgggga

SEQ ID NO: 7374 - DNA, 231 bp, Artificial Sequence
  Synthetic Polynucleotide
ctgagcgagaacgacgagtggacccaggacagagccaagcccgtgacccagatcgtgtctgccgaagcctggggcagagccgattgcggctttaccagcgagagctaccagcagggcgtgctgagcgccaccatcctgtacgagatcctgctgggcaaggccaccctgtacgccgtgctggtgtctgccctggtgctgatggctatggtcaagcggaaggacagccgggga

SEQ ID NO: 7375 - DNA, 228 bp, Artificial Sequence
  Synthetic Polynucleotide
agcgagaacgacgagtggacccaggacagagccaagcccgtgacccagatcgtgtctgccgaagcctggggcagagccgattgcggctttaccagcgagagctaccagcagggcgtgctgagcgccaccatcctgtacgagatcctgctgggcaaggccaccctgtacgccgtgctggtgtctgccctggtgctgatggctatggtcaagcggaaggacagccgggga

SEQ ID NO: 7376 - DNA, 225 bp, Artificial Sequence
  Synthetic Polynucleotide
gagaacgacgagtggacccaggacagagccaagcccgtgacccagatcgtgtctgccgaagcctggggcagagccgattgcggctttaccagcgagagctaccagcagggcgtgctgagcgccaccatcctgtacgagatcctgctgggcaaggccaccctgtacgccgtgctggtgtctgccctggtgctgatggctatggtcaagcggaaggacagccgggga

SEQ ID NO: 7377 - DNA, 222 bp, Artificial Sequence
  Synthetic Polynucleotide
aacgacgagtggacccaggacagagccaagcccgtgacccagatcgtgtctgccgaagcctggggcagagccgattgcggctttaccagcgagagctaccagcagggcgtgctgagcgccaccatcctgtacgagatcctgctgggcaaggccaccctgtacgccgtgctggtgtctgccctggtgctgatggctatggtcaagcggaaggacagccgggga

SEQ ID NO: 7378 - DNA, 219 bp, Artificial Sequence
  Synthetic Polynucleotide
gacgagtggacccaggacagagccaagcccgtgacccagatcgtgtctgccgaagcctggggcagagccgattgcggctttaccagcgagagctaccagcagggcgtgctgagcgccaccatcctgtacgagatcctgctgggcaaggccaccctgtacgccgtgctggtgtctgccctggtgctgatggctatggtcaagcggaaggacagccgggga

SEQ ID NO: 7379 - DNA, 216 bp, Artificial Sequence
  Synthetic Polynucleotide
gagtggacccaggacagagccaagcccgtgacccagatcgtgtctgccgaagcctggggcagagccgattgcggctttaccagcgagagctaccagcagggcgtgctgagcgccaccatcctgtacgagatcctgctgggcaaggccaccctgtacgccgtgctggtgtctgccctggtgctgatggctatggtcaagcggaaggacagccgggga

SEQ ID NO: 7380 - DNA, 213 bp, Artificial Sequence
  Synthetic Polynucleotide
tggacccaggacagagccaagcccgtgacccagatcgtgtctgccgaagcctggggcagagccgattgcggctttaccagcgagagctaccagcagggcgtgctgagcgccaccatcctgtacgagatcctgctgggcaaggccaccctgtacgccgtgctggtgtctgccctggtgctgatggctatggtcaagcggaaggacagccgggga

SEQ ID NO: 7381 - DNA, 210 bp, Artificial Sequence
  Synthetic Polynucleotide
acccaggacagagccaagcccgtgacccagatcgtgtctgccgaagcctggggcagagccgattgcggctttaccagcgagagctaccagcagggcgtgctgagcgccaccatcctgtacgagatcctgctgggcaaggccaccctgtacgccgtgctggtgtctgccctggtgctgatggctatggtcaagcggaaggacagccgggga

SEQ ID NO: 7382 - DNA, 207 bp, Artificial Sequence
  Synthetic Polynucleotide
caggacagagccaagcccgtgacccagatcgtgtctgccgaagcctggggcagagccgattgcggctttaccagcgagagctaccagcagggcgtgctgagcgccaccatcctgtacgagatcctgctgggcaaggccaccctgtacgccgtgctggtgtctgccctggtgctgatggctatggtcaagcggaaggacagccgggga

SEQ ID NO: 7383 - DNA, 204 bp, Artificial Sequence
  Synthetic Polynucleotide
gacagagccaagcccgtgacccagatcgtgtctgccgaagcctggggcagagccgattgcggctttaccagcgagagctaccagcagggcgtgctgagcgccaccatcctgtacgagatcctgctgggcaaggccaccctgtacgccgtgctggtgtctgccctggtgctgatggctatggtcaagcggaaggacagccgggga

SEQ ID NO: 7384 - DNA, 201 bp, Artificial Sequence
  Synthetic Polynucleotide
agagccaagcccgtgacccagatcgtgtctgccgaagcctggggcagagccgattgcggctttaccagcgagagctaccagcagggcgtgctgagcgccaccatcctgtacgagatcctgctgggcaaggccaccctgtacgccgtgctggtgtctgccctggtgctgatggctatggtcaagcggaaggacagccgggga

SEQ ID NO: 7385 - DNA, 198 bp, Artificial Sequence
  Synthetic Polynucleotide
gccaagcccgtgacccagatcgtgtctgccgaagcctggggcagagccgattgcggctttaccagcgagagctaccagcagggcgtgctgagcgccaccatcctgtacgagatcctgctgggcaaggccaccctgtacgccgtgctggtgtctgccctggtgctgatggctatggtcaagcggaaggacagccgggga

SEQ ID NO: 7386 - DNA, 195 bp, Artificial Sequence
  Synthetic Polynucleotide
aagcccgtgacccagatcgtgtctgccgaagcctggggcagagccgattgcggctttaccagcgagagctaccagcagggcgtgctgagcgccaccatcctgtacgagatcctgctgggcaaggccaccctgtacgccgtgctggtgtctgccctggtgctgatggctatggtcaagcggaaggacagccgggga

SEQ ID NO: 7387 - DNA, 192 bp, Artificial Sequence
  Synthetic Polynucleotide
cccgtgacccagatcgtgtctgccgaagcctggggcagagccgattgcggctttaccagcgagagctaccagcagggcgtgctgagcgccaccatcctgtacgagatcctgctgggcaaggccaccctgtacgccgtgctggtgtctgccctggtgctgatggctatggtcaagcggaaggacagccgggga

SEQ ID NO: 7388 - DNA, 189 bp, Artificial Sequence
  Synthetic Polynucleotide
gtgacccagatcgtgtctgccgaagcctggggcagagccgattgcggctttaccagcgagagctaccagcagggcgtgctgagcgccaccatcctgtacgagatcctgctgggcaaggccaccctgtacgccgtgctggtgtctgccctggtgctgatggctatggtcaagcggaaggacagccgggga

SEQ ID NO: 7389 - DNA, 186 bp, Artificial Sequence
  Synthetic Polynucleotide
acccagatcgtgtctgccgaagcctggggcagagccgattgcggctttaccagcgagagctaccagcagggcgtgctgagcgccaccatcctgtacgagatcctgctgggcaaggccaccctgtacgccgtgctggtgtctgccctggtgctgatggctatggtcaagcggaaggacagccgggga

SEQ ID NO: 7390 - DNA, 183 bp, Artificial Sequence
  Synthetic Polynucleotide
cagatcgtgtctgccgaagcctggggcagagccgattgcggctttaccagcgagagctaccagcagggcgtgctgagcgccaccatcctgtacgagatcctgctgggcaaggccaccctgtacgccgtgctggtgtctgccctggtgctgatggctatggtcaagcggaaggacagccgggga

SEQ ID NO: 7391 - DNA, 180 bp, Artificial Sequence
  Synthetic Polynucleotide
atcgtgtctgccgaagcctggggcagagccgattgcggctttaccagcgagagctaccagcagggcgtgctgagcgccaccatcctgtacgagatcctgctgggcaaggccaccctgtacgccgtgctggtgtctgccctggtgctgatggctatggtcaagcggaaggacagccgggga

SEQ ID NO: 7392 - DNA, 177 bp, Artificial Sequence
  Synthetic Polynucleotide
gtgtctgccgaagcctggggcagagccgattgcggctttaccagcgagagctaccagcagggcgtgctgagcgccaccatcctgtacgagatcctgctgggcaaggccaccctgtacgccgtgctggtgtctgccctggtgctgatggctatggtcaagcggaaggacagccgggga

SEQ ID NO: 7393 - DNA, 174 bp, Artificial Sequence
  Synthetic Polynucleotide
tctgccgaagcctggggcagagccgattgcggctttaccagcgagagctaccagcagggcgtgctgagcgccaccatcctgtacgagatcctgctgggcaaggccaccctgtacgccgtgctggtgtctgccctggtgctgatggctatggtcaagcggaaggacagccgggga

SEQ ID NO: 7394 - DNA, 171 bp, Artificial Sequence
  Synthetic Polynucleotide
gccgaagcctggggcagagccgattgcggctttaccagcgagagctaccagcagggcgtgctgagcgccaccatcctgtacgagatcctgctgggcaaggccaccctgtacgccgtgctggtgtctgccctggtgctgatggctatggtcaagcggaaggacagccgggga

SEQ ID NO: 7395 - DNA, 168 bp, Artificial Sequence
  Synthetic Polynucleotide
gaagcctggggcagagccgattgcggctttaccagcgagagctaccagcagggcgtgctgagcgccaccatcctgtacgagatcctgctgggcaaggccaccctgtacgccgtgctggtgtctgccctggtgctgatggctatggtcaagcggaaggacagccgggga

SEQ ID NO: 7396 - DNA, 165 bp, Artificial Sequence
  Synthetic Polynucleotide
gcctggggcagagccgattgcggctttaccagcgagagctaccagcagggcgtgctgagcgccaccatcctgtacgagatcctgctgggcaaggccaccctgtacgccgtgctggtgtctgccctggtgctgatggctatggtcaagcggaaggacagccgggga

SEQ ID NO: 7397 - DNA, 162 bp, Artificial Sequence
  Synthetic Polynucleotide
tggggcagagccgattgcggctttaccagcgagagctaccagcagggcgtgctgagcgccaccatcctgtacgagatcctgctgggcaaggccaccctgtacgccgtgctggtgtctgccctggtgctgatggctatggtcaagcggaaggacagccgggga

SEQ ID NO: 7398 - DNA, 159 bp, Artificial Sequence; identical to SEQ ID NO: 1126
  Synthetic Polynucleotide

SEQ ID NO: 7399 - DNA, 519 bp, Artificial Sequence; identical to SEQ ID NO: 1082
  Synthetic Polynucleotide

SEQ ID NO: 7400 - DNA, 516 bp, Artificial Sequence
  Synthetic Polynucleotide
aagcagctggacgccgacgtgtcccccaagcctaccatcttcctgccctctatcgccgagacaaagctccagaaggccggcacctacctgtgcctgctggaaaagttcttcccagatgtgattaagatccactggcaggaaaagaagtccaacaccatcctgggcagccaggaaggcaacaccatgaagaccaacgacacctacatgaagttcagctggctgaccgtgcccgagaagtccctggacaaagaacacagatgcatcgtgcggcacgaaaacaacaagaacggcgtggaccaggaaatcatcttcccacccatcaagaccgatgtgattacaatggaccccaaggacaactgctccaaggacgccaacgataccctgctgctccagctgaccaacaccagcgcctactacatgtacttgttgctgctgctgaagtccgtggtgtacttcgccatcatcacatgctgcctgctgcggagaaccgccttctgctgcaacggcgagaagtct

SEQ ID NO: 7401 - DNA, 513 bp, Artificial Sequence
  Synthetic Polynucleotide
cagctggacgccgacgtgtcccccaagcctaccatcttcctgccctctatcgccgagacaaagctccagaaggccggcacctacctgtgcctgctggaaaagttcttcccagatgtgattaagatccactggcaggaaaagaagtccaacaccatcctgggcagccaggaaggcaacaccatgaagaccaacgacacctacatgaagttcagctggctgaccgtgcccgagaagtccctggacaaagaacacagatgcatcgtgcggcacgaaaacaacaagaacggcgtggaccaggaaatcatcttcccacccatcaagaccgatgtgattacaatggaccccaaggacaactgctccaaggacgccaacgataccctgctgctccagctgaccaacaccagcgcctactacatgtacttgttgctgctgctgaagtccgtggtgtacttcgccatcatcacatgctgcctgctgcggagaaccgccttctgctgcaacggcgagaagtct

SEQ ID NO: 7402 - DNA, 510 bp, Artificial Sequence
  Synthetic Polynucleotide
ctggacgccgacgtgtcccccaagcctaccatcttcctgccctctatcgccgagacaaagctccagaaggccggcacctacctgtgcctgctggaaaagttcttcccagatgtgattaagatccactggcaggaaaagaagtccaacaccatcctgggcagccaggaaggcaacaccatgaagaccaacgacacctacatgaagttcagctggctgaccgtgcccgagaagtccctggacaaagaacacagatgcatcgtgcggcacgaaaacaacaagaacggcgtggaccaggaaatcatcttcccacccatcaagaccgatgtgattacaatggaccccaaggacaactgctccaaggacgccaacgataccctgctgctccagctgaccaacaccagcgcctactacatgtacttgttgctgctgctgaagtccgtggtgtacttcgccatcatcacatgctgcctgctgcggagaaccgccttctgctgcaacggcgagaagtct

SEQ ID NO: 7403 - DNA, 507 bp, Artificial Sequence
  Synthetic Polynucleotide
gacgccgacgtgtcccccaagcctaccatcttcctgccctctatcgccgagacaaagctccagaaggccggcacctacctgtgcctgctggaaaagttcttcccagatgtgattaagatccactggcaggaaaagaagtccaacaccatcctgggcagccaggaaggcaacaccatgaagaccaacgacacctacatgaagttcagctggctgaccgtgcccgagaagtccctggacaaagaacacagatgcatcgtgcggcacgaaaacaacaagaacggcgtggaccaggaaatcatcttcccacccatcaagaccgatgtgattacaatggaccccaaggacaactgctccaaggacgccaacgataccctgctgctccagctgaccaacaccagcgcctactacatgtacttgttgctgctgctgaagtccgtggtgtacttcgccatcatcacatgctgcctgctgcggagaaccgccttctgctgcaacggcgagaagtct

SEQ ID NO: 7404 - DNA, 504 bp, Artificial Sequence; identical to SEQ ID NO: 1129
  Synthetic Polynucleotide

SEQ ID NO: 7405 - DNA, 501 bp, Artificial Sequence
  Synthetic Polynucleotide
gacgtgtcccccaagcctaccatcttcctgccctctatcgccgagacaaagctccagaaggccggcacctacctgtgcctgctggaaaagttcttcccagatgtgattaagatccactggcaggaaaagaagtccaacaccatcctgggcagccaggaaggcaacaccatgaagaccaacgacacctacatgaagttcagctggctgaccgtgcccgagaagtccctggacaaagaacacagatgcatcgtgcggcacgaaaacaacaagaacggcgtggaccaggaaatcatcttcccacccatcaagaccgatgtgattacaatggaccccaaggacaactgctccaaggacgccaacgataccctgctgctccagctgaccaacaccagcgcctactacatgtacttgttgctgctgctgaagtccgtggtgtacttcgccatcatcacatgctgcctgctgcggagaaccgccttctgctgcaacggcgagaagtct

SEQ ID NO: 7406 - DNA, 498 bp, Artificial Sequence; identical to SEQ ID NO: 1130
  Synthetic Polynucleotide

SEQ ID NO: 7407 - DNA, 495 bp, Artificial Sequence
  Synthetic Polynucleotide
tcccccaagcctaccatcttcctgccctctatcgccgagacaaagctccagaaggccggcacctacctgtgcctgctggaaaagttcttcccagatgtgattaagatccactggcaggaaaagaagtccaacaccatcctgggcagccaggaaggcaacaccatgaagaccaacgacacctacatgaagttcagctggctgaccgtgcccgagaagtccctggacaaagaacacagatgcatcgtgcggcacgaaaacaacaagaacggcgtggaccaggaaatcatcttcccacccatcaagaccgatgtgattacaatggaccccaaggacaactgctccaaggacgccaacgataccctgctgctccagctgaccaacaccagcgcctactacatgtacttgttgctgctgctgaagtccgtggtgtacttcgccatcatcacatgctgcctgctgcggagaaccgccttctgctgcaacggcgagaagtct

SEQ ID NO: 7408 - DNA, 492 bp, Artificial Sequence
  Synthetic Polynucleotide
cccaagcctaccatcttcctgccctctatcgccgagacaaagctccagaaggccggcacctacctgtgcctgctggaaaagttcttcccagatgtgattaagatccactggcaggaaaagaagtccaacaccatcctgggcagccaggaaggcaacaccatgaagaccaacgacacctacatgaagttcagctggctgaccgtgcccgagaagtccctggacaaagaacacagatgcatcgtgcggcacgaaaacaacaagaacggcgtggaccaggaaatcatcttcccacccatcaagaccgatgtgattacaatggaccccaaggacaactgctccaaggacgccaacgataccctgctgctccagctgaccaacaccagcgcctactacatgtacttgttgctgctgctgaagtccgtggtgtacttcgccatcatcacatgctgcctgctgcggagaaccgccttctgctgcaacggcgagaagtct

SEQ ID NO: 7409 - DNA, 489 bp, Artificial Sequence
  Synthetic Polynucleotide
aagcctaccatcttcctgccctctatcgccgagacaaagctccagaaggccggcacctacctgtgcctgctggaaaagttcttcccagatgtgattaagatccactggcaggaaaagaagtccaacaccatcctgggcagccaggaaggcaacaccatgaagaccaacgacacctacatgaagttcagctggctgaccgtgcccgagaagtccctggacaaagaacacagatgcatcgtgcggcacgaaaacaacaagaacggcgtggaccaggaaatcatcttcccacccatcaagaccgatgtgattacaatggaccccaaggacaactgctccaaggacgccaacgataccctgctgctccagctgaccaacaccagcgcctactacatgtacttgttgctgctgctgaagtccgtggtgtacttcgccatcatcacatgctgcctgctgcggagaaccgccttctgctgcaacggcgagaagtct

SEQ ID NO: 7410 - DNA, 486 bp, Artificial Sequence
  Synthetic Polynucleotide
cctaccatcttcctgccctctatcgccgagacaaagctccagaaggccggcacctacctgtgcctgctggaaaagttcttcccagatgtgattaagatccactggcaggaaaagaagtccaacaccatcctgggcagccaggaaggcaacaccatgaagaccaacgacacctacatgaagttcagctggctgaccgtgcccgagaagtccctggacaaagaacacagatgcatcgtgcggcacgaaaacaacaagaacggcgtggaccaggaaatcatcttcccacccatcaagaccgatgtgattacaatggaccccaaggacaactgctccaaggacgccaacgataccctgctgctccagctgaccaacaccagcgcctactacatgtacttgttgctgctgctgaagtccgtggtgtacttcgccatcatcacatgctgcctgctgcggagaaccgccttctgctgcaacggcgagaagtct

SEQ ID NO: 7411 - DNA, 483 bp, Artificial Sequence; identical to SEQ ID NO: 1131
  Synthetic Polynucleotide

SEQ ID NO: 7412 - DNA, 480 bp, Artificial Sequence
  Synthetic Polynucleotide
atcttcctgccctctatcgccgagacaaagctccagaaggccggcacctacctgtgcctgctggaaaagttcttcccagatgtgattaagatccactggcaggaaaagaagtccaacaccatcctgggcagccaggaaggcaacaccatgaagaccaacgacacctacatgaagttcagctggctgaccgtgcccgagaagtccctggacaaagaacacagatgcatcgtgcggcacgaaaacaacaagaacggcgtggaccaggaaatcatcttcccacccatcaagaccgatgtgattacaatggaccccaaggacaactgctccaaggacgccaacgataccctgctgctccagctgaccaacaccagcgcctactacatgtacttgttgctgctgctgaagtccgtggtgtacttcgccatcatcacatgctgcctgctgcggagaaccgccttctgctgcaacggcgagaagtct

SEQ ID NO: 7413 - DNA, 477 bp, Artificial Sequence
  Synthetic Polynucleotide
ttcctgccctctatcgccgagacaaagctccagaaggccggcacctacctgtgcctgctggaaaagttcttcccagatgtgattaagatccactggcaggaaaagaagtccaacaccatcctgggcagccaggaaggcaacaccatgaagaccaacgacacctacatgaagttcagctggctgaccgtgcccgagaagtccctggacaaagaacacagatgcatcgtgcggcacgaaaacaacaagaacggcgtggaccaggaaatcatcttcccacccatcaagaccgatgtgattacaatggaccccaaggacaactgctccaaggacgccaacgataccctgctgctccagctgaccaacaccagcgcctactacatgtacttgttgctgctgctgaagtccgtggtgtacttcgccatcatcacatgctgcctgctgcggagaaccgccttctgctgcaacggcgagaagtct

SEQ ID NO: 7414 - DNA, 474 bp, Artificial Sequence
  Synthetic Polynucleotide
ctgccctctatcgccgagacaaagctccagaaggccggcacctacctgtgcctgctggaaaagttcttcccagatgtgattaagatccactggcaggaaaagaagtccaacaccatcctgggcagccaggaaggcaacaccatgaagaccaacgacacctacatgaagttcagctggctgaccgtgcccgagaagtccctggacaaagaacacagatgcatcgtgcggcacgaaaacaacaagaacggcgtggaccaggaaatcatcttcccacccatcaagaccgatgtgattacaatggaccccaaggacaactgctccaaggacgccaacgataccctgctgctccagctgaccaacaccagcgcctactacatgtacttgttgctgctgctgaagtccgtggtgtacttcgccatcatcacatgctgcctgctgcggagaaccgccttctgctgcaacggcgagaagtct

SEQ ID NO: 7415 - DNA, 471 bp, Artificial Sequence
  Synthetic Polynucleotide
ccctctatcgccgagacaaagctccagaaggccggcacctacctgtgcctgctggaaaagttcttcccagatgtgattaagatccactggcaggaaaagaagtccaacaccatcctgggcagccaggaaggcaacaccatgaagaccaacgacacctacatgaagttcagctggctgaccgtgcccgagaagtccctggacaaagaacacagatgcatcgtgcggcacgaaaacaacaagaacggcgtggaccaggaaatcatcttcccacccatcaagaccgatgtgattacaatggaccccaaggacaactgctccaaggacgccaacgataccctgctgctccagctgaccaacaccagcgcctactacatgtacttgttgctgctgctgaagtccgtggtgtacttcgccatcatcacatgctgcctgctgcggagaaccgccttctgctgcaacggcgagaagtct

SEQ ID NO: 7416 - DNA, 468 bp, Artificial Sequence
  Synthetic Polynucleotide
tctatcgccgagacaaagctccagaaggccggcacctacctgtgcctgctggaaaagttcttcccagatgtgattaagatccactggcaggaaaagaagtccaacaccatcctgggcagccaggaaggcaacaccatgaagaccaacgacacctacatgaagttcagctggctgaccgtgcccgagaagtccctggacaaagaacacagatgcatcgtgcggcacgaaaacaacaagaacggcgtggaccaggaaatcatcttcccacccatcaagaccgatgtgattacaatggaccccaaggacaactgctccaaggacgccaacgataccctgctgctccagctgaccaacaccagcgcctactacatgtacttgttgctgctgctgaagtccgtggtgtacttcgccatcatcacatgctgcctgctgcggagaaccgccttctgctgcaacggcgagaagtct

SEQ ID NO: 7417 - DNA, 465 bp, Artificial Sequence
  Synthetic Polynucleotide
atcgccgagacaaagctccagaaggccggcacctacctgtgcctgctggaaaagttcttcccagatgtgattaagatccactggcaggaaaagaagtccaacaccatcctgggcagccaggaaggcaacaccatgaagaccaacgacacctacatgaagttcagctggctgaccgtgcccgagaagtccctggacaaagaacacagatgcatcgtgcggcacgaaaacaacaagaacggcgtggaccaggaaatcatcttcccacccatcaagaccgatgtgattacaatggaccccaaggacaactgctccaaggacgccaacgataccctgctgctccagctgaccaacaccagcgcctactacatgtacttgttgctgctgctgaagtccgtggtgtacttcgccatcatcacatgctgcctgctgcggagaaccgccttctgctgcaacggcgagaagtct

SEQ ID NO: 7418 - DNA, 462 bp, Artificial Sequence
  Synthetic Polynucleotide
gccgagacaaagctccagaaggccggcacctacctgtgcctgctggaaaagttcttcccagatgtgattaagatccactggcaggaaaagaagtccaacaccatcctgggcagccaggaaggcaacaccatgaagaccaacgacacctacatgaagttcagctggctgaccgtgcccgagaagtccctggacaaagaacacagatgcatcgtgcggcacgaaaacaacaagaacggcgtggaccaggaaatcatcttcccacccatcaagaccgatgtgattacaatggaccccaaggacaactgctccaaggacgccaacgataccctgctgctccagctgaccaacaccagcgcctactacatgtacttgttgctgctgctgaagtccgtggtgtacttcgccatcatcacatgctgcctgctgcggagaaccgccttctgctgcaacggcgagaagtct

SEQ ID NO: 7419 - DNA, 459 bp, Artificial Sequence
  Synthetic Polynucleotide
gagacaaagctccagaaggccggcacctacctgtgcctgctggaaaagttcttcccagatgtgattaagatccactggcaggaaaagaagtccaacaccatcctgggcagccaggaaggcaacaccatgaagaccaacgacacctacatgaagttcagctggctgaccgtgcccgagaagtccctggacaaagaacacagatgcatcgtgcggcacgaaaacaacaagaacggcgtggaccaggaaatcatcttcccacccatcaagaccgatgtgattacaatggaccccaaggacaactgctccaaggacgccaacgataccctgctgctccagctgaccaacaccagcgcctactacatgtacttgttgctgctgctgaagtccgtggtgtacttcgccatcatcacatgctgcctgctgcggagaaccgccttctgctgcaacggcgagaagtct

SEQ ID NO: 7420 - DNA, 456 bp, Artificial Sequence
  Synthetic Polynucleotide
acaaagctccagaaggccggcacctacctgtgcctgctggaaaagttcttcccagatgtgattaagatccactggcaggaaaagaagtccaacaccatcctgggcagccaggaaggcaacaccatgaagaccaacgacacctacatgaagttcagctggctgaccgtgcccgagaagtccctggacaaagaacacagatgcatcgtgcggcacgaaaacaacaagaacggcgtggaccaggaaatcatcttcccacccatcaagaccgatgtgattacaatggaccccaaggacaactgctccaaggacgccaacgataccctgctgctccagctgaccaacaccagcgcctactacatgtacttgttgctgctgctgaagtccgtggtgtacttcgccatcatcacatgctgcctgctgcggagaaccgccttctgctgcaacggcgagaagtct

SEQ ID NO: 7421 - DNA, 453 bp, Artificial Sequence
  Synthetic Polynucleotide
aagctccagaaggccggcacctacctgtgcctgctggaaaagttcttcccagatgtgattaagatccactggcaggaaaagaagtccaacaccatcctgggcagccaggaaggcaacaccatgaagaccaacgacacctacatgaagttcagctggctgaccgtgcccgagaagtccctggacaaagaacacagatgcatcgtgcggcacgaaaacaacaagaacggcgtggaccaggaaatcatcttcccacccatcaagaccgatgtgattacaatggaccccaaggacaactgctccaaggacgccaacgataccctgctgctccagctgaccaacaccagcgcctactacatgtacttgttgctgctgctgaagtccgtggtgtacttcgccatcatcacatgctgcctgctgcggagaaccgccttctgctgcaacggcgagaagtct

SEQ ID NO: 7422 - DNA, 450 bp, Artificial Sequence
  Synthetic Polynucleotide
ctccagaaggccggcacctacctgtgcctgctggaaaagttcttcccagatgtgattaagatccactggcaggaaaagaagtccaacaccatcctgggcagccaggaaggcaacaccatgaagaccaacgacacctacatgaagttcagctggctgaccgtgcccgagaagtccctggacaaagaacacagatgcatcgtgcggcacgaaaacaacaagaacggcgtggaccaggaaatcatcttcccacccatcaagaccgatgtgattacaatggaccccaaggacaactgctccaaggacgccaacgataccctgctgctccagctgaccaacaccagcgcctactacatgtacttgttgctgctgctgaagtccgtggtgtacttcgccatcatcacatgctgcctgctgcggagaaccgccttctgctgcaacggcgagaagtct

SEQ ID NO: 7423 - DNA, 447 bp, Artificial Sequence
  Synthetic Polynucleotide
cagaaggccggcacctacctgtgcctgctggaaaagttcttcccagatgtgattaagatccactggcaggaaaagaagtccaacaccatcctgggcagccaggaaggcaacaccatgaagaccaacgacacctacatgaagttcagctggctgaccgtgcccgagaagtccctggacaaagaacacagatgcatcgtgcggcacgaaaacaacaagaacggcgtggaccaggaaatcatcttcccacccatcaagaccgatgtgattacaatggaccccaaggacaactgctccaaggacgccaacgataccctgctgctccagctgaccaacaccagcgcctactacatgtacttgttgctgctgctgaagtccgtggtgtacttcgccatcatcacatgctgcctgctgcggagaaccgccttctgctgcaacggcgagaagtct

SEQ ID NO: 7424 - DNA, 444 bp, Artificial Sequence
  Synthetic Polynucleotide
aaggccggcacctacctgtgcctgctggaaaagttcttcccagatgtgattaagatccactggcaggaaaagaagtccaacaccatcctgggcagccaggaaggcaacaccatgaagaccaacgacacctacatgaagttcagctggctgaccgtgcccgagaagtccctggacaaagaacacagatgcatcgtgcggcacgaaaacaacaagaacggcgtggaccaggaaatcatcttcccacccatcaagaccgatgtgattacaatggaccccaaggacaactgctccaaggacgccaacgataccctgctgctccagctgaccaacaccagcgcctactacatgtacttgttgctgctgctgaagtccgtggtgtacttcgccatcatcacatgctgcctgctgcggagaaccgccttctgctgcaacggcgagaagtct

SEQ ID NO: 7425 - DNA, 441 bp, Artificial Sequence
  Synthetic Polynucleotide
gccggcacctacctgtgcctgctggaaaagttcttcccagatgtgattaagatccactggcaggaaaagaagtccaacaccatcctgggcagccaggaaggcaacaccatgaagaccaacgacacctacatgaagttcagctggctgaccgtgcccgagaagtccctggacaaagaacacagatgcatcgtgcggcacgaaaacaacaagaacggcgtggaccaggaaatcatcttcccacccatcaagaccgatgtgattacaatggaccccaaggacaactgctccaaggacgccaacgataccctgctgctccagctgaccaacaccagcgcctactacatgtacttgttgctgctgctgaagtccgtggtgtacttcgccatcatcacatgctgcctgctgcggagaaccgccttctgctgcaacggcgagaagtct

SEQ ID NO: 7426 - DNA, 438 bp, Artificial Sequence
  Synthetic Polynucleotide
ggcacctacctgtgcctgctggaaaagttcttcccagatgtgattaagatccactggcaggaaaagaagtccaacaccatcctgggcagccaggaaggcaacaccatgaagaccaacgacacctacatgaagttcagctggctgaccgtgcccgagaagtccctggacaaagaacacagatgcatcgtgcggcacgaaaacaacaagaacggcgtggaccaggaaatcatcttcccacccatcaagaccgatgtgattacaatggaccccaaggacaactgctccaaggacgccaacgataccctgctgctccagctgaccaacaccagcgcctactacatgtacttgttgctgctgctgaagtccgtggtgtacttcgccatcatcacatgctgcctgctgcggagaaccgccttctgctgcaacggcgagaagtct

SEQ ID NO: 7427 - DNA, 435 bp, Artificial Sequence
  Synthetic Polynucleotide
acctacctgtgcctgctggaaaagttcttcccagatgtgattaagatccactggcaggaaaagaagtccaacaccatcctgggcagccaggaaggcaacaccatgaagaccaacgacacctacatgaagttcagctggctgaccgtgcccgagaagtccctggacaaagaacacagatgcatcgtgcggcacgaaaacaacaagaacggcgtggaccaggaaatcatcttcccacccatcaagaccgatgtgattacaatggaccccaaggacaactgctccaaggacgccaacgataccctgctgctccagctgaccaacaccagcgcctactacatgtacttgttgctgctgctgaagtccgtggtgtacttcgccatcatcacatgctgcctgctgcggagaaccgccttctgctgcaacggcgagaagtct

SEQ ID NO: 7428 - DNA, 432 bp, Artificial Sequence
  Synthetic Polynucleotide
tacctgtgcctgctggaaaagttcttcccagatgtgattaagatccactggcaggaaaagaagtccaacaccatcctgggcagccaggaaggcaacaccatgaagaccaacgacacctacatgaagttcagctggctgaccgtgcccgagaagtccctggacaaagaacacagatgcatcgtgcggcacgaaaacaacaagaacggcgtggaccaggaaatcatcttcccacccatcaagaccgatgtgattacaatggaccccaaggacaactgctccaaggacgccaacgataccctgctgctccagctgaccaacaccagcgcctactacatgtacttgttgctgctgctgaagtccgtggtgtacttcgccatcatcacatgctgcctgctgcggagaaccgccttctgctgcaacggcgagaagtct

SEQ ID NO: 7429 - DNA, 429 bp, Artificial Sequence
  Synthetic Polynucleotide
ctgtgcctgctggaaaagttcttcccagatgtgattaagatccactggcaggaaaagaagtccaacaccatcctgggcagccaggaaggcaacaccatgaagaccaacgacacctacatgaagttcagctggctgaccgtgcccgagaagtccctggacaaagaacacagatgcatcgtgcggcacgaaaacaacaagaacggcgtggaccaggaaatcatcttcccacccatcaagaccgatgtgattacaatggaccccaaggacaactgctccaaggacgccaacgataccctgctgctccagctgaccaacaccagcgcctactacatgtacttgttgctgctgctgaagtccgtggtgtacttcgccatcatcacatgctgcctgctgcggagaaccgccttctgctgcaacggcgagaagtct

SEQ ID NO: 7430 - DNA, 426 bp, Artificial Sequence
  Synthetic Polynucleotide
tgcctgctggaaaagttcttcccagatgtgattaagatccactggcaggaaaagaagtccaacaccatcctgggcagccaggaaggcaacaccatgaagaccaacgacacctacatgaagttcagctggctgaccgtgcccgagaagtccctggacaaagaacacagatgcatcgtgcggcacgaaaacaacaagaacggcgtggaccaggaaatcatcttcccacccatcaagaccgatgtgattacaatggaccccaaggacaactgctccaaggacgccaacgataccctgctgctccagctgaccaacaccagcgcctactacatgtacttgttgctgctgctgaagtccgtggtgtacttcgccatcatcacatgctgcctgctgcggagaaccgccttctgctgcaacggcgagaagtct

SEQ ID NO: 7431 - DNA, 423 bp, Artificial Sequence
  Synthetic Polynucleotide
ctgctggaaaagttcttcccagatgtgattaagatccactggcaggaaaagaagtccaacaccatcctgggcagccaggaaggcaacaccatgaagaccaacgacacctacatgaagttcagctggctgaccgtgcccgagaagtccctggacaaagaacacagatgcatcgtgcggcacgaaaacaacaagaacggcgtggaccaggaaatcatcttcccacccatcaagaccgatgtgattacaatggaccccaaggacaactgctccaaggacgccaacgataccctgctgctccagctgaccaacaccagcgcctactacatgtacttgttgctgctgctgaagtccgtggtgtacttcgccatcatcacatgctgcctgctgcggagaaccgccttctgctgcaacggcgagaagtct

SEQ ID NO: 7432 - DNA, 420 bp, Artificial Sequence
  Synthetic Polynucleotide
ctggaaaagttcttcccagatgtgattaagatccactggcaggaaaagaagtccaacaccatcctgggcagccaggaaggcaacaccatgaagaccaacgacacctacatgaagttcagctggctgaccgtgcccgagaagtccctggacaaagaacacagatgcatcgtgcggcacgaaaacaacaagaacggcgtggaccaggaaatcatcttcccacccatcaagaccgatgtgattacaatggaccccaaggacaactgctccaaggacgccaacgataccctgctgctccagctgaccaacaccagcgcctactacatgtacttgttgctgctgctgaagtccgtggtgtacttcgccatcatcacatgctgcctgctgcggagaaccgccttctgctgcaacggcgagaagtct

SEQ ID NO: 7433 - DNA, 417 bp, Artificial Sequence
  Synthetic Polynucleotide
gaaaagttcttcccagatgtgattaagatccactggcaggaaaagaagtccaacaccatcctgggcagccaggaaggcaacaccatgaagaccaacgacacctacatgaagttcagctggctgaccgtgcccgagaagtccctggacaaagaacacagatgcatcgtgcggcacgaaaacaacaagaacggcgtggaccaggaaatcatcttcccacccatcaagaccgatgtgattacaatggaccccaaggacaactgctccaaggacgccaacgataccctgctgctccagctgaccaacaccagcgcctactacatgtacttgttgctgctgctgaagtccgtggtgtacttcgccatcatcacatgctgcctgctgcggagaaccgccttctgctgcaacggcgagaagtct

SEQ ID NO: 7434 - DNA, 414 bp, Artificial Sequence
  Synthetic Polynucleotide
aagttcttcccagatgtgattaagatccactggcaggaaaagaagtccaacaccatcctgggcagccaggaaggcaacaccatgaagaccaacgacacctacatgaagttcagctggctgaccgtgcccgagaagtccctggacaaagaacacagatgcatcgtgcggcacgaaaacaacaagaacggcgtggaccaggaaatcatcttcccacccatcaagaccgatgtgattacaatggaccccaaggacaactgctccaaggacgccaacgataccctgctgctccagctgaccaacaccagcgcctactacatgtacttgttgctgctgctgaagtccgtggtgtacttcgccatcatcacatgctgcctgctgcggagaaccgccttctgctgcaacggcgagaagtct

SEQ ID NO: 7435 - DNA, 411 bp, Artificial Sequence
  Synthetic Polynucleotide
ttcttcccagatgtgattaagatccactggcaggaaaagaagtccaacaccatcctgggcagccaggaaggcaacaccatgaagaccaacgacacctacatgaagttcagctggctgaccgtgcccgagaagtccctggacaaagaacacagatgcatcgtgcggcacgaaaacaacaagaacggcgtggaccaggaaatcatcttcccacccatcaagaccgatgtgattacaatggaccccaaggacaactgctccaaggacgccaacgataccctgctgctccagctgaccaacaccagcgcctactacatgtacttgttgctgctgctgaagtccgtggtgtacttcgccatcatcacatgctgcctgctgcggagaaccgccttctgctgcaacggcgagaagtct

SEQ ID NO: 7436 - DNA, 408 bp, Artificial Sequence
  Synthetic Polynucleotide
ttcccagatgtgattaagatccactggcaggaaaagaagtccaacaccatcctgggcagccaggaaggcaacaccatgaagaccaacgacacctacatgaagttcagctggctgaccgtgcccgagaagtccctggacaaagaacacagatgcatcgtgcggcacgaaaacaacaagaacggcgtggaccaggaaatcatcttcccacccatcaagaccgatgtgattacaatggaccccaaggacaactgctccaaggacgccaacgataccctgctgctccagctgaccaacaccagcgcctactacatgtacttgttgctgctgctgaagtccgtggtgtacttcgccatcatcacatgctgcctgctgcggagaaccgccttctgctgcaacggcgagaagtct

SEQ ID NO: 7437 - DNA, 405 bp, Artificial Sequence
  Synthetic Polynucleotide
ccagatgtgattaagatccactggcaggaaaagaagtccaacaccatcctgggcagccaggaaggcaacaccatgaagaccaacgacacctacatgaagttcagctggctgaccgtgcccgagaagtccctggacaaagaacacagatgcatcgtgcggcacgaaaacaacaagaacggcgtggaccaggaaatcatcttcccacccatcaagaccgatgtgattacaatggaccccaaggacaactgctccaaggacgccaacgataccctgctgctccagctgaccaacaccagcgcctactacatgtacttgttgctgctgctgaagtccgtggtgtacttcgccatcatcacatgctgcctgctgcggagaaccgccttctgctgcaacggcgagaagtct

SEQ ID NO: 7438 - DNA, 402 bp, Artificial Sequence
  Synthetic Polynucleotide
gatgtgattaagatccactggcaggaaaagaagtccaacaccatcctgggcagccaggaaggcaacaccatgaagaccaacgacacctacatgaagttcagctggctgaccgtgcccgagaagtccctggacaaagaacacagatgcatcgtgcggcacgaaaacaacaagaacggcgtggaccaggaaatcatcttcccacccatcaagaccgatgtgattacaatggaccccaaggacaactgctccaaggacgccaacgataccctgctgctccagctgaccaacaccagcgcctactacatgtacttgttgctgctgctgaagtccgtggtgtacttcgccatcatcacatgctgcctgctgcggagaaccgccttctgctgcaacggcgagaagtct

SEQ ID NO: 7439 - DNA, 399 bp, Artificial Sequence
  Synthetic Polynucleotide
gtgattaagatccactggcaggaaaagaagtccaacaccatcctgggcagccaggaaggcaacaccatgaagaccaacgacacctacatgaagttcagctggctgaccgtgcccgagaagtccctggacaaagaacacagatgcatcgtgcggcacgaaaacaacaagaacggcgtggaccaggaaatcatcttcccacccatcaagaccgatgtgattacaatggaccccaaggacaactgctccaaggacgccaacgataccctgctgctccagctgaccaacaccagcgcctactacatgtacttgttgctgctgctgaagtccgtggtgtacttcgccatcatcacatgctgcctgctgcggagaaccgccttctgctgcaacggcgagaagtct

SEQ ID NO: 7440 - DNA, 396 bp, Artificial Sequence
  Synthetic Polynucleotide
attaagatccactggcaggaaaagaagtccaacaccatcctgggcagccaggaaggcaacaccatgaagaccaacgacacctacatgaagttcagctggctgaccgtgcccgagaagtccctggacaaagaacacagatgcatcgtgcggcacgaaaacaacaagaacggcgtggaccaggaaatcatcttcccacccatcaagaccgatgtgattacaatggaccccaaggacaactgctccaaggacgccaacgataccctgctgctccagctgaccaacaccagcgcctactacatgtacttgttgctgctgctgaagtccgtggtgtacttcgccatcatcacatgctgcctgctgcggagaaccgccttctgctgcaacggcgagaagtct

SEQ ID NO: 7441 - DNA, 393 bp, Artificial Sequence
  Synthetic Polynucleotide
aagatccactggcaggaaaagaagtccaacaccatcctgggcagccaggaaggcaacaccatgaagaccaacgacacctacatgaagttcagctggctgaccgtgcccgagaagtccctggacaaagaacacagatgcatcgtgcggcacgaaaacaacaagaacggcgtggaccaggaaatcatcttcccacccatcaagaccgatgtgattacaatggaccccaaggacaactgctccaaggacgccaacgataccctgctgctccagctgaccaacaccagcgcctactacatgtacttgttgctgctgctgaagtccgtggtgtacttcgccatcatcacatgctgcctgctgcggagaaccgccttctgctgcaacggcgagaagtct

SEQ ID NO: 7442 - DNA, 390 bp, Artificial Sequence
  Synthetic Polynucleotide
atccactggcaggaaaagaagtccaacaccatcctgggcagccaggaaggcaacaccatgaagaccaacgacacctacatgaagttcagctggctgaccgtgcccgagaagtccctggacaaagaacacagatgcatcgtgcggcacgaaaacaacaagaacggcgtggaccaggaaatcatcttcccacccatcaagaccgatgtgattacaatggaccccaaggacaactgctccaaggacgccaacgataccctgctgctccagctgaccaacaccagcgcctactacatgtacttgttgctgctgctgaagtccgtggtgtacttcgccatcatcacatgctgcctgctgcggagaaccgccttctgctgcaacggcgagaagtct

SEQ ID NO: 7443 - DNA, 387 bp, Artificial Sequence
  Synthetic Polynucleotide
cactggcaggaaaagaagtccaacaccatcctgggcagccaggaaggcaacaccatgaagaccaacgacacctacatgaagttcagctggctgaccgtgcccgagaagtccctggacaaagaacacagatgcatcgtgcggcacgaaaacaacaagaacggcgtggaccaggaaatcatcttcccacccatcaagaccgatgtgattacaatggaccccaaggacaactgctccaaggacgccaacgataccctgctgctccagctgaccaacaccagcgcctactacatgtacttgttgctgctgctgaagtccgtggtgtacttcgccatcatcacatgctgcctgctgcggagaaccgccttctgctgcaacggcgagaagtct

SEQ ID NO: 7444 - DNA, 384 bp, Artificial Sequence
  Synthetic Polynucleotide
tggcaggaaaagaagtccaacaccatcctgggcagccaggaaggcaacaccatgaagaccaacgacacctacatgaagttcagctggctgaccgtgcccgagaagtccctggacaaagaacacagatgcatcgtgcggcacgaaaacaacaagaacggcgtggaccaggaaatcatcttcccacccatcaagaccgatgtgattacaatggaccccaaggacaactgctccaaggacgccaacgataccctgctgctccagctgaccaacaccagcgcctactacatgtacttgttgctgctgctgaagtccgtggtgtacttcgccatcatcacatgctgcctgctgcggagaaccgccttctgctgcaacggcgagaagtct

SEQ ID NO: 7445 - DNA, 381 bp, Artificial Sequence
  Synthetic Polynucleotide
caggaaaagaagtccaacaccatcctgggcagccaggaaggcaacaccatgaagaccaacgacacctacatgaagttcagctggctgaccgtgcccgagaagtccctggacaaagaacacagatgcatcgtgcggcacgaaaacaacaagaacggcgtggaccaggaaatcatcttcccacccatcaagaccgatgtgattacaatggaccccaaggacaactgctccaaggacgccaacgataccctgctgctccagctgaccaacaccagcgcctactacatgtacttgttgctgctgctgaagtccgtggtgtacttcgccatcatcacatgctgcctgctgcggagaaccgccttctgctgcaacggcgagaagtct

SEQ ID NO: 7446 - DNA, 378 bp, Artificial Sequence
  Synthetic Polynucleotide
gaaaagaagtccaacaccatcctgggcagccaggaaggcaacaccatgaagaccaacgacacctacatgaagttcagctggctgaccgtgcccgagaagtccctggacaaagaacacagatgcatcgtgcggcacgaaaacaacaagaacggcgtggaccaggaaatcatcttcccacccatcaagaccgatgtgattacaatggaccccaaggacaactgctccaaggacgccaacgataccctgctgctccagctgaccaacaccagcgcctactacatgtacttgttgctgctgctgaagtccgtggtgtacttcgccatcatcacatgctgcctgctgcggagaaccgccttctgctgcaacggcgagaagtct

SEQ ID NO: 7447 - DNA, 375 bp, Artificial Sequence
  Synthetic Polynucleotide
aagaagtccaacaccatcctgggcagccaggaaggcaacaccatgaagaccaacgacacctacatgaagttcagctggctgaccgtgcccgagaagtccctggacaaagaacacagatgcatcgtgcggcacgaaaacaacaagaacggcgtggaccaggaaatcatcttcccacccatcaagaccgatgtgattacaatggaccccaaggacaactgctccaaggacgccaacgataccctgctgctccagctgaccaacaccagcgcctactacatgtacttgttgctgctgctgaagtccgtggtgtacttcgccatcatcacatgctgcctgctgcggagaaccgccttctgctgcaacggcgagaagtct

SEQ ID NO: 7448 - DNA, 372 bp, Artificial Sequence
  Synthetic Polynucleotide
aagtccaacaccatcctgggcagccaggaaggcaacaccatgaagaccaacgacacctacatgaagttcagctggctgaccgtgcccgagaagtccctggacaaagaacacagatgcatcgtgcggcacgaaaacaacaagaacggcgtggaccaggaaatcatcttcccacccatcaagaccgatgtgattacaatggaccccaaggacaactgctccaaggacgccaacgataccctgctgctccagctgaccaacaccagcgcctactacatgtacttgttgctgctgctgaagtccgtggtgtacttcgccatcatcacatgctgcctgctgcggagaaccgccttctgctgcaacggcgagaagtct

SEQ ID NO: 7449 - DNA, 369 bp, Artificial Sequence
  Synthetic Polynucleotide
tccaacaccatcctgggcagccaggaaggcaacaccatgaagaccaacgacacctacatgaagttcagctggctgaccgtgcccgagaagtccctggacaaagaacacagatgcatcgtgcggcacgaaaacaacaagaacggcgtggaccaggaaatcatcttcccacccatcaagaccgatgtgattacaatggaccccaaggacaactgctccaaggacgccaacgataccctgctgctccagctgaccaacaccagcgcctactacatgtacttgttgctgctgctgaagtccgtggtgtacttcgccatcatcacatgctgcctgctgcggagaaccgccttctgctgcaacggcgagaagtct

SEQ ID NO: 7450 - DNA, 366 bp, Artificial Sequence
  Synthetic Polynucleotide
aacaccatcctgggcagccaggaaggcaacaccatgaagaccaacgacacctacatgaagttcagctggctgaccgtgcccgagaagtccctggacaaagaacacagatgcatcgtgcggcacgaaaacaacaagaacggcgtggaccaggaaatcatcttcccacccatcaagaccgatgtgattacaatggaccccaaggacaactgctccaaggacgccaacgataccctgctgctccagctgaccaacaccagcgcctactacatgtacttgttgctgctgctgaagtccgtggtgtacttcgccatcatcacatgctgcctgctgcggagaaccgccttctgctgcaacggcgagaagtct

SEQ ID NO: 7451 - DNA, 363 bp, Artificial Sequence
  Synthetic Polynucleotide
accatcctgggcagccaggaaggcaacaccatgaagaccaacgacacctacatgaagttcagctggctgaccgtgcccgagaagtccctggacaaagaacacagatgcatcgtgcggcacgaaaacaacaagaacggcgtggaccaggaaatcatcttcccacccatcaagaccgatgtgattacaatggaccccaaggacaactgctccaaggacgccaacgataccctgctgctccagctgaccaacaccagcgcctactacatgtacttgttgctgctgctgaagtccgtggtgtacttcgccatcatcacatgctgcctgctgcggagaaccgccttctgctgcaacggcgagaagtct

SEQ ID NO: 7452 - DNA, 360 bp, Artificial Sequence
  Synthetic Polynucleotide
atcctgggcagccaggaaggcaacaccatgaagaccaacgacacctacatgaagttcagctggctgaccgtgcccgagaagtccctggacaaagaacacagatgcatcgtgcggcacgaaaacaacaagaacggcgtggaccaggaaatcatcttcccacccatcaagaccgatgtgattacaatggaccccaaggacaactgctccaaggacgccaacgataccctgctgctccagctgaccaacaccagcgcctactacatgtacttgttgctgctgctgaagtccgtggtgtacttcgccatcatcacatgctgcctgctgcggagaaccgccttctgctgcaacggcgagaagtct

SEQ ID NO: 7453 - DNA, 357 bp, Artificial Sequence
  Synthetic Polynucleotide
ctgggcagccaggaaggcaacaccatgaagaccaacgacacctacatgaagttcagctggctgaccgtgcccgagaagtccctggacaaagaacacagatgcatcgtgcggcacgaaaacaacaagaacggcgtggaccaggaaatcatcttcccacccatcaagaccgatgtgattacaatggaccccaaggacaactgctccaaggacgccaacgataccctgctgctccagctgaccaacaccagcgcctactacatgtacttgttgctgctgctgaagtccgtggtgtacttcgccatcatcacatgctgcctgctgcggagaaccgccttctgctgcaacggcgagaagtct

SEQ ID NO: 7454 - DNA, 354 bp, Artificial Sequence
  Synthetic Polynucleotide
ggcagccaggaaggcaacaccatgaagaccaacgacacctacatgaagttcagctggctgaccgtgcccgagaagtccctggacaaagaacacagatgcatcgtgcggcacgaaaacaacaagaacggcgtggaccaggaaatcatcttcccacccatcaagaccgatgtgattacaatggaccccaaggacaactgctccaaggacgccaacgataccctgctgctccagctgaccaacaccagcgcctactacatgtacttgttgctgctgctgaagtccgtggtgtacttcgccatcatcacatgctgcctgctgcggagaaccgccttctgctgcaacggcgagaagtct

SEQ ID NO: 7455 - DNA, 351 bp, Artificial Sequence
  Synthetic Polynucleotide
agccaggaaggcaacaccatgaagaccaacgacacctacatgaagttcagctggctgaccgtgcccgagaagtccctggacaaagaacacagatgcatcgtgcggcacgaaaacaacaagaacggcgtggaccaggaaatcatcttcccacccatcaagaccgatgtgattacaatggaccccaaggacaactgctccaaggacgccaacgataccctgctgctccagctgaccaacaccagcgcctactacatgtacttgttgctgctgctgaagtccgtggtgtacttcgccatcatcacatgctgcctgctgcggagaaccgccttctgctgcaacggcgagaagtct

SEQ ID NO: 7456 - DNA, 348 bp, Artificial Sequence
  Synthetic Polynucleotide
caggaaggcaacaccatgaagaccaacgacacctacatgaagttcagctggctgaccgtgcccgagaagtccctggacaaagaacacagatgcatcgtgcggcacgaaaacaacaagaacggcgtggaccaggaaatcatcttcccacccatcaagaccgatgtgattacaatggaccccaaggacaactgctccaaggacgccaacgataccctgctgctccagctgaccaacaccagcgcctactacatgtacttgttgctgctgctgaagtccgtggtgtacttcgccatcatcacatgctgcctgctgcggagaaccgccttctgctgcaacggcgagaagtct

SEQ ID NO: 7457 - DNA, 345 bp, Artificial Sequence
  Synthetic Polynucleotide
gaaggcaacaccatgaagaccaacgacacctacatgaagttcagctggctgaccgtgcccgagaagtccctggacaaagaacacagatgcatcgtgcggcacgaaaacaacaagaacggcgtggaccaggaaatcatcttcccacccatcaagaccgatgtgattacaatggaccccaaggacaactgctccaaggacgccaacgataccctgctgctccagctgaccaacaccagcgcctactacatgtacttgttgctgctgctgaagtccgtggtgtacttcgccatcatcacatgctgcctgctgcggagaaccgccttctgctgcaacggcgagaagtct

SEQ ID NO: 7458 - DNA, 342 bp, Artificial Sequence
  Synthetic Polynucleotide
ggcaacaccatgaagaccaacgacacctacatgaagttcagctggctgaccgtgcccgagaagtccctggacaaagaacacagatgcatcgtgcggcacgaaaacaacaagaacggcgtggaccaggaaatcatcttcccacccatcaagaccgatgtgattacaatggaccccaaggacaactgctccaaggacgccaacgataccctgctgctccagctgaccaacaccagcgcctactacatgtacttgttgctgctgctgaagtccgtggtgtacttcgccatcatcacatgctgcctgctgcggagaaccgccttctgctgcaacggcgagaagtct

SEQ ID NO: 7459 - DNA, 339 bp, Artificial Sequence
  Synthetic Polynucleotide
aacaccatgaagaccaacgacacctacatgaagttcagctggctgaccgtgcccgagaagtccctggacaaagaacacagatgcatcgtgcggcacgaaaacaacaagaacggcgtggaccaggaaatcatcttcccacccatcaagaccgatgtgattacaatggaccccaaggacaactgctccaaggacgccaacgataccctgctgctccagctgaccaacaccagcgcctactacatgtacttgttgctgctgctgaagtccgtggtgtacttcgccatcatcacatgctgcctgctgcggagaaccgccttctgctgcaacggcgagaagtct

SEQ ID NO: 7460 - DNA, 336 bp, Artificial Sequence
  Synthetic Polynucleotide
accatgaagaccaacgacacctacatgaagttcagctggctgaccgtgcccgagaagtccctggacaaagaacacagatgcatcgtgcggcacgaaaacaacaagaacggcgtggaccaggaaatcatcttcccacccatcaagaccgatgtgattacaatggaccccaaggacaactgctccaaggacgccaacgataccctgctgctccagctgaccaacaccagcgcctactacatgtacttgttgctgctgctgaagtccgtggtgtacttcgccatcatcacatgctgcctgctgcggagaaccgccttctgctgcaacggcgagaagtct

SEQ ID NO: 7461 - DNA, 333 bp, Artificial Sequence
  Synthetic Polynucleotide
atgaagaccaacgacacctacatgaagttcagctggctgaccgtgcccgagaagtccctggacaaagaacacagatgcatcgtgcggcacgaaaacaacaagaacggcgtggaccaggaaatcatcttcccacccatcaagaccgatgtgattacaatggaccccaaggacaactgctccaaggacgccaacgataccctgctgctccagctgaccaacaccagcgcctactacatgtacttgttgctgctgctgaagtccgtggtgtacttcgccatcatcacatgctgcctgctgcggagaaccgccttctgctgcaacggcgagaagtct

SEQ ID NO: 7462 - DNA, 330 bp, Artificial Sequence
  Synthetic Polynucleotide
aagaccaacgacacctacatgaagttcagctggctgaccgtgcccgagaagtccctggacaaagaacacagatgcatcgtgcggcacgaaaacaacaagaacggcgtggaccaggaaatcatcttcccacccatcaagaccgatgtgattacaatggaccccaaggacaactgctccaaggacgccaacgataccctgctgctccagctgaccaacaccagcgcctactacatgtacttgttgctgctgctgaagtccgtggtgtacttcgccatcatcacatgctgcctgctgcggagaaccgccttctgctgcaacggcgagaagtct

SEQ ID NO: 7463 - DNA, 327 bp, Artificial Sequence
  Synthetic Polynucleotide
accaacgacacctacatgaagttcagctggctgaccgtgcccgagaagtccctggacaaagaacacagatgcatcgtgcggcacgaaaacaacaagaacggcgtggaccaggaaatcatcttcccacccatcaagaccgatgtgattacaatggaccccaaggacaactgctccaaggacgccaacgataccctgctgctccagctgaccaacaccagcgcctactacatgtacttgttgctgctgctgaagtccgtggtgtacttcgccatcatcacatgctgcctgctgcggagaaccgccttctgctgcaacggcgagaagtct

SEQ ID NO: 7464 - DNA, 324 bp, Artificial Sequence
  Synthetic Polynucleotide
aacgacacctacatgaagttcagctggctgaccgtgcccgagaagtccctggacaaagaacacagatgcatcgtgcggcacgaaaacaacaagaacggcgtggaccaggaaatcatcttcccacccatcaagaccgatgtgattacaatggaccccaaggacaactgctccaaggacgccaacgataccctgctgctccagctgaccaacaccagcgcctactacatgtacttgttgctgctgctgaagtccgtggtgtacttcgccatcatcacatgctgcctgctgcggagaaccgccttctgctgcaacggcgagaagtct

SEQ ID NO: 7465 - DNA, 321 bp, Artificial Sequence
  Synthetic Polynucleotide
gacacctacatgaagttcagctggctgaccgtgcccgagaagtccctggacaaagaacacagatgcatcgtgcggcacgaaaacaacaagaacggcgtggaccaggaaatcatcttcccacccatcaagaccgatgtgattacaatggaccccaaggacaactgctccaaggacgccaacgataccctgctgctccagctgaccaacaccagcgcctactacatgtacttgttgctgctgctgaagtccgtggtgtacttcgccatcatcacatgctgcctgctgcggagaaccgccttctgctgcaacggcgagaagtct

SEQ ID NO: 7466 - DNA, 318 bp, Artificial Sequence
  Synthetic Polynucleotide
acctacatgaagttcagctggctgaccgtgcccgagaagtccctggacaaagaacacagatgcatcgtgcggcacgaaaacaacaagaacggcgtggaccaggaaatcatcttcccacccatcaagaccgatgtgattacaatggaccccaaggacaactgctccaaggacgccaacgataccctgctgctccagctgaccaacaccagcgcctactacatgtacttgttgctgctgctgaagtccgtggtgtacttcgccatcatcacatgctgcctgctgcggagaaccgccttctgctgcaacggcgagaagtct

SEQ ID NO: 7467 - DNA, 315 bp, Artificial Sequence
  Synthetic Polynucleotide
tacatgaagttcagctggctgaccgtgcccgagaagtccctggacaaagaacacagatgcatcgtgcggcacgaaaacaacaagaacggcgtggaccaggaaatcatcttcccacccatcaagaccgatgtgattacaatggaccccaaggacaactgctccaaggacgccaacgataccctgctgctccagctgaccaacaccagcgcctactacatgtacttgttgctgctgctgaagtccgtggtgtacttcgccatcatcacatgctgcctgctgcggagaaccgccttctgctgcaacggcgagaagtct

SEQ ID NO: 7468 - DNA, 312 bp, Artificial Sequence
  Synthetic Polynucleotide
atgaagttcagctggctgaccgtgcccgagaagtccctggacaaagaacacagatgcatcgtgcggcacgaaaacaacaagaacggcgtggaccaggaaatcatcttcccacccatcaagaccgatgtgattacaatggaccccaaggacaactgctccaaggacgccaacgataccctgctgctccagctgaccaacaccagcgcctactacatgtacttgttgctgctgctgaagtccgtggtgtacttcgccatcatcacatgctgcctgctgcggagaaccgccttctgctgcaacggcgagaagtct

SEQ ID NO: 7469 - DNA, 309 bp, Artificial Sequence
  Synthetic Polynucleotide
aagttcagctggctgaccgtgcccgagaagtccctggacaaagaacacagatgcatcgtgcggcacgaaaacaacaagaacggcgtggaccaggaaatcatcttcccacccatcaagaccgatgtgattacaatggaccccaaggacaactgctccaaggacgccaacgataccctgctgctccagctgaccaacaccagcgcctactacatgtacttgttgctgctgctgaagtccgtggtgtacttcgccatcatcacatgctgcctgctgcggagaaccgccttctgctgcaacggcgagaagtct

SEQ ID NO: 7470 - DNA, 306 bp, Artificial Sequence
  Synthetic Polynucleotide
ttcagctggctgaccgtgcccgagaagtccctggacaaagaacacagatgcatcgtgcggcacgaaaacaacaagaacggcgtggaccaggaaatcatcttcccacccatcaagaccgatgtgattacaatggaccccaaggacaactgctccaaggacgccaacgataccctgctgctccagctgaccaacaccagcgcctactacatgtacttgttgctgctgctgaagtccgtggtgtacttcgccatcatcacatgctgcctgctgcggagaaccgccttctgctgcaacggcgagaagtct

SEQ ID NO: 7471 - DNA, 303 bp, Artificial Sequence
  Synthetic Polynucleotide
agctggctgaccgtgcccgagaagtccctggacaaagaacacagatgcatcgtgcggcacgaaaacaacaagaacggcgtggaccaggaaatcatcttcccacccatcaagaccgatgtgattacaatggaccccaaggacaactgctccaaggacgccaacgataccctgctgctccagctgaccaacaccagcgcctactacatgtacttgttgctgctgctgaagtccgtggtgtacttcgccatcatcacatgctgcctgctgcggagaaccgccttctgctgcaacggcgagaagtct

SEQ ID NO: 7472 - DNA, 300 bp, Artificial Sequence
  Synthetic Polynucleotide
tggctgaccgtgcccgagaagtccctggacaaagaacacagatgcatcgtgcggcacgaaaacaacaagaacggcgtggaccaggaaatcatcttcccacccatcaagaccgatgtgattacaatggaccccaaggacaactgctccaaggacgccaacgataccctgctgctccagctgaccaacaccagcgcctactacatgtacttgttgctgctgctgaagtccgtggtgtacttcgccatcatcacatgctgcctgctgcggagaaccgccttctgctgcaacggcgagaagtct

SEQ ID NO: 7473 - DNA, 297 bp, Artificial Sequence
  Synthetic Polynucleotide
ctgaccgtgcccgagaagtccctggacaaagaacacagatgcatcgtgcggcacgaaaacaacaagaacggcgtggaccaggaaatcatcttcccacccatcaagaccgatgtgattacaatggaccccaaggacaactgctccaaggacgccaacgataccctgctgctccagctgaccaacaccagcgcctactacatgtacttgttgctgctgctgaagtccgtggtgtacttcgccatcatcacatgctgcctgctgcggagaaccgccttctgctgcaacggcgagaagtct

SEQ ID NO: 7474 - DNA, 294 bp, Artificial Sequence
  Synthetic Polynucleotide
accgtgcccgagaagtccctggacaaagaacacagatgcatcgtgcggcacgaaaacaacaagaacggcgtggaccaggaaatcatcttcccacccatcaagaccgatgtgattacaatggaccccaaggacaactgctccaaggacgccaacgataccctgctgctccagctgaccaacaccagcgcctactacatgtacttgttgctgctgctgaagtccgtggtgtacttcgccatcatcacatgctgcctgctgcggagaaccgccttctgctgcaacggcgagaagtct

SEQ ID NO: 7475 - DNA, 291 bp, Artificial Sequence
  Synthetic Polynucleotide
gtgcccgagaagtccctggacaaagaacacagatgcatcgtgcggcacgaaaacaacaagaacggcgtggaccaggaaatcatcttcccacccatcaagaccgatgtgattacaatggaccccaaggacaactgctccaaggacgccaacgataccctgctgctccagctgaccaacaccagcgcctactacatgtacttgttgctgctgctgaagtccgtggtgtacttcgccatcatcacatgctgcctgctgcggagaaccgccttctgctgcaacggcgagaagtct

SEQ ID NO: 7476 - DNA, 288 bp, Artificial Sequence
  Synthetic Polynucleotide
cccgagaagtccctggacaaagaacacagatgcatcgtgcggcacgaaaacaacaagaacggcgtggaccaggaaatcatcttcccacccatcaagaccgatgtgattacaatggaccccaaggacaactgctccaaggacgccaacgataccctgctgctccagctgaccaacaccagcgcctactacatgtacttgttgctgctgctgaagtccgtggtgtacttcgccatcatcacatgctgcctgctgcggagaaccgccttctgctgcaacggcgagaagtct

SEQ ID NO: 7477 - DNA, 285 bp, Artificial Sequence
  Synthetic Polynucleotide
gagaagtccctggacaaagaacacagatgcatcgtgcggcacgaaaacaacaagaacggcgtggaccaggaaatcatcttcccacccatcaagaccgatgtgattacaatggaccccaaggacaactgctccaaggacgccaacgataccctgctgctccagctgaccaacaccagcgcctactacatgtacttgttgctgctgctgaagtccgtggtgtacttcgccatcatcacatgctgcctgctgcggagaaccgccttctgctgcaacggcgagaagtct

SEQ ID NO: 7478 - DNA, 282 bp, Artificial Sequence
  Synthetic Polynucleotide
aagtccctggacaaagaacacagatgcatcgtgcggcacgaaaacaacaagaacggcgtggaccaggaaatcatcttcccacccatcaagaccgatgtgattacaatggaccccaaggacaactgctccaaggacgccaacgataccctgctgctccagctgaccaacaccagcgcctactacatgtacttgttgctgctgctgaagtccgtggtgtacttcgccatcatcacatgctgcctgctgcggagaaccgccttctgctgcaacggcgagaagtct

SEQ ID NO: 7479 - DNA, 279 bp, Artificial Sequence
  Synthetic Polynucleotide
tccctggacaaagaacacagatgcatcgtgcggcacgaaaacaacaagaacggcgtggaccaggaaatcatcttcccacccatcaagaccgatgtgattacaatggaccccaaggacaactgctccaaggacgccaacgataccctgctgctccagctgaccaacaccagcgcctactacatgtacttgttgctgctgctgaagtccgtggtgtacttcgccatcatcacatgctgcctgctgcggagaaccgccttctgctgcaacggcgagaagtct

SEQ ID NO: 7480 - DNA, 276 bp, Artificial Sequence
  Synthetic Polynucleotide
ctggacaaagaacacagatgcatcgtgcggcacgaaaacaacaagaacggcgtggaccaggaaatcatcttcccacccatcaagaccgatgtgattacaatggaccccaaggacaactgctccaaggacgccaacgataccctgctgctccagctgaccaacaccagcgcctactacatgtacttgttgctgctgctgaagtccgtggtgtacttcgccatcatcacatgctgcctgctgcggagaaccgccttctgctgcaacggcgagaagtct

SEQ ID NO: 7481 - DNA, 273 bp, Artificial Sequence
  Synthetic Polynucleotide
gacaaagaacacagatgcatcgtgcggcacgaaaacaacaagaacggcgtggaccaggaaatcatcttcccacccatcaagaccgatgtgattacaatggaccccaaggacaactgctccaaggacgccaacgataccctgctgctccagctgaccaacaccagcgcctactacatgtacttgttgctgctgctgaagtccgtggtgtacttcgccatcatcacatgctgcctgctgcggagaaccgccttctgctgcaacggcgagaagtct

SEQ ID NO: 7482 - DNA, 270 bp, Artificial Sequence
  Synthetic Polynucleotide
aaagaacacagatgcatcgtgcggcacgaaaacaacaagaacggcgtggaccaggaaatcatcttcccacccatcaagaccgatgtgattacaatggaccccaaggacaactgctccaaggacgccaacgataccctgctgctccagctgaccaacaccagcgcctactacatgtacttgttgctgctgctgaagtccgtggtgtacttcgccatcatcacatgctgcctgctgcggagaaccgccttctgctgcaacggcgagaagtct

SEQ ID NO: 7483 - DNA, 267 bp, Artificial Sequence
  Synthetic Polynucleotide
gaacacagatgcatcgtgcggcacgaaaacaacaagaacggcgtggaccaggaaatcatcttcccacccatcaagaccgatgtgattacaatggaccccaaggacaactgctccaaggacgccaacgataccctgctgctccagctgaccaacaccagcgcctactacatgtacttgttgctgctgctgaagtccgtggtgtacttcgccatcatcacatgctgcctgctgcggagaaccgccttctgctgcaacggcgagaagtct

SEQ ID NO: 7484 - DNA, 264 bp, Artificial Sequence
  Synthetic Polynucleotide
cacagatgcatcgtgcggcacgaaaacaacaagaacggcgtggaccaggaaatcatcttcccacccatcaagaccgatgtgattacaatggaccccaaggacaactgctccaaggacgccaacgataccctgctgctccagctgaccaacaccagcgcctactacatgtacttgttgctgctgctgaagtccgtggtgtacttcgccatcatcacatgctgcctgctgcggagaaccgccttctgctgcaacggcgagaagtct

SEQ ID NO: 7485 - DNA, 261 bp, Artificial Sequence
  Synthetic Polynucleotide
agatgcatcgtgcggcacgaaaacaacaagaacggcgtggaccaggaaatcatcttcccacccatcaagaccgatgtgattacaatggaccccaaggacaactgctccaaggacgccaacgataccctgctgctccagctgaccaacaccagcgcctactacatgtacttgttgctgctgctgaagtccgtggtgtacttcgccatcatcacatgctgcctgctgcggagaaccgccttctgctgcaacggcgagaagtct

SEQ ID NO: 7486 - DNA, 258 bp, Artificial Sequence
  Synthetic Polynucleotide
tgcatcgtgcggcacgaaaacaacaagaacggcgtggaccaggaaatcatcttcccacccatcaagaccgatgtgattacaatggaccccaaggacaactgctccaaggacgccaacgataccctgctgctccagctgaccaacaccagcgcctactacatgtacttgttgctgctgctgaagtccgtggtgtacttcgccatcatcacatgctgcctgctgcggagaaccgccttctgctgcaacggcgagaagtct

SEQ ID NO: 7487 - DNA, 255 bp, Artificial Sequence
  Synthetic Polynucleotide
atcgtgcggcacgaaaacaacaagaacggcgtggaccaggaaatcatcttcccacccatcaagaccgatgtgattacaatggaccccaaggacaactgctccaaggacgccaacgataccctgctgctccagctgaccaacaccagcgcctactacatgtacttgttgctgctgctgaagtccgtggtgtacttcgccatcatcacatgctgcctgctgcggagaaccgccttctgctgcaacggcgagaagtct

SEQ ID NO: 7488 - DNA, 252 bp, Artificial Sequence
  Synthetic Polynucleotide
gtgcggcacgaaaacaacaagaacggcgtggaccaggaaatcatcttcccacccatcaagaccgatgtgattacaatggaccccaaggacaactgctccaaggacgccaacgataccctgctgctccagctgaccaacaccagcgcctactacatgtacttgttgctgctgctgaagtccgtggtgtacttcgccatcatcacatgctgcctgctgcggagaaccgccttctgctgcaacggcgagaagtct

SEQ ID NO: 7489 - DNA, 249 bp, Artificial Sequence
  Synthetic Polynucleotide
cggcacgaaaacaacaagaacggcgtggaccaggaaatcatcttcccacccatcaagaccgatgtgattacaatggaccccaaggacaactgctccaaggacgccaacgataccctgctgctccagctgaccaacaccagcgcctactacatgtacttgttgctgctgctgaagtccgtggtgtacttcgccatcatcacatgctgcctgctgcggagaaccgccttctgctgcaacggcgagaagtct

SEQ ID NO: 7490 - DNA, 246 bp, Artificial Sequence
  Synthetic Polynucleotide
cacgaaaacaacaagaacggcgtggaccaggaaatcatcttcccacccatcaagaccgatgtgattacaatggaccccaaggacaactgctccaaggacgccaacgataccctgctgctccagctgaccaacaccagcgcctactacatgtacttgttgctgctgctgaagtccgtggtgtacttcgccatcatcacatgctgcctgctgcggagaaccgccttctgctgcaacggcgagaagtct

SEQ ID NO: 7491 - DNA, 243 bp, Artificial Sequence
  Synthetic Polynucleotide
gaaaacaacaagaacggcgtggaccaggaaatcatcttcccacccatcaagaccgatgtgattacaatggaccccaaggacaactgctccaaggacgccaacgataccctgctgctccagctgaccaacaccagcgcctactacatgtacttgttgctgctgctgaagtccgtggtgtacttcgccatcatcacatgctgcctgctgcggagaaccgccttctgctgcaacggcgagaagtct

SEQ ID NO: 7492 - DNA, 240 bp, Artificial Sequence
  Synthetic Polynucleotide
aacaacaagaacggcgtggaccaggaaatcatcttcccacccatcaagaccgatgtgattacaatggaccccaaggacaactgctccaaggacgccaacgataccctgctgctccagctgaccaacaccagcgcctactacatgtacttgttgctgctgctgaagtccgtggtgtacttcgccatcatcacatgctgcctgctgcggagaaccgccttctgctgcaacggcgagaagtct

SEQ ID NO: 7493 - DNA, 237 bp, Artificial Sequence
  Synthetic Polynucleotide
aacaagaacggcgtggaccaggaaatcatcttcccacccatcaagaccgatgtgattacaatggaccccaaggacaactgctccaaggacgccaacgataccctgctgctccagctgaccaacaccagcgcctactacatgtacttgttgctgctgctgaagtccgtggtgtacttcgccatcatcacatgctgcctgctgcggagaaccgccttctgctgcaacggcgagaagtct

SEQ ID NO: 7494 - DNA, 234 bp, Artificial Sequence
  Synthetic Polynucleotide
aagaacggcgtggaccaggaaatcatcttcccacccatcaagaccgatgtgattacaatggaccccaaggacaactgctccaaggacgccaacgataccctgctgctccagctgaccaacaccagcgcctactacatgtacttgttgctgctgctgaagtccgtggtgtacttcgccatcatcacatgctgcctgctgcggagaaccgccttctgctgcaacggcgagaagtct

SEQ ID NO: 7495 - DNA, 231 bp, Artificial Sequence
  Synthetic Polynucleotide
aacggcgtggaccaggaaatcatcttcccacccatcaagaccgatgtgattacaatggaccccaaggacaactgctccaaggacgccaacgataccctgctgctccagctgaccaacaccagcgcctactacatgtacttgttgctgctgctgaagtccgtggtgtacttcgccatcatcacatgctgcctgctgcggagaaccgccttctgctgcaacggcgagaagtct

SEQ ID NO: 7496 - DNA, 228 bp, Artificial Sequence
  Synthetic Polynucleotide
ggcgtggaccaggaaatcatcttcccacccatcaagaccgatgtgattacaatggaccccaaggacaactgctccaaggacgccaacgataccctgctgctccagctgaccaacaccagcgcctactacatgtacttgttgctgctgctgaagtccgtggtgtacttcgccatcatcacatgctgcctgctgcggagaaccgccttctgctgcaacggcgagaagtct

SEQ ID NO: 7497 - DNA, 225 bp, Artificial Sequence
  Synthetic Polynucleotide
gtggaccaggaaatcatcttcccacccatcaagaccgatgtgattacaatggaccccaaggacaactgctccaaggacgccaacgataccctgctgctccagctgaccaacaccagcgcctactacatgtacttgttgctgctgctgaagtccgtggtgtacttcgccatcatcacatgctgcctgctgcggagaaccgccttctgctgcaacggcgagaagtct

SEQ ID NO: 7498 - DNA, 222 bp, Artificial Sequence
  Synthetic Polynucleotide
gaccaggaaatcatcttcccacccatcaagaccgatgtgattacaatggaccccaaggacaactgctccaaggacgccaacgataccctgctgctccagctgaccaacaccagcgcctactacatgtacttgttgctgctgctgaagtccgtggtgtacttcgccatcatcacatgctgcctgctgcggagaaccgccttctgctgcaacggcgagaagtct

SEQ ID NO: 7499 - DNA, 219 bp, Artificial Sequence
  Synthetic Polynucleotide
caggaaatcatcttcccacccatcaagaccgatgtgattacaatggaccccaaggacaactgctccaaggacgccaacgataccctgctgctccagctgaccaacaccagcgcctactacatgtacttgttgctgctgctgaagtccgtggtgtacttcgccatcatcacatgctgcctgctgcggagaaccgccttctgctgcaacggcgagaagtct

SEQ ID NO: 7500 - DNA, 459 bp, Artificial Sequence; identical to SEQ ID NO: 1084
  Synthetic Polynucleotide

SEQ ID NO: 7501 - DNA, 456 bp, Artificial Sequence
  Synthetic Polynucleotide
cagcctcacaccaagcccagcgtgttcgtgatgaagaacggcaccaacgtggcctgcctcgtgaaagagttctaccccaaggacatcaggatcaacctggtgtccagcaagaagatcaccgagttcgaccccgccatcgtgatctcccccagcggcaagtacaacgccgtgaagctggggaagtacgaggacagcaacagcgtgacctgctccgtgcagcacgacaacaagaccgtgcacagcaccgactttgaagtgaaaaccgactccaccgaccacgtgaagcccaaagagacagagaacaccaagcagcccagcaagagctgccacaagcccaaggccatcgtgcacaccgagaaagtgaacatgatgagcctgaccgtgctgggcctgcggatgctgttcgccaaaaccgtggccgtgaacttcctgctgaccgccaagctgttcttcctc

SEQ ID NO: 7502 - DNA, 453 bp, Artificial Sequence; identical to SEQ ID NO: 1135
  Synthetic Polynucleotide

SEQ ID NO: 7503 - DNA, 450 bp, Artificial Sequence
  Synthetic Polynucleotide
cacaccaagcccagcgtgttcgtgatgaagaacggcaccaacgtggcctgcctcgtgaaagagttctaccccaaggacatcaggatcaacctggtgtccagcaagaagatcaccgagttcgaccccgccatcgtgatctcccccagcggcaagtacaacgccgtgaagctggggaagtacgaggacagcaacagcgtgacctgctccgtgcagcacgacaacaagaccgtgcacagcaccgactttgaagtgaaaaccgactccaccgaccacgtgaagcccaaagagacagagaacaccaagcagcccagcaagagctgccacaagcccaaggccatcgtgcacaccgagaaagtgaacatgatgagcctgaccgtgctgggcctgcggatgctgttcgccaaaaccgtggccgtgaacttcctgctgaccgccaagctgttcttcctc

SEQ ID NO: 7504 - DNA, 447 bp, Artificial Sequence
  Synthetic Polynucleotide
accaagcccagcgtgttcgtgatgaagaacggcaccaacgtggcctgcctcgtgaaagagttctaccccaaggacatcaggatcaacctggtgtccagcaagaagatcaccgagttcgaccccgccatcgtgatctcccccagcggcaagtacaacgccgtgaagctggggaagtacgaggacagcaacagcgtgacctgctccgtgcagcacgacaacaagaccgtgcacagcaccgactttgaagtgaaaaccgactccaccgaccacgtgaagcccaaagagacagagaacaccaagcagcccagcaagagctgccacaagcccaaggccatcgtgcacaccgagaaagtgaacatgatgagcctgaccgtgctgggcctgcggatgctgttcgccaaaaccgtggccgtgaacttcctgctgaccgccaagctgttcttcctc

SEQ ID NO: 7505 - DNA, 444 bp, Artificial Sequence
  Synthetic Polynucleotide
aagcccagcgtgttcgtgatgaagaacggcaccaacgtggcctgcctcgtgaaagagttctaccccaaggacatcaggatcaacctggtgtccagcaagaagatcaccgagttcgaccccgccatcgtgatctcccccagcggcaagtacaacgccgtgaagctggggaagtacgaggacagcaacagcgtgacctgctccgtgcagcacgacaacaagaccgtgcacagcaccgactttgaagtgaaaaccgactccaccgaccacgtgaagcccaaagagacagagaacaccaagcagcccagcaagagctgccacaagcccaaggccatcgtgcacaccgagaaagtgaacatgatgagcctgaccgtgctgggcctgcggatgctgttcgccaaaaccgtggccgtgaacttcctgctgaccgccaagctgttcttcctc

SEQ ID NO: 7506 - DNA, 438 bp, Artificial Sequence
  Synthetic Polynucleotide
agcgtgttcgtgatgaagaacggcaccaacgtggcctgcctcgtgaaagagttctaccccaaggacatcaggatcaacctggtgtccagcaagaagatcaccgagttcgaccccgccatcgtgatctcccccagcggcaagtacaacgccgtgaagctggggaagtacgaggacagcaacagcgtgacctgctccgtgcagcacgacaacaagaccgtgcacagcaccgactttgaagtgaaaaccgactccaccgaccacgtgaagcccaaagagacagagaacaccaagcagcccagcaagagctgccacaagcccaaggccatcgtgcacaccgagaaagtgaacatgatgagcctgaccgtgctgggcctgcggatgctgttcgccaaaaccgtggccgtgaacttcctgctgaccgccaagctgttcttcctc

SEQ ID NO: 7507 - DNA, 435 bp, Artificial Sequence; identical to SEQ ID NO: 1137
  Synthetic Polynucleotide

SEQ ID NO: 7508 - DNA, 432 bp, Artificial Sequence
  Synthetic Polynucleotide
ttcgtgatgaagaacggcaccaacgtggcctgcctcgtgaaagagttctaccccaaggacatcaggatcaacctggtgtccagcaagaagatcaccgagttcgaccccgccatcgtgatctcccccagcggcaagtacaacgccgtgaagctggggaagtacgaggacagcaacagcgtgacctgctccgtgcagcacgacaacaagaccgtgcacagcaccgactttgaagtgaaaaccgactccaccgaccacgtgaagcccaaagagacagagaacaccaagcagcccagcaagagctgccacaagcccaaggccatcgtgcacaccgagaaagtgaacatgatgagcctgaccgtgctgggcctgcggatgctgttcgccaaaaccgtggccgtgaacttcctgctgaccgccaagctgttcttcctc

SEQ ID NO: 7509 - DNA, 429 bp, Artificial Sequence
  Synthetic Polynucleotide
gtgatgaagaacggcaccaacgtggcctgcctcgtgaaagagttctaccccaaggacatcaggatcaacctggtgtccagcaagaagatcaccgagttcgaccccgccatcgtgatctcccccagcggcaagtacaacgccgtgaagctggggaagtacgaggacagcaacagcgtgacctgctccgtgcagcacgacaacaagaccgtgcacagcaccgactttgaagtgaaaaccgactccaccgaccacgtgaagcccaaagagacagagaacaccaagcagcccagcaagagctgccacaagcccaaggccatcgtgcacaccgagaaagtgaacatgatgagcctgaccgtgctgggcctgcggatgctgttcgccaaaaccgtggccgtgaacttcctgctgaccgccaagctgttcttcctc

SEQ ID NO: 7510 - DNA, 426 bp, Artificial Sequence
  Synthetic Polynucleotide
atgaagaacggcaccaacgtggcctgcctcgtgaaagagttctaccccaaggacatcaggatcaacctggtgtccagcaagaagatcaccgagttcgaccccgccatcgtgatctcccccagcggcaagtacaacgccgtgaagctggggaagtacgaggacagcaacagcgtgacctgctccgtgcagcacgacaacaagaccgtgcacagcaccgactttgaagtgaaaaccgactccaccgaccacgtgaagcccaaagagacagagaacaccaagcagcccagcaagagctgccacaagcccaaggccatcgtgcacaccgagaaagtgaacatgatgagcctgaccgtgctgggcctgcggatgctgttcgccaaaaccgtggccgtgaacttcctgctgaccgccaagctgttcttcctc

SEQ ID NO: 7511 - DNA, 423 bp, Artificial Sequence
  Synthetic Polynucleotide
aagaacggcaccaacgtggcctgcctcgtgaaagagttctaccccaaggacatcaggatcaacctggtgtccagcaagaagatcaccgagttcgaccccgccatcgtgatctcccccagcggcaagtacaacgccgtgaagctggggaagtacgaggacagcaacagcgtgacctgctccgtgcagcacgacaacaagaccgtgcacagcaccgactttgaagtgaaaaccgactccaccgaccacgtgaagcccaaagagacagagaacaccaagcagcccagcaagagctgccacaagcccaaggccatcgtgcacaccgagaaagtgaacatgatgagcctgaccgtgctgggcctgcggatgctgttcgccaaaaccgtggccgtgaacttcctgctgaccgccaagctgttcttcctc

SEQ ID NO: 7512 - DNA, 420 bp, Artificial Sequence; identical to SEQ ID NO: 1138
  Synthetic Polynucleotide

SEQ ID NO: 7513 - DNA, 417 bp, Artificial Sequence
  Synthetic Polynucleotide
ggcaccaacgtggcctgcctcgtgaaagagttctaccccaaggacatcaggatcaacctggtgtccagcaagaagatcaccgagttcgaccccgccatcgtgatctcccccagcggcaagtacaacgccgtgaagctggggaagtacgaggacagcaacagcgtgacctgctccgtgcagcacgacaacaagaccgtgcacagcaccgactttgaagtgaaaaccgactccaccgaccacgtgaagcccaaagagacagagaacaccaagcagcccagcaagagctgccacaagcccaaggccatcgtgcacaccgagaaagtgaacatgatgagcctgaccgtgctgggcctgcggatgctgttcgccaaaaccgtggccgtgaacttcctgctgaccgccaagctgttcttcctc

SEQ ID NO: 7514 - DNA, 414 bp, Artificial Sequence
  Synthetic Polynucleotide
accaacgtggcctgcctcgtgaaagagttctaccccaaggacatcaggatcaacctggtgtccagcaagaagatcaccgagttcgaccccgccatcgtgatctcccccagcggcaagtacaacgccgtgaagctggggaagtacgaggacagcaacagcgtgacctgctccgtgcagcacgacaacaagaccgtgcacagcaccgactttgaagtgaaaaccgactccaccgaccacgtgaagcccaaagagacagagaacaccaagcagcccagcaagagctgccacaagcccaaggccatcgtgcacaccgagaaagtgaacatgatgagcctgaccgtgctgggcctgcggatgctgttcgccaaaaccgtggccgtgaacttcctgctgaccgccaagctgttcttcctc

SEQ ID NO: 7515 - DNA, 411 bp, Artificial Sequence
  Synthetic Polynucleotide
aacgtggcctgcctcgtgaaagagttctaccccaaggacatcaggatcaacctggtgtccagcaagaagatcaccgagttcgaccccgccatcgtgatctcccccagcggcaagtacaacgccgtgaagctggggaagtacgaggacagcaacagcgtgacctgctccgtgcagcacgacaacaagaccgtgcacagcaccgactttgaagtgaaaaccgactccaccgaccacgtgaagcccaaagagacagagaacaccaagcagcccagcaagagctgccacaagcccaaggccatcgtgcacaccgagaaagtgaacatgatgagcctgaccgtgctgggcctgcggatgctgttcgccaaaaccgtggccgtgaacttcctgctgaccgccaagctgttcttcctc

SEQ ID NO: 7516 - DNA, 408 bp, Artificial Sequence
  Synthetic Polynucleotide
gtggcctgcctcgtgaaagagttctaccccaaggacatcaggatcaacctggtgtccagcaagaagatcaccgagttcgaccccgccatcgtgatctcccccagcggcaagtacaacgccgtgaagctggggaagtacgaggacagcaacagcgtgacctgctccgtgcagcacgacaacaagaccgtgcacagcaccgactttgaagtgaaaaccgactccaccgaccacgtgaagcccaaagagacagagaacaccaagcagcccagcaagagctgccacaagcccaaggccatcgtgcacaccgagaaagtgaacatgatgagcctgaccgtgctgggcctgcggatgctgttcgccaaaaccgtggccgtgaacttcctgctgaccgccaagctgttcttcctc

SEQ ID NO: 7517 - DNA, 405 bp, Artificial Sequence
  Synthetic Polynucleotide
gcctgcctcgtgaaagagttctaccccaaggacatcaggatcaacctggtgtccagcaagaagatcaccgagttcgaccccgccatcgtgatctcccccagcggcaagtacaacgccgtgaagctggggaagtacgaggacagcaacagcgtgacctgctccgtgcagcacgacaacaagaccgtgcacagcaccgactttgaagtgaaaaccgactccaccgaccacgtgaagcccaaagagacagagaacaccaagcagcccagcaagagctgccacaagcccaaggccatcgtgcacaccgagaaagtgaacatgatgagcctgaccgtgctgggcctgcggatgctgttcgccaaaaccgtggccgtgaacttcctgctgaccgccaagctgttcttcctc

SEQ ID NO: 7518 - DNA, 402 bp, Artificial Sequence
  Synthetic Polynucleotide
tgcctcgtgaaagagttctaccccaaggacatcaggatcaacctggtgtccagcaagaagatcaccgagttcgaccccgccatcgtgatctcccccagcggcaagtacaacgccgtgaagctggggaagtacgaggacagcaacagcgtgacctgctccgtgcagcacgacaacaagaccgtgcacagcaccgactttgaagtgaaaaccgactccaccgaccacgtgaagcccaaagagacagagaacaccaagcagcccagcaagagctgccacaagcccaaggccatcgtgcacaccgagaaagtgaacatgatgagcctgaccgtgctgggcctgcggatgctgttcgccaaaaccgtggccgtgaacttcctgctgaccgccaagctgttcttcctc

SEQ ID NO: 7519 - DNA, 399 bp, Artificial Sequence
  Synthetic Polynucleotide
ctcgtgaaagagttctaccccaaggacatcaggatcaacctggtgtccagcaagaagatcaccgagttcgaccccgccatcgtgatctcccccagcggcaagtacaacgccgtgaagctggggaagtacgaggacagcaacagcgtgacctgctccgtgcagcacgacaacaagaccgtgcacagcaccgactttgaagtgaaaaccgactccaccgaccacgtgaagcccaaagagacagagaacaccaagcagcccagcaagagctgccacaagcccaaggccatcgtgcacaccgagaaagtgaacatgatgagcctgaccgtgctgggcctgcggatgctgttcgccaaaaccgtggccgtgaacttcctgctgaccgccaagctgttcttcctc

SEQ ID NO: 7520 - DNA, 396 bp, Artificial Sequence
  Synthetic Polynucleotide
gtgaaagagttctaccccaaggacatcaggatcaacctggtgtccagcaagaagatcaccgagttcgaccccgccatcgtgatctcccccagcggcaagtacaacgccgtgaagctggggaagtacgaggacagcaacagcgtgacctgctccgtgcagcacgacaacaagaccgtgcacagcaccgactttgaagtgaaaaccgactccaccgaccacgtgaagcccaaagagacagagaacaccaagcagcccagcaagagctgccacaagcccaaggccatcgtgcacaccgagaaagtgaacatgatgagcctgaccgtgctgggcctgcggatgctgttcgccaaaaccgtggccgtgaacttcctgctgaccgccaagctgttcttcctc

SEQ ID NO: 7521 - DNA, 393 bp, Artificial Sequence
  Synthetic Polynucleotide
aaagagttctaccccaaggacatcaggatcaacctggtgtccagcaagaagatcaccgagttcgaccccgccatcgtgatctcccccagcggcaagtacaacgccgtgaagctggggaagtacgaggacagcaacagcgtgacctgctccgtgcagcacgacaacaagaccgtgcacagcaccgactttgaagtgaaaaccgactccaccgaccacgtgaagcccaaagagacagagaacaccaagcagcccagcaagagctgccacaagcccaaggccatcgtgcacaccgagaaagtgaacatgatgagcctgaccgtgctgggcctgcggatgctgttcgccaaaaccgtggccgtgaacttcctgctgaccgccaagctgttcttcctc

SEQ ID NO: 7522 - DNA, 390 bp, Artificial Sequence
  Synthetic Polynucleotide
gagttctaccccaaggacatcaggatcaacctggtgtccagcaagaagatcaccgagttcgaccccgccatcgtgatctcccccagcggcaagtacaacgccgtgaagctggggaagtacgaggacagcaacagcgtgacctgctccgtgcagcacgacaacaagaccgtgcacagcaccgactttgaagtgaaaaccgactccaccgaccacgtgaagcccaaagagacagagaacaccaagcagcccagcaagagctgccacaagcccaaggccatcgtgcacaccgagaaagtgaacatgatgagcctgaccgtgctgggcctgcggatgctgttcgccaaaaccgtggccgtgaacttcctgctgaccgccaagctgttcttcctc

SEQ ID NO: 7523 - DNA, 387 bp, Artificial Sequence
  Synthetic Polynucleotide
ttctaccccaaggacatcaggatcaacctggtgtccagcaagaagatcaccgagttcgaccccgccatcgtgatctcccccagcggcaagtacaacgccgtgaagctggggaagtacgaggacagcaacagcgtgacctgctccgtgcagcacgacaacaagaccgtgcacagcaccgactttgaagtgaaaaccgactccaccgaccacgtgaagcccaaagagacagagaacaccaagcagcccagcaagagctgccacaagcccaaggccatcgtgcacaccgagaaagtgaacatgatgagcctgaccgtgctgggcctgcggatgctgttcgccaaaaccgtggccgtgaacttcctgctgaccgccaagctgttcttcctc

SEQ ID NO: 7524 - DNA, 384 bp, Artificial Sequence
  Synthetic Polynucleotide
taccccaaggacatcaggatcaacctggtgtccagcaagaagatcaccgagttcgaccccgccatcgtgatctcccccagcggcaagtacaacgccgtgaagctggggaagtacgaggacagcaacagcgtgacctgctccgtgcagcacgacaacaagaccgtgcacagcaccgactttgaagtgaaaaccgactccaccgaccacgtgaagcccaaagagacagagaacaccaagcagcccagcaagagctgccacaagcccaaggccatcgtgcacaccgagaaagtgaacatgatgagcctgaccgtgctgggcctgcggatgctgttcgccaaaaccgtggccgtgaacttcctgctgaccgccaagctgttcttcctc

SEQ ID NO: 7525 - DNA, 381 bp, Artificial Sequence
  Synthetic Polynucleotide
cccaaggacatcaggatcaacctggtgtccagcaagaagatcaccgagttcgaccccgccatcgtgatctcccccagcggcaagtacaacgccgtgaagctggggaagtacgaggacagcaacagcgtgacctgctccgtgcagcacgacaacaagaccgtgcacagcaccgactttgaagtgaaaaccgactccaccgaccacgtgaagcccaaagagacagagaacaccaagcagcccagcaagagctgccacaagcccaaggccatcgtgcacaccgagaaagtgaacatgatgagcctgaccgtgctgggcctgcggatgctgttcgccaaaaccgtggccgtgaacttcctgctgaccgccaagctgttcttcctc

SEQ ID NO: 7526 - DNA, 378 bp, Artificial Sequence
  Synthetic Polynucleotide
aaggacatcaggatcaacctggtgtccagcaagaagatcaccgagttcgaccccgccatcgtgatctcccccagcggcaagtacaacgccgtgaagctggggaagtacgaggacagcaacagcgtgacctgctccgtgcagcacgacaacaagaccgtgcacagcaccgactttgaagtgaaaaccgactccaccgaccacgtgaagcccaaagagacagagaacaccaagcagcccagcaagagctgccacaagcccaaggccatcgtgcacaccgagaaagtgaacatgatgagcctgaccgtgctgggcctgcggatgctgttcgccaaaaccgtggccgtgaacttcctgctgaccgccaagctgttcttcctc

SEQ ID NO: 7527 - DNA, 375 bp, Artificial Sequence
  Synthetic Polynucleotide
gacatcaggatcaacctggtgtccagcaagaagatcaccgagttcgaccccgccatcgtgatctcccccagcggcaagtacaacgccgtgaagctggggaagtacgaggacagcaacagcgtgacctgctccgtgcagcacgacaacaagaccgtgcacagcaccgactttgaagtgaaaaccgactccaccgaccacgtgaagcccaaagagacagagaacaccaagcagcccagcaagagctgccacaagcccaaggccatcgtgcacaccgagaaagtgaacatgatgagcctgaccgtgctgggcctgcggatgctgttcgccaaaaccgtggccgtgaacttcctgctgaccgccaagctgttcttcctc

SEQ ID NO: 7528 - DNA, 372 bp, Artificial Sequence
  Synthetic Polynucleotide
atcaggatcaacctggtgtccagcaagaagatcaccgagttcgaccccgccatcgtgatctcccccagcggcaagtacaacgccgtgaagctggggaagtacgaggacagcaacagcgtgacctgctccgtgcagcacgacaacaagaccgtgcacagcaccgactttgaagtgaaaaccgactccaccgaccacgtgaagcccaaagagacagagaacaccaagcagcccagcaagagctgccacaagcccaaggccatcgtgcacaccgagaaagtgaacatgatgagcctgaccgtgctgggcctgcggatgctgttcgccaaaaccgtggccgtgaacttcctgctgaccgccaagctgttcttcctc

SEQ ID NO: 7529 - DNA, 369 bp, Artificial Sequence
  Synthetic Polynucleotide
aggatcaacctggtgtccagcaagaagatcaccgagttcgaccccgccatcgtgatctcccccagcggcaagtacaacgccgtgaagctggggaagtacgaggacagcaacagcgtgacctgctccgtgcagcacgacaacaagaccgtgcacagcaccgactttgaagtgaaaaccgactccaccgaccacgtgaagcccaaagagacagagaacaccaagcagcccagcaagagctgccacaagcccaaggccatcgtgcacaccgagaaagtgaacatgatgagcctgaccgtgctgggcctgcggatgctgttcgccaaaaccgtggccgtgaacttcctgctgaccgccaagctgttcttcctc

SEQ ID NO: 7530 - DNA, 366 bp, Artificial Sequence
  Synthetic Polynucleotide
atcaacctggtgtccagcaagaagatcaccgagttcgaccccgccatcgtgatctcccccagcggcaagtacaacgccgtgaagctggggaagtacgaggacagcaacagcgtgacctgctccgtgcagcacgacaacaagaccgtgcacagcaccgactttgaagtgaaaaccgactccaccgaccacgtgaagcccaaagagacagagaacaccaagcagcccagcaagagctgccacaagcccaaggccatcgtgcacaccgagaaagtgaacatgatgagcctgaccgtgctgggcctgcggatgctgttcgccaaaaccgtggccgtgaacttcctgctgaccgccaagctgttcttcctc

SEQ ID NO: 7531 - DNA, 363 bp, Artificial Sequence
  Synthetic Polynucleotide
aacctggtgtccagcaagaagatcaccgagttcgaccccgccatcgtgatctcccccagcggcaagtacaacgccgtgaagctggggaagtacgaggacagcaacagcgtgacctgctccgtgcagcacgacaacaagaccgtgcacagcaccgactttgaagtgaaaaccgactccaccgaccacgtgaagcccaaagagacagagaacaccaagcagcccagcaagagctgccacaagcccaaggccatcgtgcacaccgagaaagtgaacatgatgagcctgaccgtgctgggcctgcggatgctgttcgccaaaaccgtggccgtgaacttcctgctgaccgccaagctgttcttcctc

SEQ ID NO: 7532 - DNA, 360 bp, Artificial Sequence
  Synthetic Polynucleotide
ctggtgtccagcaagaagatcaccgagttcgaccccgccatcgtgatctcccccagcggcaagtacaacgccgtgaagctggggaagtacgaggacagcaacagcgtgacctgctccgtgcagcacgacaacaagaccgtgcacagcaccgactttgaagtgaaaaccgactccaccgaccacgtgaagcccaaagagacagagaacaccaagcagcccagcaagagctgccacaagcccaaggccatcgtgcacaccgagaaagtgaacatgatgagcctgaccgtgctgggcctgcggatgctgttcgccaaaaccgtggccgtgaacttcctgctgaccgccaagctgttcttcctc

SEQ ID NO: 7533 - DNA, 357 bp, Artificial Sequence
  Synthetic Polynucleotide
gtgtccagcaagaagatcaccgagttcgaccccgccatcgtgatctcccccagcggcaagtacaacgccgtgaagctggggaagtacgaggacagcaacagcgtgacctgctccgtgcagcacgacaacaagaccgtgcacagcaccgactttgaagtgaaaaccgactccaccgaccacgtgaagcccaaagagacagagaacaccaagcagcccagcaagagctgccacaagcccaaggccatcgtgcacaccgagaaagtgaacatgatgagcctgaccgtgctgggcctgcggatgctgttcgccaaaaccgtggccgtgaacttcctgctgaccgccaagctgttcttcctc

SEQ ID NO: 7534 - DNA, 354 bp, Artificial Sequence
  Synthetic Polynucleotide
tccagcaagaagatcaccgagttcgaccccgccatcgtgatctcccccagcggcaagtacaacgccgtgaagctggggaagtacgaggacagcaacagcgtgacctgctccgtgcagcacgacaacaagaccgtgcacagcaccgactttgaagtgaaaaccgactccaccgaccacgtgaagcccaaagagacagagaacaccaagcagcccagcaagagctgccacaagcccaaggccatcgtgcacaccgagaaagtgaacatgatgagcctgaccgtgctgggcctgcggatgctgttcgccaaaaccgtggccgtgaacttcctgctgaccgccaagctgttcttcctc

SEQ ID NO: 7535 - DNA, 351 bp, Artificial Sequence
  Synthetic Polynucleotide
agcaagaagatcaccgagttcgaccccgccatcgtgatctcccccagcggcaagtacaacgccgtgaagctggggaagtacgaggacagcaacagcgtgacctgctccgtgcagcacgacaacaagaccgtgcacagcaccgactttgaagtgaaaaccgactccaccgaccacgtgaagcccaaagagacagagaacaccaagcagcccagcaagagctgccacaagcccaaggccatcgtgcacaccgagaaagtgaacatgatgagcctgaccgtgctgggcctgcggatgctgttcgccaaaaccgtggccgtgaacttcctgctgaccgccaagctgttcttcctc

SEQ ID NO: 7536 - DNA, 348 bp, Artificial Sequence
  Synthetic Polynucleotide
aagaagatcaccgagttcgaccccgccatcgtgatctcccccagcggcaagtacaacgccgtgaagctggggaagtacgaggacagcaacagcgtgacctgctccgtgcagcacgacaacaagaccgtgcacagcaccgactttgaagtgaaaaccgactccaccgaccacgtgaagcccaaagagacagagaacaccaagcagcccagcaagagctgccacaagcccaaggccatcgtgcacaccgagaaagtgaacatgatgagcctgaccgtgctgggcctgcggatgctgttcgccaaaaccgtggccgtgaacttcctgctgaccgccaagctgttcttcctc

SEQ ID NO: 7537 - DNA, 345 bp, Artificial Sequence
  Synthetic Polynucleotide
aagatcaccgagttcgaccccgccatcgtgatctcccccagcggcaagtacaacgccgtgaagctggggaagtacgaggacagcaacagcgtgacctgctccgtgcagcacgacaacaagaccgtgcacagcaccgactttgaagtgaaaaccgactccaccgaccacgtgaagcccaaagagacagagaacaccaagcagcccagcaagagctgccacaagcccaaggccatcgtgcacaccgagaaagtgaacatgatgagcctgaccgtgctgggcctgcggatgctgttcgccaaaaccgtggccgtgaacttcctgctgaccgccaagctgttcttcctc

SEQ ID NO: 7538 - DNA, 342 bp, Artificial Sequence
  Synthetic Polynucleotide
atcaccgagttcgaccccgccatcgtgatctcccccagcggcaagtacaacgccgtgaagctggggaagtacgaggacagcaacagcgtgacctgctccgtgcagcacgacaacaagaccgtgcacagcaccgactttgaagtgaaaaccgactccaccgaccacgtgaagcccaaagagacagagaacaccaagcagcccagcaagagctgccacaagcccaaggccatcgtgcacaccgagaaagtgaacatgatgagcctgaccgtgctgggcctgcggatgctgttcgccaaaaccgtggccgtgaacttcctgctgaccgccaagctgttcttcctc

SEQ ID NO: 7539 - DNA, 339 bp, Artificial Sequence
  Synthetic Polynucleotide
accgagttcgaccccgccatcgtgatctcccccagcggcaagtacaacgccgtgaagctggggaagtacgaggacagcaacagcgtgacctgctccgtgcagcacgacaacaagaccgtgcacagcaccgactttgaagtgaaaaccgactccaccgaccacgtgaagcccaaagagacagagaacaccaagcagcccagcaagagctgccacaagcccaaggccatcgtgcacaccgagaaagtgaacatgatgagcctgaccgtgctgggcctgcggatgctgttcgccaaaaccgtggccgtgaacttcctgctgaccgccaagctgttcttcctc

SEQ ID NO: 7540 - DNA, 336 bp, Artificial Sequence
  Synthetic Polynucleotide
gagttcgaccccgccatcgtgatctcccccagcggcaagtacaacgccgtgaagctggggaagtacgaggacagcaacagcgtgacctgctccgtgcagcacgacaacaagaccgtgcacagcaccgactttgaagtgaaaaccgactccaccgaccacgtgaagcccaaagagacagagaacaccaagcagcccagcaagagctgccacaagcccaaggccatcgtgcacaccgagaaagtgaacatgatgagcctgaccgtgctgggcctgcggatgctgttcgccaaaaccgtggccgtgaacttcctgctgaccgccaagctgttcttcctc

SEQ ID NO: 7541 - DNA, 333 bp, Artificial Sequence
  Synthetic Polynucleotide
ttcgaccccgccatcgtgatctcccccagcggcaagtacaacgccgtgaagctggggaagtacgaggacagcaacagcgtgacctgctccgtgcagcacgacaacaagaccgtgcacagcaccgactttgaagtgaaaaccgactccaccgaccacgtgaagcccaaagagacagagaacaccaagcagcccagcaagagctgccacaagcccaaggccatcgtgcacaccgagaaagtgaacatgatgagcctgaccgtgctgggcctgcggatgctgttcgccaaaaccgtggccgtgaacttcctgctgaccgccaagctgttcttcctc

SEQ ID NO: 7542 - DNA, 330 bp, Artificial Sequence
  Synthetic Polynucleotide
gaccccgccatcgtgatctcccccagcggcaagtacaacgccgtgaagctggggaagtacgaggacagcaacagcgtgacctgctccgtgcagcacgacaacaagaccgtgcacagcaccgactttgaagtgaaaaccgactccaccgaccacgtgaagcccaaagagacagagaacaccaagcagcccagcaagagctgccacaagcccaaggccatcgtgcacaccgagaaagtgaacatgatgagcctgaccgtgctgggcctgcggatgctgttcgccaaaaccgtggccgtgaacttcctgctgaccgccaagctgttcttcctc

SEQ ID NO: 7543 - DNA, 327 bp, Artificial Sequence
  Synthetic Polynucleotide
cccgccatcgtgatctcccccagcggcaagtacaacgccgtgaagctggggaagtacgaggacagcaacagcgtgacctgctccgtgcagcacgacaacaagaccgtgcacagcaccgactttgaagtgaaaaccgactccaccgaccacgtgaagcccaaagagacagagaacaccaagcagcccagcaagagctgccacaagcccaaggccatcgtgcacaccgagaaagtgaacatgatgagcctgaccgtgctgggcctgcggatgctgttcgccaaaaccgtggccgtgaacttcctgctgaccgccaagctgttcttcctc

SEQ ID NO: 7544 - DNA, 324 bp, Artificial Sequence
  Synthetic Polynucleotide
gccatcgtgatctcccccagcggcaagtacaacgccgtgaagctggggaagtacgaggacagcaacagcgtgacctgctccgtgcagcacgacaacaagaccgtgcacagcaccgactttgaagtgaaaaccgactccaccgaccacgtgaagcccaaagagacagagaacaccaagcagcccagcaagagctgccacaagcccaaggccatcgtgcacaccgagaaagtgaacatgatgagcctgaccgtgctgggcctgcggatgctgttcgccaaaaccgtggccgtgaacttcctgctgaccgccaagctgttcttcctc

SEQ ID NO: 7545 - DNA, 321 bp, Artificial Sequence
  Synthetic Polynucleotide
atcgtgatctcccccagcggcaagtacaacgccgtgaagctggggaagtacgaggacagcaacagcgtgacctgctccgtgcagcacgacaacaagaccgtgcacagcaccgactttgaagtgaaaaccgactccaccgaccacgtgaagcccaaagagacagagaacaccaagcagcccagcaagagctgccacaagcccaaggccatcgtgcacaccgagaaagtgaacatgatgagcctgaccgtgctgggcctgcggatgctgttcgccaaaaccgtggccgtgaacttcctgctgaccgccaagctgttcttcctc

SEQ ID NO: 7546 - DNA, 318 bp, Artificial Sequence
  Synthetic Polynucleotide
gtgatctcccccagcggcaagtacaacgccgtgaagctggggaagtacgaggacagcaacagcgtgacctgctccgtgcagcacgacaacaagaccgtgcacagcaccgactttgaagtgaaaaccgactccaccgaccacgtgaagcccaaagagacagagaacaccaagcagcccagcaagagctgccacaagcccaaggccatcgtgcacaccgagaaagtgaacatgatgagcctgaccgtgctgggcctgcggatgctgttcgccaaaaccgtggccgtgaacttcctgctgaccgccaagctgttcttcctc

SEQ ID NO: 7547 - DNA, 315 bp, Artificial Sequence
  Synthetic Polynucleotide
atctcccccagcggcaagtacaacgccgtgaagctggggaagtacgaggacagcaacagcgtgacctgctccgtgcagcacgacaacaagaccgtgcacagcaccgactttgaagtgaaaaccgactccaccgaccacgtgaagcccaaagagacagagaacaccaagcagcccagcaagagctgccacaagcccaaggccatcgtgcacaccgagaaagtgaacatgatgagcctgaccgtgctgggcctgcggatgctgttcgccaaaaccgtggccgtgaacttcctgctgaccgccaagctgttcttcctc

SEQ ID NO: 7548 - DNA, 312 bp, Artificial Sequence
  Synthetic Polynucleotide
tcccccagcggcaagtacaacgccgtgaagctggggaagtacgaggacagcaacagcgtgacctgctccgtgcagcacgacaacaagaccgtgcacagcaccgactttgaagtgaaaaccgactccaccgaccacgtgaagcccaaagagacagagaacaccaagcagcccagcaagagctgccacaagcccaaggccatcgtgcacaccgagaaagtgaacatgatgagcctgaccgtgctgggcctgcggatgctgttcgccaaaaccgtggccgtgaacttcctgctgaccgccaagctgttcttcctc

SEQ ID NO: 7549 - DNA, 309 bp, Artificial Sequence
  Synthetic Polynucleotide
cccagcggcaagtacaacgccgtgaagctggggaagtacgaggacagcaacagcgtgacctgctccgtgcagcacgacaacaagaccgtgcacagcaccgactttgaagtgaaaaccgactccaccgaccacgtgaagcccaaagagacagagaacaccaagcagcccagcaagagctgccacaagcccaaggccatcgtgcacaccgagaaagtgaacatgatgagcctgaccgtgctgggcctgcggatgctgttcgccaaaaccgtggccgtgaacttcctgctgaccgccaagctgttcttcctc

SEQ ID NO: 7550 - DNA, 306 bp, Artificial Sequence
  Synthetic Polynucleotide
agcggcaagtacaacgccgtgaagctggggaagtacgaggacagcaacagcgtgacctgctccgtgcagcacgacaacaagaccgtgcacagcaccgactttgaagtgaaaaccgactccaccgaccacgtgaagcccaaagagacagagaacaccaagcagcccagcaagagctgccacaagcccaaggccatcgtgcacaccgagaaagtgaacatgatgagcctgaccgtgctgggcctgcggatgctgttcgccaaaaccgtggccgtgaacttcctgctgaccgccaagctgttcttcctc

SEQ ID NO: 7551 - DNA, 303 bp, Artificial Sequence
  Synthetic Polynucleotide
ggcaagtacaacgccgtgaagctggggaagtacgaggacagcaacagcgtgacctgctccgtgcagcacgacaacaagaccgtgcacagcaccgactttgaagtgaaaaccgactccaccgaccacgtgaagcccaaagagacagagaacaccaagcagcccagcaagagctgccacaagcccaaggccatcgtgcacaccgagaaagtgaacatgatgagcctgaccgtgctgggcctgcggatgctgttcgccaaaaccgtggccgtgaacttcctgctgaccgccaagctgttcttcctc

SEQ ID NO: 7552 - DNA, 300 bp, Artificial Sequence
  Synthetic Polynucleotide
aagtacaacgccgtgaagctggggaagtacgaggacagcaacagcgtgacctgctccgtgcagcacgacaacaagaccgtgcacagcaccgactttgaagtgaaaaccgactccaccgaccacgtgaagcccaaagagacagagaacaccaagcagcccagcaagagctgccacaagcccaaggccatcgtgcacaccgagaaagtgaacatgatgagcctgaccgtgctgggcctgcggatgctgttcgccaaaaccgtggccgtgaacttcctgctgaccgccaagctgttcttcctc

SEQ ID NO: 7553 - DNA, 297 bp, Artificial Sequence
  Synthetic Polynucleotide
tacaacgccgtgaagctggggaagtacgaggacagcaacagcgtgacctgctccgtgcagcacgacaacaagaccgtgcacagcaccgactttgaagtgaaaaccgactccaccgaccacgtgaagcccaaagagacagagaacaccaagcagcccagcaagagctgccacaagcccaaggccatcgtgcacaccgagaaagtgaacatgatgagcctgaccgtgctgggcctgcggatgctgttcgccaaaaccgtggccgtgaacttcctgctgaccgccaagctgttcttcctc

SEQ ID NO: 7554 - DNA, 294 bp, Artificial Sequence
  Synthetic Polynucleotide
aacgccgtgaagctggggaagtacgaggacagcaacagcgtgacctgctccgtgcagcacgacaacaagaccgtgcacagcaccgactttgaagtgaaaaccgactccaccgaccacgtgaagcccaaagagacagagaacaccaagcagcccagcaagagctgccacaagcccaaggccatcgtgcacaccgagaaagtgaacatgatgagcctgaccgtgctgggcctgcggatgctgttcgccaaaaccgtggccgtgaacttcctgctgaccgccaagctgttcttcctc

SEQ ID NO: 7555 - DNA, 291 bp, Artificial Sequence
  Synthetic Polynucleotide
gccgtgaagctggggaagtacgaggacagcaacagcgtgacctgctccgtgcagcacgacaacaagaccgtgcacagcaccgactttgaagtgaaaaccgactccaccgaccacgtgaagcccaaagagacagagaacaccaagcagcccagcaagagctgccacaagcccaaggccatcgtgcacaccgagaaagtgaacatgatgagcctgaccgtgctgggcctgcggatgctgttcgccaaaaccgtggccgtgaacttcctgctgaccgccaagctgttcttcctc

SEQ ID NO: 7556 - DNA, 288 bp, Artificial Sequence
  Synthetic Polynucleotide
gtgaagctggggaagtacgaggacagcaacagcgtgacctgctccgtgcagcacgacaacaagaccgtgcacagcaccgactttgaagtgaaaaccgactccaccgaccacgtgaagcccaaagagacagagaacaccaagcagcccagcaagagctgccacaagcccaaggccatcgtgcacaccgagaaagtgaacatgatgagcctgaccgtgctgggcctgcggatgctgttcgccaaaaccgtggccgtgaacttcctgctgaccgccaagctgttcttcctc

SEQ ID NO: 7557 - DNA, 285 bp, Artificial Sequence
  Synthetic Polynucleotide
aagctggggaagtacgaggacagcaacagcgtgacctgctccgtgcagcacgacaacaagaccgtgcacagcaccgactttgaagtgaaaaccgactccaccgaccacgtgaagcccaaagagacagagaacaccaagcagcccagcaagagctgccacaagcccaaggccatcgtgcacaccgagaaagtgaacatgatgagcctgaccgtgctgggcctgcggatgctgttcgccaaaaccgtggccgtgaacttcctgctgaccgccaagctgttcttcctc

SEQ ID NO: 7558 - DNA, 282 bp, Artificial Sequence
  Synthetic Polynucleotide
ctggggaagtacgaggacagcaacagcgtgacctgctccgtgcagcacgacaacaagaccgtgcacagcaccgactttgaagtgaaaaccgactccaccgaccacgtgaagcccaaagagacagagaacaccaagcagcccagcaagagctgccacaagcccaaggccatcgtgcacaccgagaaagtgaacatgatgagcctgaccgtgctgggcctgcggatgctgttcgccaaaaccgtggccgtgaacttcctgctgaccgccaagctgttcttcctc

SEQ ID NO: 7559 - DNA, 279 bp, Artificial Sequence
  Synthetic Polynucleotide
gggaagtacgaggacagcaacagcgtgacctgctccgtgcagcacgacaacaagaccgtgcacagcaccgactttgaagtgaaaaccgactccaccgaccacgtgaagcccaaagagacagagaacaccaagcagcccagcaagagctgccacaagcccaaggccatcgtgcacaccgagaaagtgaacatgatgagcctgaccgtgctgggcctgcggatgctgttcgccaaaaccgtggccgtgaacttcctgctgaccgccaagctgttcttcctc

SEQ ID NO: 7560 - DNA, 276 bp, Artificial Sequence
  Synthetic Polynucleotide
aagtacgaggacagcaacagcgtgacctgctccgtgcagcacgacaacaagaccgtgcacagcaccgactttgaagtgaaaaccgactccaccgaccacgtgaagcccaaagagacagagaacaccaagcagcccagcaagagctgccacaagcccaaggccatcgtgcacaccgagaaagtgaacatgatgagcctgaccgtgctgggcctgcggatgctgttcgccaaaaccgtggccgtgaacttcctgctgaccgccaagctgttcttcctc

SEQ ID NO: 7561 - DNA, 273 bp, Artificial Sequence
  Synthetic Polynucleotide
tacgaggacagcaacagcgtgacctgctccgtgcagcacgacaacaagaccgtgcacagcaccgactttgaagtgaaaaccgactccaccgaccacgtgaagcccaaagagacagagaacaccaagcagcccagcaagagctgccacaagcccaaggccatcgtgcacaccgagaaagtgaacatgatgagcctgaccgtgctgggcctgcggatgctgttcgccaaaaccgtggccgtgaacttcctgctgaccgccaagctgttcttcctc

SEQ ID NO: 7562 - DNA, 270 bp, Artificial Sequence
  Synthetic Polynucleotide
gaggacagcaacagcgtgacctgctccgtgcagcacgacaacaagaccgtgcacagcaccgactttgaagtgaaaaccgactccaccgaccacgtgaagcccaaagagacagagaacaccaagcagcccagcaagagctgccacaagcccaaggccatcgtgcacaccgagaaagtgaacatgatgagcctgaccgtgctgggcctgcggatgctgttcgccaaaaccgtggccgtgaacttcctgctgaccgccaagctgttcttcctc

SEQ ID NO: 7563 - DNA, 267 bp, Artificial Sequence
  Synthetic Polynucleotide
gacagcaacagcgtgacctgctccgtgcagcacgacaacaagaccgtgcacagcaccgactttgaagtgaaaaccgactccaccgaccacgtgaagcccaaagagacagagaacaccaagcagcccagcaagagctgccacaagcccaaggccatcgtgcacaccgagaaagtgaacatgatgagcctgaccgtgctgggcctgcggatgctgttcgccaaaaccgtggccgtgaacttcctgctgaccgccaagctgttcttcctc

SEQ ID NO: 7564 - DNA, 264 bp, Artificial Sequence
  Synthetic Polynucleotide
agcaacagcgtgacctgctccgtgcagcacgacaacaagaccgtgcacagcaccgactttgaagtgaaaaccgactccaccgaccacgtgaagcccaaagagacagagaacaccaagcagcccagcaagagctgccacaagcccaaggccatcgtgcacaccgagaaagtgaacatgatgagcctgaccgtgctgggcctgcggatgctgttcgccaaaaccgtggccgtgaacttcctgctgaccgccaagctgttcttcctc

SEQ ID NO: 7565 - DNA, 261 bp, Artificial Sequence
  Synthetic Polynucleotide
aacagcgtgacctgctccgtgcagcacgacaacaagaccgtgcacagcaccgactttgaagtgaaaaccgactccaccgaccacgtgaagcccaaagagacagagaacaccaagcagcccagcaagagctgccacaagcccaaggccatcgtgcacaccgagaaagtgaacatgatgagcctgaccgtgctgggcctgcggatgctgttcgccaaaaccgtggccgtgaacttcctgctgaccgccaagctgttcttcctc

SEQ ID NO: 7566 - DNA, 258 bp, Artificial Sequence
  Synthetic Polynucleotide
agcgtgacctgctccgtgcagcacgacaacaagaccgtgcacagcaccgactttgaagtgaaaaccgactccaccgaccacgtgaagcccaaagagacagagaacaccaagcagcccagcaagagctgccacaagcccaaggccatcgtgcacaccgagaaagtgaacatgatgagcctgaccgtgctgggcctgcggatgctgttcgccaaaaccgtggccgtgaacttcctgctgaccgccaagctgttcttcctc

SEQ ID NO: 7567 - DNA, 255 bp, Artificial Sequence
  Synthetic Polynucleotide
gtgacctgctccgtgcagcacgacaacaagaccgtgcacagcaccgactttgaagtgaaaaccgactccaccgaccacgtgaagcccaaagagacagagaacaccaagcagcccagcaagagctgccacaagcccaaggccatcgtgcacaccgagaaagtgaacatgatgagcctgaccgtgctgggcctgcggatgctgttcgccaaaaccgtggccgtgaacttcctgctgaccgccaagctgttcttcctc

SEQ ID NO: 7568 - DNA, 252 bp, Artificial Sequence
  Synthetic Polynucleotide
acctgctccgtgcagcacgacaacaagaccgtgcacagcaccgactttgaagtgaaaaccgactccaccgaccacgtgaagcccaaagagacagagaacaccaagcagcccagcaagagctgccacaagcccaaggccatcgtgcacaccgagaaagtgaacatgatgagcctgaccgtgctgggcctgcggatgctgttcgccaaaaccgtggccgtgaacttcctgctgaccgccaagctgttcttcctc

SEQ ID NO: 7569 - DNA, 249 bp, Artificial Sequence
  Synthetic Polynucleotide
tgctccgtgcagcacgacaacaagaccgtgcacagcaccgactttgaagtgaaaaccgactccaccgaccacgtgaagcccaaagagacagagaacaccaagcagcccagcaagagctgccacaagcccaaggccatcgtgcacaccgagaaagtgaacatgatgagcctgaccgtgctgggcctgcggatgctgttcgccaaaaccgtggccgtgaacttcctgctgaccgccaagctgttcttcctc

SEQ ID NO: 7570 - DNA, 246 bp, Artificial Sequence
  Synthetic Polynucleotide
tccgtgcagcacgacaacaagaccgtgcacagcaccgactttgaagtgaaaaccgactccaccgaccacgtgaagcccaaagagacagagaacaccaagcagcccagcaagagctgccacaagcccaaggccatcgtgcacaccgagaaagtgaacatgatgagcctgaccgtgctgggcctgcggatgctgttcgccaaaaccgtggccgtgaacttcctgctgaccgccaagctgttcttcctc

SEQ ID NO: 7571 - DNA, 243 bp, Artificial Sequence
  Synthetic Polynucleotide
gtgcagcacgacaacaagaccgtgcacagcaccgactttgaagtgaaaaccgactccaccgaccacgtgaagcccaaagagacagagaacaccaagcagcccagcaagagctgccacaagcccaaggccatcgtgcacaccgagaaagtgaacatgatgagcctgaccgtgctgggcctgcggatgctgttcgccaaaaccgtggccgtgaacttcctgctgaccgccaagctgttcttcctc

SEQ ID NO: 7572 - DNA, 240 bp, Artificial Sequence
  Synthetic Polynucleotide
cagcacgacaacaagaccgtgcacagcaccgactttgaagtgaaaaccgactccaccgaccacgtgaagcccaaagagacagagaacaccaagcagcccagcaagagctgccacaagcccaaggccatcgtgcacaccgagaaagtgaacatgatgagcctgaccgtgctgggcctgcggatgctgttcgccaaaaccgtggccgtgaacttcctgctgaccgccaagctgttcttcctc

SEQ ID NO: 7573 - DNA, 237 bp, Artificial Sequence
  Synthetic Polynucleotide
cacgacaacaagaccgtgcacagcaccgactttgaagtgaaaaccgactccaccgaccacgtgaagcccaaagagacagagaacaccaagcagcccagcaagagctgccacaagcccaaggccatcgtgcacaccgagaaagtgaacatgatgagcctgaccgtgctgggcctgcggatgctgttcgccaaaaccgtggccgtgaacttcctgctgaccgccaagctgttcttcctc

SEQ ID NO: 7574 - DNA, 234 bp, Artificial Sequence
  Synthetic Polynucleotide
gacaacaagaccgtgcacagcaccgactttgaagtgaaaaccgactccaccgaccacgtgaagcccaaagagacagagaacaccaagcagcccagcaagagctgccacaagcccaaggccatcgtgcacaccgagaaagtgaacatgatgagcctgaccgtgctgggcctgcggatgctgttcgccaaaaccgtggccgtgaacttcctgctgaccgccaagctgttcttcctc

SEQ ID NO: 7575 - DNA, 231 bp, Artificial Sequence
  Synthetic Polynucleotide
aacaagaccgtgcacagcaccgactttgaagtgaaaaccgactccaccgaccacgtgaagcccaaagagacagagaacaccaagcagcccagcaagagctgccacaagcccaaggccatcgtgcacaccgagaaagtgaacatgatgagcctgaccgtgctgggcctgcggatgctgttcgccaaaaccgtggccgtgaacttcctgctgaccgccaagctgttcttcctc

SEQ ID NO: 7576 - DNA, 228 bp, Artificial Sequence
  Synthetic Polynucleotide
aagaccgtgcacagcaccgactttgaagtgaaaaccgactccaccgaccacgtgaagcccaaagagacagagaacaccaagcagcccagcaagagctgccacaagcccaaggccatcgtgcacaccgagaaagtgaacatgatgagcctgaccgtgctgggcctgcggatgctgttcgccaaaaccgtggccgtgaacttcctgctgaccgccaagctgttcttcctc

SEQ ID NO: 7577 - DNA, 225 bp, Artificial Sequence
  Synthetic Polynucleotide
accgtgcacagcaccgactttgaagtgaaaaccgactccaccgaccacgtgaagcccaaagagacagagaacaccaagcagcccagcaagagctgccacaagcccaaggccatcgtgcacaccgagaaagtgaacatgatgagcctgaccgtgctgggcctgcggatgctgttcgccaaaaccgtggccgtgaacttcctgctgaccgccaagctgttcttcctc

SEQ ID NO: 7578 - DNA, 222 bp, Artificial Sequence
  Synthetic Polynucleotide
gtgcacagcaccgactttgaagtgaaaaccgactccaccgaccacgtgaagcccaaagagacagagaacaccaagcagcccagcaagagctgccacaagcccaaggccatcgtgcacaccgagaaagtgaacatgatgagcctgaccgtgctgggcctgcggatgctgttcgccaaaaccgtggccgtgaacttcctgctgaccgccaagctgttcttcctc

SEQ ID NO: 7579 - DNA, 219 bp, Artificial Sequence
  Synthetic Polynucleotide
cacagcaccgactttgaagtgaaaaccgactccaccgaccacgtgaagcccaaagagacagagaacaccaagcagcccagcaagagctgccacaagcccaaggccatcgtgcacaccgagaaagtgaacatgatgagcctgaccgtgctgggcctgcggatgctgttcgccaaaaccgtggccgtgaacttcctgctgaccgccaagctgttcttcctc

SEQ ID NO: 7580 - DNA, 216 bp, Artificial Sequence
  Synthetic Polynucleotide
agcaccgactttgaagtgaaaaccgactccaccgaccacgtgaagcccaaagagacagagaacaccaagcagcccagcaagagctgccacaagcccaaggccatcgtgcacaccgagaaagtgaacatgatgagcctgaccgtgctgggcctgcggatgctgttcgccaaaaccgtggccgtgaacttcctgctgaccgccaagctgttcttcctc

SEQ ID NO: 7581 - DNA, 213 bp, Artificial Sequence
  Synthetic Polynucleotide
accgactttgaagtgaaaaccgactccaccgaccacgtgaagcccaaagagacagagaacaccaagcagcccagcaagagctgccacaagcccaaggccatcgtgcacaccgagaaagtgaacatgatgagcctgaccgtgctgggcctgcggatgctgttcgccaaaaccgtggccgtgaacttcctgctgaccgccaagctgttcttcctc

SEQ ID NO: 7582 - DNA, 210 bp, Artificial Sequence
  Synthetic Polynucleotide
gactttgaagtgaaaaccgactccaccgaccacgtgaagcccaaagagacagagaacaccaagcagcccagcaagagctgccacaagcccaaggccatcgtgcacaccgagaaagtgaacatgatgagcctgaccgtgctgggcctgcggatgctgttcgccaaaaccgtggccgtgaacttcctgctgaccgccaagctgttcttcctc

SEQ ID NO: 7583 - DNA, 207 bp, Artificial Sequence
  Synthetic Polynucleotide
tttgaagtgaaaaccgactccaccgaccacgtgaagcccaaagagacagagaacaccaagcagcccagcaagagctgccacaagcccaaggccatcgtgcacaccgagaaagtgaacatgatgagcctgaccgtgctgggcctgcggatgctgttcgccaaaaccgtggccgtgaacttcctgctgaccgccaagctgttcttcctc

SEQ ID NO: 7584 - DNA, 204 bp, Artificial Sequence; identical to SEQ ID NO: 1139
  Synthetic Polynucleotide

SEQ ID NO: 7585 - DNA, 201 bp, Artificial Sequence
  Synthetic Polynucleotide
gtgaaaaccgactccaccgaccacgtgaagcccaaagagacagagaacaccaagcagcccagcaagagctgccacaagcccaaggccatcgtgcacaccgagaaagtgaacatgatgagcctgaccgtgctgggcctgcggatgctgttcgccaaaaccgtggccgtgaacttcctgctgaccgccaagctgttcttcctc

SEQ ID NO: 7586 - DNA, 198 bp, Artificial Sequence
  Synthetic Polynucleotide
aaaaccgactccaccgaccacgtgaagcccaaagagacagagaacaccaagcagcccagcaagagctgccacaagcccaaggccatcgtgcacaccgagaaagtgaacatgatgagcctgaccgtgctgggcctgcggatgctgttcgccaaaaccgtggccgtgaacttcctgctgaccgccaagctgttcttcctc

SEQ ID NO: 7587 - DNA, 195 bp, Artificial Sequence
  Synthetic Polynucleotide
accgactccaccgaccacgtgaagcccaaagagacagagaacaccaagcagcccagcaagagctgccacaagcccaaggccatcgtgcacaccgagaaagtgaacatgatgagcctgaccgtgctgggcctgcggatgctgttcgccaaaaccgtggccgtgaacttcctgctgaccgccaagctgttcttcctc

SEQ ID NO: 7588 - DNA, 192 bp, Artificial Sequence
  Synthetic Polynucleotide
gactccaccgaccacgtgaagcccaaagagacagagaacaccaagcagcccagcaagagctgccacaagcccaaggccatcgtgcacaccgagaaagtgaacatgatgagcctgaccgtgctgggcctgcggatgctgttcgccaaaaccgtggccgtgaacttcctgctgaccgccaagctgttcttcctc

SEQ ID NO: 7589 - DNA, 189 bp, Artificial Sequence
  Synthetic Polynucleotide
tccaccgaccacgtgaagcccaaagagacagagaacaccaagcagcccagcaagagctgccacaagcccaaggccatcgtgcacaccgagaaagtgaacatgatgagcctgaccgtgctgggcctgcggatgctgttcgccaaaaccgtggccgtgaacttcctgctgaccgccaagctgttcttcctc

SEQ ID NO: 7590 - DNA, 186 bp, Artificial Sequence
  Synthetic Polynucleotide
accgaccacgtgaagcccaaagagacagagaacaccaagcagcccagcaagagctgccacaagcccaaggccatcgtgcacaccgagaaagtgaacatgatgagcctgaccgtgctgggcctgcggatgctgttcgccaaaaccgtggccgtgaacttcctgctgaccgccaagctgttcttcctc

SEQ ID NO: 7591 - DNA, 183 bp, Artificial Sequence; identical to SEQ ID NO: 1140
  Synthetic Polynucleotide

SEQ ID NO: 7592 - DNA, 180 bp, Artificial Sequence
  Synthetic Polynucleotide
cacgtgaagcccaaagagacagagaacaccaagcagcccagcaagagctgccacaagcccaaggccatcgtgcacaccgagaaagtgaacatgatgagcctgaccgtgctgggcctgcggatgctgttcgccaaaaccgtggccgtgaacttcctgctgaccgccaagctgttcttcctc

SEQ ID NO: 7593 - DNA, 177 bp, Artificial Sequence
  Synthetic Polynucleotide
gtgaagcccaaagagacagagaacaccaagcagcccagcaagagctgccacaagcccaaggccatcgtgcacaccgagaaagtgaacatgatgagcctgaccgtgctgggcctgcggatgctgttcgccaaaaccgtggccgtgaacttcctgctgaccgccaagctgttcttcctc

SEQ ID NO: 7594 - DNA, 174 bp, Artificial Sequence
  Synthetic Polynucleotide
aagcccaaagagacagagaacaccaagcagcccagcaagagctgccacaagcccaaggccatcgtgcacaccgagaaagtgaacatgatgagcctgaccgtgctgggcctgcggatgctgttcgccaaaaccgtggccgtgaacttcctgctgaccgccaagctgttcttcctc

SEQ ID NO: 7595 - DNA, 171 bp, Artificial Sequence
  Synthetic Polynucleotide
cccaaagagacagagaacaccaagcagcccagcaagagctgccacaagcccaaggccatcgtgcacaccgagaaagtgaacatgatgagcctgaccgtgctgggcctgcggatgctgttcgccaaaaccgtggccgtgaacttcctgctgaccgccaagctgttcttcctc

SEQ ID NO: 7596 - DNA, 168 bp, Artificial Sequence
  Synthetic Polynucleotide
aaagagacagagaacaccaagcagcccagcaagagctgccacaagcccaaggccatcgtgcacaccgagaaagtgaacatgatgagcctgaccgtgctgggcctgcggatgctgttcgccaaaaccgtggccgtgaacttcctgctgaccgccaagctgttcttcctc

SEQ ID NO: 7597 - DNA, 165 bp, Artificial Sequence
  Synthetic Polynucleotide
gagacagagaacaccaagcagcccagcaagagctgccacaagcccaaggccatcgtgcacaccgagaaagtgaacatgatgagcctgaccgtgctgggcctgcggatgctgttcgccaaaaccgtggccgtgaacttcctgctgaccgccaagctgttcttcctc

SEQ ID NO: 7598 - DNA, 162 bp, Artificial Sequence
  Synthetic Polynucleotide
acagagaacaccaagcagcccagcaagagctgccacaagcccaaggccatcgtgcacaccgagaaagtgaacatgatgagcctgaccgtgctgggcctgcggatgctgttcgccaaaaccgtggccgtgaacttcctgctgaccgccaagctgttcttcctc

SEQ ID NO: 7599 - DNA, 159 bp, Artificial Sequence
  Synthetic Polynucleotide
gagaacaccaagcagcccagcaagagctgccacaagcccaaggccatcgtgcacaccgagaaagtgaacatgatgagcctgaccgtgctgggcctgcggatgctgttcgccaaaaccgtggccgtgaacttcctgctgaccgccaagctgttcttcctc

SEQ ID NO: 7600 - DNA, 156 bp, Artificial Sequence
  Synthetic Polynucleotide
aacaccaagcagcccagcaagagctgccacaagcccaaggccatcgtgcacaccgagaaagtgaacatgatgagcctgaccgtgctgggcctgcggatgctgttcgccaaaaccgtggccgtgaacttcctgctgaccgccaagctgttcttcctc

SEQ ID NO: 7601 - DNA, 1890 bp, Artificial Sequence
  Synthetic Polynucleotide
atggccttaccagtgaccgccttgctcctgccgctggccttgctgctccacgccgccaggccggcatgcgaagtgcagctgcttgaaagtggcggcggactgattcagcctggcggatctctgagactgagctgtgccgccagcggcttcaccttttctagccacgccatgacctgggtccgacaggcacctggaaaagggcttgaatgggtgtccgccatcagcggctctggcgattacacacactacgccgacagcgtgaagggcagattcaccatcagcagagacaacagcaagaacaccgtgtacctccagatgaacagcctgagagccgaggacagcgccgtgtattattgcgccaaggatgaggatggcggcagcctgcttggacacagaggacaaggcaccctggtcaccgtttcttccggtaccggcggaggcggatctggcggcggaggtagcggtggcggaggatctgaattcggcatgcggactgaagacctcccaaaggctgtggtgttcctggagcctcaatggtacagggtgctggagaaggacagtgtgactctgaagtgccagggagcctactcccctgaggacaattccacacagtggtttcacaatgagagcctcatctcaagccaggcctccagctacttcattgacgctgccacagtggacgacagtggagagtacaggtgccagacaaacctctccaccctcagtgacccggtgcagctagaagtccatatcggctggctgttgctccaggcccctcggtgggtgttcaaggaggaagaccctattcacctgaggtgtcacagctggaagaacactgctctgcataaggtcacatatttacagaatggcaaaggcaggaagtattttcatcataattctgacttctacattccaaaagccacactcaaagacagcggctcctacttctgcagggggcttgttgggagtaaaaatgtgtcttcagagactgtgaacatcaccatcactcaaggtttggcagtgtcaaccatctcatcattctttccacctggctaccaagtgtccttctgcctggtcatggtgctgctgttcgccgtggataccggcctgtacttcagcgtcaagaccaacatccggtccagcaccagagactggaaggaccacaagttcaagtggcggaaggaccctcaggacaagagggccaagcgatctggatctggagcaacaaacttctcactactcaaacaagcaggtgacgtggaggagaatcccgggcctactagaggccatatgaccgagtacaagcccacggtgcgcctcgccacccgcgacgacgtccccagggccgtacgcaccctcgccgccgcgttcgccgactaccccgccacgcgccacaccgtcgatccggaccgccacatcgagcgggtcaccgagctgcaagaactcttcctcacgcgcgtcgggctcgacatcggcaaggtgtgggtcgcggacgacggcgccgcggtggcggtctggaccacgccggagagcgtcgaagcgggggcggtgttcgccgagatcggcccgcgcatggccgagttgagcggttcccggctggccgcgcagcaacagatggaaggcctcctggcgccgcaccggcccaaggagcccgcgtggttcctggccaccgtcggcgtctcgcccgaccaccagggcaagggtctgggcagcgccgtcgtgctccccggagtggaggcggccgagcgcgccggggtgcccgccttcctggagacctccgcgccccgcaacctccccttctacgagcggctcggcttcaccgtcaccgccgacgtcgaggtgcccgaaggaccgcgcacctggtgcatgacccgcaagcccggtgcctga

SEQ ID NO: 7602 - DNA, 2274 bp, Artificial Sequence
  Synthetic Polynucleotide
atggccttaccagtgaccgccttgctcctgccgctggccttgctgctccacgccgccaggccgcagatcgtgctgtctcagtctcctgccatcctgagcgcttccccaggcgagaaagtgaccatgacctgtagagccagcagcagcgtgtcctacatgcactggtatcagcagaagcccggcagcagccctaagccttggatctacgccaccagcaatctggcctctggcgtgccagccagattttctggctctggcagcggcaccagctacagcttcacaatcagcagagtggaagccgaggacgccgccacctactattgtcagcagtggaccttcaatcctcctaccttcggcggaggcacccggctggaaatcaaaagaacagtggctgctggcggaggcggaagtggaggcggaggatctggcggcggaggctctcaggcttatctgcaacagagcggagccgaactcgtcagacctggcgcttctgtgaagatgagctgcaaggccagcggctacaccttcaccagctataatatgcactgggtcaagcagacccctcggcagggactcgaatggatcggcggaatctatcccggcaacggcgacacctcctacaaccagaagttcaagggcaaagccacactgaccgtgggcaagagcagcagcaccgcctatatgcagctcagcagcctgaccagcgaggacagcgccgtgtacttctgcgccagatacgactacaactacgctatggactactggggccagggcaccagcgtgacagttagctctgccagcacgcgtcagagcaaggctcaggttctccagagtgtggcaggccagactctgactgtcagatgccagtatccaccaacaggctccctctatgagaaaaaaggatggtgtaaagaggcttctgccctcgtctgcatccggctggttacctctagcaagcccagaactatggcctggacatcccggtttacaatctgggatgaccctgatgccggatttttcacagtgacaatgacggatctgcgcgaggaagattccgggcactattggtgtagaatctacaggccctccgacaactccgtgtctaagtctgtgcgcttttacctggtcgtcagccctgccagtgcctccactcagacatcttggaccccaagggaccttgtgtcctctcagacacagacacagtcctgcgtgccaccaactgctggcgcaagacaggctccagagtctcccagcacaatccccgtcccttctcagccccagaactccacacttaggccaggaccagctgctccaatcgcactggtcccagtgttctgcggactgctggttgccaagtctctggtgctgagcgcactcctcgtttggtggggcgatatttggtggaaaacgatgatggaattgagatccctcgatacgcagaaagccacatgccaccttcagcaagtcacagacttgccttggaccagcgtcagctctcccgtggaacgggaaattctgtatcatacagtggcccgcaccaagatttccgacgatgacgacgagcacacactgcgcgccaagagaagcggatctggcgtgaagcagaccctgaatttcgacctgctgaagctggctggcgacgtggaatccaacccaggcccttctagaggccatatgaccgagtacaagcccacggtgcgcctcgccacccgcgacgacgtccccagggccgtacgcaccctcgccgccgcgttcgccgactaccccgccacgcgccacaccgtcgatccggaccgccacatcgagcgggtcaccgagctgcaagaactcttcctcacgcgcgtcgggctcgacatcggcaaggtgtgggtcgcggacgacggcgccgcggtggcggtctggaccacgccggagagcgtcgaagcgggggcggtgttcgccgagatcggcccgcgcatggccgagttgagcggttcccggctggccgcgcagcaacagatggaaggcctcctggcgccgcaccggcccaaggagcccgcgtggttcctggccaccgtcggcgtctcgcccgaccaccagggcaagggtctgggcagcgccgtcgtgctccccggagtggaggcggccgagcgcgccggggtgcccgccttcctggagacctccgcgccccgcaacctccccttctacgagcggctcggcttcaccgtcaccgccgacgtcgaggtgcccgaaggaccgcgcacctggtgcatgacccgcaagcccggtgcctga

SEQ ID NO: 7603 - DNA, 2268 bp, Artificial Sequence
  Synthetic Polynucleotide
atggccttaccagtgaccgccttgctcctgccgctggccttgctgctccacgccgccaggccggacatccagatgacccagagccctagctcactgagcgccagcgtgggcgacagggtgaccattacctgctccgccagccaggacatcagcaactacctgaactggtaccagcagaagcccggcaaggcccccaagctgctgatctactacacctccaacctgcactccggcgtgcccagcaggttcagcggaagcggcagcggcaccgatttcaccctgaccatctccagcctgcagcccgaggacttcgccacctactactgccagcagtacaggaagctcccctggactttcggccagggcaccaaactggagatcaagcgtggcggaggcggaagtggaggcggaggatctggcggcggaggctctcaggtgcagctggtccagagcggcgccgaagtgaagaagcccggcagctccgtgaaagtgagctgcaaggccagcggcggcaccttcagcaactactggatgcactgggtgaggcaggcccccggacagggcctggagtggatgggcgccacctacaggggccacagcgacacctactacaaccagaagttcaagggccgggtgaccatcaccgccgacaagagcaccagcaccgcctacatggaactgagcagcctcaggagcgaggacaccgctgtgtattactgcgccaggggcgccatctacgacggctacgacgtgctggacaactggggccagggcacactggtgaccgtgtccagcacgcgtcagagcaaggctcaggttctccagagtgtggcaggccagactctgactgtcagatgccagtatccaccaacaggctccctctatgagaaaaaaggatggtgtaaagaggcttctgccctcgtctgcatccggctggttacctctagcaagcccagaactatggcctggacatcccggtttacaatctgggatgaccctgatgccggatttttcacagtgacaatgacggatctgcgcgaggaagattccgggcactattggtgtagaatctacaggccctccgacaactccgtgtctaagtctgtgcgcttttacctggtcgtcagccctgccagtgcctccactcagacatcttggaccccaagggaccttgtgtcctctcagacacagacacagtcctgcgtgccaccaactgctggcgcaagacaggctccagagtctcccagcacaatccccgtcccttctcagccccagaactccacacttaggccaggaccagctgctccaatcgcactggtcccagtgttctgcggactgctggttgccaagtctctggtgctgagcgcactcctcgtttggtggggcgatatttggtggaaaacgatgatggaattgagatccctcgatacgcagaaagccacatgccaccttcagcaagtcacagacttgccttggaccagcgtcagctctcccgtggaacgggaaattctgtatcatacagtggcccgcaccaagatttccgacgatgacgacgagcacacactgcgcgccaagagaagcggatctggcgtgaagcagaccctgaatttcgacctgctgaagctggctggcgacgtggaatccaacccaggcccttctagaggccatatgaccgagtacaagcccacggtgcgcctcgccacccgcgacgacgtccccagggccgtacgcaccctcgccgccgcgttcgccgactaccccgccacgcgccacaccgtcgatccggaccgccacatcgagcgggtcaccgagctgcaagaactcttcctcacgcgcgtcgggctcgacatcggcaaggtgtgggtcgcggacgacggcgccgcggtggcggtctggaccacgccggagagcgtcgaagcgggggcggtgttcgccgagatcggcccgcgcatggccgagttgagcggttcccggctggccgcgcagcaacagatggaaggcctcctggcgccgcaccggcccaaggagcccgcgtggttcctggccaccgtcggcgtctcgcccgaccaccagggcaagggtctgggcagcgccgtcgtgctccccggagtggaggcggccgagcgcgccggggtgcccgccttcctggagacctccgcgccccgcaacctccccttctacgagcggctcggcttcaccgtcaccgccgacgtcgaggtgcccgaaggaccgcgcacctggtgcatgacccgcaagcccggtgcctga

SEQ ID NO: 7604 - DNA, 2280 bp, Artificial Sequence
  Synthetic Polynucleotide
atggccttaccagtgaccgccttgctcctgccgctggccttgctgctccacgccgccaggccggacatccagatgacccagagccccagcagcctgtctgccagcgtgggcgacagagtgaccatcacctgtcggagcagccagagcatcgtgcactccgtgggcaacaccttcctggaatggtatcagcagaagcccggcaaggcccccaagctgctgatctacaaggtgtccaacagattcagcggcgtgcccagcaggtttagcggctctggcagcggcaccgacttcaccctgaccatctctagcctccagcccgaggacttcgccacctactactgttttcaaggcagccagttcccctacaccttcggccagggaacaaaggtggaaatcaagcggggcggaggcggaagtggaggcggaggatctggcggcggaggctctgaagtgcaactggtggaaagcggaggcggcctggtgcagcctggcggatctctgagactgagctgtgccgccagcggctacgagttcagccggtcctggatgaactgggtgcgccaggcccctggcaagggactggaatgggtgggaagaatctaccccggcgacggcgacaccaactacagcggcaagttcaagggccggttcaccatcagcgccgacaccagcaagaacaccgcctacctccagatgaacagcctgcgggccgaggataccgccgtgtactactgtgccagagatggcagctcctgggactggtacttcgacgtgtggggacagggaacccttgtgaccgtgtccagcacgcgtcagagcaaggctcaggttctccagagtgtggcaggccagactctgactgtcagatgccagtatccaccaacaggctccctctatgagaaaaaaggatggtgtaaagaggcttctgccctcgtctgcatccggctggttacctctagcaagcccagaactatggcctggacatcccggtttacaatctgggatgaccctgatgccggatttttcacagtgacaatgacggatctgcgcgaggaagattccgggcactattggtgtagaatctacaggccctccgacaactccgtgtctaagtctgtgcgcttttacctggtcgtcagccctgccagtgcctccactcagacatcttggaccccaagggaccttgtgtcctctcagacacagacacagtcctgcgtgccaccaactgctggcgcaagacaggctccagagtctcccagcacaatccccgtcccttctcagccccagaactccacacttaggccaggaccagctgctccaatcgcactggtcccagtgttctgcggactgctggttgccaagtctctggtgctgagcgcactcctcgtttggtggggcgatatttggtggaaaacgatgatggaattgagatccctcgatacgcagaaagccacatgccaccttcagcaagtcacagacttgccttggaccagcgtcagctctcccgtggaacgggaaattctgtatcatacagtggcccgcaccaagatttccgacgatgacgacgagcacacactgcgcgccaagagaagcggatctggcgtgaagcagaccctgaatttcgacctgctgaagctggctggcgacgtggaatccaacccaggcccttctagaggccatatgaccgagtacaagcccacggtgcgcctcgccacccgcgacgacgtccccagggccgtacgcaccctcgccgccgcgttcgccgactaccccgccacgcgccacaccgtcgatccggaccgccacatcgagcgggtcaccgagctgcaagaactcttcctcacgcgcgtcgggctcgacatcggcaaggtgtgggtcgcggacgacggcgccgcggtggcggtctggaccacgccggagagcgtcgaagcgggggcggtgttcgccgagatcggcccgcgcatggccgagttgagcggttcccggctggccgcgcagcaacagatggaaggcctcctggcgccgcaccggcccaaggagcccgcgtggttcctggccaccgtcggcgtctcgcccgaccaccagggcaagggtctgggcagcgccgtcgtgctccccggagtggaggcggccgagcgcgccggggtgcccgccttcctggagacctccgcgccccgcaacctccccttctacgagcggctcggcttcaccgtcaccgccgacgtcgaggtgcccgaaggaccgcgcacctggtgcatgacccgcaagcccggtgcctga

SEQ ID NO: 7605 - DNA, 1893 bp, Artificial Sequence
  Synthetic Polynucleotide
atggccttaccagtgaccgccttgctcctgccgctggccttgctgctccacgccgccaggccgttcgaagtgcaactggttgaatccggtggcggcctggtgcaagcaggcggatctctcagacttagctgtgccgcctccggcagaaccttcacaatgggatggtttaggcaggctccagggaaagagagagagttcgtcgccgccatctctctgtctcccacactggcctactacgccgactctgtgaaaggccggttcaccatctccagagataatgccaagaacaccgtggtgctgcaaatgaactctctgaaacccgaggatacagccctgtactattgtgccgctgaccggaagtccgtgatgagcatcagacccgattactggggacagggcacacaagtcacagtgtcctctacgcgtcagagcaaggctcaggttctccagagtgtggcaggccagactctgactgtcagatgccagtatccaccaacaggctccctctatgagaaaaaaggatggtgtaaagaggcttctgccctcgtctgcatccggctggttacctctagcaagcccagaactatggcctggacatcccggtttacaatctgggatgaccctgatgccggatttttcacagtgacaatgacggatctgcgcgaggaagattccgggcactattggtgtagaatctacaggccctccgacaactccgtgtctaagtctgtgcgcttttacctggtcgtcagccctgccagtgcctccactcagacatcttggaccccaagggaccttgtgtcctctcagacacagacacagtcctgcgtgccaccaactgctggcgcaagacaggctccagagtctcccagcacaatccccgtcccttctcagccccagaactccacacttaggccaggaccagctgctccaatcgcactggtcccagtgttctgcggactgctggttgccaagtctctggtgctgagcgcactcctcgtttggtggggcgatatttggtggaaaacgatgatggaattgagatccctcgatacgcagaaagccacatgccaccttcagcaagtcacagacttgccttggaccagcgtcagctctcccgtggaacgggaaattctgtatcatacagtggcccgcaccaagatttccgacgatgacgacgagcacacactgcgcgccaagagaagcggatctggcgtgaagcagaccctgaatttcgacctgctgaagctggctggcgacgtggaatccaacccaggcccttctagaggccatatgaccgagtacaagcccacggtgcgcctcgccacccgcgacgacgtccccagggccgtacgcaccctcgccgccgcgttcgccgactaccccgccacgcgccacaccgtcgatccggaccgccacatcgagcgggtcaccgagctgcaagaactcttcctcacgcgcgtcgggctcgacatcggcaaggtgtgggtcgcggacgacggcgccgcggtggcggtctggaccacgccggagagcgtcgaagcgggggcggtgttcgccgagatcggcccgcgcatggccgagttgagcggttcccggctggccgcgcagcaacagatggaaggcctcctggcgccgcaccggcccaaggagcccgcgtggttcctggccaccgtcggcgtctcgcccgaccaccagggcaagggtctgggcagcgccgtcgtgctccccggagtggaggcggccgagcgcgccggggtgcccgccttcctggagacctccgcgccccgcaacctccccttctacgagcggctcggcttcaccgtcaccgccgacgtcgaggtgcccgaaggaccgcgcacctggtgcatgacccgcaagcccggtgcctga

SEQ ID NO: 7606 - DNA, 1929 bp, Artificial Sequence
  Synthetic Polynucleotide
atggccttaccagtgaccgccttgctcctgccgctggccttgctgctccacgccgccaggccggcatgcgaggtgcagctggttgaatctggtggcggagttgtgcagcctggcagaagcctgagactgtcttgtgccgccagcggctttagcttcagcggctatggaatgcactgggtccgacaggcccctggcaaaggacttgagtgggtcgcctacatcagctacgacggcagcaacaagtattacgccgacagcgtgaagggcagattcaccatcagccgggacaacagcaagaacaccctgtacctccagatgaacagcctgagagccgaggacaccgccgtgtactactgcgccaaagatcctgcctggggactgagactgggcgagagcagcagctacgatttcgactactggggccagggcacaatggtcacagtttctagcggtaccacgcgtcagagcaaggctcaggttctccagagtgtggcaggccagactctgactgtcagatgccagtatccaccaacaggctccctctatgagaaaaaaggatggtgtaaagaggcttctgccctcgtctgcatccggctggttacctctagcaagcccagaactatggcctggacatcccggtttacaatctgggatgaccctgatgccggatttttcacagtgacaatgacggatctgcgcgaggaagattccgggcactattggtgtagaatctacaggccctccgacaactccgtgtctaagtctgtgcgcttttacctggtcgtcagccctgccagtgcctccactcagacatcttggaccccaagggaccttgtgtcctctcagacacagacacagtcctgcgtgccaccaactgctggcgcaagacaggctccagagtctcccagcacaatccccgtcccttctcagccccagaactccacacttaggccaggaccagctgctccaatcgcactggtcccagtgttctgcggactgctggttgccaagtctctggtgctgagcgcactcctcgtttggtggggcgatatttggtggaaaacgatgatggaattgagatccctcgatacgcagaaagccacatgccaccttcagcaagtcacagacttgccttggaccagcgtcagctctcccgtggaacgggaaattctgtatcatacagtggcccgcaccaagatttccgacgatgacgacgagcacacactgcgcgccaagagaagcggatctggcgtgaagcagaccctgaatttcgacctgctgaagctggctggcgacgtggaatccaacccaggcccttctagaggccatatgaccgagtacaagcccacggtgcgcctcgccacccgcgacgacgtccccagggccgtacgcaccctcgccgccgcgttcgccgactaccccgccacgcgccacaccgtcgatccggaccgccacatcgagcgggtcaccgagctgcaagaactcttcctcacgcgcgtcgggctcgacatcggcaaggtgtgggtcgcggacgacggcgccgcggtggcggtctggaccacgccggagagcgtcgaagcgggggcggtgttcgccgagatcggcccgcgcatggccgagttgagcggttcccggctggccgcgcagcaacagatggaaggcctcctggcgccgcaccggcccaaggagcccgcgtggttcctggccaccgtcggcgtctcgcccgaccaccagggcaagggtctgggcagcgccgtcgtgctccccggagtggaggcggccgagcgcgccggggtgcccgccttcctggagacctccgcgccccgcaacctccccttctacgagcggctcggcttcaccgtcaccgccgacgtcgaggtgcccgaaggaccgcgcacctggtgcatgacccgcaagcccggtgcctga

SEQ ID NO: 7607 - DNA, 2052 bp, Artificial Sequence
  Synthetic Polynucleotide
atggccttaccagtgaccgccttgctcctgccgctggccttgctgctccacgccgccaggccggacatccagatgacacagagccctagcagcctgtctgccagcgtgggagacagagtgaccatcacatgcaaggccagcgaccacatcaacaactggctggcctggtatcagcagaagcctggacaggcccctaagctgctgatctacggcgctaccacactggaaacaggcgtgcccagcagattttctggcagcggctctggcaccgactacaccctgacaatatccagcctccagcctgaggacttcgccacctactactgtcagcagagctggaacaccccttggacattcggccagggcaccaagctggaaatcaagagaggcggaggcggaagtggaggcggaggatctggcggcggaggctctcaagttcagcttcaacagcctggcgctgagctggtcaaacctggcgcttctgtgaagatgagctgcaaagccagcggctacgccttcagcagctactggatcaactggatgaagcagaaacccggccagggactcgaatggatcggccaaatctatcccggcgacggcgacaccaactacaacggcaagttcaagggcagagccacactgaccgccgatacctctagcagcacagcctacatgcagctgagcagcctgaccagcgaagatagcgccgtgtacttctgtgcccggtccatcacaacagtcgtgggctgcgctatggactattggggccagggaacaagcgtgaccgtgtctagtacgcgtctgtgggtgtcccagccacctgaaattcggacactggaaggctcctccgcctttctgccctgtagctttaacgccagccaggggagactcgccatcggctctgtgacatggttccgggatgaagtcgtccctggaaaagaagttcgcaacggaacaccagagttcagaggcagactcgccccactggcaagctccagattcctgcatgaccatcaggctgaactgcacattagggacgtgcggggccacgatgcctccatctatgtgtgtcgggtcgaagtgcttggactcggcgtcggaactggaaacggcactaggctggtggtcgagaaagaacatccacagcttggcgctggcaccgtcctgttgcttagagccggattctatgccgtcagcttcctgtccgtggctgtggggtctacagtgtattaccagggaaaatgtctcacctggaaaggccccagacgccagcttccagctgttgttcctgctccactgccaccaccttgtggctcctctgctcacttgcttccaccagtgcctggcggacgcgccaagagaagcggatctggcgtgaagcagaccctgaatttcgacctgctgaagctggctggcgacgtggaatccaacccaggcccttctagaggccatatgaccgagtacaagcccacggtgcgcctcgccacccgcgacgacgtccccagggccgtacgcaccctcgccgccgcgttcgccgactaccccgccacgcgccacaccgtcgatccggaccgccacatcgagcgggtcaccgagctgcaagaactcttcctcacgcgcgtcgggctcgacatcggcaaggtgtgggtcgcggacgacggcgccgcggtggcggtctggaccacgccggagagcgtcgaagcgggggcggtgttcgccgagatcggcccgcgcatggccgagttgagcggttcccggctggccgcgcagcaacagatggaaggcctcctggcgccgcaccggcccaaggagcccgcgtggttcctggccaccgtcggcgtctcgcccgaccaccagggcaagggtctgggcagcgccgtcgtgctccccggagtggaggcggccgagcgcgccggggtgcccgccttcctggagacctccgcgccccgcaacctccccttctacgagcggctcggcttcaccgtcaccgccgacgtcgaggtgcccgaaggaccgcgcacctggtgcatgacccgcaagcccggtgcctga

SEQ ID NO: 7608 - DNA, 2046 bp, Artificial Sequence
  Synthetic Polynucleotide
atggccttaccagtgaccgccttgctcctgccgctggccttgctgctccacgccgccaggccggacatccagatgacacagactacatcctccctgtctgcctctctgggagacagagtcaccatcagttgcagggcaagtcaggacattagtaaatatttaaattggtatcagcagaaaccagatggaactgttaaactcctgatctaccatacatcaagattacactcaggagtcccatcaaggttcagtggcagtgggtctggaacagattattctctcaccattagcaacctggagcaagaagatattgccacttacttttgccaacagggtaatacgcttccgtacacgttcggaggggggaccaagctggagatcacaggtggcggtggctcgggcggtggtgggtcgggtggcggcggatctgaggtgaaactgcaggagtcaggacctggcctggtggcgccctcacagagcctgtccgtcacatgcactgtctcaggggtctcattacccgactatggtgtaagctggattcgccagcctccacgaaagggtctggagtggctgggagtaatatggggtagtgaaaccacatactataattcagctctcaaatccagactgaccatcatcaaggacaactccaagagccaagttttcttaaaaatgaacagtctgcaaactgatgacacagccatttactactgtgccaaacattattactacggtggtagctatgctatggactactggggtcaaggaacctcagtcaccgtctcctcaacgcgtctgtgggtgtcccagccacctgaaattcggacactggaaggctcctccgcctttctgccctgtagctttaacgccagccaggggagactcgccatcggctctgtgacatggttccgggatgaagtcgtccctggaaaagaagttcgcaacggaacaccagagttcagaggcagactcgccccactggcaagctccagattcctgcatgaccatcaggctgaactgcacattagggacgtgcggggccacgatgcctccatctatgtgtgtcgggtcgaagtgcttggactcggcgtcggaactggaaacggcactaggctggtggtcgagaaagaacatccacagcttggcgctggcaccgtcctgttgcttagagccggattctatgccgtcagcttcctgtccgtggctgtggggtctacagtgtattaccagggaaaatgtctcacctggaaaggccccagacgccagcttccagctgttgttcctgctccactgccaccaccttgtggctcctctgctcacttgcttccaccagtgcctggcggacgcgccaagagaagcggatctggcgtgaagcagaccctgaatttcgacctgctgaagctggctggcgacgtggaatccaacccaggcccttctagaggccatatgaccgagtacaagcccacggtgcgcctcgccacccgcgacgacgtccccagggccgtacgcaccctcgccgccgcgttcgccgactaccccgccacgcgccacaccgtcgatccggaccgccacatcgagcgggtcaccgagctgcaagaactcttcctcacgcgcgtcgggctcgacatcggcaaggtgtgggtcgcggacgacggcgccgcggtggcggtctggaccacgccggagagcgtcgaagcgggggcggtgttcgccgagatcggcccgcgcatggccgagttgagcggttcccggctggccgcgcagcaacagatggaaggcctcctggcgccgcaccggcccaaggagcccgcgtggttcctggccaccgtcggcgtctcgcccgaccaccagggcaagggtctgggcagcgccgtcgtgctccccggagtggaggcggccgagcgcgccggggtgcccgccttcctggagacctccgcgccccgcaacctccccttctacgagcggctcggcttcaccgtcaccgccgacgtcgaggtgcccgaaggaccgcgcacctggtgcatgacccgcaagcccggtgcctga

SEQ ID NO: 7609 - DNA, 2055 bp, Artificial Sequence
  Synthetic Polynucleotide
atggccttaccagtgaccgccttgctcctgccgctggccttgctgctccacgccgccaggccggacgagatcgtgctgacacagagccctgccaccctgtctctgagccctggcgaaagagccaccctgagctgtagagccagccagagcgtgtccagctacctggcctggtatcagcagaagcccggccaggctccccggctgctgatctacgatgccagcaatagagccaccggcatccccgccagattttccggctctggcagcggcaccgacttcaccctgaccatcagctccctggaacccgaggacttcgccgtgtactactgccagcagcggagcaactggcccatcacattcggccagggcacccggctggaaatcaaaggcggaggcggaagtggaggcggaggatctggcggcggaggctctgaagtgcagctggtggaatcaggcggcggactggtgcagcctggcagaagcctgagactgagctgtgccgccagcggcttcaccttcaacgactacgccatgcactgggtgcgccaggcccctggaaaaggactggaatgggtgtccacaatcagctggaacagcggcagcatcggctacgccgatagcgtgaagggccggttcaccatcagccgggacaacgccaagaagtccctgtacctccagatgaacagcctgcgggccgaggacacagccctgtactattgcgccaaggacatccagtacggcaactactactacggcatggacgtgtggggccagggaaccaccgtgaccgtgtcatctacgcgtctgtgggtgtcccagccacctgaaattcggacactggaaggctcctccgcctttctgccctgtagctttaacgccagccaggggagactcgccatcggctctgtgacatggttccgggatgaagtcgtccctggaaaagaagttcgcaacggaacaccagagttcagaggcagactcgccccactggcaagctccagattcctgcatgaccatcaggctgaactgcacattagggacgtgcggggccacgatgcctccatctatgtgtgtcgggtcgaagtgcttggactcggcgtcggaactggaaacggcactaggctggtggtcgagaaagaacatccacagcttggcgctggcaccgtcctgttgcttagagccggattctatgccgtcagcttcctgtccgtggctgtggggtctacagtgtattaccagggaaaatgtctcacctggaaaggccccagacgccagcttccagctgttgttcctgctccactgccaccaccttgtggctcctctgctcacttgcttccaccagtgcctggcggacgcgccaagagaagcggatctggcgtgaagcagaccctgaatttcgacctgctgaagctggctggcgacgtggaatccaacccaggcccttctagaggccatatgaccgagtacaagcccacggtgcgcctcgccacccgcgacgacgtccccagggccgtacgcaccctcgccgccgcgttcgccgactaccccgccacgcgccacaccgtcgatccggaccgccacatcgagcgggtcaccgagctgcaagaactcttcctcacgcgcgtcgggctcgacatcggcaaggtgtgggtcgcggacgacggcgccgcggtggcggtctggaccacgccggagagcgtcgaagcgggggcggtgttcgccgagatcggcccgcgcatggccgagttgagcggttcccggctggccgcgcagcaacagatggaaggcctcctggcgccgcaccggcccaaggagcccgcgtggttcctggccaccgtcggcgtctcgcccgaccaccagggcaagggtctgggcagcgccgtcgtgctccccggagtggaggcggccgagcgcgccggggtgcccgccttcctggagacctccgcgccccgcaacctccccttctacgagcggctcggcttcaccgtcaccgccgacgtcgaggtgcccgaaggaccgcgcacctggtgcatgacccgcaagcccggtgcctga

SEQ ID NO: 7610 - DNA, 2040 bp, Artificial Sequence
  Synthetic Polynucleotide
atggccttaccagtgaccgccttgctcctgccgctggccttgctgctccacgccgccaggccggacgtggtcatgacacagagcccttctagcctgtctgccagcgtgggcgacagagtgaccatcacctgtatggcctccgaggacatctacatccggctggcctggtatcagcagaagcctggaaacgcccctaagctgctgatctacgccgccacctctctggaaacaggcgtgccaagcagattttccggcagcggctctggcaccgatttcaccctgacaatatccagcctccagcctgaggacttcgccacctactactgccagcagtattggagcagcccctggacatttggcggaggcaccaaggtggaaatcaaaggcggaggcggaagtggaggcggaggatctggcggcggaggctctcaggttcagctgcaagagtctggccccggactggtcaagcctagccaaacactgagcctgacctgtaccgtgtccggctacagcatcaccagcgactacacctggaactggatcagacagcctcctggcaacggactggaatggatcggctacatcacctacagcggcagcaccagctacaaccccagcctgaaaagccgggtgctgatctccgtggacaccagcaagaatcaggtgtccctgaagttgagcagcgtgacagccgctgataccgccgtgtactactgtgccagactggggagaagatacacaatggactactggggccagggcaccaccgtgacagtttcttctacgcgtctgtgggtgtcccagccacctgaaattcggacactggaaggctcctccgcctttctgccctgtagctttaacgccagccaggggagactcgccatcggctctgtgacatggttccgggatgaagtcgtccctggaaaagaagttcgcaacggaacaccagagttcagaggcagactcgccccactggcaagctccagattcctgcatgaccatcaggctgaactgcacattagggacgtgcggggccacgatgcctccatctatgtgtgtcgggtcgaagtgcttggactcggcgtcggaactggaaacggcactaggctggtggtcgagaaagaacatccacagcttggcgctggcaccgtcctgttgcttagagccggattctatgccgtcagcttcctgtccgtggctgtggggtctacagtgtattaccagggaaaatgtctcacctggaaaggccccagacgccagcttccagctgttgttcctgctccactgccaccaccttgtggctcctctgctcacttgcttccaccagtgcctggcggacgcgccaagagaagcggatctggcgtgaagcagaccctgaatttcgacctgctgaagctggctggcgacgtggaatccaacccaggcccttctagaggccatatgaccgagtacaagcccacggtgcgcctcgccacccgcgacgacgtccccagggccgtacgcaccctcgccgccgcgttcgccgactaccccgccacgcgccacaccgtcgatccggaccgccacatcgagcgggtcaccgagctgcaagaactcttcctcacgcgcgtcgggctcgacatcggcaaggtgtgggtcgcggacgacggcgccgcggtggcggtctggaccacgccggagagcgtcgaagcgggggcggtgttcgccgagatcggcccgcgcatggccgagttgagcggttcccggctggccgcgcagcaacagatggaaggcctcctggcgccgcaccggcccaaggagcccgcgtggttcctggccaccgtcggcgtctcgcccgaccaccagggcaagggtctgggcagcgccgtcgtgctccccggagtggaggcggccgagcgcgccggggtgcccgccttcctggagacctccgcgccccgcaacctccccttctacgagcggctcggcttcaccgtcaccgccgacgtcgaggtgcccgaaggaccgcgcacctggtgcatgacccgcaagcccggtgcctga

SEQ ID NO: 7611 - DNA, 2052 bp, Artificial Sequence
  Synthetic Polynucleotide
atggccttaccagtgaccgccttgctcctgccgctggccttgctgctccacgccgccaggccggacatccagatgacccagagccctagctcactgagcgccagcgtgggcgacagggtgaccattacctgctccgccagccaggacatcagcaactacctgaactggtaccagcagaagcccggcaaggcccccaagctgctgatctactacacctccaacctgcactccggcgtgcccagcaggttcagcggaagcggcagcggcaccgatttcaccctgaccatctccagcctgcagcccgaggacttcgccacctactactgccagcagtacaggaagctcccctggactttcggccagggcaccaaactggagatcaagcgtggcggaggcggaagtggaggcggaggatctggcggcggaggctctcaggtgcagctggtccagagcggcgccgaagtgaagaagcccggcagctccgtgaaagtgagctgcaaggccagcggcggcaccttcagcaactactggatgcactgggtgaggcaggcccccggacagggcctggagtggatgggcgccacctacaggggccacagcgacacctactacaaccagaagttcaagggccgggtgaccatcaccgccgacaagagcaccagcaccgcctacatggaactgagcagcctcaggagcgaggacaccgctgtgtattactgcgccaggggcgccatctacgacggctacgacgtgctggacaactggggccagggcacactggtgaccgtgtccagcacgcgtctgtgggtgtcccagccacctgaaattcggacactggaaggctcctccgcctttctgccctgtagctttaacgccagccaggggagactcgccatcggctctgtgacatggttccgggatgaagtcgtccctggaaaagaagttcgcaacggaacaccagagttcagaggcagactcgccccactggcaagctccagattcctgcatgaccatcaggctgaactgcacattagggacgtgcggggccacgatgcctccatctatgtgtgtcgggtcgaagtgcttggactcggcgtcggaactggaaacggcactaggctggtggtcgagaaagaacatccacagcttggcgctggcaccgtcctgttgcttagagccggattctatgccgtcagcttcctgtccgtggctgtggggtctacagtgtattaccagggaaaatgtctcacctggaaaggccccagacgccagcttccagctgttgttcctgctccactgccaccaccttgtggctcctctgctcacttgcttccaccagtgcctggcggacgcgccaagagaagcggatctggcgtgaagcagaccctgaatttcgacctgctgaagctggctggcgacgtggaatccaacccaggcccttctagaggccatatgaccgagtacaagcccacggtgcgcctcgccacccgcgacgacgtccccagggccgtacgcaccctcgccgccgcgttcgccgactaccccgccacgcgccacaccgtcgatccggaccgccacatcgagcgggtcaccgagctgcaagaactcttcctcacgcgcgtcgggctcgacatcggcaaggtgtgggtcgcggacgacggcgccgcggtggcggtctggaccacgccggagagcgtcgaagcgggggcggtgttcgccgagatcggcccgcgcatggccgagttgagcggttcccggctggccgcgcagcaacagatggaaggcctcctggcgccgcaccggcccaaggagcccgcgtggttcctggccaccgtcggcgtctcgcccgaccaccagggcaagggtctgggcagcgccgtcgtgctccccggagtggaggcggccgagcgcgccggggtgcccgccttcctggagacctccgcgccccgcaacctccccttctacgagcggctcggcttcaccgtcaccgccgacgtcgaggtgcccgaaggaccgcgcacctggtgcatgacccgcaagcccggtgcctga

SEQ ID NO: 7612 - DNA, 2064 bp, Artificial Sequence
  Synthetic Polynucleotide
atggccttaccagtgaccgccttgctcctgccgctggccttgctgctccacgccgccaggccggacatccagatgacccagagccccagcagcctgtctgccagcgtgggcgacagagtgaccatcacctgtcggagcagccagagcatcgtgcactccgtgggcaacaccttcctggaatggtatcagcagaagcccggcaaggcccccaagctgctgatctacaaggtgtccaacagattcagcggcgtgcccagcaggtttagcggctctggcagcggcaccgacttcaccctgaccatctctagcctccagcccgaggacttcgccacctactactgttttcaaggcagccagttcccctacaccttcggccagggaacaaaggtggaaatcaagcggggcggaggcggaagtggaggcggaggatctggcggcggaggctctgaagtgcaactggtggaaagcggaggcggcctggtgcagcctggcggatctctgagactgagctgtgccgccagcggctacgagttcagccggtcctggatgaactgggtgcgccaggcccctggcaagggactggaatgggtgggaagaatctaccccggcgacggcgacaccaactacagcggcaagttcaagggccggttcaccatcagcgccgacaccagcaagaacaccgcctacctccagatgaacagcctgcgggccgaggataccgccgtgtactactgtgccagagatggcagctcctgggactggtacttcgacgtgtggggacagggaacccttgtgaccgtgtccagcacgcgtctgtgggtgtcccagccacctgaaattcggacactggaaggctcctccgcctttctgccctgtagctttaacgccagccaggggagactcgccatcggctctgtgacatggttccgggatgaagtcgtccctggaaaagaagttcgcaacggaacaccagagttcagaggcagactcgccccactggcaagctccagattcctgcatgaccatcaggctgaactgcacattagggacgtgcggggccacgatgcctccatctatgtgtgtcgggtcgaagtgcttggactcggcgtcggaactggaaacggcactaggctggtggtcgagaaagaacatccacagcttggcgctggcaccgtcctgttgcttagagccggattctatgccgtcagcttcctgtccgtggctgtggggtctacagtgtattaccagggaaaatgtctcacctggaaaggccccagacgccagcttccagctgttgttcctgctccactgccaccaccttgtggctcctctgctcacttgcttccaccagtgcctggcggacgcgccaagagaagcggatctggcgtgaagcagaccctgaatttcgacctgctgaagctggctggcgacgtggaatccaacccaggcccttctagaggccatatgaccgagtacaagcccacggtgcgcctcgccacccgcgacgacgtccccagggccgtacgcaccctcgccgccgcgttcgccgactaccccgccacgcgccacaccgtcgatccggaccgccacatcgagcgggtcaccgagctgcaagaactcttcctcacgcgcgtcgggctcgacatcggcaaggtgtgggtcgcggacgacggcgccgcggtggcggtctggaccacgccggagagcgtcgaagcgggggcggtgttcgccgagatcggcccgcgcatggccgagttgagcggttcccggctggccgcgcagcaacagatggaaggcctcctggcgccgcaccggcccaaggagcccgcgtggttcctggccaccgtcggcgtctcgcccgaccaccagggcaagggtctgggcagcgccgtcgtgctccccggagtggaggcggccgagcgcgccggggtgcccgccttcctggagacctccgcgccccgcaacctccccttctacgagcggctcggcttcaccgtcaccgccgacgtcgaggtgcccgaaggaccgcgcacctggtgcatgacccgcaagcccggtgcctga

SEQ ID NO: 7613 - DNA, 2055 bp, Artificial Sequence
  Synthetic Polynucleotide
atggccttaccagtgaccgccttgctcctgccgctggccttgctgctccacgccgccaggccggacatccagatgacacagagccctagcagcctgtctgccagcgtgggagacagagtgaccatcacctgtagagccagccaggacatcagcaactacctgaactggtatcagcagaagcccggcaaggcccctaagctgctgatctactacaccagcatcctgcacagcggcgtgcccagcagattttctggctctggcagcggcaccgactacaccctgacaatatctagcctccagcctgaggacttcgccacctactattgccagcagggcaacaccctgccttggacatttggccagggcaccaaggtggaaatcaaagctggcggaggcggaagtggaggcggaggatctggcggcggaggctctgaagttcagctggttgaatctggcggcggactggttcaacctggcggatctctgagactgagctgtgccgcctctggcttcgccttcagcatctacgatatgagctgggtccgacaggcccctggcaaaggacttgagtgggtcgcctacatctcttccggcggaggaacctactatcccgacaccgtgaagggcagattcaccatcagcgtggacaagagcaagaacaccgcctacctccagatgaactccctgagagccgaggacaccgccgtgtactattgtgccagacacagcggctacggcacacactggggagtgctgtttgcctattggggccagggaaccctggtcaccgttagctctacgcgtctgtgggtgtcccagccacctgaaattcggacactggaaggctcctccgcctttctgccctgtagctttaacgccagccaggggagactcgccatcggctctgtgacatggttccgggatgaagtcgtccctggaaaagaagttcgcaacggaacaccagagttcagaggcagactcgccccactggcaagctccagattcctgcatgaccatcaggctgaactgcacattagggacgtgcggggccacgatgcctccatctatgtgtgtcgggtcgaagtgcttggactcggcgtcggaactggaaacggcactaggctggtggtcgagaaagaacatccacagcttggcgctggcaccgtcctgttgcttagagccggattctatgccgtcagcttcctgtccgtggctgtggggtctacagtgtattaccagggaaaatgtctcacctggaaaggccccagacgccagcttccagctgttgttcctgctccactgccaccaccttgtggctcctctgctcacttgcttccaccagtgcctggcggacgcgccaagagaagcggatctggcgtgaagcagaccctgaatttcgacctgctgaagctggctggcgacgtggaatccaacccaggcccttctagaggccatatgaccgagtacaagcccacggtgcgcctcgccacccgcgacgacgtccccagggccgtacgcaccctcgccgccgcgttcgccgactaccccgccacgcgccacaccgtcgatccggaccgccacatcgagcgggtcaccgagctgcaagaactcttcctcacgcgcgtcgggctcgacatcggcaaggtgtgggtcgcggacgacggcgccgcggtggcggtctggaccacgccggagagcgtcgaagcgggggcggtgttcgccgagatcggcccgcgcatggccgagttgagcggttcccggctggccgcgcagcaacagatggaaggcctcctggcgccgcaccggcccaaggagcccgcgtggttcctggccaccgtcggcgtctcgcccgaccaccagggcaagggtctgggcagcgccgtcgtgctccccggagtggaggcggccgagcgcgccggggtgcccgccttcctggagacctccgcgccccgcaacctccccttctacgagcggctcggcttcaccgtcaccgccgacgtcgaggtgcccgaaggaccgcgcacctggtgcatgacccgcaagcccggtgcctga

SEQ ID NO: 7614 - DNA, 1677 bp, Artificial Sequence
  Synthetic Polynucleotide
atggccttaccagtgaccgccttgctcctgccgctggccttgctgctccacgccgccaggccgttcgaagtgcagctggttgaatctggcggaggactggttcaggctggcggatctctgagactgtcttgtgccgccagcggcagaacctttagcatgggctggtttagacaggcccctggcaaagagagagagttcgtcgccgccatcacatactctggcggcagcccttactacgccgactctgtgaagggcagattcaccatcagccgggacaacgccaagaacaccgtgtacctccagatgaacagcctgaagcctgaggacaccgccgtgtactactgcgccgccaatccaacatacggcagcgactggaacgccgagaattggggccagggaacccaagtgacagtgtctagcacgcgtctgtgggtgtcccagccacctgaaattcggacactggaaggctcctccgcctttctgccctgtagctttaacgccagccaggggagactcgccatcggctctgtgacatggttccgggatgaagtcgtccctggaaaagaagttcgcaacggaacaccagagttcagaggcagactcgccccactggcaagctccagattcctgcatgaccatcaggctgaactgcacattagggacgtgcggggccacgatgcctccatctatgtgtgtcgggtcgaagtgcttggactcggcgtcggaactggaaacggcactaggctggtggtcgagaaagaacatccacagcttggcgctggcaccgtcctgttgcttagagccggattctatgccgtcagcttcctgtccgtggctgtggggtctacagtgtattaccagggaaaatgtctcacctggaaaggccccagacgccagcttccagctgttgttcctgctccactgccaccaccttgtggctcctctgctcacttgcttccaccagtgcctggcggacgcgccaagagaagcggatctggcgtgaagcagaccctgaatttcgacctgctgaagctggctggcgacgtggaatccaacccaggcccttctagaggccatatgaccgagtacaagcccacggtgcgcctcgccacccgcgacgacgtccccagggccgtacgcaccctcgccgccgcgttcgccgactaccccgccacgcgccacaccgtcgatccggaccgccacatcgagcgggtcaccgagctgcaagaactcttcctcacgcgcgtcgggctcgacatcggcaaggtgtgggtcgcggacgacggcgccgcggtggcggtctggaccacgccggagagcgtcgaagcgggggcggtgttcgccgagatcggcccgcgcatggccgagttgagcggttcccggctggccgcgcagcaacagatggaaggcctcctggcgccgcaccggcccaaggagcccgcgtggttcctggccaccgtcggcgtctcgcccgaccaccagggcaagggtctgggcagcgccgtcgtgctccccggagtggaggcggccgagcgcgccggggtgcccgccttcctggagacctccgcgccccgcaacctccccttctacgagcggctcggcttcaccgtcaccgccgacgtcgaggtgcccgaaggaccgcgcacctggtgcatgacccgcaagcccggtgcctga

SEQ ID NO: 7615 - DNA, 1683 bp, Artificial Sequence
  Synthetic Polynucleotide
atggccttaccagtgaccgccttgctcctgccgctggccttgctgctccacgccgccaggccgttcgaacaagtcaaactggaagaaagcggtggcggcctggtgcaacctggcgaatctctgagactgagctgtagcgccagcggctccatcttcaaggtgttcagagtgttcgccatgagctggtacaggcaaggccctggcaagcagagagagctggtcgcctctatcagcagcggcgagacaaccacatacgccgaatctgtgaaaggccggttcaccatcagccgggataatgccaagaataccgcctatctccagatggactccctgaagcctgaagatacagctgtgtactactgcaacgccgaccataccttcaccggcgatttttggggccagggaacccaagtgaccgtgtctagtacgcgtctgtgggtgtcccagccacctgaaattcggacactggaaggctcctccgcctttctgccctgtagctttaacgccagccaggggagactcgccatcggctctgtgacatggttccgggatgaagtcgtccctggaaaagaagttcgcaacggaacaccagagttcagaggcagactcgccccactggcaagctccagattcctgcatgaccatcaggctgaactgcacattagggacgtgcggggccacgatgcctccatctatgtgtgtcgggtcgaagtgcttggactcggcgtcggaactggaaacggcactaggctggtggtcgagaaagaacatccacagcttggcgctggcaccgtcctgttgcttagagccggattctatgccgtcagcttcctgtccgtggctgtggggtctacagtgtattaccagggaaaatgtctcacctggaaaggccccagacgccagcttccagctgttgttcctgctccactgccaccaccttgtggctcctctgctcacttgcttccaccagtgcctggcggacgcgccaagagaagcggatctggcgtgaagcagaccctgaatttcgacctgctgaagctggctggcgacgtggaatccaacccaggcccttctagaggccatatgaccgagtacaagcccacggtgcgcctcgccacccgcgacgacgtccccagggccgtacgcaccctcgccgccgcgttcgccgactaccccgccacgcgccacaccgtcgatccggaccgccacatcgagcgggtcaccgagctgcaagaactcttcctcacgcgcgtcgggctcgacatcggcaaggtgtgggtcgcggacgacggcgccgcggtggcggtctggaccacgccggagagcgtcgaagcgggggcggtgttcgccgagatcggcccgcgcatggccgagttgagcggttcccggctggccgcgcagcaacagatggaaggcctcctggcgccgcaccggcccaaggagcccgcgtggttcctggccaccgtcggcgtctcgcccgaccaccagggcaagggtctgggcagcgccgtcgtgctccccggagtggaggcggccgagcgcgccggggtgcccgccttcctggagacctccgcgccccgcaacctccccttctacgagcggctcggcttcaccgtcaccgccgacgtcgaggtgcccgaaggaccgcgcacctggtgcatgacccgcaagcccggtgcctga

SEQ ID NO: 7616 - DNA, 1677 bp, Artificial Sequence
  Synthetic Polynucleotide
atggccttaccagtgaccgccttgctcctgccgctggccttgctgctccacgccgccaggccgttcgaagtgcaactggttgaatccggtggcggcctggtgcaagcaggcggatctctcagacttagctgtgccgcctccggcagaaccttcacaatgggatggtttaggcaggctccagggaaagagagagagttcgtcgccgccatctctctgtctcccacactggcctactacgccgactctgtgaaaggccggttcaccatctccagagataatgccaagaacaccgtggtgctgcaaatgaactctctgaaacccgaggatacagccctgtactattgtgccgctgaccggaagtccgtgatgagcatcagacccgattactggggacagggcacacaagtcacagtgtcctctacgcgtctgtgggtgtcccagccacctgaaattcggacactggaaggctcctccgcctttctgccctgtagctttaacgccagccaggggagactcgccatcggctctgtgacatggttccgggatgaagtcgtccctggaaaagaagttcgcaacggaacaccagagttcagaggcagactcgccccactggcaagctccagattcctgcatgaccatcaggctgaactgcacattagggacgtgcggggccacgatgcctccatctatgtgtgtcgggtcgaagtgcttggactcggcgtcggaactggaaacggcactaggctggtggtcgagaaagaacatccacagcttggcgctggcaccgtcctgttgcttagagccggattctatgccgtcagcttcctgtccgtggctgtggggtctacagtgtattaccagggaaaatgtctcacctggaaaggccccagacgccagcttccagctgttgttcctgctccactgccaccaccttgtggctcctctgctcacttgcttccaccagtgcctggcggacgcgccaagagaagcggatctggcgtgaagcagaccctgaatttcgacctgctgaagctggctggcgacgtggaatccaacccaggcccttctagaggccatatgaccgagtacaagcccacggtgcgcctcgccacccgcgacgacgtccccagggccgtacgcaccctcgccgccgcgttcgccgactaccccgccacgcgccacaccgtcgatccggaccgccacatcgagcgggtcaccgagctgcaagaactcttcctcacgcgcgtcgggctcgacatcggcaaggtgtgggtcgcggacgacggcgccgcggtggcggtctggaccacgccggagagcgtcgaagcgggggcggtgttcgccgagatcggcccgcgcatggccgagttgagcggttcccggctggccgcgcagcaacagatggaaggcctcctggcgccgcaccggcccaaggagcccgcgtggttcctggccaccgtcggcgtctcgcccgaccaccagggcaagggtctgggcagcgccgtcgtgctccccggagtggaggcggccgagcgcgccggggtgcccgccttcctggagacctccgcgccccgcaacctccccttctacgagcggctcggcttcaccgtcaccgccgacgtcgaggtgcccgaaggaccgcgcacctggtgcatgacccgcaagcccggtgcctga

SEQ ID NO: 7617 - DNA, 1713 bp, Artificial Sequence
  Synthetic Polynucleotide
atggccttaccagtgaccgccttgctcctgccgctggccttgctgctccacgccgccaggccggcatgcgaggtgcagctggttgaatctggtggcggagttgtgcagcctggcagaagcctgagactgtcttgtgccgccagcggctttagcttcagcggctatggaatgcactgggtccgacaggcccctggcaaaggacttgagtgggtcgcctacatcagctacgacggcagcaacaagtattacgccgacagcgtgaagggcagattcaccatcagccgggacaacagcaagaacaccctgtacctccagatgaacagcctgagagccgaggacaccgccgtgtactactgcgccaaagatcctgcctggggactgagactgggcgagagcagcagctacgatttcgactactggggccagggcacaatggtcacagtttctagcggtaccacgcgtctgtgggtgtcccagccacctgaaattcggacactggaaggctcctccgcctttctgccctgtagctttaacgccagccaggggagactcgccatcggctctgtgacatggttccgggatgaagtcgtccctggaaaagaagttcgcaacggaacaccagagttcagaggcagactcgccccactggcaagctccagattcctgcatgaccatcaggctgaactgcacattagggacgtgcggggccacgatgcctccatctatgtgtgtcgggtcgaagtgcttggactcggcgtcggaactggaaacggcactaggctggtggtcgagaaagaacatccacagcttggcgctggcaccgtcctgttgcttagagccggattctatgccgtcagcttcctgtccgtggctgtggggtctacagtgtattaccagggaaaatgtctcacctggaaaggccccagacgccagcttccagctgttgttcctgctccactgccaccaccttgtggctcctctgctcacttgcttccaccagtgcctggcggacgcgccaagagaagcggatctggcgtgaagcagaccctgaatttcgacctgctgaagctggctggcgacgtggaatccaacccaggcccttctagaggccatatgaccgagtacaagcccacggtgcgcctcgccacccgcgacgacgtccccagggccgtacgcaccctcgccgccgcgttcgccgactaccccgccacgcgccacaccgtcgatccggaccgccacatcgagcgggtcaccgagctgcaagaactcttcctcacgcgcgtcgggctcgacatcggcaaggtgtgggtcgcggacgacggcgccgcggtggcggtctggaccacgccggagagcgtcgaagcgggggcggtgttcgccgagatcggcccgcgcatggccgagttgagcggttcccggctggccgcgcagcaacagatggaaggcctcctggcgccgcaccggcccaaggagcccgcgtggttcctggccaccgtcggcgtctcgcccgaccaccagggcaagggtctgggcagcgccgtcgtgctccccggagtggaggcggccgagcgcgccggggtgcccgccttcctggagacctccgcgccccgcaacctccccttctacgagcggctcggcttcaccgtcaccgccgacgtcgaggtgcccgaaggaccgcgcacctggtgcatgacccgcaagcccggtgcctga

SEQ ID NO: 7618 - DNA, 2025 bp, Artificial Sequence
  Synthetic Polynucleotide
atggccttaccagtgaccgccttgctcctgccgctggccttgctgctccacgccgccaggccggcatgcgaagtgcagctgcttgaaagtggcggcggactgattcagcctggcggatctctgagactgagctgtgccgccagcggcttcaccttttctagccacgccatgacctgggtccgacaggcacctggaaaagggcttgaatgggtgtccgccatcagcggctctggcgattacacacactacgccgacagcgtgaagggcagattcaccatcagcagagacaacagcaagaacaccgtgtacctccagatgaacagcctgagagccgaggacagcgccgtgtattattgcgccaaggatgaggatggcggcagcctgcttggacacagaggacaaggcaccctggtcaccgtttcttccggtaccggcggaggcggatctggcggcggaggtagcggtggcggaggatctgaattccagcagcagacactgcccaagcctttcatttgggccgagcctcacttcatggtgcccaaagaaaagcaagtgaccatctgctgccagggcaactacggcgctgtggaataccagctgcacttcgagggaagcctgttcgccgtggacagacctaagcctcctgagcggatcaacaaggtgcagttctacatccccgacatgaacagccggatggccggacagtacagctgcatctatagagtgggcgagctttggagcgagcccagcaatctgctggatctggtggtcaccgagatgtacgacacccctacactgagcgtgcaccccggacctgaagtgatctctggcgagaaagtgaccttctactgtcggctggataccgccaccagcatgtttctgctgctcaaagaaggccggtccagccacgtgcagcgcggatatggaaaagtgcaggccgagtttcccctgggacctgtgacaacagcccacagaggcacctacagatgcttcggcagctacaacaaccacgcttggagcttccctagcgagcccgtgaagttgcttgtgaccggcgacatcgagaacaccagtctggcccctgaggaccctacctttcctgccgatacctggggcacctacctgctgaccacagagacaggactccagaaagatcacgccctgtgggaccacacagcccagaacctgctgagaatgggcctcgcctttctggtgctggttgccctcgtgtggttcctggtggaagattggctgagccggaagcggacaagagagagagccagcagagcctctacctgggagggaagaagaaggctgaacacccagacacttagggccaagcgatctggatctggagcaacaaacttctcactactcaaacaagcaggtgacgtggaggagaatcccgggcctactagaggccatatgaccgagtacaagcccacggtgcgcctcgccacccgcgacgacgtccccagggccgtacgcaccctcgccgccgcgttcgccgactaccccgccacgcgccacaccgtcgatccggaccgccacatcgagcgggtcaccgagctgcaagaactcttcctcacgcgcgtcgggctcgacatcggcaaggtgtgggtcgcggacgacggcgccgcggtggcggtctggaccacgccggagagcgtcgaagcgggggcggtgttcgccgagatcggcccgcgcatggccgagttgagcggttcccggctggccgcgcagcaacagatggaaggcctcctggcgccgcaccggcccaaggagcccgcgtggttcctggccaccgtcggcgtctcgcccgaccaccagggcaagggtctgggcagcgccgtcgtgctccccggagtggaggcggccgagcgcgccggggtgcccgccttcctggagacctccgcgccccgcaacctccccttctacgagcggctcggcttcaccgtcaccgccgacgtcgaggtgcccgaaggaccgcgcacctggtgcatgacccgcaagcccggtgcctga

SEQ ID NO: 7619 - DNA, 2586 bp, Artificial Sequence
  Synthetic Polynucleotide
atggccttaccagtgaccgccttgctcctgccgctggccttgctgctccacgccgccaggccggacatccagatgacacagagccctagcagcctgtctgccagcgtgggagacagagtgaccatcacatgcaaggccagcgaccacatcaacaactggctggcctggtatcagcagaagcctggacaggcccctaagctgctgatctacggcgctaccacactggaaacaggcgtgcccagcagattttctggcagcggctctggcaccgactacaccctgacaatatccagcctccagcctgaggacttcgccacctactactgtcagcagagctggaacaccccttggacattcggccagggcaccaagctggaaatcaagagactcgaggacaagcagctggacgccgacgtgtcccccaagcctaccatcttcctgccctctatcgccgagacaaagctccagaaggccggcacctacctgtgcctgctggaaaagttcttcccagatgtgattaagatccactggcaggaaaagaagtccaacaccatcctgggcagccaggaaggcaacaccatgaagaccaacgacacctacatgaagttcagctggctgaccgtgcccgagaagtccctggacaaagaacacagatgcatcgtgcggcacgaaaacaacaagaacggcgtggaccaggaaatcatcttcccacccatcaagaccgatgtgattacaatggaccccaaggacaactgctccaaggacgccaacgataccctgctgctccagctgaccaacaccagcgcctactacatgtacttgttgctgctgctgaagtccgtggtgtacttcgccatcatcacatgctgcctgctgcggagaaccgccttctgctgcaacggcgagaagtctagggccaagcgatctggatctggagcaacaaacttctcactactcaaacaagcaggtgacgtggaggagaatcccgggcctactagtatggactggatttggcgcatccttttccttgtcggcgctgctaccggcgcgcattccttcgaacaagttcagcttcaacagcctggcgctgagctggtcaaacctggcgcttctgtgaagatgagctgcaaagccagcggctacgccttcagcagctactggatcaactggatgaagcagaaacccggccagggactcgaatggatcggccaaatctatcccggcgacggcgacaccaactacaacggcaagttcaagggcagagccacactgaccgccgatacctctagcagcacagcctacatgcagctgagcagcctgaccagcgaagatagcgccgtgtacttctgtgcccggtccatcacaacagtcgtgggctgcgctatggactattggggccagggaacaagcgtgaccgtgtctagtacgcgtcctcacaccaagcccagcgtgttcgtgatgaagaacggcaccaacgtggcctgcctcgtgaaagagttctaccccaaggacatcaggatcaacctggtgtccagcaagaagatcaccgagttcgaccccgccatcgtgatctcccccagcggcaagtacaacgccgtgaagctggggaagtacgaggacagcaacagcgtgacctgctccgtgcagcacgacaacaagaccgtgcacagcaccgactttgaagtgaaaaccgactccaccgaccacgtgaagcccaaagagacagagaacaccaagcagcccagcaagagctgccacaagcccaaggccatcgtgcacaccgagaaagtgaacatgatgagcctgaccgtgctgggcctgcggatgctgttcgccaaaaccgtggccgtgaacttcctgctgaccgccaagctgttcttcctccgcgccaagagaagcggatctggcgtgaagcagaccctgaatttcgacctgctgaagctggctggcgacgtggaatccaacccaggcccttctagaggccatatgaccgagtacaagcccacggtgcgcctcgccacccgcgacgacgtccccagggccgtacgcaccctcgccgccgcgttcgccgactaccccgccacgcgccacaccgtcgatccggaccgccacatcgagcgggtcaccgagctgcaagaactcttcctcacgcgcgtcgggctcgacatcggcaaggtgtgggtcgcggacgacggcgccgcggtggcggtctggaccacgccggagagcgtcgaagcgggggcggtgttcgccgagatcggcccgcgcatggccgagttgagcggttcccggctggccgcgcagcaacagatggaaggcctcctggcgccgcaccggcccaaggagcccgcgtggttcctggccaccgtcggcgtctcgcccgaccaccagggcaagggtctgggcagcgccgtcgtgctccccggagtggaggcggccgagcgcgccggggtgcccgccttcctggagacctccgcgccccgcaacctccccttctacgagcggctcggcttcaccgtcaccgccgacgtcgaggtgcccgaaggaccgcgcacctggtgcatgacccgcaagcccggtgcctga

SEQ ID NO: 7620 - DNA, 2583 bp, Artificial Sequence
  Synthetic Polynucleotide
atggccttaccagtgaccgccttgctcctgccgctggccttgctgctccacgccgccaggccggacatccagatgacacagagccctagcagcctgtctgccagcgtgggagacagagtgaccatcacatgcaaggccagcgaccacatcaacaactggctggcctggtatcagcagaagcctggacaggcccctaagctgctgatctacggcgctaccacactggaaacaggcgtgcccagcagattttctggcagcggctctggcaccgactacaccctgacaatatccagcctccagcctgaggacttcgccacctactactgtcagcagagctggaacaccccttggacattcggccagggcaccaagctggaaatcaagagactcgagaagcagctggacgccgacgtgtcccccaagcctaccatcttcctgccctctatcgccgagacaaagctccagaaggccggcacctacctgtgcctgctggaaaagttcttcccagatgtgattaagatccactggcaggaaaagaagtccaacaccatcctgggcagccaggaaggcaacaccatgaagaccaacgacacctacatgaagttcagctggctgaccgtgcccgagaagtccctggacaaagaacacagatgcatcgtgcggcacgaaaacaacaagaacggcgtggaccaggaaatcatcttcccacccatcaagaccgatgtgattacaatggaccccaaggacaactgctccaaggacgccaacgataccctgctgctccagctgaccaacaccagcgcctactacatgtacttgttgctgctgctgaagtccgtggtgtacttcgccatcatcacatgctgcctgctgcggagaaccgccttctgctgcaacggcgagaagtctagggccaagcgatctggatctggagcaacaaacttctcactactcaaacaagcaggtgacgtggaggagaatcccgggcctactagtatggactggatttggcgcatccttttccttgtcggcgctgctaccggcgcgcattccttcgaacaagttcagcttcaacagcctggcgctgagctggtcaaacctggcgcttctgtgaagatgagctgcaaagccagcggctacgccttcagcagctactggatcaactggatgaagcagaaacccggccagggactcgaatggatcggccaaatctatcccggcgacggcgacaccaactacaacggcaagttcaagggcagagccacactgaccgccgatacctctagcagcacagcctacatgcagctgagcagcctgaccagcgaagatagcgccgtgtacttctgtgcccggtccatcacaacagtcgtgggctgcgctatggactattggggccagggaacaagcgtgaccgtgtctagtacgcgtcctcacaccaagcccagcgtgttcgtgatgaagaacggcaccaacgtggcctgcctcgtgaaagagttctaccccaaggacatcaggatcaacctggtgtccagcaagaagatcaccgagttcgaccccgccatcgtgatctcccccagcggcaagtacaacgccgtgaagctggggaagtacgaggacagcaacagcgtgacctgctccgtgcagcacgacaacaagaccgtgcacagcaccgactttgaagtgaaaaccgactccaccgaccacgtgaagcccaaagagacagagaacaccaagcagcccagcaagagctgccacaagcccaaggccatcgtgcacaccgagaaagtgaacatgatgagcctgaccgtgctgggcctgcggatgctgttcgccaaaaccgtggccgtgaacttcctgctgaccgccaagctgttcttcctccgcgccaagagaagcggatctggcgtgaagcagaccctgaatttcgacctgctgaagctggctggcgacgtggaatccaacccaggcccttctagaggccatatgaccgagtacaagcccacggtgcgcctcgccacccgcgacgacgtccccagggccgtacgcaccctcgccgccgcgttcgccgactaccccgccacgcgccacaccgtcgatccggaccgccacatcgagcgggtcaccgagctgcaagaactcttcctcacgcgcgtcgggctcgacatcggcaaggtgtgggtcgcggacgacggcgccgcggtggcggtctggaccacgccggagagcgtcgaagcgggggcggtgttcgccgagatcggcccgcgcatggccgagttgagcggttcccggctggccgcgcagcaacagatggaaggcctcctggcgccgcaccggcccaaggagcccgcgtggttcctggccaccgtcggcgtctcgcccgaccaccagggcaagggtctgggcagcgccgtcgtgctccccggagtggaggcggccgagcgcgccggggtgcccgccttcctggagacctccgcgccccgcaacctccccttctacgagcggctcggcttcaccgtcaccgccgacgtcgaggtgcccgaaggaccgcgcacctggtgcatgacccgcaagcccggtgcctga

SEQ ID NO: 7621 - DNA, 2580 bp, Artificial Sequence
  Synthetic Polynucleotide
atggccttaccagtgaccgccttgctcctgccgctggccttgctgctccacgccgccaggccggacatccagatgacacagagccctagcagcctgtctgccagcgtgggagacagagtgaccatcacatgcaaggccagcgaccacatcaacaactggctggcctggtatcagcagaagcctggacaggcccctaagctgctgatctacggcgctaccacactggaaacaggcgtgcccagcagattttctggcagcggctctggcaccgactacaccctgacaatatccagcctccagcctgaggacttcgccacctactactgtcagcagagctggaacaccccttggacattcggccagggcaccaagctggaaatcaagagactcgagcagctggacgccgacgtgtcccccaagcctaccatcttcctgccctctatcgccgagacaaagctccagaaggccggcacctacctgtgcctgctggaaaagttcttcccagatgtgattaagatccactggcaggaaaagaagtccaacaccatcctgggcagccaggaaggcaacaccatgaagaccaacgacacctacatgaagttcagctggctgaccgtgcccgagaagtccctggacaaagaacacagatgcatcgtgcggcacgaaaacaacaagaacggcgtggaccaggaaatcatcttcccacccatcaagaccgatgtgattacaatggaccccaaggacaactgctccaaggacgccaacgataccctgctgctccagctgaccaacaccagcgcctactacatgtacttgttgctgctgctgaagtccgtggtgtacttcgccatcatcacatgctgcctgctgcggagaaccgccttctgctgcaacggcgagaagtctagggccaagcgatctggatctggagcaacaaacttctcactactcaaacaagcaggtgacgtggaggagaatcccgggcctactagtatggactggatttggcgcatccttttccttgtcggcgctgctaccggcgcgcattccttcgaacaagttcagcttcaacagcctggcgctgagctggtcaaacctggcgcttctgtgaagatgagctgcaaagccagcggctacgccttcagcagctactggatcaactggatgaagcagaaacccggccagggactcgaatggatcggccaaatctatcccggcgacggcgacaccaactacaacggcaagttcaagggcagagccacactgaccgccgatacctctagcagcacagcctacatgcagctgagcagcctgaccagcgaagatagcgccgtgtacttctgtgcccggtccatcacaacagtcgtgggctgcgctatggactattggggccagggaacaagcgtgaccgtgtctagtacgcgtcctcacaccaagcccagcgtgttcgtgatgaagaacggcaccaacgtggcctgcctcgtgaaagagttctaccccaaggacatcaggatcaacctggtgtccagcaagaagatcaccgagttcgaccccgccatcgtgatctcccccagcggcaagtacaacgccgtgaagctggggaagtacgaggacagcaacagcgtgacctgctccgtgcagcacgacaacaagaccgtgcacagcaccgactttgaagtgaaaaccgactccaccgaccacgtgaagcccaaagagacagagaacaccaagcagcccagcaagagctgccacaagcccaaggccatcgtgcacaccgagaaagtgaacatgatgagcctgaccgtgctgggcctgcggatgctgttcgccaaaaccgtggccgtgaacttcctgctgaccgccaagctgttcttcctccgcgccaagagaagcggatctggcgtgaagcagaccctgaatttcgacctgctgaagctggctggcgacgtggaatccaacccaggcccttctagaggccatatgaccgagtacaagcccacggtgcgcctcgccacccgcgacgacgtccccagggccgtacgcaccctcgccgccgcgttcgccgactaccccgccacgcgccacaccgtcgatccggaccgccacatcgagcgggtcaccgagctgcaagaactcttcctcacgcgcgtcgggctcgacatcggcaaggtgtgggtcgcggacgacggcgccgcggtggcggtctggaccacgccggagagcgtcgaagcgggggcggtgttcgccgagatcggcccgcgcatggccgagttgagcggttcccggctggccgcgcagcaacagatggaaggcctcctggcgccgcaccggcccaaggagcccgcgtggttcctggccaccgtcggcgtctcgcccgaccaccagggcaagggtctgggcagcgccgtcgtgctccccggagtggaggcggccgagcgcgccggggtgcccgccttcctggagacctccgcgccccgcaacctccccttctacgagcggctcggcttcaccgtcaccgccgacgtcgaggtgcccgaaggaccgcgcacctggtgcatgacccgcaagcccggtgcctga

SEQ ID NO: 7622 - DNA, 2562 bp, Artificial Sequence
  Synthetic Polynucleotide
atggccttaccagtgaccgccttgctcctgccgctggccttgctgctccacgccgccaggccggacatccagatgacacagagccctagcagcctgtctgccagcgtgggagacagagtgaccatcacatgcaaggccagcgaccacatcaacaactggctggcctggtatcagcagaagcctggacaggcccctaagctgctgatctacggcgctaccacactggaaacaggcgtgcccagcagattttctggcagcggctctggcaccgactacaccctgacaatatccagcctccagcctgaggacttcgccacctactactgtcagcagagctggaacaccccttggacattcggccagggcaccaagctggaaatcaagagactcgagtcccccaagcctaccatcttcctgccctctatcgccgagacaaagctccagaaggccggcacctacctgtgcctgctggaaaagttcttcccagatgtgattaagatccactggcaggaaaagaagtccaacaccatcctgggcagccaggaaggcaacaccatgaagaccaacgacacctacatgaagttcagctggctgaccgtgcccgagaagtccctggacaaagaacacagatgcatcgtgcggcacgaaaacaacaagaacggcgtggaccaggaaatcatcttcccacccatcaagaccgatgtgattacaatggaccccaaggacaactgctccaaggacgccaacgataccctgctgctccagctgaccaacaccagcgcctactacatgtacttgttgctgctgctgaagtccgtggtgtacttcgccatcatcacatgctgcctgctgcggagaaccgccttctgctgcaacggcgagaagtctagggccaagcgatctggatctggagcaacaaacttctcactactcaaacaagcaggtgacgtggaggagaatcccgggcctactagtatggactggatttggcgcatccttttccttgtcggcgctgctaccggcgcgcattccttcgaacaagttcagcttcaacagcctggcgctgagctggtcaaacctggcgcttctgtgaagatgagctgcaaagccagcggctacgccttcagcagctactggatcaactggatgaagcagaaacccggccagggactcgaatggatcggccaaatctatcccggcgacggcgacaccaactacaacggcaagttcaagggcagagccacactgaccgccgatacctctagcagcacagcctacatgcagctgagcagcctgaccagcgaagatagcgccgtgtacttctgtgcccggtccatcacaacagtcgtgggctgcgctatggactattggggccagggaacaagcgtgaccgtgtctagtacgcgtcctcacaccaagcccagcgtgttcgtgatgaagaacggcaccaacgtggcctgcctcgtgaaagagttctaccccaaggacatcaggatcaacctggtgtccagcaagaagatcaccgagttcgaccccgccatcgtgatctcccccagcggcaagtacaacgccgtgaagctggggaagtacgaggacagcaacagcgtgacctgctccgtgcagcacgacaacaagaccgtgcacagcaccgactttgaagtgaaaaccgactccaccgaccacgtgaagcccaaagagacagagaacaccaagcagcccagcaagagctgccacaagcccaaggccatcgtgcacaccgagaaagtgaacatgatgagcctgaccgtgctgggcctgcggatgctgttcgccaaaaccgtggccgtgaacttcctgctgaccgccaagctgttcttcctccgcgccaagagaagcggatctggcgtgaagcagaccctgaatttcgacctgctgaagctggctggcgacgtggaatccaacccaggcccttctagaggccatatgaccgagtacaagcccacggtgcgcctcgccacccgcgacgacgtccccagggccgtacgcaccctcgccgccgcgttcgccgactaccccgccacgcgccacaccgtcgatccggaccgccacatcgagcgggtcaccgagctgcaagaactcttcctcacgcgcgtcgggctcgacatcggcaaggtgtgggtcgcggacgacggcgccgcggtggcggtctggaccacgccggagagcgtcgaagcgggggcggtgttcgccgagatcggcccgcgcatggccgagttgagcggttcccggctggccgcgcagcaacagatggaaggcctcctggcgccgcaccggcccaaggagcccgcgtggttcctggccaccgtcggcgtctcgcccgaccaccagggcaagggtctgggcagcgccgtcgtgctccccggagtggaggcggccgagcgcgccggggtgcccgccttcctggagacctccgcgccccgcaacctccccttctacgagcggctcggcttcaccgtcaccgccgacgtcgaggtgcccgaaggaccgcgcacctggtgcatgacccgcaagcccggtgcctga

SEQ ID NO: 7623 - DNA, 2553 bp, Artificial Sequence
  Synthetic Polynucleotide
atggccttaccagtgaccgccttgctcctgccgctggccttgctgctccacgccgccaggccggacatccagatgacacagagccctagcagcctgtctgccagcgtgggagacagagtgaccatcacatgcaaggccagcgaccacatcaacaactggctggcctggtatcagcagaagcctggacaggcccctaagctgctgatctacggcgctaccacactggaaacaggcgtgcccagcagattttctggcagcggctctggcaccgactacaccctgacaatatccagcctccagcctgaggacttcgccacctactactgtcagcagagctggaacaccccttggacattcggccagggcaccaagctggaaatcaagagactcgagcctaccatcttcctgccctctatcgccgagacaaagctccagaaggccggcacctacctgtgcctgctggaaaagttcttcccagatgtgattaagatccactggcaggaaaagaagtccaacaccatcctgggcagccaggaaggcaacaccatgaagaccaacgacacctacatgaagttcagctggctgaccgtgcccgagaagtccctggacaaagaacacagatgcatcgtgcggcacgaaaacaacaagaacggcgtggaccaggaaatcatcttcccacccatcaagaccgatgtgattacaatggaccccaaggacaactgctccaaggacgccaacgataccctgctgctccagctgaccaacaccagcgcctactacatgtacttgttgctgctgctgaagtccgtggtgtacttcgccatcatcacatgctgcctgctgcggagaaccgccttctgctgcaacggcgagaagtctagggccaagcgatctggatctggagcaacaaacttctcactactcaaacaagcaggtgacgtggaggagaatcccgggcctactagtatggactggatttggcgcatccttttccttgtcggcgctgctaccggcgcgcattccttcgaacaagttcagcttcaacagcctggcgctgagctggtcaaacctggcgcttctgtgaagatgagctgcaaagccagcggctacgccttcagcagctactggatcaactggatgaagcagaaacccggccagggactcgaatggatcggccaaatctatcccggcgacggcgacaccaactacaacggcaagttcaagggcagagccacactgaccgccgatacctctagcagcacagcctacatgcagctgagcagcctgaccagcgaagatagcgccgtgtacttctgtgcccggtccatcacaacagtcgtgggctgcgctatggactattggggccagggaacaagcgtgaccgtgtctagtacgcgtcctcacaccaagcccagcgtgttcgtgatgaagaacggcaccaacgtggcctgcctcgtgaaagagttctaccccaaggacatcaggatcaacctggtgtccagcaagaagatcaccgagttcgaccccgccatcgtgatctcccccagcggcaagtacaacgccgtgaagctggggaagtacgaggacagcaacagcgtgacctgctccgtgcagcacgacaacaagaccgtgcacagcaccgactttgaagtgaaaaccgactccaccgaccacgtgaagcccaaagagacagagaacaccaagcagcccagcaagagctgccacaagcccaaggccatcgtgcacaccgagaaagtgaacatgatgagcctgaccgtgctgggcctgcggatgctgttcgccaaaaccgtggccgtgaacttcctgctgaccgccaagctgttcttcctccgcgccaagagaagcggatctggcgtgaagcagaccctgaatttcgacctgctgaagctggctggcgacgtggaatccaacccaggcccttctagaggccatatgaccgagtacaagcccacggtgcgcctcgccacccgcgacgacgtccccagggccgtacgcaccctcgccgccgcgttcgccgactaccccgccacgcgccacaccgtcgatccggaccgccacatcgagcgggtcaccgagctgcaagaactcttcctcacgcgcgtcgggctcgacatcggcaaggtgtgggtcgcggacgacggcgccgcggtggcggtctggaccacgccggagagcgtcgaagcgggggcggtgttcgccgagatcggcccgcgcatggccgagttgagcggttcccggctggccgcgcagcaacagatggaaggcctcctggcgccgcaccggcccaaggagcccgcgtggttcctggccaccgtcggcgtctcgcccgaccaccagggcaagggtctgggcagcgccgtcgtgctccccggagtggaggcggccgagcgcgccggggtgcccgccttcctggagacctccgcgccccgcaacctccccttctacgagcggctcggcttcaccgtcaccgccgacgtcgaggtgcccgaaggaccgcgcacctggtgcatgacccgcaagcccggtgcctga

SEQ ID NO: 7624 - DNA, 2539 bp, Artificial Sequence
  Synthetic Polynucleotide
atggccttaccagtgaccgccttgctcctgccgctggccttgctgctccacgccgccaggccggacatccagatgacacagagccctagcagcctgtctgccagcgtgggagacagagtgaccatcacatgcaaggccagcgaccacatcaacaactggctggcctggtatcagcagaagcctggacaggcccctaagctgctgatctacggcgctaccacactggaaacaggcgtgcccagcagattttctggcagcggctctggcaccgactacaccctgacaatatccagcctccagcctgaggacttcgccacctactactgtcagcagagctggaacaccccttggacattcggccagggcaccaagctggaaatcaagagactcgaggccctctatcgccgagacaaagctccagaaggccggcacctacctgtgcctgctggaaaagttcttcccagatgtgattaagatccactggcaggaaaagaagtccaacaccatcctgggcagccaggaaggcaacaccatgaagaccaacgacacctacatgaagttcagctggctgaccgtgcccgagaagtccctggacaaagaacacagatgcatcgtgcggcacgaaaacaacaagaacggcgtggaccaggaaatcatcttcccacccatcaagaccgatgtgattacaatggaccccaaggacaactgctccaaggacgccaacgataccctgctgctccagctgaccaacaccagcgcctactacatgtacttgttgctgctgctgaagtccgtggtgtacttcgccatcatcacatgctgcctgctgcggagaaccgccttctgctgcaacggcgagaagtctagggccaagcgatctggatctggagcaacaaacttctcactactcaaacaagcaggtgacgtggaggagaatcccgggcctactagtatggactggatttggcgcatccttttccttgtcggcgctgctaccggcgcgcattccttcgaacaagttcagcttcaacagcctggcgctgagctggtcaaacctggcgcttctgtgaagatgagctgcaaagccagcggctacgccttcagcagctactggatcaactggatgaagcagaaacccggccagggactcgaatggatcggccaaatctatcccggcgacggcgacaccaactacaacggcaagttcaagggcagagccacactgaccgccgatacctctagcagcacagcctacatgcagctgagcagcctgaccagcgaagatagcgccgtgtacttctgtgcccggtccatcacaacagtcgtgggctgcgctatggactattggggccagggaacaagcgtgaccgtgtctagtacgcgtcctcacaccaagcccagcgtgttcgtgatgaagaacggcaccaacgtggcctgcctcgtgaaagagttctaccccaaggacatcaggatcaacctggtgtccagcaagaagatcaccgagttcgaccccgccatcgtgatctcccccagcggcaagtacaacgccgtgaagctggggaagtacgaggacagcaacagcgtgacctgctccgtgcagcacgacaacaagaccgtgcacagcaccgactttgaagtgaaaaccgactccaccgaccacgtgaagcccaaagagacagagaacaccaagcagcccagcaagagctgccacaagcccaaggccatcgtgcacaccgagaaagtgaacatgatgagcctgaccgtgctgggcctgcggatgctgttcgccaaaaccgtggccgtgaacttcctgctgaccgccaagctgttcttcctccgcgccaagagaagcggatctggcgtgaagcagaccctgaatttcgacctgctgaagctggctggcgacgtggaatccaacccaggcccttctagaggccatatgaccgagtacaagcccacggtgcgcctcgccacccgcgacgacgtccccagggccgtacgcaccctcgccgccgcgttcgccgactaccccgccacgcgccacaccgtcgatccggaccgccacatcgagcgggtcaccgagctgcaagaactcttcctcacgcgcgtcgggctcgacatcggcaaggtgtgggtcgcggacgacggcgccgcggtggcggtctggaccacgccggagagcgtcgaagcgggggcggtgttcgccgagatcggcccgcgcatggccgagttgagcggttcccggctggccgcgcagcaacagatggaaggcctcctggcgccgcaccggcccaaggagcccgcgtggttcctggccaccgtcggcgtctcgcccgaccaccagggcaagggtctgggcagcgccgtcgtgctccccggagtggaggcggccgagcgcgccggggtgcccgccttcctggagacctccgcgccccgcaacctccccttctacgagcggctcggcttcaccgtcaccgccgacgtcgaggtgcccgaaggaccgcgcacctggtgcatgacccgcaagcccggtgcctga

SEQ ID NO: 7625 - DNA, 2523 bp, Artificial Sequence
  Synthetic Polynucleotide
atggccttaccagtgaccgccttgctcctgccgctggccttgctgctccacgccgccaggccggacatccagatgacacagagccctagcagcctgtctgccagcgtgggagacagagtgaccatcacatgcaaggccagcgaccacatcaacaactggctggcctggtatcagcagaagcctggacaggcccctaagctgctgatctacggcgctaccacactggaaacaggcgtgcccagcagattttctggcagcggctctggcaccgactacaccctgacaatatccagcctccagcctgaggacttcgccacctactactgtcagcagagctggaacaccccttggacattcggccagggcaccaagctggaaatcaagagactcgagacaaagctccagaaggccggcacctacctgtgcctgctggaaaagttcttcccagatgtgattaagatccactggcaggaaaagaagtccaacaccatcctgggcagccaggaaggcaacaccatgaagaccaacgacacctacatgaagttcagctggctgaccgtgcccgagaagtccctggacaaagaacacagatgcatcgtgcggcacgaaaacaacaagaacggcgtggaccaggaaatcatcttcccacccatcaagaccgatgtgattacaatggaccccaaggacaactgctccaaggacgccaacgataccctgctgctccagctgaccaacaccagcgcctactacatgtacttgttgctgctgctgaagtccgtggtgtacttcgccatcatcacatgctgcctgctgcggagaaccgccttctgctgcaacggcgagaagtctagggccaagcgatctggatctggagcaacaaacttctcactactcaaacaagcaggtgacgtggaggagaatcccgggcctactagtatggactggatttggcgcatccttttccttgtcggcgctgctaccggcgcgcattccttcgaacaagttcagcttcaacagcctggcgctgagctggtcaaacctggcgcttctgtgaagatgagctgcaaagccagcggctacgccttcagcagctactggatcaactggatgaagcagaaacccggccagggactcgaatggatcggccaaatctatcccggcgacggcgacaccaactacaacggcaagttcaagggcagagccacactgaccgccgatacctctagcagcacagcctacatgcagctgagcagcctgaccagcgaagatagcgccgtgtacttctgtgcccggtccatcacaacagtcgtgggctgcgctatggactattggggccagggaacaagcgtgaccgtgtctagtacgcgtcctcacaccaagcccagcgtgttcgtgatgaagaacggcaccaacgtggcctgcctcgtgaaagagttctaccccaaggacatcaggatcaacctggtgtccagcaagaagatcaccgagttcgaccccgccatcgtgatctcccccagcggcaagtacaacgccgtgaagctggggaagtacgaggacagcaacagcgtgacctgctccgtgcagcacgacaacaagaccgtgcacagcaccgactttgaagtgaaaaccgactccaccgaccacgtgaagcccaaagagacagagaacaccaagcagcccagcaagagctgccacaagcccaaggccatcgtgcacaccgagaaagtgaacatgatgagcctgaccgtgctgggcctgcggatgctgttcgccaaaaccgtggccgtgaacttcctgctgaccgccaagctgttcttcctccgcgccaagagaagcggatctggcgtgaagcagaccctgaatttcgacctgctgaagctggctggcgacgtggaatccaacccaggcccttctagaggccatatgaccgagtacaagcccacggtgcgcctcgccacccgcgacgacgtccccagggccgtacgcaccctcgccgccgcgttcgccgactaccccgccacgcgccacaccgtcgatccggaccgccacatcgagcgggtcaccgagctgcaagaactcttcctcacgcgcgtcgggctcgacatcggcaaggtgtgggtcgcggacgacggcgccgcggtggcggtctggaccacgccggagagcgtcgaagcgggggcggtgttcgccgagatcggcccgcgcatggccgagttgagcggttcccggctggccgcgcagcaacagatggaaggcctcctggcgccgcaccggcccaaggagcccgcgtggttcctggccaccgtcggcgtctcgcccgaccaccagggcaagggtctgggcagcgccgtcgtgctccccggagtggaggcggccgagcgcgccggggtgcccgccttcctggagacctccgcgccccgcaacctccccttctacgagcggctcggcttcaccgtcaccgccgacgtcgaggtgcccgaaggaccgcgcacctggtgcatgacccgcaagcccggtgcctga

SEQ ID NO: 7626 - DNA, 3459 bp, Artificial Sequence
  Synthetic Polynucleotide
atggccttaccagtgaccgccttgctcctgccgctggccttgctgctccacgccgccaggccggcatgcgaagtgcagctgcttgaaagtggcggcggactgattcagcctggcggatctctgagactgagctgtgccgccagcggcttcaccttttctagccacgccatgacctgggtccgacaggcacctggaaaagggcttgaatgggtgtccgccatcagcggctctggcgattacacacactacgccgacagcgtgaagggcagattcaccatcagcagagacaacagcaagaacaccgtgtacctccagatgaacagcctgagagccgaggacagcgccgtgtattattgcgccaaggatgaggatggcggcagcctgcttggacacagaggacaaggcaccctggtcaccgtttcttccggtaccggcggaggcggatctggcggcggaggtagcggtggcggaggatctgaattcggcatgcggactgaagacctcccaaaggctgtggtgttcctggagcctcaatggtacagggtgctggagaaggacagtgtgactctgaagtgccagggagcctactcccctgaggacaattccacacagtggtttcacaatgagagcctcatctcaagccaggcctccagctacttcattgacgctgccacagtggacgacagtggagagtacaggtgccagacaaacctctccaccctcagtgacccggtgcagctagaagtccatatcggctggctgttgctccaggcccctcggtgggtgttcaaggaggaagaccctattcacctgaggtgtcacagctggaagaacactgctctgcataaggtcacatatttacagaatggcaaaggcaggaagtattttcatcataattctgacttctacattccaaaagccacactcaaagacagcggctcctacttctgcagggggcttgttgggagtaaaaatgtgtcttcagagactgtgaacatcaccatcactcaaggtttggcagtgtcaaccatctcatcattctttccacctggctaccaagtgtccttctgcctggtcatggtgctgctgttcgccgtggataccggcctgtacttcagcgtcaagaccaacatccggtccagcaccagagactggaaggaccacaagttcaagtggcggaaggaccctcaggacaagagggccaagcgatctggatctggagcaacaaacttctcactactcaaacaagcaggtgacgtggaggagaatcccgggcctactagtgccaccatggactggatttggcgcatccttttccttgtcggcgctgctaccggcgcccattccgggcccgaagtgcagctggttgaatctggcggaggactggttcaggctggcggatctctgagactgtcttgtgccgccagcggcagaacctttagcatgggctggtttagacaggcccctggcaaagagagagagttcgtcgccgccatcacatactctggcggcagcccttactacgccgactctgtgaagggcagattcaccatcagccgggacaacgccaagaacaccgtgtacctccagatgaacagcctgaagcctgaggacaccgccgtgtactactgcgccgccaatccaacatacggcagcgactggaacgccgagaattggggccagggaacccaagtgacagtgtctagcggatccggcggcggaggatctggcggaggcggatctgggggcggaggctctttcgaaggcagcacgcgtcatgaaggcgtgcacagaaagcctagcctgctggctcatcctggcagactggtcaagagcgaagagacagtgatcctccagtgttggagcgacgtgatgttcgagcactttctgctgcaccgcgagggcatgttcaacgacaccctgagactgatcggcgagcaccatgatggcgtgtccaaggccaacttcagcatcagcagaatgacccaggatctggccggcacctacagatgttacggcagcgtgacacacagcccctaccaagtgtctgcccctagcgatcctctggacatcgtgattatcggcctgtacgagaagcccagcctgtccgctcaactgggacctacagttctggctggcgagaacgtgaccctgagctgtagcagcagatccagctacgacatgtaccacctgagcagagaaggcgaggcccacgaaagaaggttgcctgccggacctaaagtgaacggcaccttccaggccgactttccactgggaccagcaacacacggcggcacctatcggtgctttggcagctttcacgacagcccttacgagtggtccaagagcagcgatccactgctggtgtccgtgaccggcaatcccagcaatagctggccctctccaacagagcccagcagcaagacaggcaaccccagacatctgcacatcctgatcggcaccagcgtggtcatcatcctgtttatcctgctgttctttctgctccacagatggtgcagcaacaagaaaaacgccgccgtgatggaccaagagagcgccggaaatagaaccgccaacagcgaggatagcgacgagcaggaccctcaagaagtgacctacacacagctgaaccactgcgtgttcacccagcggaagatcaccagacctagccagcggcctaagacacctcctaccgacatcatcgtgtacaccgagctgcccaatgccgagagcagatcaaaagtggtgtcctgtcctcgcgccaagagaagcggatctggcgtgaagcagaccctgaatttcgacctgctgaagctggctggcgacgtggaatccaacccaggcccttctagaggccatatgaccgagtacaagcccacggtgcgcctcgccacccgcgacgacgtccccagggccgtacgcaccctcgccgccgcgttcgccgactaccccgccacgcgccacaccgtcgatccggaccgccacatcgagcgggtcaccgagctgcaagaactcttcctcacgcgcgtcgggctcgacatcggcaaggtgtgggtcgcggacgacggcgccgcggtggcggtctggaccacgccggagagcgtcgaagcgggggcggtgttcgccgagatcggcccgcgcatggccgagttgagcggttcccggctggccgcgcagcaacagatggaaggcctcctggcgccgcaccggcccaaggagcccgcgtggttcctggccaccgtcggcgtctcgcccgaccaccagggcaagggtctgggcagcgccgtcgtgctccccggagtggaggcggccgagcgcgccggggtgcccgccttcctggagacctccgcgccccgcaacctccccttctacgagcggctcggcttcaccgtcaccgccgacgtcgaggtgcccgaaggaccgcgcacctggtgcatgacccgcaagcccggtgcctga

SEQ ID NO: 7627 - DNA, 3225 bp, Artificial Sequence
  Synthetic Polynucleotide
atggccttaccagtgaccgccttgctcctgccgctggccttgctgctccacgccgccaggccggcatgcgaagtgcagctgcttgaaagtggcggcggactgattcagcctggcggatctctgagactgagctgtgccgccagcggcttcaccttttctagccacgccatgacctgggtccgacaggcacctggaaaagggcttgaatgggtgtccgccatcagcggctctggcgattacacacactacgccgacagcgtgaagggcagattcaccatcagcagagacaacagcaagaacaccgtgtacctccagatgaacagcctgagagccgaggacagcgccgtgtattattgcgccaaggatgaggatggcggcagcctgcttggacacagaggacaaggcaccctggtcaccgtttcttccggtaccggcggaggcggatctggcggcggaggtagcggtggcggaggatctgaattcggcatgcggactgaagacctcccaaaggctgtggtgttcctggagcctcaatggtacagggtgctggagaaggacagtgtgactctgaagtgccagggagcctactcccctgaggacaattccacacagtggtttcacaatgagagcctcatctcaagccaggcctccagctacttcattgacgctgccacagtggacgacagtggagagtacaggtgccagacaaacctctccaccctcagtgacccggtgcagctagaagtccatatcggctggctgttgctccaggcccctcggtgggtgttcaaggaggaagaccctattcacctgaggtgtcacagctggaagaacactgctctgcataaggtcacatatttacagaatggcaaaggcaggaagtattttcatcataattctgacttctacattccaaaagccacactcaaagacagcggctcctacttctgcagggggcttgttgggagtaaaaatgtgtcttcagagactgtgaacatcaccatcactcaaggtttggcagtgtcaaccatctcatcattctttccacctggctaccaagtgtccttctgcctggtcatggtgctgctgttcgccgtggataccggcctgtacttcagcgtcaagaccaacatccggtccagcaccagagactggaaggaccacaagttcaagtggcggaaggaccctcaggacaagagggccaagcgatctggatctggagcaacaaacttctcactactcaaacaagcaggtgacgtggaggagaatcccgggcctactagtgccaccatggactggatttggcgcatccttttccttgtcggcgctgctaccggcgcccattccgggcccgaagtgcagctggttgaatctggcggaggactggttcaggctggcggatctctgagactgtcttgtgccgccagcggcagaacctttagcatgggctggtttagacaggcccctggcaaagagagagagttcgtcgccgccatcacatactctggcggcagcccttactacgccgactctgtgaagggcagattcaccatcagccgggacaacgccaagaacaccgtgtacctccagatgaacagcctgaagcctgaggacaccgccgtgtactactgcgccgccaatccaacatacggcagcgactggaacgccgagaattggggccagggaacccaagtgacagtgtctagcggatccggcggcggaggatctggcggaggcggatctgggggcggaggctctttcgaaggcagcacgcgtctgcactgtgtcggcgacacctatccatccaacgatcggtgctgccatgagtgccggcctggcaacggaatggtgtctcgatgttctcggagtcagaataccgtctgtaggccatgcggacccggcttttacaatgatgtcgtgtcctccaaaccttgcaagccatgtacttggtgcaatctgcggagcggctctgagcggaaacagctgtgcactgctacccaggacacagtgtgtagatgcagagccggaactcagcccctggactcttataagcccggcgttgactgcgctccatgtccaccagggcacttttccccaggcgacaatcaagcctgtaaaccgtggacaaattgcacactggccgggaaacacaccttgcagccagccagcaattcctccgatgccatctgtgaagatcgggacccaccagccactcagcctcaagaaactcaggggcctcctgctaggcccattacagtgcaacctaccgaggcttggccccggacatctcagggaccttctacaaggccagtggaagtgccaggcggtagagctgtggctgctatccttggattgggcctcgttctcggactgttgggaccacttgcaatcctgctggctctctatctgctgcggcgggatcagagactccctccagatgctcataagccacctggcggcggatctttcaggaccccaattcaagaagaacaagccgacgctcactctaccctggctaagatccgcgccaagagaagcggatctggcgtgaagcagaccctgaatttcgacctgctgaagctggctggcgacgtggaatccaacccaggcccttctagaggccatatgaccgagtacaagcccacggtgcgcctcgccacccgcgacgacgtccccagggccgtacgcaccctcgccgccgcgttcgccgactaccccgccacgcgccacaccgtcgatccggaccgccacatcgagcgggtcaccgagctgcaagaactcttcctcacgcgcgtcgggctcgacatcggcaaggtgtgggtcgcggacgacggcgccgcggtggcggtctggaccacgccggagagcgtcgaagcgggggcggtgttcgccgagatcggcccgcgcatggccgagttgagcggttcccggctggccgcgcagcaacagatggaaggcctcctggcgccgcaccggcccaaggagcccgcgtggttcctggccaccgtcggcgtctcgcccgaccaccagggcaagggtctgggcagcgccgtcgtgctccccggagtggaggcggccgagcgcgccggggtgcccgccttcctggagacctccgcgccccgcaacctccccttctacgagcggctcggcttcaccgtcaccgccgacgtcgaggtgcccgaaggaccgcgcacctggtgcatgacccgcaagcccggtgcctga

SEQ ID NO: 7628 - DNA, 2577 bp, Artificial Sequence
  Synthetic Polynucleotide
atggccttaccagtgaccgccttgctcctgccgctggccttgctgctccacgccgccaggccggacatccagatgacacagagccctagcagcctgtctgccagcgtgggagacagagtgaccatcacatgcaaggccagcgaccacatcaacaactggctggcctggtatcagcagaagcctggacaggcccctaagctgctgatctacggcgctaccacactggaaacaggcgtgcccagcagattttctggcagcggctctggcaccgactacaccctgacaatatccagcctccagcctgaggacttcgccacctactactgtcagcagagctggaacaccccttggacattcggccagggcaccaagctggaaatcaagagactcgagctggacgccgacgtgtcccccaagcctaccatcttcctgccctctatcgccgagacaaagctccagaaggccggcacctacctgtgcctgctggaaaagttcttcccagatgtgattaagatccactggcaggaaaagaagtccaacaccatcctgggcagccaggaaggcaacaccatgaagaccaacgacacctacatgaagttcagctggctgaccgtgcccgagaagtccctggacaaagaacacagatgcatcgtgcggcacgaaaacaacaagaacggcgtggaccaggaaatcatcttcccacccatcaagaccgatgtgattacaatggaccccaaggacaactgctccaaggacgccaacgataccctgctgctccagctgaccaacaccagcgcctactacatgtacttgttgctgctgctgaagtccgtggtgtacttcgccatcatcacatgctgcctgctgcggagaaccgccttctgctgcaacggcgagaagtctagggccaagcgatctggatctggagcaacaaacttctcactactcaaacaagcaggtgacgtggaggagaatcccgggcctactagtatggactggatttggcgcatccttttccttgtcggcgctgctaccggcgcgcattccttcgaacaagttcagcttcaacagcctggcgctgagctggtcaaacctggcgcttctgtgaagatgagctgcaaagccagcggctacgccttcagcagctactggatcaactggatgaagcagaaacccggccagggactcgaatggatcggccaaatctatcccggcgacggcgacaccaactacaacggcaagttcaagggcagagccacactgaccgccgatacctctagcagcacagcctacatgcagctgagcagcctgaccagcgaagatagcgccgtgtacttctgtgcccggtccatcacaacagtcgtgggctgcgctatggactattggggccagggaacaagcgtgaccgtgtctagtacgcgtcctcacaccaagcccagcgtgttcgtgatgaagaacggcaccaacgtggcctgcctcgtgaaagagttctaccccaaggacatcaggatcaacctggtgtccagcaagaagatcaccgagttcgaccccgccatcgtgatctcccccagcggcaagtacaacgccgtgaagctggggaagtacgaggacagcaacagcgtgacctgctccgtgcagcacgacaacaagaccgtgcacagcaccgactttgaagtgaaaaccgactccaccgaccacgtgaagcccaaagagacagagaacaccaagcagcccagcaagagctgccacaagcccaaggccatcgtgcacaccgagaaagtgaacatgatgagcctgaccgtgctgggcctgcggatgctgttcgccaaaaccgtggccgtgaacttcctgctgaccgccaagctgttcttcctccgcgccaagagaagcggatctggcgtgaagcagaccctgaatttcgacctgctgaagctggctggcgacgtggaatccaacccaggcccttctagaggccatatgaccgagtacaagcccacggtgcgcctcgccacccgcgacgacgtccccagggccgtacgcaccctcgccgccgcgttcgccgactaccccgccacgcgccacaccgtcgatccggaccgccacatcgagcgggtcaccgagctgcaagaactcttcctcacgcgcgtcgggctcgacatcggcaaggtgtgggtcgcggacgacggcgccgcggtggcggtctggaccacgccggagagcgtcgaagcgggggcggtgttcgccgagatcggcccgcgcatggccgagttgagcggttcccggctggccgcgcagcaacagatggaaggcctcctggcgccgcaccggcccaaggagcccgcgtggttcctggccaccgtcggcgtctcgcccgaccaccagggcaagggtctgggcagcgccgtcgtgctccccggagtggaggcggccgagcgcgccggggtgcccgccttcctggagacctccgcgccccgcaacctccccttctacgagcggctcggcttcaccgtcaccgccgacgtcgaggtgcccgaaggaccgcgcacctggtgcatgacccgcaagcccggtgcctga

SEQ ID NO: 7629 - DNA, 2574 bp, Artificial Sequence
  Synthetic Polynucleotide
atggccttaccagtgaccgccttgctcctgccgctggccttgctgctccacgccgccaggccggacatccagatgacacagagccctagcagcctgtctgccagcgtgggagacagagtgaccatcacatgcaaggccagcgaccacatcaacaactggctggcctggtatcagcagaagcctggacaggcccctaagctgctgatctacggcgctaccacactggaaacaggcgtgcccagcagattttctggcagcggctctggcaccgactacaccctgacaatatccagcctccagcctgaggacttcgccacctactactgtcagcagagctggaacaccccttggacattcggccagggcaccaagctggaaatcaagagactcgaggacgccgacgtgtcccccaagcctaccatcttcctgccctctatcgccgagacaaagctccagaaggccggcacctacctgtgcctgctggaaaagttcttcccagatgtgattaagatccactggcaggaaaagaagtccaacaccatcctgggcagccaggaaggcaacaccatgaagaccaacgacacctacatgaagttcagctggctgaccgtgcccgagaagtccctggacaaagaacacagatgcatcgtgcggcacgaaaacaacaagaacggcgtggaccaggaaatcatcttcccacccatcaagaccgatgtgattacaatggaccccaaggacaactgctccaaggacgccaacgataccctgctgctccagctgaccaacaccagcgcctactacatgtacttgttgctgctgctgaagtccgtggtgtacttcgccatcatcacatgctgcctgctgcggagaaccgccttctgctgcaacggcgagaagtctagggccaagcgatctggatctggagcaacaaacttctcactactcaaacaagcaggtgacgtggaggagaatcccgggcctactagtatggactggatttggcgcatccttttccttgtcggcgctgctaccggcgcgcattccttcgaacaagttcagcttcaacagcctggcgctgagctggtcaaacctggcgcttctgtgaagatgagctgcaaagccagcggctacgccttcagcagctactggatcaactggatgaagcagaaacccggccagggactcgaatggatcggccaaatctatcccggcgacggcgacaccaactacaacggcaagttcaagggcagagccacactgaccgccgatacctctagcagcacagcctacatgcagctgagcagcctgaccagcgaagatagcgccgtgtacttctgtgcccggtccatcacaacagtcgtgggctgcgctatggactattggggccagggaacaagcgtgaccgtgtctagtacgcgtcctcacaccaagcccagcgtgttcgtgatgaagaacggcaccaacgtggcctgcctcgtgaaagagttctaccccaaggacatcaggatcaacctggtgtccagcaagaagatcaccgagttcgaccccgccatcgtgatctcccccagcggcaagtacaacgccgtgaagctggggaagtacgaggacagcaacagcgtgacctgctccgtgcagcacgacaacaagaccgtgcacagcaccgactttgaagtgaaaaccgactccaccgaccacgtgaagcccaaagagacagagaacaccaagcagcccagcaagagctgccacaagcccaaggccatcgtgcacaccgagaaagtgaacatgatgagcctgaccgtgctgggcctgcggatgctgttcgccaaaaccgtggccgtgaacttcctgctgaccgccaagctgttcttcctccgcgccaagagaagcggatctggcgtgaagcagaccctgaatttcgacctgctgaagctggctggcgacgtggaatccaacccaggcccttctagaggccatatgaccgagtacaagcccacggtgcgcctcgccacccgcgacgacgtccccagggccgtacgcaccctcgccgccgcgttcgccgactaccccgccacgcgccacaccgtcgatccggaccgccacatcgagcgggtcaccgagctgcaagaactcttcctcacgcgcgtcgggctcgacatcggcaaggtgtgggtcgcggacgacggcgccgcggtggcggtctggaccacgccggagagcgtcgaagcgggggcggtgttcgccgagatcggcccgcgcatggccgagttgagcggttcccggctggccgcgcagcaacagatggaaggcctcctggcgccgcaccggcccaaggagcccgcgtggttcctggccaccgtcggcgtctcgcccgaccaccagggcaagggtctgggcagcgccgtcgtgctccccggagtggaggcggccgagcgcgccggggtgcccgccttcctggagacctccgcgccccgcaacctccccttctacgagcggctcggcttcaccgtcaccgccgacgtcgaggtgcccgaaggaccgcgcacctggtgcatgacccgcaagcccggtgcctga

SEQ ID NO: 7630 - DNA, 2493 bp, Artificial Sequence
  Synthetic Polynucleotide
atggccttaccagtgaccgccttgctcctgccgctggccttgctgctccacgccgccaggccggacatccagatgacacagagccctagcagcctgtctgccagcgtgggagacagagtgaccatcacatgcaaggccagcgaccacatcaacaactggctggcctggtatcagcagaagcctggacaggcccctaagctgctgatctacggcgctaccacactggaaacaggcgtgcccagcagattttctggcagcggctctggcaccgactacaccctgacaatatccagcctccagcctgaggacttcgccacctactactgtcagcagagctggaacaccccttggacattcggccagggcaccaagctggaaatcaagagactcgagtgcctgctggaaaagttcttcccagatgtgattaagatccactggcaggaaaagaagtccaacaccatcctgggcagccaggaaggcaacaccatgaagaccaacgacacctacatgaagttcagctggctgaccgtgcccgagaagtccctggacaaagaacacagatgcatcgtgcggcacgaaaacaacaagaacggcgtggaccaggaaatcatcttcccacccatcaagaccgatgtgattacaatggaccccaaggacaactgctccaaggacgccaacgataccctgctgctccagctgaccaacaccagcgcctactacatgtacttgttgctgctgctgaagtccgtggtgtacttcgccatcatcacatgctgcctgctgcggagaaccgccttctgctgcaacggcgagaagtctagggccaagcgatctggatctggagcaacaaacttctcactactcaaacaagcaggtgacgtggaggagaatcccgggcctactagtatggactggatttggcgcatccttttccttgtcggcgctgctaccggcgcgcattccttcgaacaagttcagcttcaacagcctggcgctgagctggtcaaacctggcgcttctgtgaagatgagctgcaaagccagcggctacgccttcagcagctactggatcaactggatgaagcagaaacccggccagggactcgaatggatcggccaaatctatcccggcgacggcgacaccaactacaacggcaagttcaagggcagagccacactgaccgccgatacctctagcagcacagcctacatgcagctgagcagcctgaccagcgaagatagcgccgtgtacttctgtgcccggtccatcacaacagtcgtgggctgcgctatggactattggggccagggaacaagcgtgaccgtgtctagtacgcgtcctcacaccaagcccagcgtgttcgtgatgaagaacggcaccaacgtggcctgcctcgtgaaagagttctaccccaaggacatcaggatcaacctggtgtccagcaagaagatcaccgagttcgaccccgccatcgtgatctcccccagcggcaagtacaacgccgtgaagctggggaagtacgaggacagcaacagcgtgacctgctccgtgcagcacgacaacaagaccgtgcacagcaccgactttgaagtgaaaaccgactccaccgaccacgtgaagcccaaagagacagagaacaccaagcagcccagcaagagctgccacaagcccaaggccatcgtgcacaccgagaaagtgaacatgatgagcctgaccgtgctgggcctgcggatgctgttcgccaaaaccgtggccgtgaacttcctgctgaccgccaagctgttcttcctccgcgccaagagaagcggatctggcgtgaagcagaccctgaatttcgacctgctgaagctggctggcgacgtggaatccaacccaggcccttctagaggccatatgaccgagtacaagcccacggtgcgcctcgccacccgcgacgacgtccccagggccgtacgcaccctcgccgccgcgttcgccgactaccccgccacgcgccacaccgtcgatccggaccgccacatcgagcgggtcaccgagctgcaagaactcttcctcacgcgcgtcgggctcgacatcggcaaggtgtgggtcgcggacgacggcgccgcggtggcggtctggaccacgccggagagcgtcgaagcgggggcggtgttcgccgagatcggcccgcgcatggccgagttgagcggttcccggctggccgcgcagcaacagatggaaggcctcctggcgccgcaccggcccaaggagcccgcgtggttcctggccaccgtcggcgtctcgcccgaccaccagggcaagggtctgggcagcgccgtcgtgctccccggagtggaggcggccgagcgcgccggggtgcccgccttcctggagacctccgcgccccgcaacctccccttctacgagcggctcggcttcaccgtcaccgccgacgtcgaggtgcccgaaggaccgcgcacctggtgcatgacccgcaagcccggtgcctga

SEQ ID NO: 7631 - DNA, 2559 bp, Artificial Sequence
  Synthetic Polynucleotide
atggccttaccagtgaccgccttgctcctgccgctggccttgctgctccacgccgccaggccggacatccagatgacacagagccctagcagcctgtctgccagcgtgggagacagagtgaccatcacatgcaaggccagcgaccacatcaacaactggctggcctggtatcagcagaagcctggacaggcccctaagctgctgatctacggcgctaccacactggaaacaggcgtgcccagcagattttctggcagcggctctggcaccgactacaccctgacaatatccagcctccagcctgaggacttcgccacctactactgtcagcagagctggaacaccccttggacattcggccagggcaccaagctggaaatcaagagactcgagcccaagcctaccatcttcctgccctctatcgccgagacaaagctccagaaggccggcacctacctgtgcctgctggaaaagttcttcccagatgtgattaagatccactggcaggaaaagaagtccaacaccatcctgggcagccaggaaggcaacaccatgaagaccaacgacacctacatgaagttcagctggctgaccgtgcccgagaagtccctggacaaagaacacagatgcatcgtgcggcacgaaaacaacaagaacggcgtggaccaggaaatcatcttcccacccatcaagaccgatgtgattacaatggaccccaaggacaactgctccaaggacgccaacgataccctgctgctccagctgaccaacaccagcgcctactacatgtacttgttgctgctgctgaagtccgtggtgtacttcgccatcatcacatgctgcctgctgcggagaaccgccttctgctgcaacggcgagaagtctagggccaagcgatctggatctggagcaacaaacttctcactactcaaacaagcaggtgacgtggaggagaatcccgggcctactagtatggactggatttggcgcatccttttccttgtcggcgctgctaccggcgcgcattccttcgaacaagttcagcttcaacagcctggcgctgagctggtcaaacctggcgcttctgtgaagatgagctgcaaagccagcggctacgccttcagcagctactggatcaactggatgaagcagaaacccggccagggactcgaatggatcggccaaatctatcccggcgacggcgacaccaactacaacggcaagttcaagggcagagccacactgaccgccgatacctctagcagcacagcctacatgcagctgagcagcctgaccagcgaagatagcgccgtgtacttctgtgcccggtccatcacaacagtcgtgggctgcgctatggactattggggccagggaacaagcgtgaccgtgtctagtacgcgtcctcacaccaagcccagcgtgttcgtgatgaagaacggcaccaacgtggcctgcctcgtgaaagagttctaccccaaggacatcaggatcaacctggtgtccagcaagaagatcaccgagttcgaccccgccatcgtgatctcccccagcggcaagtacaacgccgtgaagctggggaagtacgaggacagcaacagcgtgacctgctccgtgcagcacgacaacaagaccgtgcacagcaccgactttgaagtgaaaaccgactccaccgaccacgtgaagcccaaagagacagagaacaccaagcagcccagcaagagctgccacaagcccaaggccatcgtgcacaccgagaaagtgaacatgatgagcctgaccgtgctgggcctgcggatgctgttcgccaaaaccgtggccgtgaacttcctgctgaccgccaagctgttcttcctccgcgccaagagaagcggatctggcgtgaagcagaccctgaatttcgacctgctgaagctggctggcgacgtggaatccaacccaggcccttctagaggccatatgaccgagtacaagcccacggtgcgcctcgccacccgcgacgacgtccccagggccgtacgcaccctcgccgccgcgttcgccgactaccccgccacgcgccacaccgtcgatccggaccgccacatcgagcgggtcaccgagctgcaagaactcttcctcacgcgcgtcgggctcgacatcggcaaggtgtgggtcgcggacgacggcgccgcggtggcggtctggaccacgccggagagcgtcgaagcgggggcggtgttcgccgagatcggcccgcgcatggccgagttgagcggttcccggctggccgcgcagcaacagatggaaggcctcctggcgccgcaccggcccaaggagcccgcgtggttcctggccaccgtcggcgtctcgcccgaccaccagggcaagggtctgggcagcgccgtcgtgctccccggagtggaggcggccgagcgcgccggggtgcccgccttcctggagacctccgcgccccgcaacctccccttctacgagcggctcggcttcaccgtcaccgccgacgtcgaggtgcccgaaggaccgcgcacctggtgcatgacccgcaagcccggtgcctga

SEQ ID NO: 7632 - DNA, 2508 bp, Artificial Sequence
  Synthetic Polynucleotide
atggccttaccagtgaccgccttgctcctgccgctggccttgctgctccacgccgccaggccggacatccagatgacacagagccctagcagcctgtctgccagcgtgggagacagagtgaccatcacatgcaaggccagcgaccacatcaacaactggctggcctggtatcagcagaagcctggacaggcccctaagctgctgatctacggcgctaccacactggaaacaggcgtgcccagcagattttctggcagcggctctggcaccgactacaccctgacaatatccagcctccagcctgaggacttcgccacctactactgtcagcagagctggaacaccccttggacattcggccagggcaccaagctggaaatcaagagactcgaggccggcacctacctgtgcctgctggaaaagttcttcccagatgtgattaagatccactggcaggaaaagaagtccaacaccatcctgggcagccaggaaggcaacaccatgaagaccaacgacacctacatgaagttcagctggctgaccgtgcccgagaagtccctggacaaagaacacagatgcatcgtgcggcacgaaaacaacaagaacggcgtggaccaggaaatcatcttcccacccatcaagaccgatgtgattacaatggaccccaaggacaactgctccaaggacgccaacgataccctgctgctccagctgaccaacaccagcgcctactacatgtacttgttgctgctgctgaagtccgtggtgtacttcgccatcatcacatgctgcctgctgcggagaaccgccttctgctgcaacggcgagaagtctagggccaagcgatctggatctggagcaacaaacttctcactactcaaacaagcaggtgacgtggaggagaatcccgggcctactagtatggactggatttggcgcatccttttccttgtcggcgctgctaccggcgcgcattccttcgaacaagttcagcttcaacagcctggcgctgagctggtcaaacctggcgcttctgtgaagatgagctgcaaagccagcggctacgccttcagcagctactggatcaactggatgaagcagaaacccggccagggactcgaatggatcggccaaatctatcccggcgacggcgacaccaactacaacggcaagttcaagggcagagccacactgaccgccgatacctctagcagcacagcctacatgcagctgagcagcctgaccagcgaagatagcgccgtgtacttctgtgcccggtccatcacaacagtcgtgggctgcgctatggactattggggccagggaacaagcgtgaccgtgtctagtacgcgtcctcacaccaagcccagcgtgttcgtgatgaagaacggcaccaacgtggcctgcctcgtgaaagagttctaccccaaggacatcaggatcaacctggtgtccagcaagaagatcaccgagttcgaccccgccatcgtgatctcccccagcggcaagtacaacgccgtgaagctggggaagtacgaggacagcaacagcgtgacctgctccgtgcagcacgacaacaagaccgtgcacagcaccgactttgaagtgaaaaccgactccaccgaccacgtgaagcccaaagagacagagaacaccaagcagcccagcaagagctgccacaagcccaaggccatcgtgcacaccgagaaagtgaacatgatgagcctgaccgtgctgggcctgcggatgctgttcgccaaaaccgtggccgtgaacttcctgctgaccgccaagctgttcttcctccgcgccaagagaagcggatctggcgtgaagcagaccctgaatttcgacctgctgaagctggctggcgacgtggaatccaacccaggcccttctagaggccatatgaccgagtacaagcccacggtgcgcctcgccacccgcgacgacgtccccagggccgtacgcaccctcgccgccgcgttcgccgactaccccgccacgcgccacaccgtcgatccggaccgccacatcgagcgggtcaccgagctgcaagaactcttcctcacgcgcgtcgggctcgacatcggcaaggtgtgggtcgcggacgacggcgccgcggtggcggtctggaccacgccggagagcgtcgaagcgggggcggtgttcgccgagatcggcccgcgcatggccgagttgagcggttcccggctggccgcgcagcaacagatggaaggcctcctggcgccgcaccggcccaaggagcccgcgtggttcctggccaccgtcggcgtctcgcccgaccaccagggcaagggtctgggcagcgccgtcgtgctccccggagtggaggcggccgagcgcgccggggtgcccgccttcctggagacctccgcgccccgcaacctccccttctacgagcggctcggcttcaccgtcaccgccgacgtcgaggtgcccgaaggaccgcgcacctggtgcatgacccgcaagcccggtgcctga

SEQ ID NO: 7633 - DNA, 3282 bp, Artificial Sequence
  Synthetic Polynucleotide
atggccttaccagtgaccgccttgctcctgccgctggccttgctgctccacgccgccaggccggcatgcgaagtgcagctgcttgaaagtggcggcggactgattcagcctggcggatctctgagactgagctgtgccgccagcggcttcaccttttctagccacgccatgacctgggtccgacaggcacctggaaaagggcttgaatgggtgtccgccatcagcggctctggcgattacacacactacgccgacagcgtgaagggcagattcaccatcagcagagacaacagcaagaacaccgtgtacctccagatgaacagcctgagagccgaggacagcgccgtgtattattgcgccaaggatgaggatggcggcagcctgcttggacacagaggacaaggcaccctggtcaccgtttcttccggtaccggcggaggcggatctggcggcggaggtagcggtggcggaggatctgaattcggcatgcggactgaagacctcccaaaggctgtggtgttcctggagcctcaatggtacagggtgctggagaaggacagtgtgactctgaagtgccagggagcctactcccctgaggacaattccacacagtggtttcacaatgagagcctcatctcaagccaggcctccagctacttcattgacgctgccacagtggacgacagtggagagtacaggtgccagacaaacctctccaccctcagtgacccggtgcagctagaagtccatatcggctggctgttgctccaggcccctcggtgggtgttcaaggaggaagaccctattcacctgaggtgtcacagctggaagaacactgctctgcataaggtcacatatttacagaatggcaaaggcaggaagtattttcatcataattctgacttctacattccaaaagccacactcaaagacagcggctcctacttctgcagggggcttgttgggagtaaaaatgtgtcttcagagactgtgaacatcaccatcactcaaggtttggcagtgtcaaccatctcatcattctttccacctggctaccaagtgtccttctgcctggtcatggtgctgctgttcgccgtggataccggcctgtacttcagcgtcaagaccaacatccggtccagcaccagagactggaaggaccacaagttcaagtggcggaaggaccctcaggacaagagggccaagcgatctggatctggagcaacaaacttctcactactcaaacaagcaggtgacgtggaggagaatcccgggcctactagtgccaccatggactggatttggcgcatccttttccttgtcggcgctgctaccggcgcccattccgggcccgaagtgcagctggttgaatctggcggaggactggttcaggctggcggatctctgagactgtcttgtgccgccagcggcagaacctttagcatgggctggtttagacaggcccctggcaaagagagagagttcgtcgccgccatcacatactctggcggcagcccttactacgccgactctgtgaagggcagattcaccatcagccgggacaacgccaagaacaccgtgtacctccagatgaacagcctgaagcctgaggacaccgccgtgtactactgcgccgccaatccaacatacggcagcgactggaacgccgagaattggggccagggaacccaagtgacagtgtctagcggatccggcggcggaggatctggcggaggcggatctgggggcggaggctctttcgaaggcagcacgcgtactccagctgctccacctaaagctgtcctgaagctcgaacctcaatggattaacgtcctccaagaagattctgtcaccctgacatgccggggcacccactctccagagtctgattccattcagtggtttcataatgggaacctgattccgactcacacgcagcccagctatcggtttaaagctaacaacaatgactccggggagtatacttgccagacaggacagaccagcctgtctgacccagtgcacctgacagttctgagcgaatggctcgtcctgcagacccctcatcttgagttccaagagggcgaaaccattgtcctgagatgccactcctggaaagataagccccttgtgaaagtcacattttttcagaatggcaagagcaagaagttttctcggagcgatccgaatttcagtattccccaggccaaccactctcacagcggagactatcactgtacaggcaacatcgggtatacactctacagctctaagcccgtcacaattaccgttcaggctcccagcagctccccaatgggcattattgtggccgtcgtgaccggaattgctgtggccgcaatcgtggcagctgtcgtcgctctgatctattgcagaaagaagcggatcagcgccctgccagggtatcctgagtgccgcgaaatgggcgaaactctgcctgagaaacctgctaaccccacaaatcccgatgaagctgacaaagtcggcgctgaaaacacgatcacatactccctgctcatgcatcctgacgctcttgaggaacctgacgatcagaaccggatccgcgccaagagaagcggatctggcgtgaagcagaccctgaatttcgacctgctgaagctggctggcgacgtggaatccaacccaggcccttctagaggccatatgaccgagtacaagcccacggtgcgcctcgccacccgcgacgacgtccccagggccgtacgcaccctcgccgccgcgttcgccgactaccccgccacgcgccacaccgtcgatccggaccgccacatcgagcgggtcaccgagctgcaagaactcttcctcacgcgcgtcgggctcgacatcggcaaggtgtgggtcgcggacgacggcgccgcggtggcggtctggaccacgccggagagcgtcgaagcgggggcggtgttcgccgagatcggcccgcgcatggccgagttgagcggttcccggctggccgcgcagcaacagatggaaggcctcctggcgccgcaccggcccaaggagcccgcgtggttcctggccaccgtcggcgtctcgcccgaccaccagggcaagggtctgggcagcgccgtcgtgctccccggagtggaggcggccgagcgcgccggggtgcccgccttcctggagacctccgcgccccgcaacctccccttctacgagcggctcggcttcaccgtcaccgccgacgtcgaggtgcccgaaggaccgcgcacctggtgcatgacccgcaagcccggtgcctga

SEQ ID NO: 7634 - DNA, 2565 bp, Artificial Sequence
  Synthetic Polynucleotide
atggccttaccagtgaccgccttgctcctgccgctggccttgctgctccacgccgccaggccggacatccagatgacacagagccctagcagcctgtctgccagcgtgggagacagagtgaccatcacatgcaaggccagcgaccacatcaacaactggctggcctggtatcagcagaagcctggacaggcccctaagctgctgatctacggcgctaccacactggaaacaggcgtgcccagcagattttctggcagcggctctggcaccgactacaccctgacaatatccagcctccagcctgaggacttcgccacctactactgtcagcagagctggaacaccccttggacattcggccagggcaccaagctggaaatcaagagactcgaggccgacgtgtcccccaagcctaccatcttcctgccctctatcgccgagacaaagctccagaaggccggcacctacctgtgcctgctggaaaagttcttcccagatgtgattaagatccactggcaggaaaagaagtccaacaccatcctgggcagccaggaaggcaacaccatgaagaccaacgacacctacatgaagttcagctggctgaccgtgcccgagaagtccctggacaaagaacacagatgcatcgtgcggcacgaaaacaacaagaacggcgtggaccaggaaatcatcttcccacccatcaagaccgatgtgattacaatggaccccaaggacaactgctccaaggacgccaacgataccctgctgctccagctgaccaacaccagcgcctactacatgtacttgttgctgctgctgaagtccgtggtgtacttcgccatcatcacatgctgcctgctgcggagaaccgccttctgctgcaacggcgagaagtctagggccaagcgatctggatctggagcaacaaacttctcactactcaaacaagcaggtgacgtggaggagaatcccgggcctactagtatggactggatttggcgcatccttttccttgtcggcgctgctaccggcgcgcattccttcgaacaagttcagcttcaacagcctggcgctgagctggtcaaacctggcgcttctgtgaagatgagctgcaaagccagcggctacgccttcagcagctactggatcaactggatgaagcagaaacccggccagggactcgaatggatcggccaaatctatcccggcgacggcgacaccaactacaacggcaagttcaagggcagagccacactgaccgccgatacctctagcagcacagcctacatgcagctgagcagcctgaccagcgaagatagcgccgtgtacttctgtgcccggtccatcacaacagtcgtgggctgcgctatggactattggggccagggaacaagcgtgaccgtgtctagtacgcgtaccaagcccagcgtgttcgtgatgaagaacggcaccaacgtggcctgcctcgtgaaagagttctaccccaaggacatcaggatcaacctggtgtccagcaagaagatcaccgagttcgaccccgccatcgtgatctcccccagcggcaagtacaacgccgtgaagctggggaagtacgaggacagcaacagcgtgacctgctccgtgcagcacgacaacaagaccgtgcacagcaccgactttgaagtgaaaaccgactccaccgaccacgtgaagcccaaagagacagagaacaccaagcagcccagcaagagctgccacaagcccaaggccatcgtgcacaccgagaaagtgaacatgatgagcctgaccgtgctgggcctgcggatgctgttcgccaaaaccgtggccgtgaacttcctgctgaccgccaagctgttcttcctccgcgccaagagaagcggatctggcgtgaagcagaccctgaatttcgacctgctgaagctggctggcgacgtggaatccaacccaggcccttctagaggccatatgaccgagtacaagcccacggtgcgcctcgccacccgcgacgacgtccccagggccgtacgcaccctcgccgccgcgttcgccgactaccccgccacgcgccacaccgtcgatccggaccgccacatcgagcgggtcaccgagctgcaagaactcttcctcacgcgcgtcgggctcgacatcggcaaggtgtgggtcgcggacgacggcgccgcggtggcggtctggaccacgccggagagcgtcgaagcgggggcggtgttcgccgagatcggcccgcgcatggccgagttgagcggttcccggctggccgcgcagcaacagatggaaggcctcctggcgccgcaccggcccaaggagcccgcgtggttcctggccaccgtcggcgtctcgcccgaccaccagggcaagggtctgggcagcgccgtcgtgctccccggagtggaggcggccgagcgcgccggggtgcccgccttcctggagacctccgcgccccgcaacctccccttctacgagcggctcggcttcaccgtcaccgccgacgtcgaggtgcccgaaggaccgcgcacctggtgcatgacccgcaagcccggtgcctga

SEQ ID NO: 7635 - DNA, 2592 bp, Artificial Sequence
  Synthetic Polynucleotide
atggccttaccagtgaccgccttgctcctgccgctggccttgctgctccacgccgccaggccggacatccagatgacacagagccctagcagcctgtctgccagcgtgggagacagagtgaccatcacatgcaaggccagcgaccacatcaacaactggctggcctggtatcagcagaagcctggacaggcccctaagctgctgatctacggcgctaccacactggaaacaggcgtgcccagcagattttctggcagcggctctggcaccgactacaccctgacaatatccagcctccagcctgaggacttcgccacctactactgtcagcagagctggaacaccccttggacattcggccagggcaccaagctggaaatcaagagactcgaggacaagcagctggacgccgacgtgtcccccaagcctaccatcttcctgccctctatcgccgagacaaagctccagaaggccggcacctacctgtgcctgctggaaaagttcttcccagatgtgattaagatccactggcaggaaaagaagtccaacaccatcctgggcagccaggaaggcaacaccatgaagaccaacgacacctacatgaagttcagctggctgaccgtgcccgagaagtccctggacaaagaacacagatgcatcgtgcggcacgaaaacaacaagaacggcgtggaccaggaaatcatcttcccacccatcaagaccgatgtgattacaatggaccccaaggacaactgctccaaggacgccaacgataccctgctgctccagctgaccaacaccagcgcctactacatgtacttgttgctgctgctgaagtccgtggtgtacttcgccatcatcacatgctgcctgctgcggagaaccgccttctgctgcaacggcgagaagtctagggccaagcgatctggatctggagcaacaaacttctcactactcaaacaagcaggtgacgtggaggagaatcccgggcctactagtatggactggatttggcgcatccttttccttgtcggcgctgctaccggcgcgcattccttcgaacaagttcagcttcaacagcctggcgctgagctggtcaaacctggcgcttctgtgaagatgagctgcaaagccagcggctacgccttcagcagctactggatcaactggatgaagcagaaacccggccagggactcgaatggatcggccaaatctatcccggcgacggcgacaccaactacaacggcaagttcaagggcagagccacactgaccgccgatacctctagcagcacagcctacatgcagctgagcagcctgaccagcgaagatagcgccgtgtacttctgtgcccggtccatcacaacagtcgtgggctgcgctatggactattggggccagggaacaagcgtgaccgtgtctagtacgcgtagccagcctcacaccaagcccagcgtgttcgtgatgaagaacggcaccaacgtggcctgcctcgtgaaagagttctaccccaaggacatcaggatcaacctggtgtccagcaagaagatcaccgagttcgaccccgccatcgtgatctcccccagcggcaagtacaacgccgtgaagctggggaagtacgaggacagcaacagcgtgacctgctccgtgcagcacgacaacaagaccgtgcacagcaccgactttgaagtgaaaaccgactccaccgaccacgtgaagcccaaagagacagagaacaccaagcagcccagcaagagctgccacaagcccaaggccatcgtgcacaccgagaaagtgaacatgatgagcctgaccgtgctgggcctgcggatgctgttcgccaaaaccgtggccgtgaacttcctgctgaccgccaagctgttcttcctccgcgccaagagaagcggatctggcgtgaagcagaccctgaatttcgacctgctgaagctggctggcgacgtggaatccaacccaggcccttctagaggccatatgaccgagtacaagcccacggtgcgcctcgccacccgcgacgacgtccccagggccgtacgcaccctcgccgccgcgttcgccgactaccccgccacgcgccacaccgtcgatccggaccgccacatcgagcgggtcaccgagctgcaagaactcttcctcacgcgcgtcgggctcgacatcggcaaggtgtgggtcgcggacgacggcgccgcggtggcggtctggaccacgccggagagcgtcgaagcgggggcggtgttcgccgagatcggcccgcgcatggccgagttgagcggttcccggctggccgcgcagcaacagatggaaggcctcctggcgccgcaccggcccaaggagcccgcgtggttcctggccaccgtcggcgtctcgcccgaccaccagggcaagggtctgggcagcgccgtcgtgctccccggagtggaggcggccgagcgcgccggggtgcccgccttcctggagacctccgcgccccgcaacctccccttctacgagcggctcggcttcaccgtcaccgccgacgtcgaggtgcccgaaggaccgcgcacctggtgcatgacccgcaagcccggtgcctga

SEQ ID NO: 7636 - DNA, 2364 bp, Artificial Sequence
  Synthetic Polynucleotide
atggccttaccagtgaccgccttgctcctgccgctggccttgctgctccacgccgccaggccggacatccagatgacacagagccctagcagcctgtctgccagcgtgggagacagagtgaccatcacatgcaaggccagcgaccacatcaacaactggctggcctggtatcagcagaagcctggacaggcccctaagctgctgatctacggcgctaccacactggaaacaggcgtgcccagcagattttctggcagcggctctggcaccgactacaccctgacaatatccagcctccagcctgaggacttcgccacctactactgtcagcagagctggaacaccccttggacattcggccagggcaccaagctggaaatcaagagaggcggaggcggaagtggaggcggaggatctggcggcggaggctctcaagttcagcttcaacagcctggcgctgagctggtcaaacctggcgcttctgtgaagatgagctgcaaagccagcggctacgccttcagcagctactggatcaactggatgaagcagaaacccggccagggactcgaatggatcggccaaatctatcccggcgacggcgacaccaactacaacggcaagttcaagggcagagccacactgaccgccgatacctctagcagcacagcctacatgcagctgagcagcctgaccagcgaagatagcgccgtgtacttctgtgcccggtccatcacaacagtcgtgggctgcgctatggactattggggccagggaacaagcgtgaccgtgtctagtacgcgtggaggctctggacaacaacagaccctgcctaaaccattcatctgggctgaaccccactttatggttccgaaagagaaacaagtcacgatttgttgccaagggaattacggggccgtcgagtatcagctccactttgagggctccctgtttgctgtggatcggcccaagccacctgaaagaatcaacaaagtccaattctatattcctgatatgaactcccgcatggcaggccagtattcatgtatctaccgcgtgggagaactttggagtgaaccctctaacctgctggacctcgtcgtgacagagatgtatgatacacccacactgtctgtgcaccctgggccagaagttatcagcggagaaaaagttaccttttattgccgcctcgataccgctacctctatgttcctcttgctgaaagagggccgcagctctcacgtgcagcgaggctacggaaaggtccaagctgagtttcctctcggccccgtgaccaccgctcacaggggcacatatagatgttttggctcttataacaatcatgcctggtcattcccatccgagcctgtgaaactgctggtcacaggcgatattgagaatacctctctggccccagaagatcctacattccccgccgacacatggggaacatatctgctgacaaccgaaaccgggctgcaaaaggaccatgctctgtgggatcataccgctcagaatctgcttcggatggggcttgcattcctggtcctggtggctcttgtctggtttctggtcgaggactggctgtcccggaagagaaccagagaaagagcttccagggccagcacctgggaaggcagacgcagactgaatactcagaccctgcgcgccaagagaagcggatctggcgtgaagcagaccctgaatttcgacctgctgaagctggctggcgacgtggaatccaacccaggcccttctagaggccatatgaccgagtacaagcccacggtgcgcctcgccacccgcgacgacgtccccagggccgtacgcaccctcgccgccgcgttcgccgactaccccgccacgcgccacaccgtcgatccggaccgccacatcgagcgggtcaccgagctgcaagaactcttcctcacgcgcgtcgggctcgacatcggcaaggtgtgggtcgcggacgacggcgccgcggtggcggtctggaccacgccggagagcgtcgaagcgggggcggtgttcgccgagatcggcccgcgcatggccgagttgagcggttcccggctggccgcgcagcaacagatggaaggcctcctggcgccgcaccggcccaaggagcccgcgtggttcctggccaccgtcggcgtctcgcccgaccaccagggcaagggtctgggcagcgccgtcgtgctccccggagtggaggcggccgagcgcgccggggtgcccgccttcctggagacctccgcgccccgcaacctccccttctacgagcggctcggcttcaccgtcaccgccgacgtcgaggtgcccgaaggaccgcgcacctggtgcatgacccgcaagcccggtgcctga

SEQ ID NO: 7637 - DNA, 2043 bp, Artificial Sequence
  Synthetic Polynucleotide
atggccttaccagtgaccgccttgctcctgccgctggccttgctgctccacgccgccaggccggacatccagatgacacagagccctagcagcctgtctgccagcgtgggagacagagtgaccatcacatgcaaggccagcgaccacatcaacaactggctggcctggtatcagcagaagcctggacaggcccctaagctgctgatctacggcgctaccacactggaaacaggcgtgcccagcagattttctggcagcggctctggcaccgactacaccctgacaatatccagcctccagcctgaggacttcgccacctactactgtcagcagagctggaacaccccttggacattcggccagggcaccaagctggaaatcaagagaggcggaggcggaagtggaggcggaggatctggcggcggaggctctcaagttcagcttcaacagcctggcgctgagctggtcaaacctggcgcttctgtgaagatgagctgcaaagccagcggctacgccttcagcagctactggatcaactggatgaagcagaaacccggccagggactcgaatggatcggccaaatctatcccggcgacggcgacaccaactacaacggcaagttcaagggcagagccacactgaccgccgatacctctagcagcacagcctacatgcagctgagcagcctgaccagcgaagatagcgccgtgtacttctgtgcccggtccatcacaacagtcgtgggctgcgctatggactattggggccagggaacaagcgtgaccgtgtctagtacgcgtggaggctctggaactcaaaccccttacaaagtctcaatttcaggaacaactgttatccttacatgtccccagtatcctggcagcgagatcctttggcagcataacgacaagaatatagggggagatgaagacgataagaatatcggatctgacgaggatcacttgagcctgaaagagttctccgagcttgaacaaagcggatattatgtgtgctatccgcgcgggtcaaagccggaagacgctaacttttacctttatctccgagccagagtgtgcgaaaattgcatggaaatggacgttatgtccgttgctacaatagttatcgtagatatatgcatcacgggtggactgcttctgctggtttattattggtccaagaatagaaaggccaaagctaaacccgtgaccagaggcgctggcgcaggcggaaggcaaaggggacaaaacaaagaacggccaccaccagtgccaaatccagattatgagcctattcggaaaggacagagggacctgtactctggcctgaatcagagaagaatccgcgccaagagaagcggatctggcgtgaagcagaccctgaatttcgacctgctgaagctggctggcgacgtggaatccaacccaggcccttctagagaccatatgaccgagtacaagcccacggtgcgcctcgccacccgcgacgacgtccccagggccgtacgcaccctcgccgccgcgttcgccgactaccccgccacgcgccacaccgtcgatccggaccgccacatcgagcgggtcaccgagctgcaagaactcttcctcacgcgcgtcgggctcgacatcggcaaggtgtgggtcgcggacgacggcgccgcggtggcggtctggaccacgccggagagcgtcgaagcgggggcggtgttcgccgagatcggcccgcgcatggccgagttgagcggttcccggctggccgcgcagcaacagatggaaggcctcctggcgccgcaccggcccaaggagcccgcgtggttcctggccaccgtcggcgtctcgcccgaccaccagggcaagggtctgggcagcgccgtcgtgctccccggagtggaggcggccgagcgcgccggggtgcccgccttcctggagacctccgcgccccgcaacctccccttctacgagcggctcggcttcaccgtcaccgccgacgtcgaggtgcccgaaggaccgcgcacctggtgcatgacccgcaagcccggtgcctga

SEQ ID NO: 7638 - DNA, 2010 bp, Artificial Sequence
  Synthetic Polynucleotide
atggccttaccagtgaccgccttgctcctgccgctggccttgctgctccacgccgccaggccggacatccagatgacacagagccctagcagcctgtctgccagcgtgggagacagagtgaccatcacatgcaaggccagcgaccacatcaacaactggctggcctggtatcagcagaagcctggacaggcccctaagctgctgatctacggcgctaccacactggaaacaggcgtgcccagcagattttctggcagcggctctggcaccgactacaccctgacaatatccagcctccagcctgaggacttcgccacctactactgtcagcagagctggaacaccccttggacattcggccagggcaccaagctggaaatcaagagaggcggaggcggaagtggaggcggaggatctggcggcggaggctctcaagttcagcttcaacagcctggcgctgagctggtcaaacctggcgcttctgtgaagatgagctgcaaagccagcggctacgccttcagcagctactggatcaactggatgaagcagaaacccggccagggactcgaatggatcggccaaatctatcccggcgacggcgacaccaactacaacggcaagttcaagggcagagccacactgaccgccgatacctctagcagcacagcctacatgcagctgagcagcctgaccagcgaagatagcgccgtgtacttctgtgcccggtccatcacaacagtcgtgggctgcgctatggactattggggccagggaacaagcgtgaccgtgtctagtacgcgtggaggctcaggaacaactgttatccttacatgtccccagtatcctggcagcgagatcctttggcagcataacgacaagaatatagggggagatgaagacgataagaatatcggatctgacgaggatcacttgagcctgaaagagttctccgagcttgaacaaagcggatattatgtgtgctatccgcgcgggtcaaagccggaagacgctaacttttacctttatctccgagccagagtgtgcgaaaattgcatggaaatggacgttatgtccgttgctacaatagttatcgtagatatatgcatcacgggtggactgcttctgctggtttattattggtccaagaatagaaaggccaaagctaaacccgtgaccagaggcgctggcgcaggcggaaggcaaaggggacaaaacaaagaacggccaccaccagtgccaaatccagattatgagcctattcggaaaggacagagggacctgtactctggcctgaatcagagaagaatccgcgccaagagaagcggatctggcgtgaagcagaccctgaatttcgacctgctgaagctggctggcgacgtggaatccaacccaggcccttctagagaccatatgaccgagtacaagcccacggtgcgcctcgccacccgcgacgacgtccccagggccgtacgcaccctcgccgccgcgttcgccgactaccccgccacgcgccacaccgtcgatccggaccgccacatcgagcgggtcaccgagctgcaagaactcttcctcacgcgcgtcgggctcgacatcggcaaggtgtgggtcgcggacgacggcgccgcggtggcggtctggaccacgccggagagcgtcgaagcgggggcggtgttcgccgagatcggcccgcgcatggccgagttgagcggttcccggctggccgcgcagcaacagatggaaggcctcctggcgccgcaccggcccaaggagcccgcgtggttcctggccaccgtcggcgtctcgcccgaccaccagggcaagggtctgggcagcgccgtcgtgctccccggagtggaggcggccgagcgcgccggggtgcccgccttcctggagacctccgcgccccgcaacctccccttctacgagcggctcggcttcaccgtcaccgccgacgtcgaggtgcccgaaggaccgcgcacctggtgcatgacccgcaagcccggtgcctga

SEQ ID NO: 7639 - DNA, 2925 bp, Artificial Sequence
  Synthetic Polynucleotide
atggccttaccagtgaccgccttgctcctgccgctggccttgctgctccacgccgccaggccgctgcctgttctgacacagcctccatccgtgtctgtggcccctggaaagaccgccagaatcacatgcggcggcaacaacatcggcagcaagagcgtgcactggtatcagcagaagcctggacaggctcctgtgctggtggtgtacgacgacagcgatagacctagcggcatccccgagagattcagcggcagcaattccggcaataccgccacactgaccatcagcagagtggaagctggcgacgaggccgactactactgccaagtgtgggacagcagcagcgactacgtggtgtttggcggcggaacaaagctgacagtgcttggacagcctaaggccaatcctaccgtgacactgttccctccaagcagcgaagaactccaggccaacaaggccacacttgtgtgcctgatctccgacttctaccctggggctgtgacagtggcttggaaggccgatggatctcctgtgaaagccggcgtggaaaccaccaagccatccaagcagagcaacaacaaatacgccgccagctcctacctgagcctgacacctgagcagtggaagtcccacagatcctacagctgccaagtgacccacgaaggcagcaccgtggaaaagacagtggcccctacagagtgcagcggatccgtggtggaaaaagagcaccctcagctcggagccggaacagtgctgcttctgagagccggcttttacgccgtgtcctttctgtctgtggccgtgggcagcaccgtgtactatcagggcaagtgcctgacctggaagggacctagaaggcaactgcctgctgtggtgcctgctcctttgcctcctccatgtggaagctctgcccatctgctgccacctgttccaggcggaagggccaagcgatctggatctggagcaacaaacttctcactactcaaacaagcaggtgacgtggaggagaatcccgggcctactagtatggactggatttggcgcatccttttccttgtcggcgctgctaccggcgcgcattccttcgaagaagttcaactggtgcagagcggagccgaagtgaagaagccaggcgagagcctgaagattagctgcaaaggcagcggctacagcttcaccagctactggatcggctgggtccgacagatgcctggcaaaggactggaatggatgggcatcatctaccccggcgacagcgacaccagatacagccctagctttcagggccaagtgaccatctccgccgacaagagcatcagcacagcctacctccagtggtcctctctgaaggccagcgataccgccatgtactactgcgccagacaagtctggggatggcaaggcggcatgtaccccaggtctaactggtggtacaacctggactcttggggccagggcacactggtcacagtctcttctgcctctacaaagggaccctccgtgtttcctctggctcccagcagcaagtctacaagcggaggaacagccgctctgggctgcctggtcaaggattactttcccgagcctgtgaccgtgtcctggaatagcggagcactgacaagcggcgtgcacacctttccagccgtgctgcaaagcagcggcctgtactctctgagcagcgtggtcacagtgcctagctctagcctgggcacccagacctacatctgcaatgtgaaccacaagcctagcaacaccaaggtggacaagagagtggaacccaagagctgtggtacccagagttttgggttgttggaccctaaattgtgctatctgttggacggaatcctgttcatttacggagtgatcctgaccgcattgttcctgcgggttaagttttccagatccgcagacgcacccgcttaccaacaagggcagaaccaactctacaatgaacttaatttggggcggagggaagagtacgacgttctggacaaaaggaggggacgagatcccgagatgggcggaaagcctcagcgaaggaagaatccgcaagaggggctttataacgaactccagaaagataaaatggcagaagcctatagtgagattgggatgaagggagaaaggaggaggggtaaaggtcacgatgggttgtaccaaggattgagcacagccactaaagatacctatgatgcgctccacatgcaggccctgccgccaagacgcgccaagagaagcggatctggcgtgaagcagaccctgaatttcgacctgctgaagctggctggcgacgtggaatccaacccaggcccttctagaggccatatgaccgagtacaagcccacggtgcgcctcgccacccgcgacgacgtccccagggccgtacgcaccctcgccgccgcgttcgccgactaccccgccacgcgccacaccgtcgatccggaccgccacatcgagcgggtcaccgagctgcaagaactcttcctcacgcgcgtcgggctcgacatcggcaaggtgtgggtcgcggacgacggcgccgcggtggcggtctggaccacgccggagagcgtcgaagcgggggcggtgttcgccgagatcggcccgcgcatggccgagttgagcggttcccggctggccgcgcagcaacagatggaaggcctcctggcgccgcaccggcccaaggagcccgcgtggttcctggccaccgtcggcgtctcgcccgaccaccagggcaagggtctgggcagcgccgtcgtgctccccggagtggaggcggccgagcgcgccggggtgcccgccttcctggagacctccgcgccccgcaacctccccttctacgagcggctcggcttcaccgtcaccgccgacgtcgaggtgcccgaaggaccgcgcacctggtgcatgacccgcaagcccggtgcctga

SEQ ID NO: 7640 - DNA, 3018 bp, Artificial Sequence; identical to SEQ ID NO: 2325
  Synthetic Polynucleotide

SEQ ID NO: 7641 - DNA, 3165 bp, Artificial Sequence
  Synthetic Polynucleotide
atggccttaccagtgaccgccttgctcctgccgctggccttgctgctccacgccgccaggccgctgcctgttctgacacagcctccatccgtgtctgtggcccctggaaagaccgccagaatcacatgcggcggcaacaacatcggcagcaagagcgtgcactggtatcagcagaagcctggacaggctcctgtgctggtggtgtacgacgacagcgatagacctagcggcatccccgagagattcagcggcagcaattccggcaataccgccacactgaccatcagcagagtggaagctggcgacgaggccgactactactgccaagtgtgggacagcagcagcgactacgtggtgtttggcggcggaacaaagctgacagtgcttggacagcctaaggccaatcctaccgtgacactgttccctccaagcagcgaagaactccaggccaacaaggccacacttgtgtgcctgatctccgacttctaccctggggctgtgacagtggcttggaaggccgatggatctcctgtgaaagccggcgtggaaaccaccaagccatccaagcagagcaacaacaaatacgccgccagctcctacctgagcctgacacctgagcagtggaagtcccacagatcctacagctgccaagtgacccacgaaggcagcaccgtggaaaagacagtggcccctacagagtgcagcggatccaagagcgtgcggttctacctggtggtgtctcctgcctctgccagcacacagacaagctggaccccacgcgatctggtgtctagccagactcagacccagagctgtgtgcctcctacagctggtgctagacaggcccctgagagcccttctacaatccccgttccaagccagcctcagaacagcacactcagacctggacctgccgctcctattgctctggtgcctgtgttttgtggcctgctggtggctaagagcctggtgctgtctgccctgcttgtttggtggggagacatctggtggaaaaccatgatggaactgcggagcctggacacccagaaggccacctgtcatctccagcaagtgaccgatctgccctggacctctgtgtcaagccccgtggaaagagagatcctgtaccacaccgtggctcggaccaagatcagcgacgacgatgatgagcacacccttagggccaagcgatctggatctggagcaacaaacttctcactactcaaacaagcaggtgacgtggaggagaatcccgggcctactagtatggactggatttggcgcatccttttccttgtcggcgctgctaccggcgcgcattccttcgaagaagttcaactggtgcagagcggagccgaagtgaagaagccaggcgagagcctgaagattagctgcaaaggcagcggctacagcttcaccagctactggatcggctgggtccgacagatgcctggcaaaggactggaatggatgggcatcatctaccccggcgacagcgacaccagatacagccctagctttcagggccaagtgaccatctccgccgacaagagcatcagcacagcctacctccagtggtcctctctgaaggccagcgataccgccatgtactactgcgccagacaagtctggggatggcaaggcggcatgtaccccaggtctaactggtggtacaacctggactcttggggccagggcacactggtcacagtctcttctgcctctacaaagggaccctccgtgtttcctctggctcccagcagcaagtctacaagcggaggaacagccgctctgggctgcctggtcaaggattactttcccgagcctgtgaccgtgtcctggaatagcggagcactgacaagcggcgtgcacacctttccagccgtgctgcaaagcagcggcctgtactctctgagcagcgtggtcacagtgcctagctctagcctgggcacccagacctacatctgcaatgtgaaccacaagcctagcaacaccaaggtggacaagagagtggaacccaagagctgtggtacccagagttttgggttgttggaccctaaattgtgctatctgttggacggaatcctgttcatttacggagtgatcctgaccgcattgttcctgcgggttaagttttccagatccgcagacgcacccgcttaccaacaagggcagaaccaactctacaatgaacttaatttggggcggagggaagagtacgacgttctggacaaaaggaggggacgagatcccgagatgggcggaaagcctcagcgaaggaagaatccgcaagaggggctttataacgaactccagaaagataaaatggcagaagcctatagtgagattgggatgaagggagaaaggaggaggggtaaaggtcacgatgggttgtaccaaggattgagcacagccactaaagatacctatgatgcgctccacatgcaggccctgccgccaagacgcgccaagagaagcggatctggcgtgaagcagaccctgaatttcgacctgctgaagctggctggcgacgtggaatccaacccaggcccttctagaggccatatgaccgagtacaagcccacggtgcgcctcgccacccgcgacgacgtccccagggccgtacgcaccctcgccgccgcgttcgccgactaccccgccacgcgccacaccgtcgatccggaccgccacatcgagcgggtcaccgagctgcaagaactcttcctcacgcgcgtcgggctcgacatcggcaaggtgtgggtcgcggacgacggcgccgcggtggcggtctggaccacgccggagagcgtcgaagcgggggcggtgttcgccgagatcggcccgcgcatggccgagttgagcggttcccggctggccgcgcagcaacagatggaaggcctcctggcgccgcaccggcccaaggagcccgcgtggttcctggccaccgtcggcgtctcgcccgaccaccagggcaagggtctgggcagcgccgtcgtgctccccggagtggaggcggccgagcgcgccggggtgcccgccttcctggagacctccgcgccccgcaacctccccttctacgagcggctcggcttcaccgtcaccgccgacgtcgaggtgcccgaaggaccgcgcacctggtgcatgacccgcaagcccggtgcctga

SEQ ID NO: 7642 - DNA, 3426 bp, Artificial Sequence
  Synthetic Polynucleotide
gctagcaccatggccttaccagtgaccgccttgctcctgccgctggccttgctgctccacgccgccaggccgctgcctgttctgacacagcctccatccgtgtctgtggcccctggaaagaccgccagaatcacatgcggcggcaacaacatcggcagcaagagcgtgcactggtatcagcagaagcctggacaggctcctgtgctggtggtgtacgacgacagcgatagacctagcggcatccccgagagattcagcggcagcaattccggcaataccgccacactgaccatcagcagagtggaagctggcgacgaggccgactactactgccaagtgtgggacagcagcagcgactacgtggtgtttggcggcggaacaaagctgacagtgcttggacagcctaaggccaatcctaccgtgacactgttccctccaagcagcgaagaactccaggccaacaaggccacacttgtgtgcctgatctccgacttctaccctggggctgtgacagtggcttggaaggccgatggatctcctgtgaaagccggcgtggaaaccaccaagccatccaagcagagcaacaacaaatacgccgccagctcctacctgagcctgacacctgagcagtggaagtcccacagatcctacagctgccaagtgacccacgaaggcagcaccgtggaaaagacagtggcccctacagagtgcagcctcgagcagagcttcggcctgctggaccccaagctgtgctacctgctggatggcatcctgttcatctacggcgtgatcctgaccgccctgttcctgagagtgaagttcagcagaagcgccgacgcccctgcctaccagcagggacagaaccaactgtacaacgagctgaacctgggcagacgggaagagtacgacgtgctggacaagcggagaggcagggaccctgagatgggcggaaagccccagcggagaaagaacccccaggaaggactgtataacgaactccagaaagacaagatggccgaagcctacagcgagatcggcatgaagggcgagcggagaagaggcaagggccacgatggcctgtaccagggcctgagcaccgccaccaaggacacctatgacgccctgcacatgcaggccctgcctccaagaagggccaagcgatctggatctggagcaacaaacttctcactactcaaacaagcaggtgacgtggaggagaatcccgggcctactagtatggactggatttggcgcatccttttccttgtcggcgctgctaccggcgcgcattccttcgaagaagttcaactggtgcagagcggagccgaagtgaagaagccaggcgagagcctgaagattagctgcaaaggcagcggctacagcttcaccagctactggatcggctgggtccgacagatgcctggcaaaggactggaatggatgggcatcatctaccccggcgacagcgacaccagatacagccctagctttcagggccaagtgaccatctccgccgacaagagcatcagcacagcctacctccagtggtcctctctgaaggccagcgataccgccatgtactactgcgccagacaagtctggggatggcaaggcggcatgtaccccaggtctaactggtggtacaacctggactcttggggccagggcacactggtcacagtctcttctgcctctacaaagggaccctccgtgtttcctctggctcccagcagcaagtctacaagcggaggaacagccgctctgggctgcctggtcaaggattactttcccgagcctgtgaccgtgtcctggaatagcggagcactgacaagcggcgtgcacacctttccagccgtgctgcaaagcagcggcctgtactctctgagcagcgtggtcacagtgcctagctctagcctgggcacccagacctacatctgcaatgtgaaccacaagcctagcaacaccaaggtggacaagagagtggaacccaagagctgtacgcgtggaatgaggactgaggatcttcccaaagctgtcgtctttctcgaaccccaatggtatcgggtgctcgaaaaagactctgtgacactgaaatgccaaggggcctactctcccgaggacaactccacacagtggtttcataatgagtccctcatcagctctcaggccagctcttatttcattgatgccgctacagtggacgactccggcgagtatcggtgtcagaccaatctgtctacactgtctgaccccgtgcagcttgaggtccacattggatggttgctcttgcaagccccacgctgggttttcaaagaggaagatccaatccatctgcggtgccacagctggaaaaacaccgctctccacaaagtcacatacctgcaaaatggcaaaggacgcaaatacttccatcacaattccgatttttacattccgaaggctaccctgaaagacagcggcagctatttctgccggggactcgtcggctccaagaatgtgtcctccgaaaccgtgaatatcacgattacccaaggactggctgtgcctacaatctctagcttctttccgcctggataccaagtctccttctgtcttgtgatggtcctcctgtttgctgtggacacaggactgtacttttccgtgaaaacgaacatccgcagctccacacgcgattggaaagatcacaagtttaaatggcgcaaagatccccaggacaagcgcgccaagagaagcggatctggcgtgaagcagaccctgaatttcgacctgctgaagctggctggcgacgtggaatccaacccaggcccttctagaggccatatgaccgagtacaagcccacggtgcgcctcgccacccgcgacgacgtccccagggccgtacgcaccctcgccgccgcgttcgccgactaccccgccacgcgccacaccgtcgatccggaccgccacatcgagcgggtcaccgagctgcaagaactcttcctcacgcgcgtcgggctcgacatcggcaaggtgtgggtcgcggacgacggcgccgcggtggcggtctggaccacgccggagagcgtcgaagcgggggcggtgttcgccgagatcggcccgcgcatggccgagttgagcggttcccggctggccgcgcagcaacagatggaaggcctcctggcgccgcaccggcccaaggagcccgcgtggttcctggccaccgtcggcgtctcgcccgaccaccagggcaagggtctgggcagcgccgtcgtgctccccggagtggaggcggccgagcgcgccggggtgcccgccttcctggagacctccgcgccccgcaacctccccttctacgagcggctcggcttcaccgtcaccgccgacgtcgaggtgcccgaaggaccgcgcacctggtgcatgacccgcaagcccggtgcctgagtcgac

SEQ ID NO: 7643 - DNA, 3165 bp, Artificial Sequence
  Synthetic Polynucleotide
atggccttaccagtgaccgccttgctcctgccgctggccttgctgctccacgccgccaggccggacatccagatgacacagagccctagcagcctgtctgccagcgtgggagacagagtgaccatcacatgcaaggccagcgaccacatcaacaactggctggcctggtatcagcagaagcctggacaggcccctaagctgctgatctacggcgctaccacactggaaacaggcgtgcccagcagattttctggcagcggctctggcaccgactacaccctgacaatatccagcctccagcctgaggacttcgccacctactactgtcagcagagctggaacaccccttggacattcggccagggcaccaagctggaaatcaagagactcgagggacagcctaaggccaatcctaccgtgacactgttccctccaagcagcgaagaactccaggccaacaaggccacacttgtgtgcctgatctccgacttctaccctggggctgtgacagtggcttggaaggccgatggatctcctgtgaaagccggcgtggaaaccaccaagccatccaagcagagcaacaacaaatacgccgccagctcctacctgagcctgacacctgagcagtggaagtcccacagatcctacagctgccaagtgacccacgaaggcagcaccgtggaaaagacagtggcccctacagagtgcagcggatcccagagcttcggcctgctggaccccaagctgtgctacctgctggatggcatcctgttcatctacggcgtgatcctgaccgccctgttcctgagagtgaagttcagcagaagcgccgacgcccctgcctaccagcagggacagaaccaactgtacaacgagctgaacctgggcagacgggaagagtacgacgtgctggacaagcggagaggcagggaccctgagatgggcggaaagccccagcggagaaagaacccccaggaaggactgtataacgaactccagaaagacaagatggccgaagcctacagcgagatcggcatgaagggcgagcggagaagaggcaagggccacgatggcctgtaccagggcctgagcaccgccaccaaggacacctatgacgccctgcacatgcaggccctgcctccaagaagggccaagcgatctggatctggagcaacaaacttctcactactcaaacaagcaggtgacgtggaggagaatcccgggcctactagtatggactggatttggcgcatccttttccttgtcggcgctgctaccggcgcgcattccttcgaacaagttcagcttcaacagcctggcgctgagctggtcaaacctggcgcttctgtgaagatgagctgcaaagccagcggctacgccttcagcagctactggatcaactggatgaagcagaaacccggccagggactcgaatggatcggccaaatctatcccggcgacggcgacaccaactacaacggcaagttcaagggcagagccacactgaccgccgatacctctagcagcacagcctacatgcagctgagcagcctgaccagcgaagatagcgccgtgtacttctgtgcccggtccatcacaacagtcgtgggctgcgctatggactattggggccagggaacaagcgtgaccgtgtctagtacgcgtgcgtctcccacttctccgaaagttttccccctttccctctgtagcacacaacctgatggaaatgtggtcatcgcatgtctggtacaaggattctttccacaagagccattgagcgttacatggtcagagagcgggcagggagttaccgctaggaatttcccaccctcacaggatgcgagtggtgatctttataccacatcatcacaactcacgttgccagccactcagtgcctcgctggaaagtcagtaacatgccatgtcaaacattacactaatccctcacaagatgttaccgtgccttgcccagtaccttctacgccgcccaccccgtctccatctactccacccacgccatcacctagtggtacccagagttttgggttgttggaccctaaattgtgctatctgttggacggaatcctgttcatttacggagtgatcctgaccgcattgttcctgcgggttaagttttccagatccgcagacgcacccgcttaccaacaagggcagaaccaactctacaatgaacttaatttggggcggagggaagagtacgacgttctggacaaaaggaggggacgagatcccgagatgggcggaaagcctcagcgaaggaagaatccgcaagaggggctttataacgaactccagaaagataaaatggcagaagcctatagtgagattgggatgaagggagaaaggaggaggggtaaaggtcacgatgggttgtaccaaggattgagcacagccactaaagatacctatgatgcgctccacatgcaggccctgccgccaagacgcgccaagagaagcggatctggcgtgaagcagaccctgaatttcgacctgctgaagctggctggcgacgtggaatccaacccaggcccttctagaggccatatgaccgagtacaagcccacggtgcgcctcgccacccgcgacgacgtccccagggccgtacgcaccctcgccgccgcgttcgccgactaccccgccacgcgccacaccgtcgatccggaccgccacatcgagcgggtcaccgagctgcaagaactcttcctcacgcgcgtcgggctcgacatcggcaaggtgtgggtcgcggacgacggcgccgcggtggcggtctggaccacgccggagagcgtcgaagcgggggcggtgttcgccgagatcggcccgcgcatggccgagttgagcggttcccggctggccgcgcagcaacagatggaaggcctcctggcgccgcaccggcccaaggagcccgcgtggttcctggccaccgtcggcgtctcgcccgaccaccagggcaagggtctgggcagcgccgtcgtgctccccggagtggaggcggccgagcgcgccggggtgcccgccttcctggagacctccgcgccccgcaacctccccttctacgagcggctcggcttcaccgtcaccgccgacgtcgaggtgcccgaaggaccgcgcacctggtgcatgacccgcaagcccggtgcctga

SEQ ID NO: 7644 - DNA, 3123 bp, Artificial Sequence
  Synthetic Polynucleotide
gctagcaccatggccttaccagtgaccgccttgctcctgccgctggccttgctgctccacgccgccaggccggacatccagatgacacagagccctagcagcctgtctgccagcgtgggagacagagtgaccatcacatgcaaggccagcgaccacatcaacaactggctggcctggtatcagcagaagcctggacaggcccctaagctgctgatctacggcgctaccacactggaaacaggcgtgcccagcagattttctggcagcggctctggcaccgactacaccctgacaatatccagcctccagcctgaggacttcgccacctactactgtcagcagagctggaacaccccttggacattcggccagggcaccaagctggaaatcaagagactcgagggacagcctaaggccaatcctaccgtgacactgttccctccaagcagcgaagaactccaggccaacaaggccacacttgtgtgcctgatctccgacttctaccctggggctgtgacagtggcttggaaggccgatggatctcctgtgaaagccggcgtggaaaccaccaagccatccaagcagagcaacaacaaatacgccgccagctcctacctgagcctgacacctgagcagtggaagtcccacagatcctacagctgccaagtgacccacgaaggcagcaccgtggaaaagacagtggcccctacagagtgcagcggatcccagagcttcggcctgctggaccccaagctgtgctacctgctggatggcatcctgttcatctacggcgtgatcctgaccgccctgttcctgagagtgaagttcagcagaagcgccgacgcccctgcctaccagcagggacagaaccaactgtacaacgagctgaacctgggcagacgggaagagtacgacgtgctggacaagcggagaggcagggaccctgagatgggcggaaagccccagcggagaaagaacccccaggaaggactgtataacgaactccagaaagacaagatggccgaagcctacagcgagatcggcatgaagggcgagcggagaagaggcaagggccacgatggcctgtaccagggcctgagcaccgccaccaaggacacctatgacgccctgcacatgcaggccctgcctccaagaagggccaagcgatctggatctggagcaacaaacttctcactactcaaacaagcaggtgacgtggaggagaatcccgggcctactagtatggactggatttggcgcatccttttccttgtcggcgctgctaccggcgcgcattccttcgaacaagttcagcttcaacagcctggcgctgagctggtcaaacctggcgcttctgtgaagatgagctgcaaagccagcggctacgccttcagcagctactggatcaactggatgaagcagaaacccggccagggactcgaatggatcggccaaatctatcccggcgacggcgacaccaactacaacggcaagttcaagggcagagccacactgaccgccgatacctctagcagcacagcctacatgcagctgagcagcctgaccagcgaagatagcgccgtgtacttctgtgcccggtccatcacaacagtcgtgggctgcgctatggactattggggccagggaacaagcgtgaccgtgtctagtacgcgtgcctccacgaagggaccatctgttttccctcttgccccctgctcacggtcaacgtctgaatccacggcagccctgggctgcctcgttaaggactactttccagagccggtaacagtctcctggaacagtggagcccttacatcaggtgttcacactttccctgccgtcttgcaaagtagcggactgtacagccttagttccgttgttacggttccttctagcaacttcggtacacagacatatacttgtaacgtagatcataagcctagcaacaccaaggtggacaaaaccgtagagagaaagtgtggtacccagagttttgggttgttggaccctaaattgtgctatctgttggacggaatcctgttcatttacggagtgatcctgaccgcattgttcctgcgggttaagttttccagatccgcagacgcacccgcttaccaacaagggcagaaccaactctacaatgaacttaatttggggcggagggaagagtacgacgttctggacaaaaggaggggacgagatcccgagatgggcggaaagcctcagcgaaggaagaatccgcaagaggggctttataacgaactccagaaagataaaatggcagaagcctatagtgagattgggatgaagggagaaaggaggaggggtaaaggtcacgatgggttgtaccaaggattgagcacagccactaaagatacctatgatgcgctccacatgcaggccctgccgccaagacgcgccaagagaagcggatctggcgtgaagcagaccctgaatttcgacctgctgaagctggctggcgacgtggaatccaacccaggcccttctagaggccatatgaccgagtacaagcccacggtgcgcctcgccacccgcgacgacgtccccagggccgtacgcaccctcgccgccgcgttcgccgactaccccgccacgcgccacaccgtcgatccggaccgccacatcgagcgggtcaccgagctgcaagaactcttcctcacgcgcgtcgggctcgacatcggcaaggtgtgggtcgcggacgacggcgccgcggtggcggtctggaccacgccggagagcgtcgaagcgggggcggtgttcgccgagatcggcccgcgcatggccgagttgagcggttcccggctggccgcgcagcaacagatggaaggcctcctggcgccgcaccggcccaaggagcccgcgtggttcctggccaccgtcggcgtctcgcccgaccaccagggcaagggtctgggcagcgccgtcgtgctccccggagtggaggcggccgagcgcgccggggtgcccgccttcctggagacctccgcgccccgcaacctccccttctacgagcggctcggcttcaccgtcaccgccgacgtcgaggtgcccgaaggaccgcgcacctggtgcatgacccgcaagcccggtgcctgagtcgac

SEQ ID NO: 7645 - DNA, 3279 bp, Artificial Sequence
  Synthetic Polynucleotide
atggccttaccagtgaccgccttgctcctgccgctggccttgctgctccacgccgccaggccggacatccagatgacacagagccctagcagcctgtctgccagcgtgggagacagagtgaccatcacatgcaaggccagcgaccacatcaacaactggctggcctggtatcagcagaagcctggacaggcccctaagctgctgatctacggcgctaccacactggaaacaggcgtgcccagcagattttctggcagcggctctggcaccgactacaccctgacaatatccagcctccagcctgaggacttcgccacctactactgtcagcagagctggaacaccccttggacattcggccagggcaccaagctggaaatcaagagactcgagggacagcctaaggccaatcctaccgtgacactgttccctccaagcagcgaagaactccaggccaacaaggccacacttgtgtgcctgatctccgacttctaccctggggctgtgacagtggcttggaaggccgatggatctcctgtgaaagccggcgtggaaaccaccaagccatccaagcagagcaacaacaaatacgccgccagctcctacctgagcctgacacctgagcagtggaagtcccacagatcctacagctgccaagtgacccacgaaggcagcaccgtggaaaagacagtggcccctacagagtgcagcggatcccagagcttcggcctgctggaccccaagctgtgctacctgctggatggcatcctgttcatctacggcgtgatcctgaccgccctgttcctgagagtgaagttcagcagaagcgccgacgcccctgcctaccagcagggacagaaccaactgtacaacgagctgaacctgggcagacgggaagagtacgacgtgctggacaagcggagaggcagggaccctgagatgggcggaaagccccagcggagaaagaacccccaggaaggactgtataacgaactccagaaagacaagatggccgaagcctacagcgagatcggcatgaagggcgagcggagaagaggcaagggccacgatggcctgtaccagggcctgagcaccgccaccaaggacacctatgacgccctgcacatgcaggccctgcctccaagaagggccaagcgatctggatctggagcaacaaacttctcactactcaaacaagcaggtgacgtggaggagaatcccgggcctactagtatggactggatttggcgcatccttttccttgtcggcgctgctaccggcgcgcattccttcgaacaagttcagcttcaacagcctggcgctgagctggtcaaacctggcgcttctgtgaagatgagctgcaaagccagcggctacgccttcagcagctactggatcaactggatgaagcagaaacccggccagggactcgaatggatcggccaaatctatcccggcgacggcgacaccaactacaacggcaagttcaagggcagagccacactgaccgccgatacctctagcagcacagcctacatgcagctgagcagcctgaccagcgaagatagcgccgtgtacttctgtgcccggtccatcacaacagtcgtgggctgcgctatggactattggggccagggaacaagcgtgaccgtgtctagtacgcgtgctccgacaaaggcgccagacgtttttcctattatttcaggatgtcggcatccgaaagataattccccagttgttctggcgtgtcttatcacgggctaccatcctacatctgttaccgttacgtggtatatgggtacgcaaagccaacctcagcggacttttccagagatccaacggcgagattcatattatatgacatccagtcagttgagtacaccgctgcaacagtggcggcaaggtgagtataagtgtgtggtccaacacacagccagtaaaagtaagaaagagatattccggtggcctgaaagcccgaaggcacaagcatcttctgttccgacggcgcaaccgcaagctgaaggaagtcttgcaaaagcaaccacagcacccgcgacaacacgaaacacaggacgcggaggcgaggaaaagaaaaaagaaaaggaaaaggaagagcaagaggagagggaaactaagacccccggtacccagagttttgggttgttggaccctaaattgtgctatctgttggacggaatcctgttcatttacggagtgatcctgaccgcattgttcctgcgggttaagttttccagatccgcagacgcacccgcttaccaacaagggcagaaccaactctacaatgaacttaatttggggcggagggaagagtacgacgttctggacaaaaggaggggacgagatcccgagatgggcggaaagcctcagcgaaggaagaatccgcaagaggggctttataacgaactccagaaagataaaatggcagaagcctatagtgagattgggatgaagggagaaaggaggaggggtaaaggtcacgatgggttgtaccaaggattgagcacagccactaaagatacctatgatgcgctccacatgcaggccctgccgccaagacgcgccaagagaagcggatctggcgtgaagcagaccctgaatttcgacctgctgaagctggctggcgacgtggaatccaacccaggcccttctagaggccatatgaccgagtacaagcccacggtgcgcctcgccacccgcgacgacgtccccagggccgtacgcaccctcgccgccgcgttcgccgactaccccgccacgcgccacaccgtcgatccggaccgccacatcgagcgggtcaccgagctgcaagaactcttcctcacgcgcgtcgggctcgacatcggcaaggtgtgggtcgcggacgacggcgccgcggtggcggtctggaccacgccggagagcgtcgaagcgggggcggtgttcgccgagatcggcccgcgcatggccgagttgagcggttcccggctggccgcgcagcaacagatggaaggcctcctggcgccgcaccggcccaaggagcccgcgtggttcctggccaccgtcggcgtctcgcccgaccaccagggcaagggtctgggcagcgccgtcgtgctccccggagtggaggcggccgagcgcgccggggtgcccgccttcctggagacctccgcgccccgcaacctccccttctacgagcggctcggcttcaccgtcaccgccgacgtcgaggtgcccgaaggaccgcgcacctggtgcatgacccgcaagcccggtgcctga

SEQ ID NO: 7646 - DNA, 3105 bp, Artificial Sequence
  Synthetic Polynucleotide
atggccttaccagtgaccgccttgctcctgccgctggccttgctgctccacgccgccaggccggacatccagatgacacagagccctagcagcctgtctgccagcgtgggagacagagtgaccatcacatgcaaggccagcgaccacatcaacaactggctggcctggtatcagcagaagcctggacaggcccctaagctgctgatctacggcgctaccacactggaaacaggcgtgcccagcagattttctggcagcggctctggcaccgactacaccctgacaatatccagcctccagcctgaggacttcgccacctactactgtcagcagagctggaacaccccttggacattcggccagggcaccaagctggaaatcaagagactcgagggacagcctaaggccaatcctaccgtgacactgttccctccaagcagcgaagaactccaggccaacaaggccacacttgtgtgcctgatctccgacttctaccctggggctgtgacagtggcttggaaggccgatggatctcctgtgaaagccggcgtggaaaccaccaagccatccaagcagagcaacaacaaatacgccgccagctcctacctgagcctgacacctgagcagtggaagtcccacagatcctacagctgccaagtgacccacgaaggcagcaccgtggaaaagacagtggcccctacagagtgcagcggatcccagagcttcggcctgctggaccccaagctgtgctacctgctggatggcatcctgttcatctacggcgtgatcctgaccgccctgttcctgagagtgaagttcagcagaagcgccgacgcccctgcctaccagcagggacagaaccaactgtacaacgagctgaacctgggcagacgggaagagtacgacgtgctggacaagcggagaggcagggaccctgagatgggcggaaagccccagcggagaaagaacccccaggaaggactgtataacgaactccagaaagacaagatggccgaagcctacagcgagatcggcatgaagggcgagcggagaagaggcaagggccacgatggcctgtaccagggcctgagcaccgccaccaaggacacctatgacgccctgcacatgcaggccctgcctccaagaagggccaagcgatctggatctggagcaacaaacttctcactactcaaacaagcaggtgacgtggaggagaatcccgggcctactagtatggactggatttggcgcatccttttccttgtcggcgctgctaccggcgcgcattccttcgaacaagttcagcttcaacagcctggcgctgagctggtcaaacctggcgcttctgtgaagatgagctgcaaagccagcggctacgccttcagcagctactggatcaactggatgaagcagaaacccggccagggactcgaatggatcggccaaatctatcccggcgacggcgacaccaactacaacggcaagttcaagggcagagccacactgaccgccgatacctctagcagcacagcctacatgcagctgagcagcctgaccagcgaagatagcgccgtgtacttctgtgcccggtccatcacaacagtcgtgggctgcgctatggactattggggccagggaacaagcgtgaccgtgtctagtacgcgtgcctcaacgaaagggcctagcgtcttccccctggcgccgtgctcacgatccacaagcgaatccaccgccgctctcggatgcctcgtaaaggattatttccctgaaccagtcacggtgtcatggaacagcggtgcccttaccagcggcgtccatacctttcctgctgtgctccagtccagcggactttatagtctcagctctgtcgtgaccgtcccttcctctaattttggcacccagacttacacgtgcaacgtcgatcataagcccagtaacaccaaggtagacaagacggtggaacgaaagggtacccagagttttgggttgttggaccctaaattgtgctatctgttggacggaatcctgttcatttacggagtgatcctgaccgcattgttcctgcgggttaagttttccagatccgcagacgcacccgcttaccaacaagggcagaaccaactctacaatgaacttaatttggggcggagggaagagtacgacgttctggacaaaaggaggggacgagatcccgagatgggcggaaagcctcagcgaaggaagaatccgcaagaggggctttataacgaactccagaaagataaaatggcagaagcctatagtgagattgggatgaagggagaaaggaggaggggtaaaggtcacgatgggttgtaccaaggattgagcacagccactaaagatacctatgatgcgctccacatgcaggccctgccgccaagacgcgccaagagaagcggatctggcgtgaagcagaccctgaatttcgacctgctgaagctggctggcgacgtggaatccaacccaggcccttctagaggccatatgaccgagtacaagcccacggtgcgcctcgccacccgcgacgacgtccccagggccgtacgcaccctcgccgccgcgttcgccgactaccccgccacgcgccacaccgtcgatccggaccgccacatcgagcgggtcaccgagctgcaagaactcttcctcacgcgcgtcgggctcgacatcggcaaggtgtgggtcgcggacgacggcgccgcggtggcggtctggaccacgccggagagcgtcgaagcgggggcggtgttcgccgagatcggcccgcgcatggccgagttgagcggttcccggctggccgcgcagcaacagatggaaggcctcctggcgccgcaccggcccaaggagcccgcgtggttcctggccaccgtcggcgtctcgcccgaccaccagggcaagggtctgggcagcgccgtcgtgctccccggagtggaggcggccgagcgcgccggggtgcccgccttcctggagacctccgcgccccgcaacctccccttctacgagcggctcggcttcaccgtcaccgccgacgtcgaggtgcccgaaggaccgcgcacctggtgcatgacccgcaagcccggtgcctga

SEQ ID NO: 7647 - DNA, 3132 bp, Artificial Sequence
  Synthetic Polynucleotide
atggccttaccagtgaccgccttgctcctgccgctggccttgctgctccacgccgccaggccggacatccagatgacacagagccctagcagcctgtctgccagcgtgggagacagagtgaccatcacatgcaaggccagcgaccacatcaacaactggctggcctggtatcagcagaagcctggacaggcccctaagctgctgatctacggcgctaccacactggaaacaggcgtgcccagcagattttctggcagcggctctggcaccgactacaccctgacaatatccagcctccagcctgaggacttcgccacctactactgtcagcagagctggaacaccccttggacattcggccagggcaccaagctggaaatcaagagactcgagggacagcctaaggccaatcctaccgtgacactgttccctccaagcagcgaagaactccaggccaacaaggccacacttgtgtgcctgatctccgacttctaccctggggctgtgacagtggcttggaaggccgatggatctcctgtgaaagccggcgtggaaaccaccaagccatccaagcagagcaacaacaaatacgccgccagctcctacctgagcctgacacctgagcagtggaagtcccacagatcctacagctgccaagtgacccacgaaggcagcaccgtggaaaagacagtggcccctacagagtgcagcggatcccagagcttcggcctgctggaccccaagctgtgctacctgctggatggcatcctgttcatctacggcgtgatcctgaccgccctgttcctgagagtgaagttcagcagaagcgccgacgcccctgcctaccagcagggacagaaccaactgtacaacgagctgaacctgggcagacgggaagagtacgacgtgctggacaagcggagaggcagggaccctgagatgggcggaaagccccagcggagaaagaacccccaggaaggactgtataacgaactccagaaagacaagatggccgaagcctacagcgagatcggcatgaagggcgagcggagaagaggcaagggccacgatggcctgtaccagggcctgagcaccgccaccaaggacacctatgacgccctgcacatgcaggccctgcctccaagaagggccaagcgatctggatctggagcaacaaacttctcactactcaaacaagcaggtgacgtggaggagaatcccgggcctactagtatggactggatttggcgcatccttttccttgtcggcgctgctaccggcgcgcattccttcgaacaagttcagcttcaacagcctggcgctgagctggtcaaacctggcgcttctgtgaagatgagctgcaaagccagcggctacgccttcagcagctactggatcaactggatgaagcagaaacccggccagggactcgaatggatcggccaaatctatcccggcgacggcgacaccaactacaacggcaagttcaagggcagagccacactgaccgccgatacctctagcagcacagcctacatgcagctgagcagcctgaccagcgaagatagcgccgtgtacttctgtgcccggtccatcacaacagtcgtgggctgcgctatggactattggggccagggaacaagcgtgaccgtgtctagtacgcgtgcgtcacctacgtccccaaaagtgttcccgctgtcactcgattccactccacaggacggtaacgtggtggttgcctgcctggtacaaggtttctttcctcaagaaccactctctgtgacgtggtctgaaagtggtcagaatgttacagcacggaacttcccaccgagtcaagatgcgagtggggatctctatacgacatccagtcaactcacactgcccgcaacacaatgccccgatggcaaatctgttacctgccatgtgaaacattacaccaatccatcccaggatgtgacagtaccttgtccggttccgccccctcccccgggtacccagagttttgggttgttggaccctaaattgtgctatctgttggacggaatcctgttcatttacggagtgatcctgaccgcattgttcctgcgggttaagttttccagatccgcagacgcacccgcttaccaacaagggcagaaccaactctacaatgaacttaatttggggcggagggaagagtacgacgttctggacaaaaggaggggacgagatcccgagatgggcggaaagcctcagcgaaggaagaatccgcaagaggggctttataacgaactccagaaagataaaatggcagaagcctatagtgagattgggatgaagggagaaaggaggaggggtaaaggtcacgatgggttgtaccaaggattgagcacagccactaaagatacctatgatgcgctccacatgcaggccctgccgccaagacgcgccaagagaagcggatctggcgtgaagcagaccctgaatttcgacctgctgaagctggctggcgacgtggaatccaacccaggcccttctagaggccatatgaccgagtacaagcccacggtgcgcctcgccacccgcgacgacgtccccagggccgtacgcaccctcgccgccgcgttcgccgactaccccgccacgcgccacaccgtcgatccggaccgccacatcgagcgggtcaccgagctgcaagaactcttcctcacgcgcgtcgggctcgacatcggcaaggtgtgggtcgcggacgacggcgccgcggtggcggtctggaccacgccggagagcgtcgaagcgggggcggtgttcgccgagatcggcccgcgcatggccgagttgagcggttcccggctggccgcgcagcaacagatggaaggcctcctggcgccgcaccggcccaaggagcccgcgtggttcctggccaccgtcggcgtctcgcccgaccaccagggcaagggtctgggcagcgccgtcgtgctccccggagtggaggcggccgagcgcgccggggtgcccgccttcctggagacctccgcgccccgcaacctccccttctacgagcggctcggcttcaccgtcaccgccgacgtcgaggtgcccgaaggaccgcgcacctggtgcatgacccgcaagcccggtgcctgagtcgac

SEQ ID NO: 7648 - DNA, 3111 bp, Artificial Sequence
  Synthetic Polynucleotide
atggccttaccagtgaccgccttgctcctgccgctggccttgctgctccacgccgccaggccggacatccagatgacacagagccctagcagcctgtctgccagcgtgggagacagagtgaccatcacatgcaaggccagcgaccacatcaacaactggctggcctggtatcagcagaagcctggacaggcccctaagctgctgatctacggcgctaccacactggaaacaggcgtgcccagcagattttctggcagcggctctggcaccgactacaccctgacaatatccagcctccagcctgaggacttcgccacctactactgtcagcagagctggaacaccccttggacattcggccagggcaccaagctggaaatcaagagactcgagggacagcctaaggccaatcctaccgtgacactgttccctccaagcagcgaagaactccaggccaacaaggccacacttgtgtgcctgatctccgacttctaccctggggctgtgacagtggcttggaaggccgatggatctcctgtgaaagccggcgtggaaaccaccaagccatccaagcagagcaacaacaaatacgccgccagctcctacctgagcctgacacctgagcagtggaagtcccacagatcctacagctgccaagtgacccacgaaggcagcaccgtggaaaagacagtggcccctacagagtgcagcggatcccagagcttcggcctgctggaccccaagctgtgctacctgctggatggcatcctgttcatctacggcgtgatcctgaccgccctgttcctgagagtgaagttcagcagaagcgccgacgcccctgcctaccagcagggacagaaccaactgtacaacgagctgaacctgggcagacgggaagagtacgacgtgctggacaagcggagaggcagggaccctgagatgggcggaaagccccagcggagaaagaacccccaggaaggactgtataacgaactccagaaagacaagatggccgaagcctacagcgagatcggcatgaagggcgagcggagaagaggcaagggccacgatggcctgtaccagggcctgagcaccgccaccaaggacacctatgacgccctgcacatgcaggccctgcctccaagaagggccaagcgatctggatctggagcaacaaacttctcactactcaaacaagcaggtgacgtggaggagaatcccgggcctactagtatggactggatttggcgcatccttttccttgtcggcgctgctaccggcgcgcattccttcgaacaagttcagcttcaacagcctggcgctgagctggtcaaacctggcgcttctgtgaagatgagctgcaaagccagcggctacgccttcagcagctactggatcaactggatgaagcagaaacccggccagggactcgaatggatcggccaaatctatcccggcgacggcgacaccaactacaacggcaagttcaagggcagagccacactgaccgccgatacctctagcagcacagcctacatgcagctgagcagcctgaccagcgaagatagcgccgtgtacttctgtgcccggtccatcacaacagtcgtgggctgcgctatggactattggggccagggaacaagcgtgaccgtgtctagtacgcgtgctagtacccagtcaccttctgttttcccgcttactagatgctgcaagaacataccatccaatgccacttctgtcacactgggctgtcttgctacaggttattttcctgagccggtgatggtcacttgggataccggtagcctgaatggaactacaatgacgctgcctgccacgacgctcacattgagtgggcattacgcgacaattagtcttttgacggtaagcggagcttgggctaagcagatgttcacttgcagagtagcgcacactccctctagtactgactgggttgacaacaaaaccttttctggtacccagagttttgggttgttggaccctaaattgtgctatctgttggacggaatcctgttcatttacggagtgatcctgaccgcattgttcctgcgggttaagttttccagatccgcagacgcacccgcttaccaacaagggcagaaccaactctacaatgaacttaatttggggcggagggaagagtacgacgttctggacaaaaggaggggacgagatcccgagatgggcggaaagcctcagcgaaggaagaatccgcaagaggggctttataacgaactccagaaagataaaatggcagaagcctatagtgagattgggatgaagggagaaaggaggaggggtaaaggtcacgatgggttgtaccaaggattgagcacagccactaaagatacctatgatgcgctccacatgcaggccctgccgccaagacgcgccaagagaagcggatctggcgtgaagcagaccctgaatttcgacctgctgaagctggctggcgacgtggaatccaacccaggcccttctagaggccatatgaccgagtacaagcccacggtgcgcctcgccacccgcgacgacgtccccagggccgtacgcaccctcgccgccgcgttcgccgactaccccgccacgcgccacaccgtcgatccggaccgccacatcgagcgggtcaccgagctgcaagaactcttcctcacgcgcgtcgggctcgacatcggcaaggtgtgggtcgcggacgacggcgccgcggtggcggtctggaccacgccggagagcgtcgaagcgggggcggtgttcgccgagatcggcccgcgcatggccgagttgagcggttcccggctggccgcgcagcaacagatggaaggcctcctggcgccgcaccggcccaaggagcccgcgtggttcctggccaccgtcggcgtctcgcccgaccaccagggcaagggtctgggcagcgccgtcgtgctccccggagtggaggcggccgagcgcgccggggtgcccgccttcctggagacctccgcgccccgcaacctccccttctacgagcggctcggcttcaccgtcaccgccgacgtcgaggtgcccgaaggaccgcgcacctggtgcatgacccgcaagcccggtgcctga

SEQ ID NO: 7649 - DNA, 3111 bp, Artificial Sequence
  Synthetic Polynucleotide
atggccttaccagtgaccgccttgctcctgccgctggccttgctgctccacgccgccaggccggacatccagatgacacagagccctagcagcctgtctgccagcgtgggagacagagtgaccatcacatgcaaggccagcgaccacatcaacaactggctggcctggtatcagcagaagcctggacaggcccctaagctgctgatctacggcgctaccacactggaaacaggcgtgcccagcagattttctggcagcggctctggcaccgactacaccctgacaatatccagcctccagcctgaggacttcgccacctactactgtcagcagagctggaacaccccttggacattcggccagggcaccaagctggaaatcaagagactcgagggacagcctaaggccaatcctaccgtgacactgttccctccaagcagcgaagaactccaggccaacaaggccacacttgtgtgcctgatctccgacttctaccctggggctgtgacagtggcttggaaggccgatggatctcctgtgaaagccggcgtggaaaccaccaagccatccaagcagagcaacaacaaatacgccgccagctcctacctgagcctgacacctgagcagtggaagtcccacagatcctacagctgccaagtgacccacgaaggcagcaccgtggaaaagacagtggcccctacagagtgcagcggatcccagagcttcggcctgctggaccccaagctgtgctacctgctggatggcatcctgttcatctacggcgtgatcctgaccgccctgttcctgagagtgaagttcagcagaagcgccgacgcccctgcctaccagcagggacagaaccaactgtacaacgagctgaacctgggcagacgggaagagtacgacgtgctggacaagcggagaggcagggaccctgagatgggcggaaagccccagcggagaaagaacccccaggaaggactgtataacgaactccagaaagacaagatggccgaagcctacagcgagatcggcatgaagggcgagcggagaagaggcaagggccacgatggcctgtaccagggcctgagcaccgccaccaaggacacctatgacgccctgcacatgcaggccctgcctccaagaagggccaagcgatctggatctggagcaacaaacttctcactactcaaacaagcaggtgacgtggaggagaatcccgggcctactagtatggactggatttggcgcatccttttccttgtcggcgctgctaccggcgcgcattccttcgaacaagttcagcttcaacagcctggcgctgagctggtcaaacctggcgcttctgtgaagatgagctgcaaagccagcggctacgccttcagcagctactggatcaactggatgaagcagaaacccggccagggactcgaatggatcggccaaatctatcccggcgacggcgacaccaactacaacggcaagttcaagggcagagccacactgaccgccgatacctctagcagcacagcctacatgcagctgagcagcctgaccagcgaagatagcgccgtgtacttctgtgcccggtccatcacaacagtcgtgggctgcgctatggactattggggccagggaacaagcgtgaccgtgtctagtacgcgtgcgtccactaagggtccgtcagtcttcccgctggcgccctgttcccgcagcacgagtgaatctaccgccgcccttgggtgcttggtaaaagactattttcctgagcccgttacagtatcatggaacagcggggctctgactagcggggtgcatacgttccctgcggttctgcaatctagcggactgtattctctctccagtgttgtgaccgtgccaagctccagcctcggtactaaaacttatacatgtaatgtggatcataaaccttcaaataccaaggttgacaaaagggtagagagtaagtacggtggtacccagagttttgggttgttggaccctaaattgtgctatctgttggacggaatcctgttcatttacggagtgatcctgaccgcattgttcctgcgggttaagttttccagatccgcagacgcacccgcttaccaacaagggcagaaccaactctacaatgaacttaatttggggcggagggaagagtacgacgttctggacaaaaggaggggacgagatcccgagatgggcggaaagcctcagcgaaggaagaatccgcaagaggggctttataacgaactccagaaagataaaatggcagaagcctatagtgagattgggatgaagggagaaaggaggaggggtaaaggtcacgatgggttgtaccaaggattgagcacagccactaaagatacctatgatgcgctccacatgcaggccctgccgccaagacgcgccaagagaagcggatctggcgtgaagcagaccctgaatttcgacctgctgaagctggctggcgacgtggaatccaacccaggcccttctagaggccatatgaccgagtacaagcccacggtgcgcctcgccacccgcgacgacgtccccagggccgtacgcaccctcgccgccgcgttcgccgactaccccgccacgcgccacaccgtcgatccggaccgccacatcgagcgggtcaccgagctgcaagaactcttcctcacgcgcgtcgggctcgacatcggcaaggtgtgggtcgcggacgacggcgccgcggtggcggtctggaccacgccggagagcgtcgaagcgggggcggtgttcgccgagatcggcccgcgcatggccgagttgagcggttcccggctggccgcgcagcaacagatggaaggcctcctggcgccgcaccggcccaaggagcccgcgtggttcctggccaccgtcggcgtctcgcccgaccaccagggcaagggtctgggcagcgccgtcgtgctccccggagtggaggcggccgagcgcgccggggtgcccgccttcctggagacctccgcgccccgcaacctccccttctacgagcggctcggcttcaccgtcaccgccgacgtcgaggtgcccgaaggaccgcgcacctggtgcatgacccgcaagcccggtgcctga

SEQ ID NO: 7650 - DNA, 3111 bp, Artificial Sequence
  Synthetic Polynucleotide
atggccttaccagtgaccgccttgctcctgccgctggccttgctgctccacgccgccaggccggacatccagatgacacagagccctagcagcctgtctgccagcgtgggagacagagtgaccatcacatgcaaggccagcgaccacatcaacaactggctggcctggtatcagcagaagcctggacaggcccctaagctgctgatctacggcgctaccacactggaaacaggcgtgcccagcagattttctggcagcggctctggcaccgactacaccctgacaatatccagcctccagcctgaggacttcgccacctactactgtcagcagagctggaacaccccttggacattcggccagggcaccaagctggaaatcaagagactcgagggacagcctaaggccaatcctaccgtgacactgttccctccaagcagcgaagaactccaggccaacaaggccacacttgtgtgcctgatctccgacttctaccctggggctgtgacagtggcttggaaggccgatggatctcctgtgaaagccggcgtggaaaccaccaagccatccaagcagagcaacaacaaatacgccgccagctcctacctgagcctgacacctgagcagtggaagtcccacagatcctacagctgccaagtgacccacgaaggcagcaccgtggaaaagacagtggcccctacagagtgcagcggatcccagagcttcggcctgctggaccccaagctgtgctacctgctggatggcatcctgttcatctacggcgtgatcctgaccgccctgttcctgagagtgaagttcagcagaagcgccgacgcccctgcctaccagcagggacagaaccaactgtacaacgagctgaacctgggcagacgggaagagtacgacgtgctggacaagcggagaggcagggaccctgagatgggcggaaagccccagcggagaaagaacccccaggaaggactgtataacgaactccagaaagacaagatggccgaagcctacagcgagatcggcatgaagggcgagcggagaagaggcaagggccacgatggcctgtaccagggcctgagcaccgccaccaaggacacctatgacgccctgcacatgcaggccctgcctccaagaagggccaagcgatctggatctggagcaacaaacttctcactactcaaacaagcaggtgacgtggaggagaatcccgggcctactagtatggactggatttggcgcatccttttccttgtcggcgctgctaccggcgcgcattccttcgaacaagttcagcttcaacagcctggcgctgagctggtcaaacctggcgcttctgtgaagatgagctgcaaagccagcggctacgccttcagcagctactggatcaactggatgaagcagaaacccggccagggactcgaatggatcggccaaatctatcccggcgacggcgacaccaactacaacggcaagttcaagggcagagccacactgaccgccgatacctctagcagcacagcctacatgcagctgagcagcctgaccagcgaagatagcgccgtgtacttctgtgcccggtccatcacaacagtcgtgggctgcgctatggactattggggccagggaacaagcgtgaccgtgtctagtacgcgtgcaagtacaaagggacccagtgttttcccgctcgccccctgttcacgatcaacgagtgagtccactgcggctctcggatgcctcgtcaaagactacttccccgagccggtgactgttagttggaactctggggctcttacttcaggcgtacacacattccccgccgtgcttcagtcaagtgggctctactcacttagcagtgtggtaacggttccctctagcaactttggcacccaaacatatacttgcaacgtcgatcacaagccgtcaaataccaaagttgacaagaccgttgaaaggaaatgttgtggtacccagagttttgggttgttggaccctaaattgtgctatctgttggacggaatcctgttcatttacggagtgatcctgaccgcattgttcctgcgggttaagttttccagatccgcagacgcacccgcttaccaacaagggcagaaccaactctacaatgaacttaatttggggcggagggaagagtacgacgttctggacaaaaggaggggacgagatcccgagatgggcggaaagcctcagcgaaggaagaatccgcaagaggggctttataacgaactccagaaagataaaatggcagaagcctatagtgagattgggatgaagggagaaaggaggaggggtaaaggtcacgatgggttgtaccaaggattgagcacagccactaaagatacctatgatgcgctccacatgcaggccctgccgccaagacgcgccaagagaagcggatctggcgtgaagcagaccctgaatttcgacctgctgaagctggctggcgacgtggaatccaacccaggcccttctagaggccatatgaccgagtacaagcccacggtgcgcctcgccacccgcgacgacgtccccagggccgtacgcaccctcgccgccgcgttcgccgactaccccgccacgcgccacaccgtcgatccggaccgccacatcgagcgggtcaccgagctgcaagaactcttcctcacgcgcgtcgggctcgacatcggcaaggtgtgggtcgcggacgacggcgccgcggtggcggtctggaccacgccggagagcgtcgaagcgggggcggtgttcgccgagatcggcccgcgcatggccgagttgagcggttcccggctggccgcgcagcaacagatggaaggcctcctggcgccgcaccggcccaaggagcccgcgtggttcctggccaccgtcggcgtctcgcccgaccaccagggcaagggtctgggcagcgccgtcgtgctccccggagtggaggcggccgagcgcgccggggtgcccgccttcctggagacctccgcgccccgcaacctccccttctacgagcggctcggcttcaccgtcaccgccgacgtcgaggtgcccgaaggaccgcgcacctggtgcatgacccgcaagcccggtgcctga

SEQ ID NO: 7651 - DNA, 3783 bp, Artificial Sequence
  Synthetic Polynucleotide
gctagcaccatggccttaccagtgaccgccttgctcctgccgctggccttgctgctccacgccgccaggccgctgcctgttctgacacagcctccatccgtgtctgtggcccctggaaagaccgccagaatcacatgcggcggcaacaacatcggcagcaagagcgtgcactggtatcagcagaagcctggacaggctcctgtgctggtggtgtacgacgacagcgatagacctagcggcatccccgagagattcagcggcagcaattccggcaataccgccacactgaccatcagcagagtggaagctggcgacgaggccgactactactgccaagtgtgggacagcagcagcgactacgtggtgtttggcggcggaacaaagctgacagtgcttggacagcctaaggccaatcctaccgtgacactgttccctccaagcagcgaagaactccaggccaacaaggccacacttgtgtgcctgatctccgacttctaccctggggctgtgacagtggcttggaaggccgatggatctcctgtgaaagccggcgtggaaaccaccaagccatccaagcagagcaacaacaaatacgccgccagctcctacctgagcctgacacctgagcagtggaagtcccacagatcctacagctgccaagtgacccacgaaggcagcaccgtggaaaagacagtggcccctacagagtgcagcggatccgcaaagcccaccacgactccagcgccgcgaccaccaacaccggcgcccactatcgcgtcgcagcccctgtccctgagaccagaggcgtgtagaccagcggctggaggcgcagtgcacacgagggggctggacttcgcctgtgacagcaacctgtttgtggcctcttggatcgccgtgatgattatcttcagaatcggaatggccgtggctatcttctgctgcttcttcttcccatcctggcggcggaagcggaaagagaagcagtctgagacaagccccaaagagttcctgaccatctacgaggacgtgaaggacctgaaaacccggcggaaccacgaacaagagcagacctttcctggcggaggcagcaccatctacagcatgatccagagccagagcagcgcccctacaagccaagagcctgcctacacactgtactccctgatccagcctagcagaaagagcggcagccggaagagaaatcacagccccagcttcaacagcacgatctacgaagtgatcggcaagagccagccaaaggctcagaaccctgccagactgagccggaaagagctggaaaacttcgacgtgtacagcactagtagagtgaagttcagcagaagcgccgacgcccctgcctaccagcagggacagaaccaactgtacaacgagctgaacctgggcagacgggaagagtacgacgtgctggacaagcggagaggcagggaccctgagatgggcggaaagccccagcggagaaagaacccccaggaaggactgtataacgaactccagaaagacaagatggccgaagcctacagcgagatcggcatgaagggcgagcggagaagaggcaagggccacgatggcctgtaccagggcctgagcaccgccaccaaggacacctatgacgccctgcacatgcaggccctgcctccaagaagggccaagcgatctggatctggagcaacaaacttctcactactcaaacaagcaggtgacgtggaggagaatcccgggcctatggactggatttggcgcatccttttccttgtcggcgctgctaccggcgcgcattccttcgaagaagttcaactggtgcagagcggagccgaagtgaagaagccaggcgagagcctgaagattagctgcaaaggcagcggctacagcttcaccagctactggatcggctgggtccgacagatgcctggcaaaggactggaatggatgggcatcatctaccccggcgacagcgacaccagatacagccctagctttcagggccaagtgaccatctccgccgacaagagcatcagcacagcctacctccagtggtcctctctgaaggccagcgataccgccatgtactactgcgccagacaagtctggggatggcaaggcggcatgtaccccaggtctaactggtggtacaacctggactcttggggccagggcacactggtcacagtctcttctgcctctacaaagggaccctccgtgtttcctctggctcccagcagcaagtctacaagcggaggaacagccgctctgggctgcctggtcaaggattactttcccgagcctgtgaccgtgtcctggaatagcggagcactgacaagcggcgtgcacacctttccagccgtgctgcaaagcagcggcctgtactctctgagcagcgtggtcacagtgcctagctctagcctgggcacccagacctacatctgcaatgtgaaccacaagcctagcaacaccaaggtggacaagagagtggaacccaagagctgtggtaccacaacgccgggcgaaaggagttccttgccggccttttaccccggcacaagcggaagctgtagtgggtgtggaagcctcagcctcccacttcttgcgggcctcgtcgcggcagatgcagtagcttcacttcttattgtaggcgcggtatttctctgtgctcgaccaaggaggtcacccgctcaggaggatggtaaggtgtatataaatatgccaggacgcggaagctctagacgggttaagttttccagatccgcagacgcacccgcttaccaacaagggcagaaccaactctacaatgaacttaatttggggcggagggaagagtacgacgttctggacaaaaggaggggacgagatcccgagatgggcggaaagcctcagcgaaggaagaatccgcaagaggggctttataacgaactccagaaagataaaatggcagaagcctatagtgagattgggatgaagggagaaaggaggaggggtaaaggtcacgatgggttgtaccaaggattgagcacagccactaaagatacctatgatgcgctccacatgcaggccctgccgccaagacgcgccaagagaagcggatctggcgtgaagcagaccctgaatttcgacctgctgaagctggctggcgacgtggaatccaacccaggccctggccatatgaccgagtacaagcccacggtgcgcctcgccacccgcgacgacgtccccagggccgtacgcaccctcgccgccgcgttcgccgactaccccgccacgcgccacaccgtcgatccggaccgccacatcgagcgggtcaccgagctgcaagaactcttcctcacgcgcgtcgggctcgacatcggcaaggtgtgggtcgcggacgacggcgccgcggtggcggtctggaccacgccggagagcgtcgaagcgggggcggtgttcgccgagatcggcccgcgcatggccgagttgagcggttcccggctggccgcgcagcaacagatggaaggcctcctggcgccgcaccggcccaaggagcccgcgtggttcctggccaccgtcggcgtctcgcccgaccaccagggcaagggtctgggcagcgccgtcgtgctccccggagtggaggcggccgagcgcgccggggtgcccgccttcctggagacctccgcgccccgcaacctccccttctacgagcggctcggcttcaccgtcaccgccgacgtcgaggtgcccgaaggaccgcgcacctggtgcatgacccgcaagcccggtgcctgagtcgac

SEQ ID NO: 7652 - DNA, 3129 bp, Artificial Sequence
  Synthetic Polynucleotide
gctagcaccatggccttaccagtgaccgccttgctcctgccgctggccttgctgctccacgccgccaggccggacatccagatgacacagagccctagcagcctgtctgccagcgtgggagacagagtgaccatcacatgcaaggccagcgaccacatcaacaactggctggcctggtatcagcagaagcctggacaggcccctaagctgctgatctacggcgctaccacactggaaacaggcgtgcccagcagattttctggcagcggctctggcaccgactacaccctgacaatatccagcctccagcctgaggacttcgccacctactactgtcagcagagctggaacaccccttggacattcggccagggcaccaagctggaaatcaagagactcgagggacagcctaaggccaatcctaccgtgacactgttccctccaagcagcgaagaactccaggccaacaaggccacacttgtgtgcctgatctccgacttctaccctggggctgtgacagtggcttggaaggccgatggatctcctgtgaaagccggcgtggaaaccaccaagccatccaagcagagcaacaacaaatacgccgccagctcctacctgagcctgacacctgagcagtggaagtcccacagatcctacagctgccaagtgacccacgaaggcagcaccgtggaaaagacagtggcccctacagagtgcagcggatcccagagcttcggcctgctggaccccaagctgtgctacctgctggatggcatcctgttcatctacggcgtgatcctgaccgccctgttcctgagagtgaagttcagcagaagcgccgacgcccctgcctaccagcagggacagaaccaactgtacaacgagctgaacctgggcagacgggaagagtacgacgtgctggacaagcggagaggcagggaccctgagatgggcggaaagccccagcggagaaagaacccccaggaaggactgtataacgaactccagaaagacaagatggccgaagcctacagcgagatcggcatgaagggcgagcggagaagaggcaagggccacgatggcctgtaccagggcctgagcaccgccaccaaggacacctatgacgccctgcacatgcaggccctgcctccaagaagggccaagcgatctggatctggagcaacaaacttctcactactcaaacaagcaggtgacgtggaggagaatcccgggcctactagtatggactggatttggcgcatccttttccttgtcggcgctgctaccggcgcgcattccttcgaacaagttcagcttcaacagcctggcgctgagctggtcaaacctggcgcttctgtgaagatgagctgcaaagccagcggctacgccttcagcagctactggatcaactggatgaagcagaaacccggccagggactcgaatggatcggccaaatctatcccggcgacggcgacaccaactacaacggcaagttcaagggcagagccacactgaccgccgatacctctagcagcacagcctacatgcagctgagcagcctgaccagcgaagatagcgccgtgtacttctgtgcccggtccatcacaacagtcgtgggctgcgctatggactattggggccagggaacaagcgtgaccgtgtctagtacgcgtgggtcagcaagtgcgcccacgctctttccattggtttcttgcgagaactctccctcagacacatcaagtgtcgcggtaggctgtctcgcccaagattttttgcccgatagtataacgctgtcatggaaatataagaacaatagtgatataagctccacaaggggttttccgagcgtactgcgaggcggtaaatatgcagcgacgagtcaagtcttgctcccatccaaggatgtcatgcaaggcaccgatgagcatgttgtttgcaaagtgcaacatccgaatggaaataaggaaaaaaacgtcccgctgcccggtacccagagttttgggttgttggaccctaaattgtgctatctgttggacggaatcctgttcatttacggagtgatcctgaccgcattgttcctgcgggttaagttttccagatccgcagacgcacccgcttaccaacaagggcagaaccaactctacaatgaacttaatttggggcggagggaagagtacgacgttctggacaaaaggaggggacgagatcccgagatgggcggaaagcctcagcgaaggaagaatccgcaagaggggctttataacgaactccagaaagataaaatggcagaagcctatagtgagattgggatgaagggagaaaggaggaggggtaaaggtcacgatgggttgtaccaaggattgagcacagccactaaagatacctatgatgcgctccacatgcaggccctgccgccaagacgcgccaagagaagcggatctggcgtgaagcagaccctgaatttcgacctgctgaagctggctggcgacgtggaatccaacccaggcccttctagaggccatatgaccgagtacaagcccacggtgcgcctcgccacccgcgacgacgtccccagggccgtacgcaccctcgccgccgcgttcgccgactaccccgccacgcgccacaccgtcgatccggaccgccacatcgagcgggtcaccgagctgcaagaactcttcctcacgcgcgtcgggctcgacatcggcaaggtgtgggtcgcggacgacggcgccgcggtggcggtctggaccacgccggagagcgtcgaagcgggggcggtgttcgccgagatcggcccgcgcatggccgagttgagcggttcccggctggccgcgcagcaacagatggaaggcctcctggcgccgcaccggcccaaggagcccgcgtggttcctggccaccgtcggcgtctcgcccgaccaccagggcaagggtctgggcagcgccgtcgtgctccccggagtggaggcggccgagcgcgccggggtgcccgccttcctggagacctccgcgccccgcaacctccccttctacgagcggctcggcttcaccgtcaccgccgacgtcgaggtgcccgaaggaccgcgcacctggtgcatgacccgcaagcccggtgcctgagtcgac

SEQ ID NO: 7653 - DNA, 2712 bp, Artificial Sequence; identical to SEQ ID NO: 1600
  Synthetic Polynucleotide

SEQ ID NO: 7654 - DNA, 3396 bp, Artificial Sequence
  Synthetic Polynucleotide
atggccttaccagtgaccgccttgctcctgccgctggccttgctgctccacgccgccaggccggcatgcctgtgggtttcacagcctccagagatcagaaccctggaaggcagcagcgccttcctgccttgcagcttcaatgcctctcagggcagactggctatcggcagcgtgacctggttcagagatgaggtggtgcccggcaaagaagtgcggaacggcacccctgagtttagaggaaggctggcccctctggcctccagcagatttctgcacgatcaccaggccgagctgcacatcagagatgtgcgaggacacgacgccagcatctacgtgtgcagagtggaagtgctcggcctcggagttggcacaggcaatggaacaagactggtggtggaaaaagagcaccctcagctcggaggtaccggcggaggcggatctggcggcggaggtagcggtggcggaggatctgaattcgacatccagatgacacagagccctagcagcctgtctgccagcgtgggagacagagtgaccatcacatgcaaggccagcgaccacatcaacaactggctggcctggtatcagcagaagcctggacaggcccctaagctgctgatctacggcgctaccacactggaaacaggcgtgcccagcagattttctggcagcggctctggcaccgactacaccctgacaatatccagcctccagcctgaggacttcgccacctactactgtcagcagagctggaacaccccttggacattcggccagggcaccaagctggaaatcaagagactcgaggacctgaagaacgtgttcccacctgaggtggccgtgttcgagcctagcgaggccgagatcagccacacccagaaagccaccctcgtgtgcctggctaccggcttctaccccgaccatgtggaactgtcttggtgggtcaacggcaaagaggtgcacagcggcgtgtgtaccgacccccagccactgaaagaacagcccgccctgaacgacagccggtactgcctgagcagcagactgagagtgtccgccaccttctggcagaacccccggaaccacttcagatgccaggtgcagttctacggcctgagcgagaacgacgagtggacccaggacagagccaagcccgtgacccagatcgtgtctgccgaagcctggggcagagccgattgcggctttaccagcgagagctaccagcagggcgtgctgagcgccaccatcctgtacgagatcctgctgggcaaggccaccctgtacgccgtgctggtgtctgccctggtgctgatggctatggtcaagcggaaggacagccggggaagggccaagcgatctggatctggagcaacaaacttctcactactcaaacaagcaggtgacgtggaggagaatcccgggcctactagtgccaccatggactggatttggcgcatccttttccttgtcggcgctgctaccggcgcccattccgggcccctgtgggtgtcccagccacctgaaattcggacactggaaggctcctccgcctttctgccctgtagctttaacgccagccaggggagactcgccatcggctctgtgacatggttccgggatgaagtcgtccctggaaaagaagttcgcaacggaacaccagagttcagaggcagactcgccccactggcaagctccagattcctgcatgaccatcaggctgaactgcacattagggacgtgcggggccacgatgcctccatctatgtgtgtcgggtcgaagtgcttggactcggcgtcggaactggaaacggcactaggctggtggtcgagaaagaacatccacagcttggcggatccggcggcggaggatctggcggaggcggatctgggggcggaggctctttcgaacaagttcagcttcaacagcctggcgctgagctggtcaaacctggcgcttctgtgaagatgagctgcaaagccagcggctacgccttcagcagctactggatcaactggatgaagcagaaacccggccagggactcgaatggatcggccaaatctatcccggcgacggcgacaccaactacaacggcaagttcaagggcagagccacactgaccgccgatacctctagcagcacagcctacatgcagctgagcagcctgaccagcgaagatagcgccgtgtacttctgtgcccggtccatcacaacagtcgtgggctgcgctatggactattggggccagggaacaagcgtgaccgtgtctagtacgcgtatccagaaccctgatcctgccgtgtaccagctgcgggatagcaagagcagcgacaagagcgtgtgtctgttcaccgacttcgacagccagaccaacgtgtcccagagcaaggactccgacgtgtacatcaccgataagtgcgtgctggacatgcggagcatggacttcaagagcaactccgccgtggcctggtccaacaagtccgatttcgcctgcgccaacgccttcaacaacagcattatccccgaggacacattcttcccaagccccgagagcagctgcgacgtgaagctggtggaaaagagcttcgagacagacaccaacctgaacttccagaacctgagcgtgatcggcttcagaatcctgctgctgaaagtggccggctttaacctgctgatgaccctgcggctgtggtccagccgcgccaagagaagcggatctggcgtgaagcagaccctgaatttcgacctgctgaagctggctggcgacgtggaatccaacccaggcccttctagaggccatatgaccgagtacaagcccacggtgcgcctcgccacccgcgacgacgtccccagggccgtacgcaccctcgccgccgcgttcgccgactaccccgccacgcgccacaccgtcgatccggaccgccacatcgagcgggtcaccgagctgcaagaactcttcctcacgcgcgtcgggctcgacatcggcaaggtgtgggtcgcggacgacggcgccgcggtggcggtctggaccacgccggagagcgtcgaagcgggggcggtgttcgccgagatcggcccgcgcatggccgagttgagcggttcccggctggccgcgcagcaacagatggaaggcctcctggcgccgcaccggcccaaggagcccgcgtggttcctggccaccgtcggcgtctcgcccgaccaccagggcaagggtctgggcagcgccgtcgtgctccccggagtggaggcggccgagcgcgccggggtgcccgccttcctggagacctccgcgccccgcaacctccccttctacgagcggctcggcttcaccgtcaccgccgacgtcgaggtgcccgaaggaccgcgcacctggtgcatgacccgcaagcccggtgcctga

SEQ ID NO: 7655 - DNA, 2541 bp, Artificial Sequence
  Synthetic Polynucleotide
atggccttaccagtgaccgccttgctcctgccgctggccttgctgctccacgccgccaggccggcatgccagtctaaagcccaggtgctgcaatctgtggccggacagacactgacagtgcggtgtcagtatcctcctaccggcagcctgtacgagaagaaaggctggtgcaaagaggccagcgcactcgtctgtatcagactggtcaccagcagcaagccccggacaatggcatggaccagcagattcaccatctgggacgatcccgacgccggcttctttaccgtgaccatgaccgacctgagagaagaggacagcggccactactggtgccggatctacagacccagcgacaacagcgtgtccctcgaggacctgaagaacgtgttcccacctgaggtggccgtgttcgagcctagcgaggccgagatcagccacacccagaaagccaccctcgtgtgcctggctaccggcttctaccccgaccatgtggaactgtcttggtgggtcaacggcaaagaggtgcacagcggcgtgtgtaccgacccccagccactgaaagaacagcccgccctgaacgacagccggtactgcctgagcagcagactgagagtgtccgccaccttctggcagaacccccggaaccacttcagatgccaggtgcagttctacggcctgagcgagaacgacgagtggacccaggacagagccaagcccgtgacccagatcgtgtctgccgaagcctggggcagagccgattgcggctttaccagcgagagctaccagcagggcgtgctgagcgccaccatcctgtacgagatcctgctgggcaaggccaccctgtacgccgtgctggtgtctgccctggtgctgatggctatggtcaagcggaaggacagccggggaagggccaagcgatctggatctggagcaacaaacttctcactactcaaacaagcaggtgacgtggaggagaatcccgggcctactagtgccaccatggactggatttggcgcatccttttccttgtcggcgctgctaccggcgcccattccgggcccctgtgggtgtcccagccacctgaaattcggacactggaaggctcctccgcctttctgccctgtagctttaacgccagccaggggagactcgccatcggctctgtgacatggttccgggatgaagtcgtccctggaaaagaagttcgcaacggaacaccagagttcagaggcagactcgccccactggcaagctccagattcctgcatgaccatcaggctgaactgcacattagggacgtgcggggccacgatgcctccatctatgtgtgtcgggtcgaagtgcttggactcggcgtcggaactggaaacggcactaggctggtggtcgagaaagaacatccacagcttggcacgcgtatccagaaccctgatcctgccgtgtaccagctgcgggatagcaagagcagcgacaagagcgtgtgtctgttcaccgacttcgacagccagaccaacgtgtcccagagcaaggactccgacgtgtacatcaccgataagtgcgtgctggacatgcggagcatggacttcaagagcaactccgccgtggcctggtccaacaagtccgatttcgcctgcgccaacgccttcaacaacagcattatccccgaggacacattcttcccaagccccgagagcagctgcgacgtgaagctggtggaaaagagcttcgagacagacaccaacctgaacttccagaacctgagcgtgatcggcttcagaatcctgctgctgaaagtggccggctttaacctgctgatgaccctgcggctgtggtccagccgcgccaagagaagcggatctggcgtgaagcagaccctgaatttcgacctgctgaagctggctggcgacgtggaatccaacccaggcccttctagaggccatatgaccgagtacaagcccacggtgcgcctcgccacccgcgacgacgtccccagggccgtacgcaccctcgccgccgcgttcgccgactaccccgccacgcgccacaccgtcgatccggaccgccacatcgagcgggtcaccgagctgcaagaactcttcctcacgcgcgtcgggctcgacatcggcaaggtgtgggtcgcggacgacggcgccgcggtggcggtctggaccacgccggagagcgtcgaagcgggggcggtgttcgccgagatcggcccgcgcatggccgagttgagcggttcccggctggccgcgcagcaacagatggaaggcctcctggcgccgcaccggcccaaggagcccgcgtggttcctggccaccgtcggcgtctcgcccgaccaccagggcaagggtctgggcagcgccgtcgtgctccccggagtggaggcggccgagcgcgccggggtgcccgccttcctggagacctccgcgccccgcaacctccccttctacgagcggctcggcttcaccgtcaccgccgacgtcgaggtgcccgaaggaccgcgcacctggtgcatgacccgcaagcccggtgcctga

SEQ ID NO: 7656 - DNA, 2688 bp, Artificial Sequence; identical to SEQ ID NO: 2296
  Synthetic Polynucleotide

SEQ ID NO: 7657 - DNA, 2874 bp, Artificial Sequence; identical to SEQ ID NO: 1601
  Synthetic Polynucleotide

SEQ ID NO: 7658 - DNA, 2550 bp, Artificial Sequence; identical to SEQ ID NO: 1756
  Synthetic Polynucleotide

SEQ ID NO: 7659 - DNA, 3144 bp, Artificial Sequence; identical to SEQ ID NO: 1730
  Synthetic Polynucleotide

SEQ ID NO: 7660 - DNA, 2211 bp, Artificial Sequence
  Synthetic Polynucleotide
atggccttaccagtgaccgccttgctcctgccgctggccttgctgctccacgccgccaggccggacatccagatgacacagactacatcctccctgtctgcctctctgggagacagagtcaccatcagttgcagggcaagtcaggacattagtaaatatttaaattggtatcagcagaaaccagatggaactgttaaactcctgatctaccatacatcaagattacactcaggagtcccatcaaggttcagtggcagtgggtctggaacagattattctctcaccattagcaacctggagcaagaagatattgccacttacttttgccaacagggtaatacgcttccgtacacgttcggaggggggaccaagctggagatcacaggtggcggtggctcgggcggtggtgggtcgggtggcggcggatctgaggtgaaactgcaggagtcaggacctggcctggtggcgccctcacagagcctgtccgtcacatgcactgtctcaggggtctcattacccgactatggtgtaagctggattcgccagcctccacgaaagggtctggagtggctgggagtaatatggggtagtgaaaccacatactataattcagctctcaaatccagactgaccatcatcaaggacaactccaagagccaagttttcttaaaaatgaacagtctgcaaactgatgacacagccatttactactgtgccaaacattattactacggtggtagctatgctatggactactggggtcaaggaacctcagtcaccgtctcctcaacgcgtggaatgaggactgaggatcttcccaaagctgtcgtctttctcgaaccccaatggtatcgggtgctcgaaaaagactctgtgacactgaaatgccaaggggcctactctcccgaggacaactccacacagtggtttcataatgagtccctcatcagctctcaggccagctcttatttcattgatgccgctacagtggacgactccggcgagtatcggtgtcagaccaatctgtctacactgtctgaccccgtgcagcttgaggtccacattggatggttgctcttgcaagccccacgctgggttttcaaagaggaagatccaatccatctgcggtgccacagctggaaaaacaccgctctccacaaagtcacatacctgcaaaatggcaaaggacgcaaatacttccatcacaattccgatttttacattccgaaggctaccctgaaagacagcggcagctatttctgccggggactcgtcggctccaagaatgtgtcctccgaaaccgtgaatatcacgattacccaaggactggctgtgcctacaatctctagcttctttccgcctggataccaagtctccttctgtcttgtgatggtcctcctgtttgctgtggacacaggactgtacttttccgtgaaaacgaacatccgcagctccacacgcgattggaaagatcacaagtttaaatggcgcaaagatccccaggacaagcgcgccaagagaagcggatctggcgtgaagcagaccctgaatttcgacctgctgaagctggctggcgacgtggaatccaacccaggcccttctagaggccatatgaccgagtacaagcccacggtgcgcctcgccacccgcgacgacgtccccagggccgtacgcaccctcgccgccgcgttcgccgactaccccgccacgcgccacaccgtcgatccggaccgccacatcgagcgggtcaccgagctgcaagaactcttcctcacgcgcgtcgggctcgacatcggcaaggtgtgggtcgcggacgacggcgccgcggtggcggtctggaccacgccggagagcgtcgaagcgggggcggtgttcgccgagatcggcccgcgcatggccgagttgagcggttcccggctggccgcgcagcaacagatggaaggcctcctggcgccgcaccggcccaaggagcccgcgtggttcctggccaccgtcggcgtctcgcccgaccaccagggcaagggtctgggcagcgccgtcgtgctccccggagtggaggcggccgagcgcgccggggtgcccgccttcctggagacctccgcgccccgcaacctccccttctacgagcggctcggcttcaccgtcaccgccgacgtcgaggtgcccgaaggaccgcgcacctggtgcatgacccgcaagcccggtgcctga

SEQ ID NO: 7661 - DNA, 2220 bp, Artificial Sequence
  Synthetic Polynucleotide
atggccttaccagtgaccgccttgctcctgccgctggccttgctgctccacgccgccaggccggacgagatcgtgctgacacagagccctgccaccctgtctctgagccctggcgaaagagccaccctgagctgtagagccagccagagcgtgtccagctacctggcctggtatcagcagaagcccggccaggctccccggctgctgatctacgatgccagcaatagagccaccggcatccccgccagattttccggctctggcagcggcaccgacttcaccctgaccatcagctccctggaacccgaggacttcgccgtgtactactgccagcagcggagcaactggcccatcacattcggccagggcacccggctggaaatcaaaggcggaggcggaagtggaggcggaggatctggcggcggaggctctgaagtgcagctggtggaatcaggcggcggactggtgcagcctggcagaagcctgagactgagctgtgccgccagcggcttcaccttcaacgactacgccatgcactgggtgcgccaggcccctggaaaaggactggaatgggtgtccacaatcagctggaacagcggcagcatcggctacgccgatagcgtgaagggccggttcaccatcagccgggacaacgccaagaagtccctgtacctccagatgaacagcctgcgggccgaggacacagccctgtactattgcgccaaggacatccagtacggcaactactactacggcatggacgtgtggggccagggaaccaccgtgaccgtgtcatctacgcgtggaatgaggactgaggatcttcccaaagctgtcgtctttctcgaaccccaatggtatcgggtgctcgaaaaagactctgtgacactgaaatgccaaggggcctactctcccgaggacaactccacacagtggtttcataatgagtccctcatcagctctcaggccagctcttatttcattgatgccgctacagtggacgactccggcgagtatcggtgtcagaccaatctgtctacactgtctgaccccgtgcagcttgaggtccacattggatggttgctcttgcaagccccacgctgggttttcaaagaggaagatccaatccatctgcggtgccacagctggaaaaacaccgctctccacaaagtcacatacctgcaaaatggcaaaggacgcaaatacttccatcacaattccgatttttacattccgaaggctaccctgaaagacagcggcagctatttctgccggggactcgtcggctccaagaatgtgtcctccgaaaccgtgaatatcacgattacccaaggactggctgtgcctacaatctctagcttctttccgcctggataccaagtctccttctgtcttgtgatggtcctcctgtttgctgtggacacaggactgtacttttccgtgaaaacgaacatccgcagctccacacgcgattggaaagatcacaagtttaaatggcgcaaagatccccaggacaagcgcgccaagagaagcggatctggcgtgaagcagaccctgaatttcgacctgctgaagctggctggcgacgtggaatccaacccaggcccttctagaggccatatgaccgagtacaagcccacggtgcgcctcgccacccgcgacgacgtccccagggccgtacgcaccctcgccgccgcgttcgccgactaccccgccacgcgccacaccgtcgatccggaccgccacatcgagcgggtcaccgagctgcaagaactcttcctcacgcgcgtcgggctcgacatcggcaaggtgtgggtcgcggacgacggcgccgcggtggcggtctggaccacgccggagagcgtcgaagcgggggcggtgttcgccgagatcggcccgcgcatggccgagttgagcggttcccggctggccgcgcagcaacagatggaaggcctcctggcgccgcaccggcccaaggagcccgcgtggttcctggccaccgtcggcgtctcgcccgaccaccagggcaagggtctgggcagcgccgtcgtgctccccggagtggaggcggccgagcgcgccggggtgcccgccttcctggagacctccgcgccccgcaacctccccttctacgagcggctcggcttcaccgtcaccgccgacgtcgaggtgcccgaaggaccgcgcacctggtgcatgacccgcaagcccggtgcctga

SEQ ID NO: 7662 - DNA, 2223 bp, Artificial Sequence
  Synthetic Polynucleotide
atggccttaccagtgaccgccttgctcctgccgctggccttgctgctccacgccgccaggccgcagatcgtgctgtctcagtctcctgccatcctgagcgcttccccaggcgagaaagtgaccatgacctgtagagccagcagcagcgtgtcctacatgcactggtatcagcagaagcccggcagcagccctaagccttggatctacgccaccagcaatctggcctctggcgtgccagccagattttctggctctggcagcggcaccagctacagcttcacaatcagcagagtggaagccgaggacgccgccacctactattgtcagcagtggaccttcaatcctcctaccttcggcggaggcacccggctggaaatcaaaagaacagtggctgctggcggaggcggaagtggaggcggaggatctggcggcggaggctctcaggcttatctgcaacagagcggagccgaactcgtcagacctggcgcttctgtgaagatgagctgcaaggccagcggctacaccttcaccagctataatatgcactgggtcaagcagacccctcggcagggactcgaatggatcggcggaatctatcccggcaacggcgacacctcctacaaccagaagttcaagggcaaagccacactgaccgtgggcaagagcagcagcaccgcctatatgcagctcagcagcctgaccagcgaggacagcgccgtgtacttctgcgccagatacgactacaactacgctatggactactggggccagggcaccagcgtgacagttagctctgccagcacgcgtggaatgaggactgaggatcttcccaaagctgtcgtctttctcgaaccccaatggtatcgggtgctcgaaaaagactctgtgacactgaaatgccaaggggcctactctcccgaggacaactccacacagtggtttcataatgagtccctcatcagctctcaggccagctcttatttcattgatgccgctacagtggacgactccggcgagtatcggtgtcagaccaatctgtctacactgtctgaccccgtgcagcttgaggtccacattggatggttgctcttgcaagccccacgctgggttttcaaagaggaagatccaatccatctgcggtgccacagctggaaaaacaccgctctccacaaagtcacatacctgcaaaatggcaaaggacgcaaatacttccatcacaattccgatttttacattccgaaggctaccctgaaagacagcggcagctatttctgccggggactcgtcggctccaagaatgtgtcctccgaaaccgtgaatatcacgattacccaaggactggctgtgcctacaatctctagcttctttccgcctggataccaagtctccttctgtcttgtgatggtcctcctgtttgctgtggacacaggactgtacttttccgtgaaaacgaacatccgcagctccacacgcgattggaaagatcacaagtttaaatggcgcaaagatccccaggacaagcgcgccaagagaagcggatctggcgtgaagcagaccctgaatttcgacctgctgaagctggctggcgacgtggaatccaacccaggcccttctagaggccatatgaccgagtacaagcccacggtgcgcctcgccacccgcgacgacgtccccagggccgtacgcaccctcgccgccgcgttcgccgactaccccgccacgcgccacaccgtcgatccggaccgccacatcgagcgggtcaccgagctgcaagaactcttcctcacgcgcgtcgggctcgacatcggcaaggtgtgggtcgcggacgacggcgccgcggtggcggtctggaccacgccggagagcgtcgaagcgggggcggtgttcgccgagatcggcccgcgcatggccgagttgagcggttcccggctggccgcgcagcaacagatggaaggcctcctggcgccgcaccggcccaaggagcccgcgtggttcctggccaccgtcggcgtctcgcccgaccaccagggcaagggtctgggcagcgccgtcgtgctccccggagtggaggcggccgagcgcgccggggtgcccgccttcctggagacctccgcgccccgcaacctccccttctacgagcggctcggcttcaccgtcaccgccgacgtcgaggtgcccgaaggaccgcgcacctggtgcatgacccgcaagcccggtgcctga

SEQ ID NO: 7663 - DNA, 2205 bp, Artificial Sequence
  Synthetic Polynucleotide
atggccttaccagtgaccgccttgctcctgccgctggccttgctgctccacgccgccaggccggacgtggtcatgacacagagcccttctagcctgtctgccagcgtgggcgacagagtgaccatcacctgtatggcctccgaggacatctacatccggctggcctggtatcagcagaagcctggaaacgcccctaagctgctgatctacgccgccacctctctggaaacaggcgtgccaagcagattttccggcagcggctctggcaccgatttcaccctgacaatatccagcctccagcctgaggacttcgccacctactactgccagcagtattggagcagcccctggacatttggcggaggcaccaaggtggaaatcaaaggcggaggcggaagtggaggcggaggatctggcggcggaggctctcaggttcagctgcaagagtctggccccggactggtcaagcctagccaaacactgagcctgacctgtaccgtgtccggctacagcatcaccagcgactacacctggaactggatcagacagcctcctggcaacggactggaatggatcggctacatcacctacagcggcagcaccagctacaaccccagcctgaaaagccgggtgctgatctccgtggacaccagcaagaatcaggtgtccctgaagttgagcagcgtgacagccgctgataccgccgtgtactactgtgccagactggggagaagatacacaatggactactggggccagggcaccaccgtgacagtttcttctacgcgtggaatgaggactgaggatcttcccaaagctgtcgtctttctcgaaccccaatggtatcgggtgctcgaaaaagactctgtgacactgaaatgccaaggggcctactctcccgaggacaactccacacagtggtttcataatgagtccctcatcagctctcaggccagctcttatttcattgatgccgctacagtggacgactccggcgagtatcggtgtcagaccaatctgtctacactgtctgaccccgtgcagcttgaggtccacattggatggttgctcttgcaagccccacgctgggttttcaaagaggaagatccaatccatctgcggtgccacagctggaaaaacaccgctctccacaaagtcacatacctgcaaaatggcaaaggacgcaaatacttccatcacaattccgatttttacattccgaaggctaccctgaaagacagcggcagctatttctgccggggactcgtcggctccaagaatgtgtcctccgaaaccgtgaatatcacgattacccaaggactggctgtgcctacaatctctagcttctttccgcctggataccaagtctccttctgtcttgtgatggtcctcctgtttgctgtggacacaggactgtacttttccgtgaaaacgaacatccgcagctccacacgcgattggaaagatcacaagtttaaatggcgcaaagatccccaggacaagcgcgccaagagaagcggatctggcgtgaagcagaccctgaatttcgacctgctgaagctggctggcgacgtggaatccaacccaggcccttctagaggccatatgaccgagtacaagcccacggtgcgcctcgccacccgcgacgacgtccccagggccgtacgcaccctcgccgccgcgttcgccgactaccccgccacgcgccacaccgtcgatccggaccgccacatcgagcgggtcaccgagctgcaagaactcttcctcacgcgcgtcgggctcgacatcggcaaggtgtgggtcgcggacgacggcgccgcggtggcggtctggaccacgccggagagcgtcgaagcgggggcggtgttcgccgagatcggcccgcgcatggccgagttgagcggttcccggctggccgcgcagcaacagatggaaggcctcctggcgccgcaccggcccaaggagcccgcgtggttcctggccaccgtcggcgtctcgcccgaccaccagggcaagggtctgggcagcgccgtcgtgctccccggagtggaggcggccgagcgcgccggggtgcccgccttcctggagacctccgcgccccgcaacctccccttctacgagcggctcggcttcaccgtcaccgccgacgtcgaggtgcccgaaggaccgcgcacctggtgcatgacccgcaagcccggtgcctga

SEQ ID NO: 7664 - DNA, 2217 bp, Artificial Sequence
  Synthetic Polynucleotide
atggccttaccagtgaccgccttgctcctgccgctggccttgctgctccacgccgccaggccggacatccagatgacccagagccctagctcactgagcgccagcgtgggcgacagggtgaccattacctgctccgccagccaggacatcagcaactacctgaactggtaccagcagaagcccggcaaggcccccaagctgctgatctactacacctccaacctgcactccggcgtgcccagcaggttcagcggaagcggcagcggcaccgatttcaccctgaccatctccagcctgcagcccgaggacttcgccacctactactgccagcagtacaggaagctcccctggactttcggccagggcaccaaactggagatcaagcgtggcggaggcggaagtggaggcggaggatctggcggcggaggctctcaggtgcagctggtccagagcggcgccgaagtgaagaagcccggcagctccgtgaaagtgagctgcaaggccagcggcggcaccttcagcaactactggatgcactgggtgaggcaggcccccggacagggcctggagtggatgggcgccacctacaggggccacagcgacacctactacaaccagaagttcaagggccgggtgaccatcaccgccgacaagagcaccagcaccgcctacatggaactgagcagcctcaggagcgaggacaccgctgtgtattactgcgccaggggcgccatctacgacggctacgacgtgctggacaactggggccagggcacactggtgaccgtgtccagcacgcgtggaatgaggactgaggatcttcccaaagctgtcgtctttctcgaaccccaatggtatcgggtgctcgaaaaagactctgtgacactgaaatgccaaggggcctactctcccgaggacaactccacacagtggtttcataatgagtccctcatcagctctcaggccagctcttatttcattgatgccgctacagtggacgactccggcgagtatcggtgtcagaccaatctgtctacactgtctgaccccgtgcagcttgaggtccacattggatggttgctcttgcaagccccacgctgggttttcaaagaggaagatccaatccatctgcggtgccacagctggaaaaacaccgctctccacaaagtcacatacctgcaaaatggcaaaggacgcaaatacttccatcacaattccgatttttacattccgaaggctaccctgaaagacagcggcagctatttctgccggggactcgtcggctccaagaatgtgtcctccgaaaccgtgaatatcacgattacccaaggactggctgtgcctacaatctctagcttctttccgcctggataccaagtctccttctgtcttgtgatggtcctcctgtttgctgtggacacaggactgtacttttccgtgaaaacgaacatccgcagctccacacgcgattggaaagatcacaagtttaaatggcgcaaagatccccaggacaagcgcgccaagagaagcggatctggcgtgaagcagaccctgaatttcgacctgctgaagctggctggcgacgtggaatccaacccaggcccttctagaggccatatgaccgagtacaagcccacggtgcgcctcgccacccgcgacgacgtccccagggccgtacgcaccctcgccgccgcgttcgccgactaccccgccacgcgccacaccgtcgatccggaccgccacatcgagcgggtcaccgagctgcaagaactcttcctcacgcgcgtcgggctcgacatcggcaaggtgtgggtcgcggacgacggcgccgcggtggcggtctggaccacgccggagagcgtcgaagcgggggcggtgttcgccgagatcggcccgcgcatggccgagttgagcggttcccggctggccgcgcagcaacagatggaaggcctcctggcgccgcaccggcccaaggagcccgcgtggttcctggccaccgtcggcgtctcgcccgaccaccagggcaagggtctgggcagcgccgtcgtgctccccggagtggaggcggccgagcgcgccggggtgcccgccttcctggagacctccgcgccccgcaacctccccttctacgagcggctcggcttcaccgtcaccgccgacgtcgaggtgcccgaaggaccgcgcacctggtgcatgacccgcaagcccggtgcctga

SEQ ID NO: 7665 - DNA, 2220 bp, Artificial Sequence
  Synthetic Polynucleotide
atggccttaccagtgaccgccttgctcctgccgctggccttgctgctccacgccgccaggccggacatccagatgacccagaccacaagcagcctgtctgccagcctgggcgacagagtgaccatctcttgtagagccagccaggacatcagcaactacctgaactggtatcagcagaaacccgacggcaccgtgaagctgctgatctactacaccagcatcctgcacagcggcgtgcccagcagattttctggctctggcagcggcaccgactacagcctgaccatcagcaatctggaacaagaggacttcgctacctacttctgccagcaaggcaacaccctgccttggacatttggcggaggcaccaagctggaaatcaaagctggcggaggcggaagtggaggcggaggatctggcggcggaggctctgaagtgcaactggttgaatctggcggcggactggttaagcctggcggatctctgaagctgagctgtgccgcctctggcttcgccttcagcatctacgatatgagctgggtccgacagacccctgagaagagactggaatgggtcgcctacatctctagcggcggagggacctactatcccgacacagtgaagggcagattcaccatctccagagacaacgccaagaacaccctgtacctccagatgagcagcctgaagtccgaggacaccgccatgtactactgcgccagacacagcggctatggcacacattggggagtgctgtttgcctactggggccagggaacactggtcacagtttctgctacgcgtggaatgaggactgaggatcttcccaaagctgtcgtctttctcgaaccccaatggtatcgggtgctcgaaaaagactctgtgacactgaaatgccaaggggcctactctcccgaggacaactccacacagtggtttcataatgagtccctcatcagctctcaggccagctcttatttcattgatgccgctacagtggacgactccggcgagtatcggtgtcagaccaatctgtctacactgtctgaccccgtgcagcttgaggtccacattggatggttgctcttgcaagccccacgctgggttttcaaagaggaagatccaatccatctgcggtgccacagctggaaaaacaccgctctccacaaagtcacatacctgcaaaatggcaaaggacgcaaatacttccatcacaattccgatttttacattccgaaggctaccctgaaagacagcggcagctatttctgccggggactcgtcggctccaagaatgtgtcctccgaaaccgtgaatatcacgattacccaaggactggctgtgcctacaatctctagcttctttccgcctggataccaagtctccttctgtcttgtgatggtcctcctgtttgctgtggacacaggactgtacttttccgtgaaaacgaacatccgcagctccacacgcgattggaaagatcacaagtttaaatggcgcaaagatccccaggacaagcgcgccaagagaagcggatctggcgtgaagcagaccctgaatttcgacctgctgaagctggctggcgacgtggaatccaacccaggcccttctagaggccatatgaccgagtacaagcccacggtgcgcctcgccacccgcgacgacgtccccagggccgtacgcaccctcgccgccgcgttcgccgactaccccgccacgcgccacaccgtcgatccggaccgccacatcgagcgggtcaccgagctgcaagaactcttcctcacgcgcgtcgggctcgacatcggcaaggtgtgggtcgcggacgacggcgccgcggtggcggtctggaccacgccggagagcgtcgaagcgggggcggtgttcgccgagatcggcccgcgcatggccgagttgagcggttcccggctggccgcgcagcaacagatggaaggcctcctggcgccgcaccggcccaaggagcccgcgtggttcctggccaccgtcggcgtctcgcccgaccaccagggcaagggtctgggcagcgccgtcgtgctccccggagtggaggcggccgagcgcgccggggtgcccgccttcctggagacctccgcgccccgcaacctccccttctacgagcggctcggcttcaccgtcaccgccgacgtcgaggtgcccgaaggaccgcgcacctggtgcatgacccgcaagcccggtgcctga

SEQ ID NO: 7666 - DNA, 2229 bp, Artificial Sequence
  Synthetic Polynucleotide
atggccttaccagtgaccgccttgctcctgccgctggccttgctgctccacgccgccaggccggacatccagatgacccagagccccagcagcctgtctgccagcgtgggcgacagagtgaccatcacctgtcggagcagccagagcatcgtgcactccgtgggcaacaccttcctggaatggtatcagcagaagcccggcaaggcccccaagctgctgatctacaaggtgtccaacagattcagcggcgtgcccagcaggtttagcggctctggcagcggcaccgacttcaccctgaccatctctagcctccagcccgaggacttcgccacctactactgttttcaaggcagccagttcccctacaccttcggccagggaacaaaggtggaaatcaagcggggcggaggcggaagtggaggcggaggatctggcggcggaggctctgaagtgcaactggtggaaagcggaggcggcctggtgcagcctggcggatctctgagactgagctgtgccgccagcggctacgagttcagccggtcctggatgaactgggtgcgccaggcccctggcaagggactggaatgggtgggaagaatctaccccggcgacggcgacaccaactacagcggcaagttcaagggccggttcaccatcagcgccgacaccagcaagaacaccgcctacctccagatgaacagcctgcgggccgaggataccgccgtgtactactgtgccagagatggcagctcctgggactggtacttcgacgtgtggggacagggaacccttgtgaccgtgtccagcacgcgtggaatgaggactgaggatcttcccaaagctgtcgtctttctcgaaccccaatggtatcgggtgctcgaaaaagactctgtgacactgaaatgccaaggggcctactctcccgaggacaactccacacagtggtttcataatgagtccctcatcagctctcaggccagctcttatttcattgatgccgctacagtggacgactccggcgagtatcggtgtcagaccaatctgtctacactgtctgaccccgtgcagcttgaggtccacattggatggttgctcttgcaagccccacgctgggttttcaaagaggaagatccaatccatctgcggtgccacagctggaaaaacaccgctctccacaaagtcacatacctgcaaaatggcaaaggacgcaaatacttccatcacaattccgatttttacattccgaaggctaccctgaaagacagcggcagctatttctgccggggactcgtcggctccaagaatgtgtcctccgaaaccgtgaatatcacgattacccaaggactggctgtgcctacaatctctagcttctttccgcctggataccaagtctccttctgtcttgtgatggtcctcctgtttgctgtggacacaggactgtacttttccgtgaaaacgaacatccgcagctccacacgcgattggaaagatcacaagtttaaatggcgcaaagatccccaggacaagcgcgccaagagaagcggatctggcgtgaagcagaccctgaatttcgacctgctgaagctggctggcgacgtggaatccaacccaggcccttctagaggccatatgaccgagtacaagcccacggtgcgcctcgccacccgcgacgacgtccccagggccgtacgcaccctcgccgccgcgttcgccgactaccccgccacgcgccacaccgtcgatccggaccgccacatcgagcgggtcaccgagctgcaagaactcttcctcacgcgcgtcgggctcgacatcggcaaggtgtgggtcgcggacgacggcgccgcggtggcggtctggaccacgccggagagcgtcgaagcgggggcggtgttcgccgagatcggcccgcgcatggccgagttgagcggttcccggctggccgcgcagcaacagatggaaggcctcctggcgccgcaccggcccaaggagcccgcgtggttcctggccaccgtcggcgtctcgcccgaccaccagggcaagggtctgggcagcgccgtcgtgctccccggagtggaggcggccgagcgcgccggggtgcccgccttcctggagacctccgcgccccgcaacctccccttctacgagcggctcggcttcaccgtcaccgccgacgtcgaggtgcccgaaggaccgcgcacctggtgcatgacccgcaagcccggtgcctga

SEQ ID NO: 7667 - DNA, 2220 bp, Artificial Sequence
  Synthetic Polynucleotide
atggccttaccagtgaccgccttgctcctgccgctggccttgctgctccacgccgccaggccggacatccagatgacacagagccctagcagcctgtctgccagcgtgggagacagagtgaccatcacctgtagagccagccaggacatcagcaactacctgaactggtatcagcagaagcccggcaaggcccctaagctgctgatctactacaccagcatcctgcacagcggcgtgcccagcagattttctggctctggcagcggcaccgactacaccctgacaatatctagcctccagcctgaggacttcgccacctactattgccagcagggcaacaccctgccttggacatttggccagggcaccaaggtggaaatcaaagctggcggaggcggaagtggaggcggaggatctggcggcggaggctctgaagttcagctggttgaatctggcggcggactggttcaacctggcggatctctgagactgagctgtgccgcctctggcttcgccttcagcatctacgatatgagctgggtccgacaggcccctggcaaaggacttgagtgggtcgcctacatctcttccggcggaggaacctactatcccgacaccgtgaagggcagattcaccatcagcgtggacaagagcaagaacaccgcctacctccagatgaactccctgagagccgaggacaccgccgtgtactattgtgccagacacagcggctacggcacacactggggagtgctgtttgcctattggggccagggaaccctggtcaccgttagctctacgcgtggaatgaggactgaggatcttcccaaagctgtcgtctttctcgaaccccaatggtatcgggtgctcgaaaaagactctgtgacactgaaatgccaaggggcctactctcccgaggacaactccacacagtggtttcataatgagtccctcatcagctctcaggccagctcttatttcattgatgccgctacagtggacgactccggcgagtatcggtgtcagaccaatctgtctacactgtctgaccccgtgcagcttgaggtccacattggatggttgctcttgcaagccccacgctgggttttcaaagaggaagatccaatccatctgcggtgccacagctggaaaaacaccgctctccacaaagtcacatacctgcaaaatggcaaaggacgcaaatacttccatcacaattccgatttttacattccgaaggctaccctgaaagacagcggcagctatttctgccggggactcgtcggctccaagaatgtgtcctccgaaaccgtgaatatcacgattacccaaggactggctgtgcctacaatctctagcttctttccgcctggataccaagtctccttctgtcttgtgatggtcctcctgtttgctgtggacacaggactgtacttttccgtgaaaacgaacatccgcagctccacacgcgattggaaagatcacaagtttaaatggcgcaaagatccccaggacaagcgcgccaagagaagcggatctggcgtgaagcagaccctgaatttcgacctgctgaagctggctggcgacgtggaatccaacccaggcccttctagaggccatatgaccgagtacaagcccacggtgcgcctcgccacccgcgacgacgtccccagggccgtacgcaccctcgccgccgcgttcgccgactaccccgccacgcgccacaccgtcgatccggaccgccacatcgagcgggtcaccgagctgcaagaactcttcctcacgcgcgtcgggctcgacatcggcaaggtgtgggtcgcggacgacggcgccgcggtggcggtctggaccacgccggagagcgtcgaagcgggggcggtgttcgccgagatcggcccgcgcatggccgagttgagcggttcccggctggccgcgcagcaacagatggaaggcctcctggcgccgcaccggcccaaggagcccgcgtggttcctggccaccgtcggcgtctcgcccgaccaccagggcaagggtctgggcagcgccgtcgtgctccccggagtggaggcggccgagcgcgccggggtgcccgccttcctggagacctccgcgccccgcaacctccccttctacgagcggctcggcttcaccgtcaccgccgacgtcgaggtgcccgaaggaccgcgcacctggtgcatgacccgcaagcccggtgcctga

SEQ ID NO: 7668 - DNA, 2214 bp, Artificial Sequence
  Synthetic Polynucleotide
atggccttaccagtgaccgccttgctcctgccgctggccttgctgctccacgccgccaggccggacgagatcgtgctgacacagagccccgccaccctgtcactgtctccaggcgaaagagccaccctgagctgtagcgccagcagcagcgtgtcctacatgcactggtatcagcagaagcccggccaggcccccagactgctgatctacgataccagcaagctggcctccggcatccccgccagattttctggcagcggctccggcaccgacttcaccctgacaatcagcagcctggaacccgaggacgtggccgtgtactactgttttcaaggcagcgtgtaccccttcaccttcggccagggcaccaagctggaaatcaagagaggtggcggtggctcgggcggtggtgggtcgggtggcggcggatctcaggtgcagctccaggaatctggccctggcctcgtgaagcctagccagaccctgagcctgacctgtaccgtgtctggcggcagcatcagcacaagcggcatgggcgtgggctggatcagacagcaccctggcaagggcctggaatggatcggccacatttggtgggacgacgacaagcggtacaaccccgccctgaagtccagagtgaccatcagcgtggacaccagcaagaaccagttcagcctgaagctgagcagcgtgacagccgccgataccgccgtgtattattgcgcccggatggaactgtggtcctactacttcgactactggggccagggaaccctcgtgaccgtgtctagtacgcgtggaatgaggactgaggatcttcccaaagctgtcgtctttctcgaaccccaatggtatcgggtgctcgaaaaagactctgtgacactgaaatgccaaggggcctactctcccgaggacaactccacacagtggtttcataatgagtccctcatcagctctcaggccagctcttatttcattgatgccgctacagtggacgactccggcgagtatcggtgtcagaccaatctgtctacactgtctgaccccgtgcagcttgaggtccacattggatggttgctcttgcaagccccacgctgggttttcaaagaggaagatccaatccatctgcggtgccacagctggaaaaacaccgctctccacaaagtcacatacctgcaaaatggcaaaggacgcaaatacttccatcacaattccgatttttacattccgaaggctaccctgaaagacagcggcagctatttctgccggggactcgtcggctccaagaatgtgtcctccgaaaccgtgaatatcacgattacccaaggactggctgtgcctacaatctctagcttctttccgcctggataccaagtctccttctgtcttgtgatggtcctcctgtttgctgtggacacaggactgtacttttccgtgaaaacgaacatccgcagctccacacgcgattggaaagatcacaagtttaaatggcgcaaagatccccaggacaagcgcgccaagagaagcggatctggcgtgaagcagaccctgaatttcgacctgctgaagctggctggcgacgtggaatccaacccaggcccttctagaggccatatgaccgagtacaagcccacggtgcgcctcgccacccgcgacgacgtccccagggccgtacgcaccctcgccgccgcgttcgccgactaccccgccacgcgccacaccgtcgatccggaccgccacatcgagcgggtcaccgagctgcaagaactcttcctcacgcgcgtcgggctcgacatcggcaaggtgtgggtcgcggacgacggcgccgcggtggcggtctggaccacgccggagagcgtcgaagcgggggcggtgttcgccgagatcggcccgcgcatggccgagttgagcggttcccggctggccgcgcagcaacagatggaaggcctcctggcgccgcaccggcccaaggagcccgcgtggttcctggccaccgtcggcgtctcgcccgaccaccagggcaagggtctgggcagcgccgtcgtgctccccggagtggaggcggccgagcgcgccggggtgcccgccttcctggagacctccgcgccccgcaacctccccttctacgagcggctcggcttcaccgtcaccgccgacgtcgaggtgcccgaaggaccgcgcacctggtgcatgacccgcaagcccggtgcctga

SEQ ID NO: 7669 - DNA, 1842 bp, Artificial Sequence
  Synthetic Polynucleotide
atggccttaccagtgaccgccttgctcctgccgctggccttgctgctccacgccgccaggccgttcgaagtgcagctggttgaatctggcggaggactggttcaggctggcggatctctgagactgtcttgtgccgccagcggcagaacctttagcatgggctggtttagacaggcccctggcaaagagagagagttcgtcgccgccatcacatactctggcggcagcccttactacgccgactctgtgaagggcagattcaccatcagccgggacaacgccaagaacaccgtgtacctccagatgaacagcctgaagcctgaggacaccgccgtgtactactgcgccgccaatccaacatacggcagcgactggaacgccgagaattggggccagggaacccaagtgacagtgtctagcacgcgtggaatgaggactgaggatcttcccaaagctgtcgtctttctcgaaccccaatggtatcgggtgctcgaaaaagactctgtgacactgaaatgccaaggggcctactctcccgaggacaactccacacagtggtttcataatgagtccctcatcagctctcaggccagctcttatttcattgatgccgctacagtggacgactccggcgagtatcggtgtcagaccaatctgtctacactgtctgaccccgtgcagcttgaggtccacattggatggttgctcttgcaagccccacgctgggttttcaaagaggaagatccaatccatctgcggtgccacagctggaaaaacaccgctctccacaaagtcacatacctgcaaaatggcaaaggacgcaaatacttccatcacaattccgatttttacattccgaaggctaccctgaaagacagcggcagctatttctgccggggactcgtcggctccaagaatgtgtcctccgaaaccgtgaatatcacgattacccaaggactggctgtgcctacaatctctagcttctttccgcctggataccaagtctccttctgtcttgtgatggtcctcctgtttgctgtggacacaggactgtacttttccgtgaaaacgaacatccgcagctccacacgcgattggaaagatcacaagtttaaatggcgcaaagatccccaggacaagcgcgccaagagaagcggatctggcgtgaagcagaccctgaatttcgacctgctgaagctggctggcgacgtggaatccaacccaggcccttctagaggccatatgaccgagtacaagcccacggtgcgcctcgccacccgcgacgacgtccccagggccgtacgcaccctcgccgccgcgttcgccgactaccccgccacgcgccacaccgtcgatccggaccgccacatcgagcgggtcaccgagctgcaagaactcttcctcacgcgcgtcgggctcgacatcggcaaggtgtgggtcgcggacgacggcgccgcggtggcggtctggaccacgccggagagcgtcgaagcgggggcggtgttcgccgagatcggcccgcgcatggccgagttgagcggttcccggctggccgcgcagcaacagatggaaggcctcctggcgccgcaccggcccaaggagcccgcgtggttcctggccaccgtcggcgtctcgcccgaccaccagggcaagggtctgggcagcgccgtcgtgctccccggagtggaggcggccgagcgcgccggggtgcccgccttcctggagacctccgcgccccgcaacctccccttctacgagcggctcggcttcaccgtcaccgccgacgtcgaggtgcccgaaggaccgcgcacctggtgcatgacccgcaagcccggtgcctga

SEQ ID NO: 7670 - DNA, 1848 bp, Artificial Sequence
  Synthetic Polynucleotide
atggccttaccagtgaccgccttgctcctgccgctggccttgctgctccacgccgccaggccgttcgaacaagtcaaactggaagaaagcggtggcggcctggtgcaacctggcgaatctctgagactgagctgtagcgccagcggctccatcttcaaggtgttcagagtgttcgccatgagctggtacaggcaaggccctggcaagcagagagagctggtcgcctctatcagcagcggcgagacaaccacatacgccgaatctgtgaaaggccggttcaccatcagccgggataatgccaagaataccgcctatctccagatggactccctgaagcctgaagatacagctgtgtactactgcaacgccgaccataccttcaccggcgatttttggggccagggaacccaagtgaccgtgtctagtacgcgtggaatgaggactgaggatcttcccaaagctgtcgtctttctcgaaccccaatggtatcgggtgctcgaaaaagactctgtgacactgaaatgccaaggggcctactctcccgaggacaactccacacagtggtttcataatgagtccctcatcagctctcaggccagctcttatttcattgatgccgctacagtggacgactccggcgagtatcggtgtcagaccaatctgtctacactgtctgaccccgtgcagcttgaggtccacattggatggttgctcttgcaagccccacgctgggttttcaaagaggaagatccaatccatctgcggtgccacagctggaaaaacaccgctctccacaaagtcacatacctgcaaaatggcaaaggacgcaaatacttccatcacaattccgatttttacattccgaaggctaccctgaaagacagcggcagctatttctgccggggactcgtcggctccaagaatgtgtcctccgaaaccgtgaatatcacgattacccaaggactggctgtgcctacaatctctagcttctttccgcctggataccaagtctccttctgtcttgtgatggtcctcctgtttgctgtggacacaggactgtacttttccgtgaaaacgaacatccgcagctccacacgcgattggaaagatcacaagtttaaatggcgcaaagatccccaggacaagcgcgccaagagaagcggatctggcgtgaagcagaccctgaatttcgacctgctgaagctggctggcgacgtggaatccaacccaggcccttctagaggccatatgaccgagtacaagcccacggtgcgcctcgccacccgcgacgacgtccccagggccgtacgcaccctcgccgccgcgttcgccgactaccccgccacgcgccacaccgtcgatccggaccgccacatcgagcgggtcaccgagctgcaagaactcttcctcacgcgcgtcgggctcgacatcggcaaggtgtgggtcgcggacgacggcgccgcggtggcggtctggaccacgccggagagcgtcgaagcgggggcggtgttcgccgagatcggcccgcgcatggccgagttgagcggttcccggctggccgcgcagcaacagatggaaggcctcctggcgccgcaccggcccaaggagcccgcgtggttcctggccaccgtcggcgtctcgcccgaccaccagggcaagggtctgggcagcgccgtcgtgctccccggagtggaggcggccgagcgcgccggggtgcccgccttcctggagacctccgcgccccgcaacctccccttctacgagcggctcggcttcaccgtcaccgccgacgtcgaggtgcccgaaggaccgcgcacctggtgcatgacccgcaagcccggtgcctga

SEQ ID NO: 7671 - DNA, 1848 bp, Artificial Sequence
  Synthetic Polynucleotide
atggccttaccagtgaccgccttgctcctgccgctggccttgctgctccacgccgccaggccgttcgaacaagtcaaactggaagaaagcggtggcggcctggtgcaacctggcgaatctctgagactgagctgtagcgccagcggctccatcttcaaggtgttcagagtgttcgccatgagctggtacaggcaaggccctggcaagcagagagagctggtcgccgagatcagcagcggcgagacaaccacatacgccgactctgtgaaaggccggttcaccatcagccgggataatgccaagaataccgcctatctccagatggactccctgaagcctgaagatacagctgtgtactactgcaacgccgaccataccttcaccggcgatttttggggccagggaacccaagtgaccgtgtctagtacgcgtggaatgaggactgaggatcttcccaaagctgtcgtctttctcgaaccccaatggtatcgggtgctcgaaaaagactctgtgacactgaaatgccaaggggcctactctcccgaggacaactccacacagtggtttcataatgagtccctcatcagctctcaggccagctcttatttcattgatgccgctacagtggacgactccggcgagtatcggtgtcagaccaatctgtctacactgtctgaccccgtgcagcttgaggtccacattggatggttgctcttgcaagccccacgctgggttttcaaagaggaagatccaatccatctgcggtgccacagctggaaaaacaccgctctccacaaagtcacatacctgcaaaatggcaaaggacgcaaatacttccatcacaattccgatttttacattccgaaggctaccctgaaagacagcggcagctatttctgccggggactcgtcggctccaagaatgtgtcctccgaaaccgtgaatatcacgattacccaaggactggctgtgcctacaatctctagcttctttccgcctggataccaagtctccttctgtcttgtgatggtcctcctgtttgctgtggacacaggactgtacttttccgtgaaaacgaacatccgcagctccacacgcgattggaaagatcacaagtttaaatggcgcaaagatccccaggacaagcgcgccaagagaagcggatctggcgtgaagcagaccctgaatttcgacctgctgaagctggctggcgacgtggaatccaacccaggcccttctagaggccatatgaccgagtacaagcccacggtgcgcctcgccacccgcgacgacgtccccagggccgtacgcaccctcgccgccgcgttcgccgactaccccgccacgcgccacaccgtcgatccggaccgccacatcgagcgggtcaccgagctgcaagaactcttcctcacgcgcgtcgggctcgacatcggcaaggtgtgggtcgcggacgacggcgccgcggtggcggtctggaccacgccggagagcgtcgaagcgggggcggtgttcgccgagatcggcccgcgcatggccgagttgagcggttcccggctggccgcgcagcaacagatggaaggcctcctggcgccgcaccggcccaaggagcccgcgtggttcctggccaccgtcggcgtctcgcccgaccaccagggcaagggtctgggcagcgccgtcgtgctccccggagtggaggcggccgagcgcgccggggtgcccgccttcctggagacctccgcgccccgcaacctccccttctacgagcggctcggcttcaccgtcaccgccgacgtcgaggtgcccgaaggaccgcgcacctggtgcatgacccgcaagcccggtgcctga

SEQ ID NO: 7672 - DNA, 1842 bp, Artificial Sequence
  Synthetic Polynucleotide
atggccttaccagtgaccgccttgctcctgccgctggccttgctgctccacgccgccaggccgttcgaagtgcaactggttgaatccggtggcggcctggtgcaagcaggcggatctctcagacttagctgtgccgcctccggcagaaccttcacaatgggatggtttaggcaggctccagggaaagagagagagttcgtcgccgccatctctctgtctcccacactggcctactacgccgactctgtgaaaggccggttcaccatctccagagataatgccaagaacaccgtggtgctgcaaatgaactctctgaaacccgaggatacagccctgtactattgtgccgctgaccggaagtccgtgatgagcatcagacccgattactggggacagggcacacaagtcacagtgtcctctacgcgtggaatgaggactgaggatcttcccaaagctgtcgtctttctcgaaccccaatggtatcgggtgctcgaaaaagactctgtgacactgaaatgccaaggggcctactctcccgaggacaactccacacagtggtttcataatgagtccctcatcagctctcaggccagctcttatttcattgatgccgctacagtggacgactccggcgagtatcggtgtcagaccaatctgtctacactgtctgaccccgtgcagcttgaggtccacattggatggttgctcttgcaagccccacgctgggttttcaaagaggaagatccaatccatctgcggtgccacagctggaaaaacaccgctctccacaaagtcacatacctgcaaaatggcaaaggacgcaaatacttccatcacaattccgatttttacattccgaaggctaccctgaaagacagcggcagctatttctgccggggactcgtcggctccaagaatgtgtcctccgaaaccgtgaatatcacgattacccaaggactggctgtgcctacaatctctagcttctttccgcctggataccaagtctccttctgtcttgtgatggtcctcctgtttgctgtggacacaggactgtacttttccgtgaaaacgaacatccgcagctccacacgcgattggaaagatcacaagtttaaatggcgcaaagatccccaggacaagcgcgccaagagaagcggatctggcgtgaagcagaccctgaatttcgacctgctgaagctggctggcgacgtggaatccaacccaggcccttctagaggccatatgaccgagtacaagcccacggtgcgcctcgccacccgcgacgacgtccccagggccgtacgcaccctcgccgccgcgttcgccgactaccccgccacgcgccacaccgtcgatccggaccgccacatcgagcgggtcaccgagctgcaagaactcttcctcacgcgcgtcgggctcgacatcggcaaggtgtgggtcgcggacgacggcgccgcggtggcggtctggaccacgccggagagcgtcgaagcgggggcggtgttcgccgagatcggcccgcgcatggccgagttgagcggttcccggctggccgcgcagcaacagatggaaggcctcctggcgccgcaccggcccaaggagcccgcgtggttcctggccaccgtcggcgtctcgcccgaccaccagggcaagggtctgggcagcgccgtcgtgctccccggagtggaggcggccgagcgcgccggggtgcccgccttcctggagacctccgcgccccgcaacctccccttctacgagcggctcggcttcaccgtcaccgccgacgtcgaggtgcccgaaggaccgcgcacctggtgcatgacccgcaagcccggtgcctga

SEQ ID NO: 7673 - DNA, 2220 bp, Artificial Sequence
  Synthetic Polynucleotide
atggccttaccagtgaccgccttgctcctgccgctggccttgctgctccacgccgccaggccggacatccagctgacacagagccctgatagcctggccgtgtctctgggagagagagccaccatcaactgcaagagcagccagagcgtgctgtactccagcatcaacaagaactacctggcctggtatcagcagaagcccggccagcctcctaagctgctgatctactgggccagcaccagagaaagcggcgtgcccgatagattttctggcagcggctctggcaccgacttcaccctgacaattagcagcctccaggccgaggatgtggccgtgtactactgccagcagtattacagcaccccttacaccttcggccagggcaccaaggtggaaatcaaaggcggaggcggaagtggaggcggaggatctggcggcggaggctctcaaatgcagctggtgcagagcggcaccgaagtgaagaagcctggcgagagcctgaagatcagctgcaaaggctccggctacggcttcatcacctactggatcggctgggtccgacagatgcctggcaaaggactggaatggatgggcatcatctaccccggcgacagcgagacaagatacagccctagcttccagggccaagtgaccatcagcgccgacaagagcatcaataccgcctacctccagtggtccagcctgaaggcttctgacaccgccatctactactgtgccggcggaagcggcatcagcaccccaatggatgtttggggccagggaaccaccgtgacagttacgcgtggaatgaggactgaggatcttcccaaagctgtcgtctttctcgaaccccaatggtatcgggtgctcgaaaaagactctgtgacactgaaatgccaaggggcctactctcccgaggacaactccacacagtggtttcataatgagtccctcatcagctctcaggccagctcttatttcattgatgccgctacagtggacgactccggcgagtatcggtgtcagaccaatctgtctacactgtctgaccccgtgcagcttgaggtccacattggatggttgctcttgcaagccccacgctgggttttcaaagaggaagatccaatccatctgcggtgccacagctggaaaaacaccgctctccacaaagtcacatacctgcaaaatggcaaaggacgcaaatacttccatcacaattccgatttttacattccgaaggctaccctgaaagacagcggcagctatttctgccggggactcgtcggctccaagaatgtgtcctccgaaaccgtgaatatcacgattacccaaggactggctgtgcctacaatctctagcttctttccgcctggataccaagtctccttctgtcttgtgatggtcctcctgtttgctgtggacacaggactgtacttttccgtgaaaacgaacatccgcagctccacacgcgattggaaagatcacaagtttaaatggcgcaaagatccccaggacaagcgcgccaagagaagcggatctggcgtgaagcagaccctgaatttcgacctgctgaagctggctggcgacgtggaatccaacccaggcccttctagaggccatatgaccgagtacaagcccacggtgcgcctcgccacccgcgacgacgtccccagggccgtacgcaccctcgccgccgcgttcgccgactaccccgccacgcgccacaccgtcgatccggaccgccacatcgagcgggtcaccgagctgcaagaactcttcctcacgcgcgtcgggctcgacatcggcaaggtgtgggtcgcggacgacggcgccgcggtggcggtctggaccacgccggagagcgtcgaagcgggggcggtgttcgccgagatcggcccgcgcatggccgagttgagcggttcccggctggccgcgcagcaacagatggaaggcctcctggcgccgcaccggcccaaggagcccgcgtggttcctggccaccgtcggcgtctcgcccgaccaccagggcaagggtctgggcagcgccgtcgtgctccccggagtggaggcggccgagcgcgccggggtgcccgccttcctggagacctccgcgccccgcaacctccccttctacgagcggctcggcttcaccgtcaccgccgacgtcgaggtgcccgaaggaccgcgcacctggtgcatgacccgcaagcccggtgcctga

SEQ ID NO: 7674 - DNA, 2886 bp, Artificial Sequence
  Synthetic Polynucleotide
atggccttaccagtgaccgccttgctcctgccgctggccttgctgctccacgccgccaggccggacatccagatgacacagagccctagcagcctgtctgccagcgtgggagacagagtgaccatcacatgcaaggccagcgaccacatcaacaactggctggcctggtatcagcagaagcctggacaggcccctaagctgctgatctacggcgctaccacactggaaacaggcgtgcccagcagattttctggcagcggctctggcaccgactacaccctgacaatatccagcctccagcctgaggacttcgccacctactactgtcagcagagctggaacaccccttggacattcggccagggcaccaagctggaaatcaagagactcgagggacagcctaaggccaatcctaccgtgacactgttccctccaagcagcgaagaactccaggccaacaaggccacacttgtgtgcctgatctccgacttctaccctggggctgtgacagtggcttggaaggccgatggatctcctgtgaaagccggcgtggaaaccaccaagccatccaagcagagcaacaacaaatacgccgccagctcctacctgagcctgacacctgagcagtggaagtcccacagatcctacagctgccaagtgacccacgaaggcagcaccgtggaaaagacagtggcccctacagagtgcagcggatccattacccaaggactggctgtgcctacaatctctagcttctttccgcctggataccaagtctccttctgtcttgtgatggtcctcctgtttgctgtggacacaggactgtacttttccgtgaaaacgaacatccgcagctccacacgcgattggaaagatcacaagtttaaatggcgcaaagatccccaggacaagcgcgccaagagaagcggatctggcgtgaagcagaccctgaatttcgacctgctgaagctggctggcgacgtggaatccaacccaggccctactagtatggactggatttggcgcatccttttccttgtcggcgctgctaccggcgcgcattccttcgaacaagttcagcttcaacagcctggcgctgagctggtcaaacctggcgcttctgtgaagatgagctgcaaagccagcggctacgccttcagcagctactggatcaactggatgaagcagaaacccggccagggactcgaatggatcggccaaatctatcccggcgacggcgacaccaactacaacggcaagttcaagggcagagccacactgaccgccgatacctctagcagcacagcctacatgcagctgagcagcctgaccagcgaagatagcgccgtgtacttctgtgcccggtccatcacaacagtcgtgggctgcgctatggactattggggccagggaacaagcgtgaccgtgtctagtacgcgtgcctctacaaagggaccctccgtgtttcctctggctcccagcagcaagtctacaagcggaggaacagccgctctgggctgcctggtcaaggattactttcccgagcctgtgaccgtgtcctggaatagcggagcactgacaagcggcgtgcacacctttccagccgtgctgcaaagcagcggcctgtactctctgagcagcgtggtcacagtgcctagctctagcctgggcacccagacctacatctgcaatgtgaaccacaagcctagcaacaccaaggtggacaagagagtggaacccaagagctgtggtacccagagttttgggttgttggaccctaaattgtgctatctgttggacggaatcctgttcatttacggagtgatcctgaccgcattgttcctgcgggttaagttttccagatccgcagacgcacccgcttaccaacaagggcagaaccaactctacaatgaacttaatttggggcggagggaagagtacgacgttctggacaaaaggaggggacgagatcccgagatgggcggaaagcctcagcgaaggaagaatccgcaagaggggctttataacgaactccagaaagataaaatggcagaagcctatagtgagattgggatgaagggagaaaggaggaggggtaaaggtcacgatgggttgtaccaaggattgagcacagccactaaagatacctatgatgcgctccacatgcaggccctgccgccaagacgcgccaagagaagcggatctggcgtgaagcagaccctgaatttcgacctgctgaagctggctggcgacgtggaatccaacccaggcccttctagaggccatatgaccgagtacaagcccacggtgcgcctcgccacccgcgacgacgtccccagggccgtacgcaccctcgccgccgcgttcgccgactaccccgccacgcgccacaccgtcgatccggaccgccacatcgagcgggtcaccgagctgcaagaactcttcctcacgcgcgtcgggctcgacatcggcaaggtgtgggtcgcggacgacggcgccgcggtggcggtctggaccacgccggagagcgtcgaagcgggggcggtgttcgccgagatcggcccgcgcatggccgagttgagcggttcccggctggccgcgcagcaacagatggaaggcctcctggcgccgcaccggcccaaggagcccgcgtggttcctggccaccgtcggcgtctcgcccgaccaccagggcaagggtctgggcagcgccgtcgtgctccccggagtggaggcggccgagcgcgccggggtgcccgccttcctggagacctccgcgccccgcaacctccccttctacgagcggctcggcttcaccgtcaccgccgacgtcgaggtgcccgaaggaccgcgcacctggtgcatgacccgcaagcccggtgcctga

SEQ ID NO: 7675 - DNA, 3843 bp, Artificial Sequence
  Synthetic Polynucleotide
atggccttaccagtgaccgccttgctcctgccgctggccttgctgctccacgccgccaggccgctgcctgttctgacacagcctccatccgtgtctgtggcccctggaaagaccgccagaatcacatgcggcggcaacaacatcggcagcaagagcgtgcactggtatcagcagaagcctggacaggctcctgtgctggtggtgtacgacgacagcgatagacctagcggcatccccgagagattcagcggcagcaattccggcaataccgccacactgaccatcagcagagtggaagctggcgacgaggccgactactactgccaagtgtgggacagcagcagcgactacgtggtgtttggcggcggaacaaagctgacagtgcttggacagcctaaggccaatcctaccgtgacactgttccctccaagcagcgaagaactccaggccaacaaggccacacttgtgtgcctgatctccgacttctaccctggggctgtgacagtggcttggaaggccgatggatctcctgtgaaagccggcgtggaaaccaccaagccatccaagcagagcaacaacaaatacgccgccagctcctacctgagcctgacacctgagcagtggaagtcccacagatcctacagctgccaagtgacccacgaaggcagcaccgtggaaaagacagtggcccctacagagtgcagcggatcccagagcttcggcctgctggaccccaagctgagctacctgctggatggcatcctgttcatctacggcgtgatcctgaccgccctgttcctgtggcggcggaagcggaaagagaagcagtctgagacaagccccaaagagttcctgaccatctacgaggacgtgaaggacctgaaaacccggcggaaccacgaacaagagcagacctttcctggcggaggcagcaccatctacagcatgatccagagccagagcagcgcccctacaagccaagagcctgcctacacactgtactccctgatccagcctagcagaaagagcggcagccggaagagaaatcacagccccagcttcaacagcacgatctacgaagtgatcggcaagagccagccaaaggctcagaaccctgccagactgagccggaaagagctggaaaacttcgacgtgtacagcactagtagagtgaagttcagcagaagcgccgacgcccctgcctaccagcagggacagaaccaactgtacaacgagctgaacctgggcagacgggaagagtacgacgtgctggacaagcggagaggcagggaccctgagatgggcggaaagccccagcggagaaagaacccccaggaaggactgtataacgaactccagaaagacaagatggccgaagcctacagcgagatcggcatgaagggcgagcggagaagaggcaagggccacgatggcctgtaccagggcctgagcaccgccaccaaggacacctatgacgccctgcacatgcaggccctgcctccaagaagggccaagcgatctggatctggagcaacaaacttctcactactcaaacaagcaggtgacgtggaggagaatcccgggcctatggactggatttggcgcatccttttccttgtcggcgctgctaccggcgcgcattccttcgaagttcaactggtgcagagcggagccgaagtgaagaagccaggcgagagcctgaagattagctgcaaaggcagcggctacagcttcaccagctactggatcggctgggtccgacagatgcctggcaaaggactggaatggatgggcatcatctaccccggcgacagcgacaccagatacagccctagctttcagggccaagtgaccatctccgccgacaagagcatcagcacagcctacctccagtggtcctctctgaaggccagcgataccgccatgtactactgcgccagacaagtctggggatggcaaggcggcatgtaccccaggtctaactggtggtacaacctggactcttggggccagggcacactggtcacagtctcttctgcctctacaaagggaccctccgtgtttcctctggctcccagcagcaagtctacaagcggaggaacagccgctctgggctgcctggtcaaggattactttcccgagcctgtgaccgtgtcctggaatagcggagcactgacaagcggcgtgcacacctttccagccgtgctgcaaagcagcggcctgtactctctgagcagcgtggtcacagtgcctagctctagcctgggcacccagacctacatctgcaatgtgaaccacaagcctagcaacaccaaggtggacaagagagtggaacccaagagctgtggtacccagagttttgggttgttggaccctaaattgagctatctgttggacggaatcctgttcatttacggagtgatcctgaccgcattgttcctgtggcgacgcaagcgcaaagaaaagcaaagcgagacaagcccaaaagaatttctcactatatacgaggacgtgaaagatttgaagacgaggcggaatcatgagcaagagcagacatttcctggcgggggctctactatctactcaatgattcaatcccaaagctccgctccgacttcccaagagcccgcttacactctctactcactgatacagccttcaagaaaatcaggctctcggaaacggaatcattccccatccttcaatagtaccatctatgaagtaatcggtaagagtcaacctaaagctcaaaaccccgctcgcttgagccgcaaggagctggaaaacttcgatgtatatagctctagacgggttaagttttccagatccgcagacgcacccgcttaccaacaagggcagaaccaactctacaatgaacttaatttggggcggagggaagagtacgacgttctggacaaaaggaggggacgagatcccgagatgggcggaaagcctcagcgaaggaagaatccgcaagaggggctttataacgaactccagaaagataaaatggcagaagcctatagtgagattgggatgaagggagaaaggaggaggggtaaaggtcacgatgggttgtaccaaggattgagcacagccactaaagatacctatgatgcgctccacatgcaggccctgccgccaagacgcgccaagagaagcggatctggcgtgaagcagaccctgaatttcgacctgctgaagctggctggcgacgtggaatccaacccaggccctggccatatgaccgagtacaagcccacggtgcgcctcgccacccgcgacgacgtccccagggccgtacgcaccctcgccgccgcgttcgccgactaccccgccacgcgccacaccgtcgatccggaccgccacatcgagcgggtcaccgagctgcaagaactcttcctcacgcgcgtcgggctcgacatcggcaaggtgtgggtcgcggacgacggcgccgcggtggcggtctggaccacgccggagagcgtcgaagcgggggcggtgttcgccgagatcggcccgcgcatggccgagttgagcggttcccggctggccgcgcagcaacagatggaaggcctcctggcgccgcaccggcccaaggagcccgcgtggttcctggccaccgtcggcgtctcgcccgaccaccagggcaagggtctgggcagcgccgtcgtgctccccggagtggaggcggccgagcgcgccggggtgcccgccttcctggagacctccgcgccccgcaacctccccttctacgagcggctcggcttcaccgtcaccgccgacgtcgaggtgcccgaaggaccgcgcacctggtgcatgacccgcaagcccggtgcctga

SEQ ID NO: 7676 - DNA, 2217 bp, Artificial Sequence
  Synthetic Polynucleotide
atggccttaccagtgaccgccttgctcctgccgctggccttgctgctccacgccgccaggccggacatccagatgacacagagccctagcagcctgtctgccagcgtgggagacagagtgaccatcacatgcaaggccagcgaccacatcaacaactggctggcctggtatcagcagaagcctggacaggcccctaagctgctgatctacggcgctaccacactggaaacaggcgtgcccagcagattttctggcagcggctctggcaccgactacaccctgacaatatccagcctccagcctgaggacttcgccacctactactgtcagcagagctggaacaccccttggacattcggccagggcaccaagctggaaatcaagagaggcggaggcggaagtggaggcggaggatctggcggcggaggctctcaagttcagcttcaacagcctggcgctgagctggtcaaacctggcgcttctgtgaagatgagctgcaaagccagcggctacgccttcagcagctactggatcaactggatgaagcagaaacccggccagggactcgaatggatcggccaaatctatcccggcgacggcgacaccaactacaacggcaagttcaagggcagagccacactgaccgccgatacctctagcagcacagcctacatgcagctgagcagcctgaccagcgaagatagcgccgtgtacttctgtgcccggtccatcacaacagtcgtgggctgcgctatggactattggggccagggaacaagcgtgaccgtgtctagtacgcgtggaatgaggactgaggatcttcccaaagctgtcgtctttctcgaaccccaatggtatcgggtgctcgaaaaagactctgtgacactgaaatgccaaggggcctactctcccgaggacaactccacacagtggtttcataatgagtccctcatcagctctcaggccagctcttatttcattgatgccgctacagtggacgactccggcgagtatcggtgtcagaccaatctgtctacactgtctgaccccgtgcagcttgaggtccacattggatggttgctcttgcaagccccacgctgggttttcaaagaggaagatccaatccatctgcggtgccacagctggaaaaacaccgctctccacaaagtcacatacctgcaaaatggcaaaggacgcaaatacttccatcacaattccgatttttacattccgaaggctaccctgaaagacagcggcagctatttctgccggggactcgtcggctccaagaatgtgtcctccgaaaccgtgaatatcacgattacccaaggactggctgtgcctacaatctctagcttctttccgcctggataccaagtctccttctgtcttgtgatggtcctcctgtttgctgtggacacaggactgtacttttccgtgaaaacgaacatccgcagctccacacgcgattggaaagatcacaagtttaaatggcgcaaagatccccaggacaagcgcgccaagagaagcggatctggcgtgaagcagaccctgaatttcgacctgctgaagctggctggcgacgtggaatccaacccaggcccttctagaggccatatgaccgagtacaagcccacggtgcgcctcgccacccgcgacgacgtccccagggccgtacgcaccctcgccgccgcgttcgccgactaccccgccacgcgccacaccgtcgatccggaccgccacatcgagcgggtcaccgagctgcaagaactcttcctcacgcgcgtcgggctcgacatcggcaaggtgtgggtcgcggacgacggcgccgcggtggcggtctggaccacgccggagagcgtcgaagcgggggcggtgttcgccgagatcggcccgcgcatggccgagttgagcggttcccggctggccgcgcagcaacagatggaaggcctcctggcgccgcaccggcccaaggagcccgcgtggttcctggccaccgtcggcgtctcgcccgaccaccagggcaagggtctgggcagcgccgtcgtgctccccggagtggaggcggccgagcgcgccggggtgcccgccttcctggagacctccgcgccccgcaacctccccttctacgagcggctcggcttcaccgtcaccgccgacgtcgaggtgcccgaaggaccgcgcacctggtgcatgacccgcaagcccggtgcctga

SEQ ID NO: 7677 - DNA, 1890 bp, Artificial Sequence; identical to SEQ ID NO: 2318
  Synthetic Polynucleotide

SEQ ID NO: 7678 - DNA, 1890 bp, Artificial Sequence; identical to SEQ ID NO: 7601
  Synthetic Polynucleotide

SEQ ID NO: 7679 - DNA, 1518 bp, Artificial Sequence
  Synthetic Polynucleotide
atggccttaccagtgaccgccttgctcctgccgctggccttgctgctccacgccgccaggccggacatccagatgacacagagccctagcagcctgtctgccagcgtgggagacagagtgaccatcacatgcaaggccagcgaccacatcaacaactggctggcctggtatcagcagaagcctggacaggcccctaagctgctgatctacggcgctaccacactggaaacaggcgtgcccagcagattttctggcagcggctctggcaccgactacaccctgacaatatccagcctccagcctgaggacttcgccacctactactgtcagcagagctggaacaccccttggacattcggccagggcaccaagctggaaatcaagagaggcggaggcggaagtggaggcggaggatctggcggcggaggctctcaagttcagcttcaacagcctggcgctgagctggtcaaacctggcgcttctgtgaagatgagctgcaaagccagcggctacgccttcagcagctactggatcaactggatgaagcagaaacccggccagggactcgaatggatcggccaaatctatcccggcgacggcgacaccaactacaacggcaagttcaagggcagagccacactgaccgccgatacctctagcagcacagcctacatgcagctgagcagcctgaccagcgaagatagcgccgtgtacttctgtgcccggtccatcacaacagtcgtgggctgcgctatggactattggggccagggaacaagcgtgaccgtgtctagtacgcgtggaatgaggactgaggatcttcccaaagctgtcgtctttctcgaaccccaatggtatcgggtgctcgaaaaagactctgtgacactgaaatgccaaggggcctactctcccgaggacaactccacacagtggtttcataatgagtccctcatcagctctcaggccagctcttatttcattgatgccgctacagtggacgactccggcgagtatcggtgtcagaccaatctgtctacactgtctgaccccgtgcagcttgaggtccacattggatggttgctcttgcaagccccacgctgggttttcaaagaggaagatccaatccatctgcggtgccacagctggaaaaacaccgctctccacaaagtcacatacctgcaaaatggcaaaggacgcaaatacttccatcacaattccgatttttacattccgaaggctaccctgaaagacagcggcagctatttctgccggggactcgtcggctccaagaatgtgtcctccgaaaccgtgaatatcacgattacccaaggactggctgtgcctacaatctctagcttctttccgcctggataccaagtctccttctgtcttgtgatggtcctcctgtttgctgtggacacaggactgtacttttccgtgaaaacgaacatccgcagctccacacgcgattggaaagatcacaagtttaaatggcgcaaagatccccaggacaagtaa

SEQ ID NO: 7680 - DNA, 1863 bp, Artificial Sequence
  Synthetic Polynucleotide
atggccttaccagtgaccgccttgctcctgccgctggccttgctgctccacgccgccaggccggacatccagatgacacagagccctagcagcctgtctgccagcgtgggagacagagtgaccatcacatgcaaggccagcgaccacatcaacaactggctggcctggtatcagcagaagcctggacaggcccctaagctgctgatctacggcgctaccacactggaaacaggcgtgcccagcagattttctggcagcggctctggcaccgactacaccctgacaatatccagcctccagcctgaggacttcgccacctactactgtcagcagagctggaacaccccttggacattcggccagggcaccaagctggaaatcaagagaggcggaggcggaagtggaggcggaggatctggcggcggaggctctcaagttcagcttcaacagcctggcgctgagctggtcaaacctggcgcttctgtgaagatgagctgcaaagccagcggctacgccttcagcagctactggatcaactggatgaagcagaaacccggccagggactcgaatggatcggccaaatctatcccggcgacggcgacaccaactacaacggcaagttcaagggcagagccacactgaccgccgatacctctagcagcacagcctacatgcagctgagcagcctgaccagcgaagatagcgccgtgtacttctgtgcccggtccatcacaacagtcgtgggctgcgctatggactattggggccagggaacaagcgtgaccgtgtctagtacgcgtaaaattgaagttatgtatcctcctccttacctagacaatgagaagagcaatggaaccattatccatgtgaaaggggcgcgtggcgatattgagaatacctctctggccccagaagatcctacattccccgccgacacatggggaacatatctgctgacaaccgaaaccgggctgcaaaaggaccatgctctgtgggatcataccgctcagaatctgcttcggatggggcttgcattcctggtcctggtggctcttgtctggtttctggtcgaggactggctgtcccggaagagaaccagagaaagagcttccagggccagcacctgggaaggcagacgcagactgaatactcagaccctgcgcgccaagagaagcggatctggcgtgaagcagaccctgaatttcgacctgctgaagctggctggcgacgtggaatccaacccaggcccttctagaggccatatgaccgagtacaagcccacggtgcgcctcgccacccgcgacgacgtccccagggccgtacgcaccctcgccgccgcgttcgccgactaccccgccacgcgccacaccgtcgatccggaccgccacatcgagcgggtcaccgagctgcaagaactcttcctcacgcgcgtcgggctcgacatcggcaaggtgtgggtcgcggacgacggcgccgcggtggcggtctggaccacgccggagagcgtcgaagcgggggcggtgttcgccgagatcggcccgcgcatggccgagttgagcggttcccggctggccgcgcagcaacagatggaaggcctcctggcgccgcaccggcccaaggagcccgcgtggttcctggccaccgtcggcgtctcgcccgaccaccagggcaagggtctgggcagcgccgtcgtgctccccggagtggaggcggccgagcgcgccggggtgcccgccttcctggagacctccgcgccccgcaacctccccttctacgagcggctcggcttcaccgtcaccgccgacgtcgaggtgcccgaaggaccgcgcacctggtgcatgacccgcaagcccggtgcctga

SEQ ID NO: 7681 - DNA, 1875 bp, Artificial Sequence
  Synthetic Polynucleotide
atggccttaccagtgaccgccttgctcctgccgctggccttgctgctccacgccgccaggccggacatccagatgacacagagccctagcagcctgtctgccagcgtgggagacagagtgaccatcacatgcaaggccagcgaccacatcaacaactggctggcctggtatcagcagaagcctggacaggcccctaagctgctgatctacggcgctaccacactggaaacaggcgtgcccagcagattttctggcagcggctctggcaccgactacaccctgacaatatccagcctccagcctgaggacttcgccacctactactgtcagcagagctggaacaccccttggacattcggccagggcaccaagctggaaatcaagagaggcggaggcggaagtggaggcggaggatctggcggcggaggctctcaagttcagcttcaacagcctggcgctgagctggtcaaacctggcgcttctgtgaagatgagctgcaaagccagcggctacgccttcagcagctactggatcaactggatgaagcagaaacccggccagggactcgaatggatcggccaaatctatcccggcgacggcgacaccaactacaacggcaagttcaagggcagagccacactgaccgccgatacctctagcagcacagcctacatgcagctgagcagcctgaccagcgaagatagcgccgtgtacttctgtgcccggtccatcacaacagtcgtgggctgcgctatggactattggggccagggaacaagcgtgaccgtgtctagtacgcgtaaaattgaagttatgtatcctcctccttacctagacaatgagaagagcaatggaaccattatccatgtgaaaggggcgcgtgtggctgaaggcaaaacagataatcagtacacactcttcgttgccggcggaaccgtgctgctcctgctctttgtgattagcatcacaacgattatcgtcatcttcctcaaccgcaggcggagaagagagaggcgcgatctgttcaccgagtcttgggatacacagaaagctccgaacaactatcggagccctatctccaccggacagcccacaaatcagtctatggacgacacacgcgaggacatctatgtcaattaccccactttttctaggcggcctaagaccagagtgcgcgccaagagaagcggatctggcgtgaagcagaccctgaatttcgacctgctgaagctggctggcgacgtggaatccaacccaggcccttctagaggccatatgaccgagtacaagcccacggtgcgcctcgccacccgcgacgacgtccccagggccgtacgcaccctcgccgccgcgttcgccgactaccccgccacgcgccacaccgtcgatccggaccgccacatcgagcgggtcaccgagctgcaagaactcttcctcacgcgcgtcgggctcgacatcggcaaggtgtgggtcgcggacgacggcgccgcggtggcggtctggaccacgccggagagcgtcgaagcgggggcggtgttcgccgagatcggcccgcgcatggccgagttgagcggttcccggctggccgcgcagcaacagatggaaggcctcctggcgccgcaccggcccaaggagcccgcgtggttcctggccaccgtcggcgtctcgcccgaccaccagggcaagggtctgggcagcgccgtcgtgctccccggagtggaggcggccgagcgcgccggggtgcccgccttcctggagacctccgcgccccgcaacctccccttctacgagcggctcggcttcaccgtcaccgccgacgtcgaggtgcccgaaggaccgcgcacctggtgcatgacccgcaagcccggtgcctga

SEQ ID NO: 7682 - DNA, 1935 bp, Artificial Sequence
  Synthetic Polynucleotide
atggccttaccagtgaccgccttgctcctgccgctggccttgctgctccacgccgccaggccggacatccagatgacacagagccctagcagcctgtctgccagcgtgggagacagagtgaccatcacatgcaaggccagcgaccacatcaacaactggctggcctggtatcagcagaagcctggacaggcccctaagctgctgatctacggcgctaccacactggaaacaggcgtgcccagcagattttctggcagcggctctggcaccgactacaccctgacaatatccagcctccagcctgaggacttcgccacctactactgtcagcagagctggaacaccccttggacattcggccagggcaccaagctggaaatcaagagaggcggaggcggaagtggaggcggaggatctggcggcggaggctctcaagttcagcttcaacagcctggcgctgagctggtcaaacctggcgcttctgtgaagatgagctgcaaagccagcggctacgccttcagcagctactggatcaactggatgaagcagaaacccggccagggactcgaatggatcggccaaatctatcccggcgacggcgacaccaactacaacggcaagttcaagggcagagccacactgaccgccgatacctctagcagcacagcctacatgcagctgagcagcctgaccagcgaagatagcgccgtgtacttctgtgcccggtccatcacaacagtcgtgggctgcgctatggactattggggccagggaacaagcgtgaccgtgtctagtacgcgtaaaattgaagttatgtatcctcctccttacctagacaatgagaagagcaatggaaccattatccatgtgaaaggggcgcgtggcgatattgagaatacctctctggccccagaagatcctacattccccgccgacacatggggaacatatctgctgacaaccgaaaccgggctgcaaaaggaccatgctctgtgggatcataccgctcagaatctgcttcggatggggcttgcattcctggtcctggtggctcttgtctggtttctggtcgaggactggctgtcccggaagagaaccagagaaagagcttccagggccagcacctgggaaggcagacgcagactgaatactcagaccctgcgcgccaagagaagcggatctggcgtgaagcagaccctgaatttcgacctgctgaagctggctggcgacgtggaatccaacccaggcccttctagaatgtaccggatgcagctgctgagctgtatcgccctgtctctggccctggtcacaaatagcgcccctaccagcagcagcaccaagaaaacccagctgcaactggaacacctcctgctggacctccagatgatcctgaacggcatcaacaactacaagaaccccaagctgaccgagatgctgaccgccaagttctacatgcccaagaaggccaccgagctgaagcacctccagtgcctggaagaggaactgaagcccctggaagaagtgctgaatctggcccagagcaagaacttccacctgaggccaagggacctgatctccaacatcaacgtgatcgtgctggaactgaaaggcagcgagacaaccttcatgtgcgagtacgccgacgagacagctaccatcgtggaatttctgaatcggtggatcaccttctgccagagcatcatcagcaccctgacaaagatcgaagtgatgtaccctcctccttacctggacaacgagaagtccaacggcaccatcatccacgtgaagggcaagcacctgtgtccttctccactgttccccggacctagcaagcctttctgggtgctcgttgttgttggcggcgtgctggcctgttacagcctgctggttaccgtggccttcatcatcttttgggtccgaagcaagcggagctaa

SEQ ID NO: 7683 - DNA, 1779 bp, Artificial Sequence
  Synthetic Polynucleotide
atggccttaccagtgaccgccttgctcctgccgctggccttgctgctccacgccgccaggccggacatccagatgacacagagccctagcagcctgtctgccagcgtgggagacagagtgaccatcacatgcaaggccagcgaccacatcaacaactggctggcctggtatcagcagaagcctggacaggcccctaagctgctgatctacggcgctaccacactggaaacaggcgtgcccagcagattttctggcagcggctctggcaccgactacaccctgacaatatccagcctccagcctgaggacttcgccacctactactgtcagcagagctggaacaccccttggacattcggccagggcaccaagctggaaatcaagagaggcggaggcggaagtggaggcggaggatctggcggcggaggctctcaagttcagcttcaacagcctggcgctgagctggtcaaacctggcgcttctgtgaagatgagctgcaaagccagcggctacgccttcagcagctactggatcaactggatgaagcagaaacccggccagggactcgaatggatcggccaaatctatcccggcgacggcgacaccaactacaacggcaagttcaagggcagagccacactgaccgccgatacctctagcagcacagcctacatgcagctgagcagcctgaccagcgaagatagcgccgtgtacttctgtgcccggtccatcacaacagtcgtgggctgcgctatggactattggggccagggaacaagcgtgaccgtgtctagtacgcgtaaaattgaagttatgtatcctcctccttacctagacaatgagaagagcaatggaaccattatccatgtgaaaggggcgcgtatcacccagggcctggccgtgtctaccatcagcagctttttcccacccggctaccaggtgtccttctgcctcgtgatggtgctgctgttcgccgtggacaccggcctgtacttcagcgtgaaaacaaacatccggtccagcaccagagactggaaggaccacaagttcaagtggcggaaggacccccaggacaagcgcgccaagagaagcggatctggcgtgaagcagaccctgaatttcgacctgctgaagctggctggcgacgtggaatccaacccaggcccttctagaggccatatgaccgagtacaagcccacggtgcgcctcgccacccgcgacgacgtccccagggccgtacgcaccctcgccgccgcgttcgccgactaccccgccacgcgccacaccgtcgatccggaccgccacatcgagcgggtcaccgagctgcaagaactcttcctcacgcgcgtcgggctcgacatcggcaaggtgtgggtcgcggacgacggcgccgcggtggcggtctggaccacgccggagagcgtcgaagcgggggcggtgttcgccgagatcggcccgcgcatggccgagttgagcggttcccggctggccgcgcagcaacagatggaaggcctcctggcgccgcaccggcccaaggagcccgcgtggttcctggccaccgtcggcgtctcgcccgaccaccagggcaagggtctgggcagcgccgtcgtgctccccggagtggaggcggccgagcgcgccggggtgcccgccttcctggagacctccgcgccccgcaacctccccttctacgagcggctcggcttcaccgtcaccgccgacgtcgaggtgcccgaaggaccgcgcacctggtgcatgacccgcaagcccggtgcctga

SEQ ID NO: 7684 - DNA, 2139 bp, Artificial Sequence
  Synthetic Polynucleotide
atggccttaccagtgaccgccttgctcctgccgctggccttgctgctccacgccgccaggccggacatccagatgacacagagccctagcagcctgtctgccagcgtgggagacagagtgaccatcacatgcaaggccagcgaccacatcaacaactggctggcctggtatcagcagaagcctggacaggcccctaagctgctgatctacggcgctaccacactggaaacaggcgtgcccagcagattttctggcagcggctctggcaccgactacaccctgacaatatccagcctccagcctgaggacttcgccacctactactgtcagcagagctggaacaccccttggacattcggccagggcaccaagctggaaatcaagagaggcggaggcggaagtggaggcggaggatctggcggcggaggctctcaagttcagcttcaacagcctggcgctgagctggtcaaacctggcgcttctgtgaagatgagctgcaaagccagcggctacgccttcagcagctactggatcaactggatgaagcagaaacccggccagggactcgaatggatcggccaaatctatcccggcgacggcgacaccaactacaacggcaagttcaagggcagagccacactgaccgccgatacctctagcagcacagcctacatgcagctgagcagcctgaccagcgaagatagcgccgtgtacttctgtgcccggtccatcacaacagtcgtgggctgcgctatggactattggggccagggaacaagcgtgaccgtgtctagtacgcgtaaaattgaagttatgtatcctcctccttacctagacaatgagaagagcaatggaaccattatccatgtgaaaggggcgcgtgacggtaacgaggagatgggaggaatcactcaaaccccttacaaagtctcaatttcaggaacaactgttatccttacatgtccccagtatcctggcagcgagatcctttggcagcataacgacaagaatatagggggagatgaagacgataagaatatcggatctgacgaggatcacttgagcctgaaagagttctccgagcttgaacaaagcggatattatgtgtgctatccgcgcgggtcaaagccggaagacgctaacttttacctttatctccgagccagagtgtgcgaaaattgcatggaaatggacgttatgtccgttgctacaatagttatcgtagatatatgcatcacgggtggactgcttctgctggtttattattggtccaagaatagaaaggccaaagctaaacccgtgaccagaggcgctggcgcaggcggaaggcaaaggggacaaaacaaagaacggccaccaccagtgccaaatccagattatgagcctattcggaaaggacagagggacctgtactctggcctgaatcagagaagaatccgcgccaagagaagcggatctggcgtgaagcagaccctgaatttcgacctgctgaagctggctggcgacgtggaatccaacccaggcccttctagagaccatatgaccgagtacaagcccacggtgcgcctcgccacccgcgacgacgtccccagggccgtacgcaccctcgccgccgcgttcgccgactaccccgccacgcgccacaccgtcgatccggaccgccacatcgagcgggtcaccgagctgcaagaactcttcctcacgcgcgtcgggctcgacatcggcaaggtgtgggtcgcggacgacggcgccgcggtggcggtctggaccacgccggagagcgtcgaagcgggggcggtgttcgccgagatcggcccgcgcatggccgagttgagcggttcccggctggccgcgcagcaacagatggaaggcctcctggcgccgcaccggcccaaggagcccgcgtggttcctggccaccgtcggcgtctcgcccgaccaccagggcaagggtctgggcagcgccgtcgtgctccccggagtggaggcggccgagcgcgccggggtgcccgccttcctggagacctccgcgccccgcaacctccccttctacgagcggctcggcttcaccgtcaccgccgacgtcgaggtgcccgaaggaccgcgcacctggtgcatgacccgcaagcccggtgcctga

SEQ ID NO: 7685 - DNA, 2124 bp, Artificial Sequence
  Synthetic Polynucleotide
atggccttaccagtgaccgccttgctcctgccgctggccttgctgctccacgccgccaggccggacatccagatgacacagagccctagcagcctgtctgccagcgtgggagacagagtgaccatcacatgcaaggccagcgaccacatcaacaactggctggcctggtatcagcagaagcctggacaggcccctaagctgctgatctacggcgctaccacactggaaacaggcgtgcccagcagattttctggcagcggctctggcaccgactacaccctgacaatatccagcctccagcctgaggacttcgccacctactactgtcagcagagctggaacaccccttggacattcggccagggcaccaagctggaaatcaagagaggcggaggcggaagtggaggcggaggatctggcggcggaggctctcaagttcagcttcaacagcctggcgctgagctggtcaaacctggcgcttctgtgaagatgagctgcaaagccagcggctacgccttcagcagctactggatcaactggatgaagcagaaacccggccagggactcgaatggatcggccaaatctatcccggcgacggcgacaccaactacaacggcaagttcaagggcagagccacactgaccgccgatacctctagcagcacagcctacatgcagctgagcagcctgaccagcgaagatagcgccgtgtacttctgtgcccggtccatcacaacagtcgtgggctgcgctatggactattggggccagggaacaagcgtgaccgtgtctagtacgcgtaaaattgaagttatgtatcctcctccttacctagacaatgagaagagcaatggaaccattatccatgtgaaaggggcgcgtaagtctgtgcgcttttacctggtcgtcagccctgccagtgcctccactcagacatcttggaccccaagggaccttgtgtcctctcagacacagacacagtcctgcgtgccaccaactgctggcgcaagacaggctccagagtctcccagcacaatccccgtcccttctcagccccagaactccacacttaggccaggaccagctgctccaatcgcactggtcccagtgttctgcggactgctggttgccaagtctctggtgctgagcgcactcctcgtttggtggggcgatatttggtggaaaacgatgatggaattgagatccctcgatacgcagaaagccacatgccaccttcagcaagtcacagacttgccttggaccagcgtcagctctcccgtggaacgggaaattctgtatcatacagtggcccgcaccaagatttccgacgatgacgacgagcacacactgcgcgccaagagaagcggatctggcgtgaagcagaccctgaatttcgacctgctgaagctggctggcgacgtggaatccaacccaggcccttctagaatgtaccggatgcagctgctgagctgtatcgccctgtctctggccctggtcacaaatagcgcccctaccagcagcagcaccaagaaaacccagctgcaactggaacacctcctgctggacctccagatgatcctgaacggcatcaacaactacaagaaccccaagctgaccgagatgctgaccgccaagttctacatgcccaagaaggccaccgagctgaagcacctccagtgcctggaagaggaactgaagcccctggaagaagtgctgaatctggcccagagcaagaacttccacctgaggccaagggacctgatctccaacatcaacgtgatcgtgctggaactgaaaggcagcgagacaaccttcatgtgcgagtacgccgacgagacagctaccatcgtggaatttctgaatcggtggatcaccttctgccagagcatcatcagcaccctgacaaagatcgaagtgatgtaccctcctccttacctggacaacgagaagtccaacggcaccatcatccacgtgaagggcaagcacctgtgtccttctccactgttccccggacctagcaagcctttctgggtgctcgttgttgttggcggcgtgctggcctgttacagcctgctggttaccgtggccttcatcatcttttgggtccgaagcaagcggagctaa

SEQ ID NO: 7686 - DNA, 1830 bp, Artificial Sequence
  Synthetic Polynucleotide
atgggatggattaggggaagaagatcccggcactcttgggagatgtctgagtttcataattacaacctcgatctgaaaaagagcgacttttccacgcggtggcaaaagcagcggtgccctgtcgtgaagtccaagtgtcgggaaaacgccagtccattcttcttttgctgtttcattgccgtcgcaatggggatcagattcattattatggtcgcaatttggagtgctgtctttctgaacagcctctttaatcaagaagtccagattccgctcaccgaatcctactgcggaccttgtccaaaaaattggatttgttacaaaaacaactgttatcaattctttgatgagtctaaaaattggtatgagtcccaggcttcctgcatgtctcagaacgcttctctgctgaaagtctactctaaagaagatcaggatctcctgaagctcgtcaagagctatcattggatggggctcgtccacattcctaccaacggaagctggcaatgggaagatggctccatcctgtctccaaatctgctcacgattattgaaatgcagaaaggggattgtgctctctacgccagctccttcaagggatatattgagaactgtagcacgcccaatacttatatctgtatgcaacggaccgtgggcggcggaggatctggcggaggcggatctgggggcggaggctctttcgaagtgcaactggttgaatccggtggcggcctggtgcaagcaggcggatctctcagacttagctgtgccgcctccggcagaaccttcacaatgggatggtttaggcaggctccagggaaagagagagagttcgtcgccgccatctctctgtctcccacactggcctactacgccgagtctgtgaaaggccggttcaccatctccagagataatgccaagaacaccgtggtgctgcaaatgaactctctgaaacccgaggatacagccctgtactattgtgccgctgaccggaagtccgtgatgagcatcagacccgattactggggacagggcacacaagtcacagtgtcctctacgcgtcgcgccaagagaagcggatctggcgtgaagcagaccctgaatttcgacctgctgaagctggctggcgacgtggaatccaacccaggcccttctagaatgtaccggatgcagctgctgagctgtatcgccctgtctctggccctggtcacaaatagcgcccctaccagcagcagcaccaagaaaacccagctgcaactggaacacctcctgctggacctccagatgatcctgaacggcatcaacaactacaagaaccccaagctgaccgagatgctgaccgccaagttctacatgcccaagaaggccaccgagctgaagcacctccagtgcctggaagaggaactgaagcccctggaagaagtgctgaatctggcccagagcaagaacttccacctgaggccaagggacctgatctccaacatcaacgtgatcgtgctggaactgaaaggcagcgagacaaccttcatgtgcgagtacgccgacgagacagctaccatcgtggaatttctgaatcggtggatcaccttctgccagagcatcatcagcaccctgacaaagatcgaagtgatgtaccctcctccttacctggacaacgagaagtccaacggcaccatcatccacgtgaagggcaagcacctgtgtccttctccactgttccccggacctagcaagcctttctgggtgctcgttgttgttggcggcgtgctggcctgttacagcctgctggttaccgtggccttcatcatcttttgggtccgaagcaagcggagctaa

SEQ ID NO: 7687 - DNA, 1854 bp, Artificial Sequence
  Synthetic Polynucleotide
atgggatggattaggggaagaagatcccggcactcttgggagatgtctgagtttcataattacaacctcgatctgaaaaagagcgacttttccacgcggtggcaaaagcagcggtgccctgtcgtgaagtccaagtgtcgggaaaacgccagtccattcttcttttgctgtttcattgccgtcgcaatggggatcagattcattattatggtcgcaatttggagtgctgtctttctgaacagcctctttaatcaagaagtccagattccgctcaccgaatcctactgcggaccttgtccaaaaaattggatttgttacaaaaacaactgttatcaattctttgatgagtctaaaaattggtatgagtcccaggcttcctgcatgtctcagaacgcttctctgctgaaagtctactctaaagaagatcaggatctcctgaagctcgtcaagagctatcattggatggggctcgtccacattcctaccaacggaagctggcaatgggaagatggctccatcctgtctccaaatctgctcacgattattgaaatgcagaaaggggattgtgctctctacgccagctccttcaagggatatattgagaactgtagcacgcccaatacttatatctgtatgcaacggaccgtgggcggcggaggatctggcggaggcggatctgggggcggaggctctttcgaagtgcaactggttgaatccggtggcggcctggtgcaagcaggcggatctctcagacttagctgtgccgcctccggcagaaccttcacaatgggatggtttaggcaggctccagggaaagagagagagttcgtcgccgccatctctctgtctcccacactggcctactacgccgagtctgtgaaaggccggttcaccatctccagagataatgccaagaacaccgtggtgctgcaaatgaactctctgaaacccgaggatacagccctgtactattgtgccgctgaccggaagtccgtgatgagcatcagacccgattactggggacagggcacacaagtcacagtgtcctctacgcgtcgcgccaagagaagcggatctggcgtgaagcagaccctgaatttcgacctgctgaagctggctggcgacgtggaatccaacccaggcccttctagaatgtaccggatgcagctgctgagctgtatcgccctgtctctggccctggtcacaaatagcgcccctaccagcagcagcaccaagaaaacccagctgcaactggaacacctcctgctggacctccagatgatcctgaacggcatcaacaactacaagaaccccaagctgacccggatgctgaccttcaagttctacatgcccaagaaggccaccgagctgaagcacctccagtgcctggaagaggaactgaagcccctggaagaagtgctgaatctggcccagagcaagaacttccacctgaggccaagggacctgatctccaacatcaacgtgatcgtgctggaactgaaaggcagcgagacaaccttcatgtgcgagtacgccgacgagacagctaccatcgtggaatttctgaatcggtggatcaccttctgccagagcatcatcagcaccctgacacatatgttgcagatggctgggcagtgctcccaaaatgaatattttgacagtttgttgcatgcttgcataccttgtcaacttcgatgttcttctaatactcctcctctaacatgtcagcgttattgtaatgcaagtgtgaccaattcagtgaaaggaacgaatgcgattctctggacctgtttgggactgagcttaataatttctttggcagttttcgtgctaatgtttttgctaaggaagtaa

SEQ ID NO: 7688 - DNA, 2364 bp, Artificial Sequence; identical to SEQ ID NO: 7636
  Synthetic Polynucleotide

SEQ ID NO: 7689 - DNA, 2043 bp, Artificial Sequence; identical to SEQ ID NO: 7637
  Synthetic Polynucleotide

SEQ ID NO: 7690 - DNA, 2010 bp, Artificial Sequence; identical to SEQ ID NO: 7638
  Synthetic Polynucleotide

SEQ ID NO: 7691 - DNA, 1935 bp, Artificial Sequence
  Synthetic Polynucleotide
atggccttaccagtgaccgccttgctcctgccgctggccttgctgctccacgccgccaggccggacatccagatgacacagagccctagcagcctgtctgccagcgtgggagacagagtgaccatcacatgcaaggccagcgaccacatcaacaactggctggcctggtatcagcagaagcctggacaggcccctaagctgctgatctacggcgctaccacactggaaacaggcgtgcccagcagattttctggcagcggctctggcaccgactacaccctgacaatatccagcctccagcctgaggacttcgccacctactactgtcagcagagctggaacaccccttggacattcggccagggcaccaagctggaaatcaagagaggcggaggcggaagtggaggcggaggatctggcggcggaggctctcaagttcagcttcaacagcctggcgctgagctggtcaaacctggcgcttctgtgaagatgagctgcaaagccagcggctacgccttcagcagctactggatcaactggatgaagcagaaacccggccagggactcgaatggatcggccaaatctatcccggcgacggcgacaccaactacaacggcaagttcaagggcagagccacactgaccgccgatacctctagcagcacagcctacatgcagctgagcagcctgaccagcgaagatagcgccgtgtacttctgtgcccggtccatcacaacagtcgtgggctgcgctatggactattggggccagggaacaagcgtgaccgtgtctagtacgcgtaccacgacgccagcgccgcgaccaccaacaccggcgcccaccatcgcgtcgcagcccctgtccctgcgcccagaggcgtgccggccagcggcggggggcgcagtgcacacgagggggctggacttcgcctgtgacgcgcgtgtggctgaaggcaaaacagataatcagtacacactcttcgttgccggcggaaccgtgctgctcctgctctttgtgattagcatcacaacgattatcgtcatcttcctcaaccgcaggcggagaagagagaggcgcgatctgttcaccgagtcttgggatacacagaaagctccgaacaactatcggagccctatctccaccggacagcccacaaatcagtctatggacgacacacgcgaggacatctatgtcaattaccccactttttctaggcggcctaagaccagagtgcgcgccaagagaagcggatctggcgtgaagcagaccctgaatttcgacctgctgaagctggctggcgacgtggaatccaacccaggcccttctagaggccatatgaccgagtacaagcccacggtgcgcctcgccacccgcgacgacgtccccagggccgtacgcaccctcgccgccgcgttcgccgactaccccgccacgcgccacaccgtcgatccggaccgccacatcgagcgggtcaccgagctgcaagaactcttcctcacgcgcgtcgggctcgacatcggcaaggtgtgggtcgcggacgacggcgccgcggtggcggtctggaccacgccggagagcgtcgaagcgggggcggtgttcgccgagatcggcccgcgcatggccgagttgagcggttcccggctggccgcgcagcaacagatggaaggcctcctggcgccgcaccggcccaaggagcccgcgtggttcctggccaccgtcggcgtctcgcccgaccaccagggcaagggtctgggcagcgccgtcgtgctccccggagtggaggcggccgagcgcgccggggtgcccgccttcctggagacctccgcgccccgcaacctccccttctacgagcggctcggcttcaccgtcaccgccgacgtcgaggtgcccgaaggaccgcgcacctggtgcatgacccgcaagcccggtgcctga

SEQ ID NO: 7692 - DNA, 2112 bp, Artificial Sequence
  Synthetic Polynucleotide
atggccttaccagtgaccgccttgctcctgccgctggccttgctgctccacgccgccaggccggacatccagatgacacagagccctagcagcctgtctgccagcgtgggagacagagtgaccatcacatgcaaggccagcgaccacatcaacaactggctggcctggtatcagcagaagcctggacaggcccctaagctgctgatctacggcgctaccacactggaaacaggcgtgcccagcagattttctggcagcggctctggcaccgactacaccctgacaatatccagcctccagcctgaggacttcgccacctactactgtcagcagagctggaacaccccttggacattcggccagggcaccaagctggaaatcaagagaggcggaggcggaagtggaggcggaggatctggcggcggaggctctcaagttcagcttcaacagcctggcgctgagctggtcaaacctggcgcttctgtgaagatgagctgcaaagccagcggctacgccttcagcagctactggatcaactggatgaagcagaaacccggccagggactcgaatggatcggccaaatctatcccggcgacggcgacaccaactacaacggcaagttcaagggcagagccacactgaccgccgatacctctagcagcacagcctacatgcagctgagcagcctgaccagcgaagatagcgccgtgtacttctgtgcccggtccatcacaacagtcgtgggctgcgctatggactattggggccagggaacaagcgtgaccgtgtctagtacgcgtaccacgacgccagcgccgcgaccaccaacaccggcgcccaccatcgcgtcgcagcccctgtccctgcgcccagaggcgtgccggccagcggcggggggcgcagtgcacacgagggggctggacttcgcctgtgacgcgcgtaagtctgtgcgcttttacctggtcgtcagccctgccagtgcctccactcagacatcttggaccccaagggaccttgtgtcctctcagacacagacacagtcctgcgtgccaccaactgctggcgcaagacaggctccagagtctcccagcacaatccccgtcccttctcagccccagaactccacacttaggccaggaccagctgctccaatcgcactggtcccagtgttctgcggactgctggttgccaagtctctggtgctgagcgcactcctcgtttggtggggcgatatttggtggaaaacgatgatggaattgagatccctcgatacgcagaaagccacatgccaccttcagcaagtcacagacttgccttggaccagcgtcagctctcccgtggaacgggaaattctgtatcatacagtggcccgcaccaagatttccgacgatgacgacgagcacacactgcgcgccaagagaagcggatctggcgtgaagcagaccctgaatttcgacctgctgaagctggctggcgacgtggaatccaacccaggcccttctagaggccatatgaccgagtacaagcccacggtgcgcctcgccacccgcgacgacgtccccagggccgtacgcaccctcgccgccgcgttcgccgactaccccgccacgcgccacaccgtcgatccggaccgccacatcgagcgggtcaccgagctgcaagaactcttcctcacgcgcgtcgggctcgacatcggcaaggtgtgggtcgcggacgacggcgccgcggtggcggtctggaccacgccggagagcgtcgaagcgggggcggtgttcgccgagatcggcccgcgcatggccgagttgagcggttcccggctggccgcgcagcaacagatggaaggcctcctggcgccgcaccggcccaaggagcccgcgtggttcctggccaccgtcggcgtctcgcccgaccaccagggcaagggtctgggcagcgccgtcgtgctccccggagtggaggcggccgagcgcgccggggtgcccgccttcctggagacctccgcgccccgcaacctccccttctacgagcggctcggcttcaccgtcaccgccgacgtcgaggtgcccgaaggaccgcgcacctggtgcatgacccgcaagcccggtgcctga

SEQ ID NO: 7693 - DNA, 1830 bp, Artificial Sequence
  Synthetic Polynucleotide
atggccttaccagtgaccgccttgctcctgccgctggccttgctgctccacgccgccaggccggacatccagatgacacagagccctagcagcctgtctgccagcgtgggagacagagtgaccatcacatgcaaggccagcgaccacatcaacaactggctggcctggtatcagcagaagcctggacaggcccctaagctgctgatctacggcgctaccacactggaaacaggcgtgcccagcagattttctggcagcggctctggcaccgactacaccctgacaatatccagcctccagcctgaggacttcgccacctactactgtcagcagagctggaacaccccttggacattcggccagggcaccaagctggaaatcaagagaggcggaggcggaagtggaggcggaggatctggcggcggaggctctcaagttcagcttcaacagcctggcgctgagctggtcaaacctggcgcttctgtgaagatgagctgcaaagccagcggctacgccttcagcagctactggatcaactggatgaagcagaaacccggccagggactcgaatggatcggccaaatctatcccggcgacggcgacaccaactacaacggcaagttcaagggcagagccacactgaccgccgatacctctagcagcacagcctacatgcagctgagcagcctgaccagcgaagatagcgccgtgtacttctgtgcccggtccatcacaacagtcgtgggctgcgctatggactattggggccagggaacaagcgtgaccgtgtctagtacgcgtaccacgacgccagcgccgcgaccaccaacaccggcgcccaccatcgcgtcgcagcccctgtccctgcgcccagaggcgtgccggccagcggcggggggcgcagtgcacacgagggggctggacttcgcctgtgacggtaccatcactcaaggtttggcagtgtcaaccatctcatcattctttccacctggctaccaagtgtccttctgcctggtcatggtgctgctgttcgccgtggataccggcctgtacttcagcgtcaagaccaacatccggtccagcaccagagactggaaggaccacaagttcaagtggcggaaggaccctcaggacaagagggccaagcgatctggatctggagcaacaaacttctcactactcaaacaagcaggtgacgtggaggagaatcccgggccttctagaggccatatgaccgagtacaagcccacggtgcgcctcgccacccgcgacgacgtccccagggccgtacgcaccctcgccgccgcgttcgccgactaccccgccacgcgccacaccgtcgatccggaccgccacatcgagcgggtcaccgagctgcaagaactcttcctcacgcgcgtcgggctcgacatcggcaaggtgtgggtcgcggacgacggcgccgcggtggcggtctggaccacgccggagagcgtcgaagcgggggcggtgttcgccgagatcggcccgcgcatggccgagttgagcggttcccggctggccgcgcagcaacagatggaaggcctcctggcgccgcaccggcccaaggagcccgcgtggttcctggccaccgtcggcgtctcgcccgaccaccagggcaagggtctgggcagcgccgtcgtgctccccggagtggaggcggccgagcgcgccggggtgcccgccttcctggagacctccgcgccccgcaacctccccttctacgagcggctcggcttcaccgtcaccgccgacgtcgaggtgcccgaaggaccgcgcacctggtgcatgacccgcaagcccggtgcctga

SEQ ID NO: 7694 - DNA, 2208 bp, Artificial Sequence
  Synthetic Polynucleotide
atggccttaccagtgaccgccttgctcctgccgctggccttgctgctccacgccgccaggccggacatccagatgacacagagccctagcagcctgtctgccagcgtgggagacagagtgaccatcacatgcaaggccagcgaccacatcaacaactggctggcctggtatcagcagaagcctggacaggcccctaagctgctgatctacggcgctaccacactggaaacaggcgtgcccagcagattttctggcagcggctctggcaccgactacaccctgacaatatccagcctccagcctgaggacttcgccacctactactgtcagcagagctggaacaccccttggacattcggccagggcaccaagctggaaatcaagagaggcggaggcggaagtggaggcggaggatctggcggcggaggctctcaagttcagcttcaacagcctggcgctgagctggtcaaacctggcgcttctgtgaagatgagctgcaaagccagcggctacgccttcagcagctactggatcaactggatgaagcagaaacccggccagggactcgaatggatcggccaaatctatcccggcgacggcgacaccaactacaacggcaagttcaagggcagagccacactgaccgccgatacctctagcagcacagcctacatgcagctgagcagcctgaccagcgaagatagcgccgtgtacttctgtgcccggtccatcacaacagtcgtgggctgcgctatggactattggggccagggaacaagcgtgaccgtgtctagtacgcgtaccacgacgccagcgccgcgaccaccaacaccggcgcccaccatcgcgtcgcagcccctgtccctgcgcccagaggcgtgccggccagcggcggggggcgcagtgcacacgagggggctggacttcgcctgtgacggtaccacaacgccgggcgaaaggagttccttgccggccttttaccccggcacaagcggaagctgtagtgggtgtggaagcctcagcctcccacttcttgcgggcctcgtcgcggcagatgcagtagcttcacttcttattgtaggcgcggtatttctctgtgctcgaccaaggaggtcacccgctcaggaggatggtaaggtgtatataaatatgccaggacgcggaagctctagacgggttaagttttccagatccgcagacgcacccgcttaccaacaagggcagaaccaactctacaatgaacttaatttggggcggagggaagagtacgacgttctggacaaaaggaggggacgagatcccgagatgggcggaaagcctcagcgaaggaagaatccgcaagaggggctttataacgaactccagaaagataaaatggcagaagcctatagtgagattgggatgaagggagaaaggaggaggggtaaaggtcacgatgggttgtaccaaggattgagcacagccactaaagatacctatgatgcgctccacatgcaggccctgccgccaagacgcgccaagagaagcggatctggcgtgaagcagaccctgaatttcgacctgctgaagctggctggcgacgtggaatccaacccaggccctggccatatgaccgagtacaagcccacggtgcgcctcgccacccgcgacgacgtccccagggccgtacgcaccctcgccgccgcgttcgccgactaccccgccacgcgccacaccgtcgatccggaccgccacatcgagcgggtcaccgagctgcaagaactcttcctcacgcgcgtcgggctcgacatcggcaaggtgtgggtcgcggacgacggcgccgcggtggcggtctggaccacgccggagagcgtcgaagcgggggcggtgttcgccgagatcggcccgcgcatggccgagttgagcggttcccggctggccgcgcagcaacagatggaaggcctcctggcgccgcaccggcccaaggagcccgcgtggttcctggccaccgtcggcgtctcgcccgaccaccagggcaagggtctgggcagcgccgtcgtgctccccggagtggaggcggccgagcgcgccggggtgcccgccttcctggagacctccgcgccccgcaacctccccttctacgagcggctcggcttcaccgtcaccgccgacgtcgaggtgcccgaaggaccgcgcacctggtgcatgacccgcaagcccggtgcctga

SEQ ID NO: 7695 - DNA, 1923 bp, Artificial Sequence
  Synthetic Polynucleotide
atggccttaccagtgaccgccttgctcctgccgctggccttgctgctccacgccgccaggccggacatccagatgacacagagccctagcagcctgtctgccagcgtgggagacagagtgaccatcacatgcaaggccagcgaccacatcaacaactggctggcctggtatcagcagaagcctggacaggcccctaagctgctgatctacggcgctaccacactggaaacaggcgtgcccagcagattttctggcagcggctctggcaccgactacaccctgacaatatccagcctccagcctgaggacttcgccacctactactgtcagcagagctggaacaccccttggacattcggccagggcaccaagctggaaatcaagagaggcggaggcggaagtggaggcggaggatctggcggcggaggctctcaagttcagcttcaacagcctggcgctgagctggtcaaacctggcgcttctgtgaagatgagctgcaaagccagcggctacgccttcagcagctactggatcaactggatgaagcagaaacccggccagggactcgaatggatcggccaaatctatcccggcgacggcgacaccaactacaacggcaagttcaagggcagagccacactgaccgccgatacctctagcagcacagcctacatgcagctgagcagcctgaccagcgaagatagcgccgtgtacttctgtgcccggtccatcacaacagtcgtgggctgcgctatggactattggggccagggaacaagcgtgaccgtgtctagtacgcgtaccacgacgccagcgccgcgaccaccaacaccggcgcccaccatcgcgtcgcagcccctgtccctgcgcccagaggcgtgccggccagcggcggggggcgcagtgcacacgagggggctggacttcgcctgtgacgcgcgtggcgatattgagaatacctctctggccccagaagatcctacattccccgccgacacatggggaacatatctgctgacaaccgaaaccgggctgcaaaaggaccatgctctgtgggatcataccgctcagaatctgcttcggatggggcttgcattcctggtcctggtggctcttgtctggtttctggtcgaggactggctgtcccggaagagaaccagagaaagagcttccagggccagcacctgggaaggcagacgcagactgaatactcagaccctgcgcgccaagagaagcggatctggcgtgaagcagaccctgaatttcgacctgctgaagctggctggcgacgtggaatccaacccaggcccttctagaggccatatgaccgagtacaagcccacggtgcgcctcgccacccgcgacgacgtccccagggccgtacgcaccctcgccgccgcgttcgccgactaccccgccacgcgccacaccgtcgatccggaccgccacatcgagcgggtcaccgagctgcaagaactcttcctcacgcgcgtcgggctcgacatcggcaaggtgtgggtcgcggacgacggcgccgcggtggcggtctggaccacgccggagagcgtcgaagcgggggcggtgttcgccgagatcggcccgcgcatggccgagttgagcggttcccggctggccgcgcagcaacagatggaaggcctcctggcgccgcaccggcccaaggagcccgcgtggttcctggccaccgtcggcgtctcgcccgaccaccagggcaagggtctgggcagcgccgtcgtgctccccggagtggaggcggccgagcgcgccggggtgcccgccttcctggagacctccgcgccccgcaacctccccttctacgagcggctcggcttcaccgtcaccgccgacgtcgaggtgcccgaaggaccgcgcacctggtgcatgacccgcaagcccggtgcctga

SEQ ID NO: 7696 - DNA, 1761 bp, Artificial Sequence
  Synthetic Polynucleotide
atgggatggattaggggaagaagatcccggcactcttgggagatgtctgagtttcataattacaacctcgatctgaaaaagagcgacttttccacgcggtggcaaaagcagcggtgccctgtcgtgaagtccaagtgtcgggaaaacgccagtccattcttcttttgctgtttcattgccgtcgcaatggggatcagattcattattatggtcgcaatttggagtgctgtctttctgaacagcctctttaatcaagaagtccagattccgctcaccgaatcctactgcggaccttgtccaaaaaattggatttgttacaaaaacaactgttatcaattctttgatgagtctaaaaattggtatgagtcccaggcttcctgcatgtctcagaacgcttctctgctgaaagtctactctaaagaagatcaggatctcctgaagctcgtcaagagctatcattggatggggctcgtccacattcctaccaacggaagctggcaatgggaagatggctccatcctgtctccaaatctgctcacgattattgaaatgcagaaaggggattgtgctctctacgccagctccttcaagggatatattgagaactgtagcacgcccaatacttatatctgtatgcaacggaccgtgggcggcggaggatctggcggaggcggatctgggggcggaggctctttcgaagtgcaactggtggaatctgggggcggactggtgcagccaggcggaagtctgaggctgtcttgtgccgcctccggcagcatcttcggcttcaacgacatggcctggtatcggcaggctcccggaaaacagcgcgagctggtggctctgattagcagagtgggcgtgaccagcagcgccgactctgtgaagggcagattcacaatctccagagtgaacgccaaggatacagtgtacctccagatgaactctctgaaacctgaggatacagcagtgtactattgctacatggaccagcggctggacggcagcacactggcctactggggacagggaactcaagtgacagtgtctagcacgcgtcgcgccaagagaagcggatctggcgtgaagcagaccctgaatttcgacctgctgaagctggctggcgacgtggaatccaacccaggcccttctagaggccatatgaccgagtacaagcccacggtgcgcctcgccacccgcgacgacgtccccagggccgtacgcaccctcgccgccgcgttcgccgactaccccgccacgcgccacaccgtcgatccggaccgccacatcgagcgggtcaccgagctgcaagaactcttcctcacgcgcgtcgggctcgacatcggcaaggtgtgggtcgcggacgacggcgccgcggtggcggtctggaccacgccggagagcgtcgaagcgggggcggtgttcgccgagatcggcccgcgcatggccgagttgagcggttcccggctggccgcgcagcaacagatggaaggcctcctggcgccgcaccggcccaaggagcccgcgtggttcctggccaccgtcggcgtctcgcccgaccaccagggcaagggtctgggcagcgccgtcgtgctccccggagtggaggcggccgagcgcgccggggtgcccgccttcctggagacctccgcgccccgcaacctccccttctacgagcggctcggcttcaccgtcaccgccgacgtcgaggtgcccgaaggaccgcgcacctggtgcatgacccgcaagcccggtgcctga

SEQ ID NO: 7697 - DNA, 1779 bp, Artificial Sequence
  Synthetic Polynucleotide
atgggatggattaggggaagaagatcccggcactcttgggagatgtctgagtttcataattacaacctcgatctgaaaaagagcgacttttccacgcggtggcaaaagcagcggtgccctgtcgtgaagtccaagtgtcgggaaaacgccagtccattcttcttttgctgtttcattgccgtcgcaatggggatcagattcattattatggtcgcaatttggagtgctgtctttctgaacagcctctttaatcaagaagtccagattccgctcaccgaatcctactgcggaccttgtccaaaaaattggatttgttacaaaaacaactgttatcaattctttgatgagtctaaaaattggtatgagtcccaggcttcctgcatgtctcagaacgcttctctgctgaaagtctactctaaagaagatcaggatctcctgaagctcgtcaagagctatcattggatggggctcgtccacattcctaccaacggaagctggcaatgggaagatggctccatcctgtctccaaatctgctcacgattattgaaatgcagaaaggggattgtgctctctacgccagctccttcaagggatatattgagaactgtagcacgcccaatacttatatctgtatgcaacggaccgtgggcggcggaggatctggcggaggcggatctgggggcggaggctctttcgaagtgcaactggtggagtccggcggtggactggtacagcctgggggttcactgcgcctgtcctgcgccgccagcggaagaacctattacctcaatgctatgggttggttccgccaggccccaggaaaggagcgcgagttcgtggcggctattgactggtccgaggggaacaaggactatgctgattccgtgaagggcaggtttaccatcagccgggataattcaaaaaatactgtttatttgcagatgaactctcttagaccagaagacactgctgtctattactgcgccgctgacacccctccttggggaccactgatttatatcgaaagctatgattcctgggggcagggcacactcgtcaccgtgagtagcacgcgtcgcgccaagagaagcggatctggcgtgaagcagaccctgaatttcgacctgctgaagctggctggcgacgtggaatccaacccaggcccttctagaggccatatgaccgagtacaagcccacggtgcgcctcgccacccgcgacgacgtccccagggccgtacgcaccctcgccgccgcgttcgccgactaccccgccacgcgccacaccgtcgatccggaccgccacatcgagcgggtcaccgagctgcaagaactcttcctcacgcgcgtcgggctcgacatcggcaaggtgtgggtcgcggacgacggcgccgcggtggcggtctggaccacgccggagagcgtcgaagcgggggcggtgttcgccgagatcggcccgcgcatggccgagttgagcggttcccggctggccgcgcagcaacagatggaaggcctcctggcgccgcaccggcccaaggagcccgcgtggttcctggccaccgtcggcgtctcgcccgaccaccagggcaagggtctgggcagcgccgtcgtgctccccggagtggaggcggccgagcgcgccggggtgcccgccttcctggagacctccgcgccccgcaacctccccttctacgagcggctcggcttcaccgtcaccgccgacgtcgaggtgcccgaaggaccgcgcacctggtgcatgacccgcaagcccggtgcctga

SEQ ID NO: 7698 - DNA, 1758 bp, Artificial Sequence
  Synthetic Polynucleotide
atgggatggattaggggaagaagatcccggcactcttgggagatgtctgagtttcataattacaacctcgatctgaaaaagagcgacttttccacgcggtggcaaaagcagcggtgccctgtcgtgaagtccaagtgtcgggaaaacgccagtccattcttcttttgctgtttcattgccgtcgcaatggggatcagattcattattatggtcgcaatttggagtgctgtctttctgaacagcctctttaatcaagaagtccagattccgctcaccgaatcctactgcggaccttgtccaaaaaattggatttgttacaaaaacaactgttatcaattctttgatgagtctaaaaattggtatgagtcccaggcttcctgcatgtctcagaacgcttctctgctgaaagtctactctaaagaagatcaggatctcctgaagctcgtcaagagctatcattggatggggctcgtccacattcctaccaacggaagctggcaatgggaagatggctccatcctgtctccaaatctgctcacgattattgaaatgcagaaaggggattgtgctctctacgccagctccttcaagggatatattgagaactgtagcacgcccaatacttatatctgtatgcaacggaccgtgggcggcggaggatctggcggaggcggatctgggggcggaggctctttcgaagtgcaactggttgaatccggtggcggcctggtgcaagcaggcggatctctcagacttagctgtgccgcctccggcagaaccttcacaatgggatggtttaggcaggctccagggaaagagagagagttcgtcgccgccatctctctgtctcccacactggcctactacgccgagtctgtgaaaggccggttcaccatctccagagataatgccaagaacaccgtggtgctgcaaatgaactctctgaaacccgaggatacagccctgtactattgtgccgctgaccggaagtccgtgatgagcatcagacccgattactggggacagggcacacaagtcacagtgtcctctacgcgtcgcgccaagagaagcggatctggcgtgaagcagaccctgaatttcgacctgctgaagctggctggcgacgtggaatccaacccaggcccttctagaggccatatgaccgagtacaagcccacggtgcgcctcgccacccgcgacgacgtccccagggccgtacgcaccctcgccgccgcgttcgccgactaccccgccacgcgccacaccgtcgatccggaccgccacatcgagcgggtcaccgagctgcaagaactcttcctcacgcgcgtcgggctcgacatcggcaaggtgtgggtcgcggacgacggcgccgcggtggcggtctggaccacgccggagagcgtcgaagcgggggcggtgttcgccgagatcggcccgcgcatggccgagttgagcggttcccggctggccgcgcagcaacagatggaaggcctcctggcgccgcaccggcccaaggagcccgcgtggttcctggccaccgtcggcgtctcgcccgaccaccagggcaagggtctgggcagcgccgtcgtgctccccggagtggaggcggccgagcgcgccggggtgcccgccttcctggagacctccgcgccccgcaacctccccttctacgagcggctcggcttcaccgtcaccgccgacgtcgaggtgcccgaaggaccgcgcacctggtgcatgacccgcaagcccggtgcctga

SEQ ID NO: 7699 - DNA, 1824 bp, Artificial Sequence
  Synthetic Polynucleotide
atgcaggacgaggaacggtacatgaccctgaacgtgcagagcaagaagcggagcagcgcccagacaagccagctgaccttcaaggactacagcgtgaccctgcactggtacaagatcctgctgggcatcagcggcaccgtgaacggaatcctgacactgaccctgatctccctgattctgctggtgtctcagggcgtgctgctgaagtgtcagaagggcagctgtagcaacgccacacagtacgaggataccggcgacctgaaagtgaacaacggcaccagacggaacatcagcaacaaggacctgtgcgccagcagatccgccgatcagacagtgctgtgtcagagcgagtggctgaagtaccagggcaagtgctactggttcagcaacgagatgaagtcttggagcgacagctacgtgtactgcctggaaagaaagagccacctcctgattatccacgaccagctggaaatggccttcatccagaagaacctgcggcagctgaactacgtgtggatcggcctgaacttcaccagcctgaagatgacctggacctgggtggacggcagccctatcgacagcaagattttcttcatcaagggacccgccaaagagaacagctgcgccgccatcaaagagagcaaaatcttcagcgagacatgcagcagcgtgttcaagtggatctgccagtacggcggaggcggatctggcggcggaggtagcggtggcggaggatctttcgaagtgcaactggtggagtccggcggtggactggtacagcctgggggttcactgcgcctgtcctgcgccgccagcggaagaacctattacctcaatgctatgggttggttccgccaggccccaggaaaggagcgcgagttcgtggcggctattgactggtccgaggggaacaaggactatgctgattccgtgaagggcaggtttaccatcagccgggataattcaaaaaatactgtttatttgcagatgaactctcttagaccagaagacactgctgtctattactgcgccgctgacacccctccttggggaccactgatttatatcgaaagctatgattcctgggggcagggcacactcgtcaccgtgagtagcacgcgtcgcgccaagagaagcggatctggcgtgaagcagaccctgaatttcgacctgctgaagctggctggcgacgtggaatccaacccaggcccttctagaggccatatgaccgagtacaagcccacggtgcgcctcgccacccgcgacgacgtccccagggccgtacgcaccctcgccgccgcgttcgccgactaccccgccacgcgccacaccgtcgatccggaccgccacatcgagcgggtcaccgagctgcaagaactcttcctcacgcgcgtcgggctcgacatcggcaaggtgtgggtcgcggacgacggcgccgcggtggcggtctggaccacgccggagagcgtcgaagcgggggcggtgttcgccgagatcggcccgcgcatggccgagttgagcggttcccggctggccgcgcagcaacagatggaaggcctcctggcgccgcaccggcccaaggagcccgcgtggttcctggccaccgtcggcgtctcgcccgaccaccagggcaagggtctgggcagcgccgtcgtgctccccggagtggaggcggccgagcgcgccggggtgcccgccttcctggagacctccgcgccccgcaacctccccttctacgagcggctcggcttcaccgtcaccgccgacgtcgaggtgcccgaaggaccgcgcacctggtgcatgacccgcaagcccggtgcctga

SEQ ID NO: 7700 - DNA, 2346 bp, Artificial Sequence
  Synthetic Polynucleotide
atggccttaccagtgaccgccttgctcctgccgctggccttgctgctccacgccgccaggccggacatccagatgacacagagccctagcagcctgtctgccagcgtgggagacagagtgaccatcacatgcaaggccagcgaccacatcaacaactggctggcctggtatcagcagaagcctggacaggcccctaagctgctgatctacggcgctaccacactggaaacaggcgtgcccagcagattttctggcagcggctctggcaccgactacaccctgacaatatccagcctccagcctgaggacttcgccacctactactgtcagcagagctggaacaccccttggacattcggccagggcaccaagctggaaatcaagagaggcggaggcggaagtggaggcggaggatctggcggcggaggctctcaagttcagcttcaacagcctggcgctgagctggtcaaacctggcgcttctgtgaagatgagctgcaaagccagcggctacgccttcagcagctactggatcaactggatgaagcagaaacccggccagggactcgaatggatcggccaaatctatcccggcgacggcgacaccaactacaacggcaagttcaagggcagagccacactgaccgccgatacctctagcagcacagcctacatgcagctgagcagcctgaccagcgaagatagcgccgtgtacttctgtgcccggtccatcacaacagtcgtgggctgcgctatggactattggggccagggaacaagcgtgaccgtgtctagtacgcgtcagagcaaggctcaggttctccagagtgtggcaggccagactctgactgtcagatgccagtatccaccaacaggctccctctatgagaaaaaaggatggtgtaaagaggcttctgccctcgtctgcatccggctggttacctctagcaagcccagaactatggcctggacatcccggtttacaatctgggatgaccctgatgccggatttttcacagtgacaatgacggatctgcgcgaggaagattccgggcactattggtgtagaatctacaggccctccgacaactccgtgtctaagtctgtgcgcttttacctggtcgtcagccctgccagtgcctccactcagacatcttggaccccaagggaccttgtgtcctctcagacacagacacagtcctgcgtgccaccaactgctggcgcaagacaggctccagagtctcccagcacaatccccgtcccttctcagccccagaactccacacttaggccaggaccagctgctccaatcgcactggtcccagtgttctgcggactgctggttgccaagtctctggtgctgagcgcactcctcgtttggtggggcgatatttggtggaaaacgatgatggaattgagatccctcgatacgcagaaagccacatgccaccttcagcaagtcacagacttgccttggaccagcgtcagctctcccgtggaacgggaaattctgtatcatacagtggcccgcaccaagatttccgacgatgacgacgagcacacactgcgcgccaagagaagcggatctggcgtgaagcagaccctgaatttcgacctgctgaagctggctggcgacgtggaatccaacccaggcccttctagaatgtaccggatgcagctgctgagctgtatcgccctgtctctggccctggtcacaaatagcgcccctaccagcagcagcaccaagaaaacccagctgcaactggaacacctcctgctggacctccagatgatcctgaacggcatcaacaactacaagaaccccaagctgacccggatgctgaccttcaagttctacatgcccaagaaggccaccgagctgaagcacctccagtgcctggaagaggaactgaagcccctggaagaagtgctgaatctggcccagagcaagaacttccacctgaggccaagggacctgatctccaacatcaacgtgatcgtgctggaactgaaaggcagcgagacaaccttcatgtgcgagtacgccgacgagacagctaccatcgtggaatttctgaatcggtggatcaccttctgccagagcatcatcagcaccctgacagcgcgtaaaattgaagttatgtatcctcctccttacctagacaatgagaagagcaatggaaccattatccatgtgaaagggaaacacctttgtccaagtcccctatttcccggaccttctaagcccttttgggtgctggtggtggttgggggagtcctggcttgctatagcttgctagtaacagtggcctttattattttctgggtgaggagtaagaggagctaa

SEQ ID NO: 7701 - DNA, 3201 bp, Artificial Sequence
  Synthetic Polynucleotide
atggccttaccagtgaccgccttgctcctgccgctggccttgctgctccacgccgccaggccgctgcctgttctgacacagcctccatccgtgtctgtggcccctggaaagaccgccagaatcacatgcggcggcaacaacatcggcagcaagagcgtgcactggtatcagcagaagcctggacaggctcctgtgctggtggtgtacgacgacagcgatagacctagcggcatccccgagagattcagcggcagcaattccggcaataccgccacactgaccatcagcagagtggaagctggcgacgaggccgactactactgccaagtgtgggacagcagcagcgactacgtggtgtttggcggcggaacaaagctgacagtgcttggacagcctaaggccaatcctaccgtgacactgttccctccaagcagcgaagaactccaggccaacaaggccacacttgtgtgcctgatctccgacttctaccctggggctgtgacagtggcttggaaggccgatggatctcctgtgaaagccggcgtggaaaccaccaagccatccaagcagagcaacaacaaatacgccgccagctcctacctgagcctgacacctgagcagtggaagtcccacagatcctacagctgccaagtgacccacgaaggcagcaccgtggaaaagacagtggcccctacagagtgcagcggatcccagagcttcggcctgctggaccccaagctgtgctacctgctggatggcatcctgttcatctacggcgtgatcctgaccgccctgttcctgagagtgaagttcagcagaagcgccgacgcccctgcctaccagcagggacagaaccaactgtacaacgagctgaacctgggcagacgggaagagtacgacgtgctggacaagcggagaggcagggaccctgagatgggcggaaagccccagcggagaaagaacccccaggaaggactgtataacgaactccagaaagacaagatggccgaagcctacagcgagatcggcatgaagggcgagcggagaagaggcaagggccacgatggcctgtaccagggcctgagcaccgccaccaaggacacctatgacgccctgcacatgcaggccctgcctccaagaagggccaagcgatctggatctggagcaacaaacttctcactactcaaacaagcaggtgacgtggaggagaatcccgggcctactagtatggactggatttggcgcatccttttccttgtcggcgctgctaccggcgcgcattccttcgaagttcaactggtgcagagcggagccgaagtgaagaagccaggcgagagcctgaagattagctgcaaaggcagcggctacagcttcaccagctactggatcggctgggtccgacagatgcctggcaaaggactggaatggatgggcatcatctaccccggcgacagcgacaccagatacagccctagctttcagggccaagtgaccatctccgccgacaagagcatcagcacagcctacctccagtggtcctctctgaaggccagcgataccgccatgtactactgcgccagacaagtctggggatggcaaggcggcatgtaccccaggtctaactggtggtacaacctggactcttggggccagggcacactggtcacagtctcttctgcctctacaaagggaccctccgtgtttcctctggctcccagcagcaagtctacaagcggaggaacagccgctctgggctgcctggtcaaggattactttcccgagcctgtgaccgtgtcctggaatagcggagcactgacaagcggcgtgcacacctttccagccgtgctgcaaagcagcggcctgtactctctgagcagcgtggtcacagtgcctagctctagcctgggcacccagacctacatctgcaatgtgaaccacaagcctagcaacaccaaggtggacaagagagtggaacccaagagctgtggtacccagagttttgggttgttggaccctaaattgtgctatctgttggacggaatcctgttcatttacggagtgatcctgaccgcattgttcctgcgggttaagttttccagatccgcagacgcacccgcttaccaacaagggcagaaccaactctacaatgaacttaatttggggcggagggaagagtacgacgttctggacaaaaggaggggacgagatcccgagatgggcggaaagcctcagcgaaggaagaatccgcaagaggggctttataacgaactccagaaagataaaatggcagaagcctatagtgagattgggatgaagggagaaaggaggaggggtaaaggtcacgatgggttgtaccaaggattgagcacagccactaaagatacctatgatgcgctccacatgcaggccctgccgccaagacgcgccaagagaagcggatctggcgtgaagcagaccctgaatttcgacctgctgaagctggctggcgacgtggaatccaacccaggcccttctagaatgtaccggatgcagctgctgagctgtatcgccctgtctctggccctggtcacaaatagcgcccctaccagcagcagcaccaagaaaacccagctgcaactggaacacctcctgctggacctccagatgatcctgaacggcatcaacaactacaagaaccccaagctgacccggatgctgaccttcaagttctacatgcccaagaaggccaccgagctgaagcacctccagtgcctggaagaggaactgaagcccctggaagaagtgctgaatctggcccagagcaagaacttccacctgaggccaagggacctgatctccaacatcaacgtgatcgtgctggaactgaaaggcagcgagacaaccttcatgtgcgagtacgccgacgagacagctaccatcgtggaatttctgaatcggtggatcaccttctgccagagcatcatcagcaccctgacagcgcgtaaaattgaagttatgtatcctcctccttacctagacaatgagaagagcaatggaaccattatccatgtgaaagggaaacacctttgtccaagtcccctatttcccggaccttctaagcccttttgggtgctggtggtggttgggggagtcctggcttgctatagcttgctagtaacagtggcctttattattttctgggtgaggagtaagaggagctaa

SEQ ID NO: 7702 - DNA, 2364 bp, Artificial Sequence; identical to SEQ ID NO: 7636
  Synthetic Polynucleotide

SEQ ID NO: 7703 - DNA, 1209 bp, Artificial Sequence
  Synthetic Polynucleotide
atggccttaccagtgaccgccttgctcctgccgctggccttgctgctccacgccgccaggccggacatccagatgaaccagagccccagcagcctgagcgccagcctgggcgataccatcaccatcacctgtcacgccagccagaacatcaacgtgtggctgagctggtatcagcagaagcccggcaacatccccaagctgctgatctacaaggccagcaacctgcacaccggcgtgcccagcagattttctggcagcggctctggcaccggcttcaccattaccatcagctccctccagcccgaggacattgccacctactactgccagcagggccagagctacccctggacatttggcggaggcaccaagctggaaatcaagagaggcggaggcggaagtggaggcggaggatctggcggcggaggctctgaagtgcaactccagcagagcggcccagagcttgtgaagcctggcgcttccgtgaagattagctgcaaagccagcggctacagcttcaccggctacttcatgaactgggtcaagcagagccacggcaagagcctggagtacatcggcagattcaacccctacaacggcgagacactgtacaaccagaagttcaagggcaaggccaccctgaccgtggacaagagcagcagcaccgtgcacatggaactgctgagcgtgaccagcgaggacagcgccgtgtactactgtggcagaagcggcaacgacgacgctatggactattggggccagggcaccagcgtgaccgtgtctagtgctacgcgtggaggctctggagcccctaccagcagcagcaccaagaaaacccagctgcaactggaacacctcctgctggacctccagatgatcctgaacggcatcaacaactacaagaaccccaagctgaccgccatgctgaccaagaagttctacatgcccaagaaggccaccgagctgaagcacctccagtgcctggaagaggaactgaagcccctggaagaagtgctgaatctggcccagagcaagaacttccacctgaggccaagggacctgatctccaacatcaacgtgatcgtgctggaactgaaaggcagcgagacaaccttcatgtgcgagtacgccgacgagacagctaccatcgtggaatttctgaatcggtggatcaccttctgcgccagcatcatcagcaccctgacataa

SEQ ID NO: 7704 - DNA, 1209 bp, Artificial Sequence
  Synthetic Polynucleotide
atggccttaccagtgaccgccttgctcctgccgctggccttgctgctccacgccgccaggccggacatccagatgaaccagagccccagcagcctgagcgccagcctgggcgataccatcaccatcacctgtcacgccagccagaacatcaacgtgtggctgagctggtatcagcagaagcccggcaacatccccaagctgctgatctacaaggccagcaacctgcacaccggcgtgcccagcagattttctggcagcggctctggcaccggcttcaccattaccatcagctccctccagcccgaggacattgccacctactactgccagcagggccagagctacccctggacatttggcggaggcaccaagctggaaatcaagagaggcggaggcggaagtggaggcggaggatctggcggcggaggctctgaagtgcaactccagcagagcggcccagagcttgtgaagcctggcgcttccgtgaagattagctgcaaagccagcggctacagcttcaccggctacttcatgaactgggtcaagcagagccacggcaagagcctggagtacatcggcagattcaacccctacaacggcgagacactgtacaaccagaagttcaagggcaaggccaccctgaccgtggacaagagcagcagcaccgtgcacatggaactgctgagcgtgaccagcgaggacagcgccgtgtactactgtggcagaagcggcaacgacgacgctatggactattggggccagggcaccagcgtgaccgtgtctagtgctacgcgtggaggctctggagcccctaccagcagcagcaccaagaaaacccagctgcaactggaacacctcctgctggacctccagatgatcctgaacggcatcaacaactacaagaaccccaagctgaccgagatgctgaccgccaagttctacatgcccaagaaggccaccgagctgaagcacctccagtgcctggaagaggaactgaagcccctggaagaagtgctgaatctggcccagagcaagaacttccacctgaggccaagggacctgatctccaacatcaacgtggccgtgctggaactgaaaggcagcgagacaaccttcatgtgcgagtacgccgacgagacagctaccatcgtggaatttctgaatcggtggatcaccttctgccagagcatcatcagcaccctgacataa

SEQ ID NO: 7705 - DNA, 1209 bp, Artificial Sequence
  Synthetic Polynucleotide
atggccttaccagtgaccgccttgctcctgccgctggccttgctgctccacgccgccaggccggacatccagatgaaccagagccccagcagcctgagcgccagcctgggcgataccatcaccatcacctgtcacgccagccagaacatcaacgtgtggctgagctggtatcagcagaagcccggcaacatccccaagctgctgatctacaaggccagcaacctgcacaccggcgtgcccagcagattttctggcagcggctctggcaccggcttcaccattaccatcagctccctccagcccgaggacattgccacctactactgccagcagggccagagctacccctggacatttggcggaggcaccaagctggaaatcaagagaggcggaggcggaagtggaggcggaggatctggcggcggaggctctgaagtgcaactccagcagagcggcccagagcttgtgaagcctggcgcttccgtgaagattagctgcaaagccagcggctacagcttcaccggctacttcatgaactgggtcaagcagagccacggcaagagcctggagtacatcggcagattcaacccctacaacggcgagacactgtacaaccagaagttcaagggcaaggccaccctgaccgtggacaagagcagcagcaccgtgcacatggaactgctgagcgtgaccagcgaggacagcgccgtgtactactgtggcagaagcggcaacgacgacgctatggactattggggccagggcaccagcgtgaccgtgtctagtgctacgcgtggaggctctggagcccctaccagcagcagcaccaagaaaacccagctgcaactggaacacctcctgctggacctccagatgatcctgaacggcatcaacaactacaagaaccccaagctgacccggatgctgaccgccaagttcgccatgcccaagaaggccaccgagctgaagcacctccagtgcctggaagaggaactgaagcccctggaagaagtgctgaatggggcccagagcaagaacttccacctgaggccaagggacctgatctccaacatcaacgtgatcgtgctggaactgaaaggcagcgagacaaccttcatgtgcgagtacgccgacgagacagctaccatcgtggaatttctgaatcggtggatcaccttcggccagagcatcatcagcaccctgacataa

SEQ ID NO: 7706 - DNA, 1209 bp, Artificial Sequence
  Synthetic Polynucleotide
atggccttaccagtgaccgccttgctcctgccgctggccttgctgctccacgccgccaggccggacatccagatgaaccagagccccagcagcctgagcgccagcctgggcgataccatcaccatcacctgtcacgccagccagaacatcaacgtgtggctgagctggtatcagcagaagcccggcaacatccccaagctgctgatctacaaggccagcaacctgcacaccggcgtgcccagcagattttctggcagcggctctggcaccggcttcaccattaccatcagctccctccagcccgaggacattgccacctactactgccagcagggccagagctacccctggacatttggcggaggcaccaagctggaaatcaagagaggcggaggcggaagtggaggcggaggatctggcggcggaggctctgaagtgcaactccagcagagcggcccagagcttgtgaagcctggcgcttccgtgaagattagctgcaaagccagcggctacagcttcaccggctacttcatgaactgggtcaagcagagccacggcaagagcctggagtacatcggcagattcaacccctacaacggcgagacactgtacaaccagaagttcaagggcaaggccaccctgaccgtggacaagagcagcagcaccgtgcacatggaactgctgagcgtgaccagcgaggacagcgccgtgtactactgtggcagaagcggcaacgacgacgctatggactattggggccagggcaccagcgtgaccgtgtctagtgctacgcgtggaggctctggagcccctaccagcagcagcaccaagaaaacccagctgcaactggaacacctcctgctggacctccagatgatcctgaacggcatcaacaactacaagaaccccaagctgacccggatgctgaccttcaagttctacatgcccaagaaggccaccgagctgaagcacctccagtgcctggaagaggaactgaagcccctggaagaagtgctgaatctggcccagagcaagaacttccacctgaggccaagggacctgatctccaacatcaacgtgatcgtgctggaactgaaaggcagcgagacaaccttcatgtgcgagtacgccgacgagacagctaccatcgtggaatttctgaatcggtggatcaccttctgccagagcatcatcagcaccctgacataa

SEQ ID NO: 7707 - DNA, 3201 bp, Artificial Sequence; identical to SEQ ID NO: 7701
  Synthetic Polynucleotide

SEQ ID NO: 7708 - DNA, 4137 bp, Artificial Sequence
  Synthetic Polynucleotide
atggccttaccagtgaccgccttgctcctgccgctggccttgctgctccacgccgccaggccggcatgcgaggtgcagctggttgaatctggcggaggactggttcagcctggcggatctctgagactgtcttgtgccgccagcggctacaccttcaccacctattggatgcactgggtccgacaggcccctggcaaaggacttgagtgggtcggatatatcaggcccagcaccggctacacagagtacaaccagaagttcaaggaccgcttcaccatcagcgccgacaccagcaagaataccgcctacctccagatgaacagcctgagagccgaggacaccgccgtgtactactgtgccagatccagatggctgctggactattggggccagggcacactggttacagtttctggcggaggcggaagtggaggcggaggatctggcggcggaggctctgacattcagatgacacagagccctagcagcctgagcgcctctgtgggagacagagtgaccatcacatgcaagagcagccagagcgtgctgtactccagcaatcagaagaactacctggcctggttccagcagaagcctggcaaggctcctaagctgctgatctactgggccagcaccagagaaagcggcgtgccaagcagattttctggcagcggctctggcaccgacttcaccctgacaatatccagcctccagcctgaggacttcgccacctacttttgccaccagtacctgagcagctacacattcggacagggcaccaaggtggaaatcaagcggggtaccggcggaggcggatctggcggcggaggtagcggtggcggaggatctgaattcgacatccagatgacacagagccctagcagcctgtctgccagcgtgggagacagagtgaccatcacatgcaaggccagcgaccacatcaacaactggctggcctggtatcagcagaagcctggacaggcccctaagctgctgatctacggcgctaccacactggaaacaggcgtgcccagcagattttctggcagcggctctggcaccgactacaccctgacaatatccagcctccagcctgaggacttcgccacctactactgtcagcagagctggaacaccccttggacattcggccagggcaccaagctggaaatcaagagactcgaggacctgaagaacgtgttcccacctgaggtggccgtgttcgagcctagcaaggccgagatcgcccacacccagaaagccaccctcgtgtgcctggctaccggcttctaccccgaccatgtggaactgtcttggtgggtcaacggcaaagaggtgcacagcggcgtgtgtaccgacccccagccactgaaagaacagcccgccctgaacgacagccggtactgcctgagcagcagactgagagtgtccgccaccttctggcagaacccccggaaccacttcagatgccaggtgcagttctacggcctgagcgagaacgacgagtggacccaggacagagccaagcccgtgacccagatcgtgtctgccgaagcctggggcagagccgattgcggcatcaccagcgccagctaccaccagggcgtgctgagcgccaccatcctgtacgagatcctgctgggcaaggccaccctgtacgccgtgctggtgtctgccctggtgctgatggctatggtcaagcggaaggacagccggggaagggccaagcgatctggatctggagcaacaaacttctcactactcaaacaagcaggtgacgtggaggagaatcccgggcctactagtgccaccatggactggatttggcgcatccttttccttgtcggcgctgctaccggcgcccattccgggcccgacatccagatgacacagagccctagcagcctgtctgccagcgtgggagacagagtgaccatcacatgcaaggccagccaggatgtgggcacagccgtggattggtatcagcagaagcctggcaaggcccctaagctgctgatctactgggccagcacaagacacacaggcgtgcccagcagattttctggcagcggctctggcaccgacttcaccctgacaatatccagcctccagcctgaggacttcgccacctactactgccagcagtacaacagctaccctctgaccttcggccagggcaccaaggtggaaatcaaaagaggcggaggcggatctggcggcggaggtagcggtggcggaggatctgaagtgcagctggttgaatcaggtggcggcctggttcaacctggcggatctctgagactgagctgtgccgccagcggctacacctttaccgagtacacaatccactgggtccgacaggcccctggcaaaggacttgagtgggtcgccaacatcaaccccaacaatggcggcaccacctacaaccagaagttcgaggacagattcaccatcagccgggacaacagcaagaacaccctgtacctccagatgaactccctgagagccgaggacaccgccgtgtactattgtgccagaggctggaacttcgactactggggccagggaacactggtcaccgttagctctggatccggcggcggaggatctggcggaggcggatctgggggcggaggctctttcgaacaagttcagcttcaacagcctggcgctgagctggtcaaacctggcgcttctgtgaagatgagctgcaaagccagcggctacgccttcagcagctactggatcaactggatgaagcagaaacccggccagggactcgaatggatcggccaaatctatcccggcgacggcgacaccaactacaacggcaagttcaagggcagagccacactgaccgccgatacctctagcagcacagcctacatgcagctgagcagcctgaccagcgaagatagcgccgtgtacttctgtgcccggtccatcacaacagtcgtgggctgcgctatggactattggggccagggaacaagcgtgaccgtgtctagtacgcgtatccagaaccctgatcctgccgtgtaccagctgcgggatagcaagagcagcgacaagagcgtgtgtctgttcaccgacttcgacagccagaccaacgtgtcccagagcaaggactccgacgtgtacatcaccgataagtgcgtgctggacatgcggagcatggacttcaagagcaactccgccgtggcctggtccaacaagtccgatttcgcctgcgccaacgccttcaacaacagcattatccccgaggacacattcttcccaagcagcgacgtgccctgcgacgtgaagctggtggaaaagagcttcgagacagacaccaacctgaacttccagaacctgagcgtgatcggcttcagaatcctgctgctgaaagtggccggctttaacctgctgatgaccctgcggctgtggtccagccgcgccaagagaagcggatctggcgtgaagcagaccctgaatttcgacctgctgaagctggctggcgacgtggaatccaacccaggcccttctagaggccatatgaccgagtacaagcccacggtgcgcctcgccacccgcgacgacgtccccagggccgtacgcaccctcgccgccgcgttcgccgactaccccgccacgcgccacaccgtcgatccggaccgccacatcgagcgggtcaccgagctgcaagaactcttcctcacgcgcgtcgggctcgacatcggcaaggtgtgggtcgcggacgacggcgccgcggtggcggtctggaccacgccggagagcgtcgaagcgggggcggtgttcgccgagatcggcccgcgcatggccgagttgagcggttcccggctggccgcgcagcaacagatggaaggcctcctggcgccgcaccggcccaaggagcccgcgtggttcctggccaccgtcggcgtctcgcccgaccaccagggcaagggtctgggcagcgccgtcgtgctccccggagtggaggcggccgagcgcgccggggtgcccgccttcctggagacctccgcgccccgcaacctccccttctacgagcggctcggcttcaccgtcaccgccgacgtcgaggtgcccgaaggaccgcgcacctggtgcatgacccgcaagcccggtgcctga

SEQ ID NO: 7709 - DNA, 2634 bp, Artificial Sequence
  Synthetic Polynucleotide
atggccttaccagtgaccgccttgctcctgccgctggccttgctgctccacgccgccaggccggacatccagatgacacagagccctagcagcctgtctgccagcgtgggagacagagtgaccatcacatgcaaggccagcgaccacatcaacaactggctggcctggtatcagcagaagcctggacaggcccctaagctgctgatctacggcgctaccacactggaaacaggcgtgcccagcagattttctggcagcggctctggcaccgactacaccctgacaatatccagcctccagcctgaggacttcgccacctactactgtcagcagagctggaacaccccttggacattcggccagggcaccaagctggaaatcaagagactcgaggacaagcagctggacgccgacgtgtcccccaagcctaccatcttcctgccctctatcgccgagacaaagctccagaaggccggcacctacctgtgcctgctggaaaagttcttcccagatatcattaagatccactggcaggaaaagaagtccaacaccatcctgggcagccaggaaggcaacaccatgaagaccaacgacacctacatgaagttcagctggctgaccgtgcccgaggagtccctggacaaagaacacagatgcatcgtgcggcacgaaaacaacaagaacggcatcgaccaggaaatcatcttcccacccatcaagaccgatgttaccaccgtagaccctaagtataactattcaaaggatgctaacgatgtgattacaatggaccccaaggacaactggtccaaggacgccaacgataccctgctgctccagctgaccaacaccagcgcctactacacctacttgttgctgctgctgaagtccgtggtgtacttcgccatcatcacatgctgcctgctgcggagaaccgccttctgctgcaacggcgagaagtctagggccaagcgatctggatctggagcaacaaacttctcactactcaaacaagcaggtgacgtggaggagaatcccgggcctactagtatggactggatttggcgcatccttttccttgtcggcgctgctaccggcgcgcattccttcgaacaagttcagcttcaacagcctggcgctgagctggtcaaacctggcgcttctgtgaagatgagctgcaaagccagcggctacgccttcagcagctactggatcaactggatgaagcagaaacccggccagggactcgaatggatcggccaaatctatcccggcgacggcgacaccaactacaacggcaagttcaagggcagagccacactgaccgccgatacctctagcagcacagcctacatgcagctgagcagcctgaccagcgaagatagcgccgtgtacttctgtgcccggtccatcacaacagtcgtgggctgcgctatggactattggggccagggaacaagcgtgaccgtgtctagtacgcgtcctcacaccaagcccagcgtgttcgtgatgaagaacggcaccaacgtggcctgcctcgtgaaagagttctaccccaaggacatcaggatcaacctggtgtccagcaagaagatcaccgagttcgaccccgccatcgtgatctcccccagcggcaagtacaacgccgtgaagctggggaagtacgaggacagcaacagcgtgacctgctccgtgcagcacgacaacaagaccgtgcacagcaccgactttgaagtgaaaaccgactccaccgaccacgtgaagcccaaagagacagagaacaccaagcagcccagcaagagctgccacaagcccaaggccatcgtgcacaccgagaaagtgaacatgatgagcctgaccgtgctgggcctgcggatgctgttcgccaaaaccgtggccgtgaacttcctgctgaccgccaagctgttcttcctccgcgccaagagaagcggatctggcgtgaagcagaccctgaatttcgacctgctgaagctggctggcgacgtggaatccaacccaggcccttctagaggccatatgaccgagtacaagcccacggtgcgcctcgccacccgcgacgacgtccccagggccgtacgcaccctcgccgccgcgttcgccgactaccccgccacgcgccacaccgtcgatccggaccgccacatcgagcgggtcaccgagctgcaagaactcttcctcacgcgcgtcgggctcgacatcggcaaggtgtgggtcgcggacgacggcgccgcggtggcggtctggaccacgccggagagcgtcgaagcgggggcggtgttcgccgagatcggcccgcgcatggccgagttgagcggttcccggctggccgcgcagcaacagatggaaggcctcctggcgccgcaccggcccaaggagcccgcgtggttcctggccaccgtcggcgtctcgcccgaccaccagggcaagggtctgggcagcgccgtcgtgctccccggagtggaggcggccgagcgcgccggggtgcccgccttcctggagacctccgcgccccgcaacctccccttctacgagcggctcggcttcaccgtcaccgccgacgtcgaggtgcccgaaggaccgcgcacctggtgcatgacccgcaagcccggtgcctga

SEQ ID NO: 7710 - DNA, 2124 bp, Artificial Sequence
  Synthetic Polynucleotide
atggccttaccagtgaccgccttgctcctgccgctggccttgctgctccacgccgccaggccggacatccagatgacacagagccctagcagcctgtctgccagcgtgggagacagagtgaccatcacatgcaaggccagcgaccacatcaacaactggctggcctggtatcagcagaagcctggacaggcccctaagctgctgatctacggcgctaccacactggaaacaggcgtgcccagcagattttctggcagcggctctggcaccgactacaccctgacaatatccagcctccagcctgaggacttcgccacctactactgtcagcagagctggaacaccccttggacattcggccagggcaccaagctggaaatcaagagaggcggaggcggaagtggaggcggaggatctggcggcggaggctctcaagttcagcttcaacagcctggcgctgagctggtcaaacctggcgcttctgtgaagatgagctgcaaagccagcggctacgccttcagcagctactggatcaactggatgaagcagaaacccggccagggactcgaatggatcggccaaatctatcccggcgacggcgacaccaactacaacggcaagttcaagggcagagccacactgaccgccgatacctctagcagcacagcctacatgcagctgagcagcctgaccagcgaagatagcgccgtgtacttctgtgcccggtccatcacaacagtcgtgggctgcgctatggactattggggccagggaacaagcgtgaccgtgtctagtacgcgtctgtgggtgtcccagccacctgaaattcggacactggaaggctcctccgcctttctgccctgtagctttaacgccagccaggggagactcgccatcggctctgtgacatggttccgggatgaagtcgtccctggaaaagaagttcgcaacggaacaccagagttcagaggcagactcgccccactggcaagctccagattcctgcatgaccatcaggctgaactgcacattagggacgtgcggggccacgatgcctccatctatgtgtgtcgggtcgaagtgcttggactcggcgtcggaactggaaacggcactaggctggtggtcgagaaagaacatccacagcttggcgctggcaccgtcctgttgcttagagccggattctatgccgtcagcttcctgtccgtggctgtggggtctacagtgtattaccagggaaaatgtctcacctggaaaggccccagacgccagcttccagctgttgttcctgctccactgccaccaccttgtggctcctctgctcacttgcttccaccagtgcctggcggacgcgccaagagaagcggatctggcgtgaagcagaccctgaatttcgacctgctgaagctggctggcgacgtggaatccaacccaggcccttctagaatgtaccggatgcagctgctgagctgtatcgccctgtctctggccctggtcacaaatagcgcccctaccagcagcagcaccaagaaaacccagctgcaactggaacacctcctgctggacctccagatgatcctgaacggcatcaacaactacaagaaccccaagctgaccgagatgctgaccgccaagttctacatgcccaagaaggccaccgagctgaagcacctccagtgcctggaagaggaactgaagcccctggaagaagtgctgaatctggcccagagcaagaacttccacctgaggccaagggacctgatctccaacatcaacgtgatcgtgctggaactgaaaggcagcgagacaaccttcatgtgcgagtacgccgacgagacagctaccatcgtggaatttctgaatcggtggatcaccttctgccagagcatcatcagcaccctgacaaagatcgaagtgatgtaccctcctccttacctggacaacgagaagtccaacggcaccatcatccacgtgaagggcaagcacctgtgtccttctccactgttccccggacctagcaagcctttctgggtgctcgttgttgttggcggcgtgctggcctgttacagcctgctggttaccgtggccttcatcatcttttgggtccgaagcaagcggagctaa

SEQ ID NO: 7711 - DNA, 2124 bp, Artificial Sequence
  Synthetic Polynucleotide
atggccttaccagtgaccgccttgctcctgccgctggccttgctgctccacgccgccaggccggacatccagatgacacagagccctagcagcctgtctgccagcgtgggagacagagtgaccatcacatgcaaggccagcgaccacatcaacaactggctggcctggtatcagcagaagcctggacaggcccctaagctgctgatctacggcgctaccacactggaaacaggcgtgcccagcagattttctggcagcggctctggcaccgactacaccctgacaatatccagcctccagcctgaggacttcgccacctactactgtcagcagagctggaacaccccttggacattcggccagggcaccaagctggaaatcaagagaggcggaggcggaagtggaggcggaggatctggcggcggaggctctcaagttcagcttcaacagcctggcgctgagctggtcaaacctggcgcttctgtgaagatgagctgcaaagccagcggctacgccttcagcagctactggatcaactggatgaagcagaaacccggccagggactcgaatggatcggccaaatctatcccggcgacggcgacaccaactacaacggcaagttcaagggcagagccacactgaccgccgatacctctagcagcacagcctacatgcagctgagcagcctgaccagcgaagatagcgccgtgtacttctgtgcccggtccatcacaacagtcgtgggctgcgctatggactattggggccagggaacaagcgtgaccgtgtctagtacgcgtctgtgggtgtcccagccacctgaaattcggacactggaaggctcctccgcctttctgccctgtagctttaacgccagccaggggagactcgccatcggctctgtgacatggttccgggatgaagtcgtccctggaaaagaagttcgcaacggaacaccagagttcagaggcagactcgccccactggcaagctccagattcctgcatgaccatcaggctgaactgcacattagggacgtgcggggccacgatgcctccatctatgtgtgtcgggtcgaagtgcttggactcggcgtcggaactggaaacggcactaggctggtggtcgagaaagaacatccacagcttggcgctggcaccgtcctgttgcttagagccggattctatgccgtcagcttcctgtccgtggctgtggggtctacagtgtattaccagggaaaatgtctcacctggaaaggccccagacgccagcttccagctgttgttcctgctccactgccaccaccttgtggctcctctgctcacttgcttccaccagtgcctggcggacgcgccaagagaagcggatctggcgtgaagcagaccctgaatttcgacctgctgaagctggctggcgacgtggaatccaacccaggcccttctagaatgtaccggatgcagctgctgagctgtatcgccctgtctctggccctggtcacaaatagcgcccctaccagcagcagcaccaagaaaacccagctgcaactggaacacctcctgctggacctccagatgatcctgaacggcatcaacaactacaagaaccccaagctgaccgccatgctgaccaagaagttctacatgcccaagaaggccaccgagctgaagcacctccagtgcctggaagaggaactgaagcccctggaagaagtgctgaatctggcccagagcaagaacttccacctgaggccaagggacctgatctccaacatcaacgtgatcgtgctggaactgaaaggcagcgagacaaccttcatgtgcgagtacgccgacgagacagctaccatcgtggaatttctgaatcggtggatcaccttctgcgccagcatcatcagcaccctgacaaagatcgaagtgatgtaccctcctccttacctggacaacgagaagtccaacggcaccatcatccacgtgaagggcaagcacctgtgtccttctccactgttccccggacctagcaagcctttctgggtgctcgttgttgttggcggcgtgctggcctgttacagcctgctggttaccgtggccttcatcatcttttgggtccgaagcaagcggagctaa

SEQ ID NO: 7712 - DNA, 2124 bp, Artificial Sequence
  Synthetic Polynucleotide
atggccttaccagtgaccgccttgctcctgccgctggccttgctgctccacgccgccaggccggacatccagatgacacagagccctagcagcctgtctgccagcgtgggagacagagtgaccatcacatgcaaggccagcgaccacatcaacaactggctggcctggtatcagcagaagcctggacaggcccctaagctgctgatctacggcgctaccacactggaaacaggcgtgcccagcagattttctggcagcggctctggcaccgactacaccctgacaatatccagcctccagcctgaggacttcgccacctactactgtcagcagagctggaacaccccttggacattcggccagggcaccaagctggaaatcaagagaggcggaggcggaagtggaggcggaggatctggcggcggaggctctcaagttcagcttcaacagcctggcgctgagctggtcaaacctggcgcttctgtgaagatgagctgcaaagccagcggctacgccttcagcagctactggatcaactggatgaagcagaaacccggccagggactcgaatggatcggccaaatctatcccggcgacggcgacaccaactacaacggcaagttcaagggcagagccacactgaccgccgatacctctagcagcacagcctacatgcagctgagcagcctgaccagcgaagatagcgccgtgtacttctgtgcccggtccatcacaacagtcgtgggctgcgctatggactattggggccagggaacaagcgtgaccgtgtctagtacgcgtctgtgggtgtcccagccacctgaaattcggacactggaaggctcctccgcctttctgccctgtagctttaacgccagccaggggagactcgccatcggctctgtgacatggttccgggatgaagtcgtccctggaaaagaagttcgcaacggaacaccagagttcagaggcagactcgccccactggcaagctccagattcctgcatgaccatcaggctgaactgcacattagggacgtgcggggccacgatgcctccatctatgtgtgtcgggtcgaagtgcttggactcggcgtcggaactggaaacggcactaggctggtggtcgagaaagaacatccacagcttggcgctggcaccgtcctgttgcttagagccggattctatgccgtcagcttcctgtccgtggctgtggggtctacagtgtattaccagggaaaatgtctcacctggaaaggccccagacgccagcttccagctgttgttcctgctccactgccaccaccttgtggctcctctgctcacttgcttccaccagtgcctggcggacgcgccaagagaagcggatctggcgtgaagcagaccctgaatttcgacctgctgaagctggctggcgacgtggaatccaacccaggcccttctagaatgtaccggatgcagctgctgagctgtatcgccctgtctctggccctggtcacaaatagcgcccctgccagcagcagcaccaagaaaacccagctgcaactggaacacctcctgctggacctccagatgatcctgaacggcatcaacaactacaagaaccccaagctgacccggatgctgaccgccaagttcgccatgcccaagaaggccaccgagctgaagcacctccagtgcctggaagaggaactgaagcccctggaagaagtgctgaatggggcccagagcaagaacttccacctgaggccaagggacctgatctccaacatcaacgtgatcgtgctggaactgaaaggcagcgagacaaccttcatgtgcgagtacgccgacgagacagctaccatcgtggaatttctgaatcggtggatcaccttcggccagagcatcatcagcaccctgacaaagatcgaagtgatgtaccctcctccttacctggacaacgagaagtccaacggcaccatcatccacgtgaagggcaagcacctgtgtccttctccactgttccccggacctagcaagcctttctgggtgctcgttgttgttggcggcgtgctggcctgttacagcctgctggttaccgtggccttcatcatcttttgggtccgaagcaagcggagctaa

SEQ ID NO: 7713 - DNA, 2124 bp, Artificial Sequence
  Synthetic Polynucleotide
atggccttaccagtgaccgccttgctcctgccgctggccttgctgctccacgccgccaggccggacatccagatgacacagagccctagcagcctgtctgccagcgtgggagacagagtgaccatcacatgcaaggccagcgaccacatcaacaactggctggcctggtatcagcagaagcctggacaggcccctaagctgctgatctacggcgctaccacactggaaacaggcgtgcccagcagattttctggcagcggctctggcaccgactacaccctgacaatatccagcctccagcctgaggacttcgccacctactactgtcagcagagctggaacaccccttggacattcggccagggcaccaagctggaaatcaagagaggcggaggcggaagtggaggcggaggatctggcggcggaggctctcaagttcagcttcaacagcctggcgctgagctggtcaaacctggcgcttctgtgaagatgagctgcaaagccagcggctacgccttcagcagctactggatcaactggatgaagcagaaacccggccagggactcgaatggatcggccaaatctatcccggcgacggcgacaccaactacaacggcaagttcaagggcagagccacactgaccgccgatacctctagcagcacagcctacatgcagctgagcagcctgaccagcgaagatagcgccgtgtacttctgtgcccggtccatcacaacagtcgtgggctgcgctatggactattggggccagggaacaagcgtgaccgtgtctagtacgcgtctgtgggtgtcccagccacctgaaattcggacactggaaggctcctccgcctttctgccctgtagctttaacgccagccaggggagactcgccatcggctctgtgacatggttccgggatgaagtcgtccctggaaaagaagttcgcaacggaacaccagagttcagaggcagactcgccccactggcaagctccagattcctgcatgaccatcaggctgaactgcacattagggacgtgcggggccacgatgcctccatctatgtgtgtcgggtcgaagtgcttggactcggcgtcggaactggaaacggcactaggctggtggtcgagaaagaacatccacagcttggcgctggcaccgtcctgttgcttagagccggattctatgccgtcagcttcctgtccgtggctgtggggtctacagtgtattaccagggaaaatgtctcacctggaaaggccccagacgccagcttccagctgttgttcctgctccactgccaccaccttgtggctcctctgctcacttgcttccaccagtgcctggcggacgcgccaagagaagcggatctggcgtgaagcagaccctgaatttcgacctgctgaagctggctggcgacgtggaatccaacccaggcccttctagaatgtaccggatgcagctgctgagctgtatcgccctgtctctggccctggtcacaaatagcgcccctaccagcagcagcaccaagaaaacccagctgcaactggaacacctcctgctggacctccagatgatcctgaacggcatcaacaactacaagaaccccaagctgaccgagatgctgaccgccaagttctacatgcccaagaaggccaccgagctgaagcacctccagtgcctggaagaggaactgaagcccctggaagaagtgctgaatctggcccagagcaagaacttccacctgaggccaagggacctgatctccaacatcaacgtggccgtgctggaactgaaaggcagcgagacaaccttcatgtgcgagtacgccgacgagacagctaccatcgtggaatttctgaatcggtggatcaccttctgccagagcatcatcagcaccctgacaaagatcgaagtgatgtaccctcctccttacctggacaacgagaagtccaacggcaccatcatccacgtgaagggcaagcacctgtgtccttctccactgttccccggacctagcaagcctttctgggtgctcgttgttgttggcggcgtgctggcctgttacagcctgctggttaccgtggccttcatcatcttttgggtccgaagcaagcggagctaa

SEQ ID NO: 7714 - DNA, 2067 bp, Artificial Sequence
  Synthetic Polynucleotide
atggccttaccagtgaccgccttgctcctgccgctggccttgctgctccacgccgccaggccggacatccagatgacacagagccctagcagcctgtctgccagcgtgggagacagagtgaccatcacatgcaaggccagcgaccacatcaacaactggctggcctggtatcagcagaagcctggacaggcccctaagctgctgatctacggcgctaccacactggaaacaggcgtgcccagcagattttctggcagcggctctggcaccgactacaccctgacaatatccagcctccagcctgaggacttcgccacctactactgtcagcagagctggaacaccccttggacattcggccagggcaccaagctggaaatcaagagaggcggaggcggaagtggaggcggaggatctggcggcggaggctctcaagttcagcttcaacagcctggcgctgagctggtcaaacctggcgcttctgtgaagatgagctgcaaagccagcggctacgccttcagcagctactggatcaactggatgaagcagaaacccggccagggactcgaatggatcggccaaatctatcccggcgacggcgacaccaactacaacggcaagttcaagggcagagccacactgaccgccgatacctctagcagcacagcctacatgcagctgagcagcctgaccagcgaagatagcgccgtgtacttctgtgcccggtccatcacaacagtcgtgggctgcgctatggactattggggccagggaacaagcgtgaccgtgtctagtacgcgtctgtgggtgtcccagccacctgaaattcggacactggaaggctcctccgcctttctgccctgtagctttaacgccagccaggggagactcgccatcggctctgtgacatggttccgggatgaagtcgtccctggaaaagaagttcgcaacggaacaccagagttcagaggcagactcgccccactggcaagctccagattcctgcatgaccatcaggctgaactgcacattagggacgtgcggggccacgatgcctccatctatgtgtgtcgggtcgaagtgcttggactcggcgtcggaactggaaacggcactaggctggtggtcgagaaagaacatccacagcttggcgctggcaccgtcctgttgcttagagccggattctatgccgtcagcttcctgtccgtggctgtggggtctacagtgtattaccagggaaaatgtctcacctggaaaggccccagacgccagcttccagctgttgttcctgctccactgccaccaccttgtggctcctctgctcacttgcttccaccagtgcctggcggacgcgccaagagaagcggatctggcgtgaagcagaccctgaatttcgacctgctgaagctggctggcgacgtggaatccaacccaggcccttctagaatgtaccggatgcagctgctgagctgtatcgccctgtctctggccctggtcacaaatagcaactgggttaacgtgatctccgacctgaagaagatcgaggacctgatccagtccatgcacatcgacgccacactgtacaccgagagcgacgtgcaccctagctgtaaagtgaccgccatgaagtgctttctgctggaactgcaagtgatctccctggaaagcggcgacgccagcatccacgacaccgtgaagaacctgattatcctggctaacaacagcctgagcagcaacggcaacgtgaccgagtccggctgtaaagagtgcgaggaactggaagagaagaatatcaaagagttcctccagagcttcgtgcacatcgtgcagatgttcatcaacaccagcaagatcgaagtgatgtaccctcctccttacctggacaacgagaagtccaacggcaccatcatccacgtgaagggcaagcacctgtgtccttctccactgttccccggacctagcaagcctttctgggtgctcgttgttgttggcggcgtgctggcctgttacagcctgctggttaccgtggccttcatcatcttttgggtccgaagcaagcggagctaa

SEQ ID NO: 7715 - DNA, 2067 bp, Artificial Sequence
  Synthetic Polynucleotide
atggccttaccagtgaccgccttgctcctgccgctggccttgctgctccacgccgccaggccggacatccagatgacacagagccctagcagcctgtctgccagcgtgggagacagagtgaccatcacatgcaaggccagcgaccacatcaacaactggctggcctggtatcagcagaagcctggacaggcccctaagctgctgatctacggcgctaccacactggaaacaggcgtgcccagcagattttctggcagcggctctggcaccgactacaccctgacaatatccagcctccagcctgaggacttcgccacctactactgtcagcagagctggaacaccccttggacattcggccagggcaccaagctggaaatcaagagaggcggaggcggaagtggaggcggaggatctggcggcggaggctctcaagttcagcttcaacagcctggcgctgagctggtcaaacctggcgcttctgtgaagatgagctgcaaagccagcggctacgccttcagcagctactggatcaactggatgaagcagaaacccggccagggactcgaatggatcggccaaatctatcccggcgacggcgacaccaactacaacggcaagttcaagggcagagccacactgaccgccgatacctctagcagcacagcctacatgcagctgagcagcctgaccagcgaagatagcgccgtgtacttctgtgcccggtccatcacaacagtcgtgggctgcgctatggactattggggccagggaacaagcgtgaccgtgtctagtacgcgtctgtgggtgtcccagccacctgaaattcggacactggaaggctcctccgcctttctgccctgtagctttaacgccagccaggggagactcgccatcggctctgtgacatggttccgggatgaagtcgtccctggaaaagaagttcgcaacggaacaccagagttcagaggcagactcgccccactggcaagctccagattcctgcatgaccatcaggctgaactgcacattagggacgtgcggggccacgatgcctccatctatgtgtgtcgggtcgaagtgcttggactcggcgtcggaactggaaacggcactaggctggtggtcgagaaagaacatccacagcttggcgctggcaccgtcctgttgcttagagccggattctatgccgtcagcttcctgtccgtggctgtggggtctacagtgtattaccagggaaaatgtctcacctggaaaggccccagacgccagcttccagctgttgttcctgctccactgccaccaccttgtggctcctctgctcacttgcttccaccagtgcctggcggacgcgccaagagaagcggatctggcgtgaagcagaccctgaatttcgacctgctgaagctggctggcgacgtggaatccaacccaggcccttctagaatgtaccggatgcagctgctgagctgtatcgccctgtctctggccctggtcacaaatagcaactgggttaacgtgatctccgacctgaagaagatcgaggacctgatccagtccatgcacatcgacgccacactgtacaccgagagcgacgtgcaccctagctgtaaagtgaccgccatgaagtgctttctgctggaactgcaagtgatctccctggaaagcggcgacgccagcatccacgacaccgtggaaaacctgattatccgggctaacaacagcctgagcagcaacggcaacgtgaccgagtccggctgtaaagagtgcgaggaactggaagagaagaatatcaaagagttcctccagagcttcgtgcacatcgtgcagatgttcatcaacaccagcaagatcgaagtgatgtaccctcctccttacctggacaacgagaagtccaacggcaccatcatccacgtgaagggcaagcacctgtgtccttctccactgttccccggacctagcaagcctttctgggtgctcgttgttgttggcggcgtgctggcctgttacagcctgctggttaccgtggccttcatcatcttttgggtccgaagcaagcggagctaa

SEQ ID NO: 7716 - DNA, 2067 bp, Artificial Sequence
  Synthetic Polynucleotide
atggccttaccagtgaccgccttgctcctgccgctggccttgctgctccacgccgccaggccggacatccagatgacacagagccctagcagcctgtctgccagcgtgggagacagagtgaccatcacatgcaaggccagcgaccacatcaacaactggctggcctggtatcagcagaagcctggacaggcccctaagctgctgatctacggcgctaccacactggaaacaggcgtgcccagcagattttctggcagcggctctggcaccgactacaccctgacaatatccagcctccagcctgaggacttcgccacctactactgtcagcagagctggaacaccccttggacattcggccagggcaccaagctggaaatcaagagaggcggaggcggaagtggaggcggaggatctggcggcggaggctctcaagttcagcttcaacagcctggcgctgagctggtcaaacctggcgcttctgtgaagatgagctgcaaagccagcggctacgccttcagcagctactggatcaactggatgaagcagaaacccggccagggactcgaatggatcggccaaatctatcccggcgacggcgacaccaactacaacggcaagttcaagggcagagccacactgaccgccgatacctctagcagcacagcctacatgcagctgagcagcctgaccagcgaagatagcgccgtgtacttctgtgcccggtccatcacaacagtcgtgggctgcgctatggactattggggccagggaacaagcgtgaccgtgtctagtacgcgtctgtgggtgtcccagccacctgaaattcggacactggaaggctcctccgcctttctgccctgtagctttaacgccagccaggggagactcgccatcggctctgtgacatggttccgggatgaagtcgtccctggaaaagaagttcgcaacggaacaccagagttcagaggcagactcgccccactggcaagctccagattcctgcatgaccatcaggctgaactgcacattagggacgtgcggggccacgatgcctccatctatgtgtgtcgggtcgaagtgcttggactcggcgtcggaactggaaacggcactaggctggtggtcgagaaagaacatccacagcttggcgctggcaccgtcctgttgcttagagccggattctatgccgtcagcttcctgtccgtggctgtggggtctacagtgtattaccagggaaaatgtctcacctggaaaggccccagacgccagcttccagctgttgttcctgctccactgccaccaccttgtggctcctctgctcacttgcttccaccagtgcctggcggacgcgccaagagaagcggatctggcgtgaagcagaccctgaatttcgacctgctgaagctggctggcgacgtggaatccaacccaggcccttctagaatgtaccggatgcagctgctgagctgtatcgccctgtctctggccctggtcacaaatagcaactgggttaacgtgatctccagcctgaagaagatcgaggacctgatccagtccatgcacatcgacgccacactgtacaccgagagcgacgtgcaccctagctgtaaagtgaccgccatgaagtgctttctgctggaactgcaagtgatctccctggaaagcggcgacgccagcatccacgacaccgtggaaaacctgattatcctggctaacaacagcctgagcagcaacggcaacgtgaccgagtccggctgtaaagagtgcgaggaactggaagagaagaatatcaaagagttcctccagagcttcgtgcacatcgtgcagatgttcatcaacaccagcaagatcgaagtgatgtaccctcctccttacctggacaacgagaagtccaacggcaccatcatccacgtgaagggcaagcacctgtgtccttctccactgttccccggacctagcaagcctttctgggtgctcgttgttgttggcggcgtgctggcctgttacagcctgctggttaccgtggccttcatcatcttttgggtccgaagcaagcggagctaa

SEQ ID NO: 7717 - DNA, 2643 bp, Artificial Sequence
  Synthetic Polynucleotide
atggccttaccagtgaccgccttgctcctgccgctggccttgctgctccacgccgccaggccggacatccagatgacacagagccctagcagcctgtctgccagcgtgggagacagagtgaccatcacatgcaaggccagcgaccacatcaacaactggctggcctggtatcagcagaagcctggacaggcccctaagctgctgatctacggcgctaccacactggaaacaggcgtgcccagcagattttctggcagcggctctggcaccgactacaccctgacaatatccagcctccagcctgaggacttcgccacctactactgtcagcagagctggaacaccccttggacattcggccagggcaccaagctggaaatcaagagactcgaggccgacgtgtcccccaagcctaccatcttcctgccctctatcgccgagacaaagctccagaaggccggcacctacctgtgcctgctggaaaagttcttcccagatgtgattaagatccactggcaggaaaagaagtccaacaccatcctgggcagccaggaaggcaacaccatgaagaccaacgacacctacatgaagttcagctggctgaccgtgcccgagaagtccctggacaaagaacacagatgcatcgtgcggcacgaaaacaacaagaacggcgtggaccaggaaatcatcttcccacccatcaagaccgatgtgattacaatggaccccaaggacaactgctccaaggacgccaacgataccctgctgctccagctgaccaacaccagcgcctactacatgtacttgttgctgctgctgaagtccgtggtgtacttcgccatcatcacatgctgcctgctgcggagaaccgccttctgctgcaacggcgagaagtctagggccaagcgatctggatctggagcaacaaacttctcactactcaaacaagcaggtgacgtggaggagaatcccgggcctactagtatggactggatttggcgcatccttttccttgtcggcgctgctaccggcgcgcattccttcgaacaagttcagcttcaacagcctggcgctgagctggtcaaacctggcgcttctgtgaagatgagctgcaaagccagcggctacgccttcagcagctactggatcaactggatgaagcagaaacccggccagggactcgaatggatcggccaaatctatcccggcgacggcgacaccaactacaacggcaagttcaagggcagagccacactgaccgccgatacctctagcagcacagcctacatgcagctgagcagcctgaccagcgaagatagcgccgtgtacttctgtgcccggtccatcacaacagtcgtgggctgcgctatggactattggggccagggaacaagcgtgaccgtgtctagtacgcgtcctcacaccaagcccagcgtgttcgtgatgaagaacggcaccaacgtggcctgcctcgtgaaagagttctaccccaaggacatcaggatcaacctggtgtccagcaagaagatcaccgagttcgaccccgccatcgtgatctcccccagcggcaagtacaacgccgtgaagctggggaagtacgaggacagcaacagcgtgacctgctccgtgcagcacgacaacaagaccgtgcacagcaccgactttgaagtgaaaaccgactccaccgaccacgtgaagcccaaagagacagagaacaccaagcagcccagcaagagctgccacaagcccaaggccatcgtgcacaccgagaaagtgaacatgatgagcctgaccgtgctgggcctgcggatgctgttcgccaaaaccgtggccgtgaacttcctgctgaccgccaagctgttcttcctccgcgccaagagaagcggatctggcgtgaagcagaccctgaatttcgacctgctgaagctggctggcgacgtggaatccaacccaggcccttctagaatgtaccggatgcagctgctgagctgtatcgacctgtctctggccctggtcacaaatagcgcccctaccagcagcagcaccaagaaaacccagctgcaactggaacacctcctgctggacctccagatgatcctgaacggcatcaacaactacaagaaccccaagctgaccgagatgctgaccgccaagttctacatgcccaagaaggccaccgagctgaagcacctccagtgcctggaagaggaactgaagcccctggaagaagtgctgaatctggcccagagcaagaacttccacctgaggccaagggacctgatctccaacatcaacgtgatcgtgctggaactgaaaggcagcgagacaaccttcatgtgcgagtacgccgacgagacagctaccatcgtggaatttctgaatcggtggatcaccttctgccagagcatcatcagcaccctgacaaagatcgaagtgatgtaccctcctccttacctggacaacgagaagtccaacggcaccatcatccacgtgaagggcaagcacctgtgtccttctccactgttccccggacctagcaagcctttctgggtgctcgttgttgttggcggcgtgctggcctgttacagcctgctggttaccgtggccttcatcatcttttgggtccgaagcaagcggagctaa

SEQ ID NO: 7718 - DNA, 2643 bp, Artificial Sequence
  Synthetic Polynucleotide
atggccttaccagtgaccgccttgctcctgccgctggccttgctgctccacgccgccaggccggacatccagatgacacagagccctagcagcctgtctgccagcgtgggagacagagtgaccatcacatgcaaggccagcgaccacatcaacaactggctggcctggtatcagcagaagcctggacaggcccctaagctgctgatctacggcgctaccacactggaaacaggcgtgcccagcagattttctggcagcggctctggcaccgactacaccctgacaatatccagcctccagcctgaggacttcgccacctactactgtcagcagagctggaacaccccttggacattcggccagggcaccaagctggaaatcaagagactcgaggccgacgtgtcccccaagcctaccatcttcctgccctctatcgccgagacaaagctccagaaggccggcacctacctgtgcctgctggaaaagttcttcccagatgtgattaagatccactggcaggaaaagaagtccaacaccatcctgggcagccaggaaggcaacaccatgaagaccaacgacacctacatgaagttcagctggctgaccgtgcccgagaagtccctggacaaagaacacagatgcatcgtgcggcacgaaaacaacaagaacggcgtggaccaggaaatcatcttcccacccatcaagaccgatgtgattacaatggaccccaaggacaactgctccaaggacgccaacgataccctgctgctccagctgaccaacaccagcgcctactacatgtacttgttgctgctgctgaagtccgtggtgtacttcgccatcatcacatgctgcctgctgcggagaaccgccttctgctgcaacggcgagaagtctagggccaagcgatctggatctggagcaacaaacttctcactactcaaacaagcaggtgacgtggaggagaatcccgggcctactagtatggactggatttggcgcatccttttccttgtcggcgctgctaccggcgcgcattccttcgaacaagttcagcttcaacagcctggcgctgagctggtcaaacctggcgcttctgtgaagatgagctgcaaagccagcggctacgccttcagcagctactggatcaactggatgaagcagaaacccggccagggactcgaatggatcggccaaatctatcccggcgacggcgacaccaactacaacggcaagttcaagggcagagccacactgaccgccgatacctctagcagcacagcctacatgcagctgagcagcctgaccagcgaagatagcgccgtgtacttctgtgcccggtccatcacaacagtcgtgggctgcgctatggactattggggccagggaacaagcgtgaccgtgtctagtacgcgtcctcacaccaagcccagcgtgttcgtgatgaagaacggcaccaacgtggcctgcctcgtgaaagagttctaccccaaggacatcaggatcaacctggtgtccagcaagaagatcaccgagttcgaccccgccatcgtgatctcccccagcggcaagtacaacgccgtgaagctggggaagtacgaggacagcaacagcgtgacctgctccgtgcagcacgacaacaagaccgtgcacagcaccgactttgaagtgaaaaccgactccaccgaccacgtgaagcccaaagagacagagaacaccaagcagcccagcaagagctgccacaagcccaaggccatcgtgcacaccgagaaagtgaacatgatgagcctgaccgtgctgggcctgcggatgctgttcgccaaaaccgtggccgtgaacttcctgctgaccgccaagctgttcttcctccgcgccaagagaagcggatctggcgtgaagcagaccctgaatttcgacctgctgaagctggctggcgacgtggaatccaacccaggcccttctagaatgtaccggatgcagctgctgagctgtatcgccctgtctctggccctggtcacaaatagcgcccctaccagcagcagcaccaagaaaacccagctgcaactggaacacctcctgctggacctccagatgatcctgaacggcatcaacaactacaagaaccccaagctgaccgccatgctgaccaagaagttctacatgcccaagaaggccaccgagctgaagcacctccagtgcctggaagaggaactgaagcccctggaagaagtgctgaatctggcccagagcaagaacttccacctgaggccaagggacctgatctccaacatcaacgtgatcgtgctggaactgaaaggcagcgagacaaccttcatgtgcgagtacgccgacgagacagctaccatcgtggaatttctgaatcggtggatcaccttctgcgccagcatcatcagcaccctgacaaagatcgaagtgatgtaccctcctccttacctggacaacgagaagtccaacggcaccatcatccacgtgaagggcaagcacctgtgtccttctccactgttccccggacctagcaagcctttctgggtgctcgttgttgttggcggcgtgctggcctgttacagcctgctggttaccgtggccttcatcatcttttgggtccgaagcaagcggagctaa

SEQ ID NO: 7719 - DNA, 2643 bp, Artificial Sequence
  Synthetic Polynucleotide
atggccttaccagtgaccgccttgctcctgccgctggccttgctgctccacgccgccaggccggacatccagatgacacagagccctagcagcctgtctgccagcgtgggagacagagtgaccatcacatgcaaggccagcgaccacatcaacaactggctggcctggtatcagcagaagcctggacaggcccctaagctgctgatctacggcgctaccacactggaaacaggcgtgcccagcagattttctggcagcggctctggcaccgactacaccctgacaatatccagcctccagcctgaggacttcgccacctactactgtcagcagagctggaacaccccttggacattcggccagggcaccaagctggaaatcaagagactcgaggccgacgtgtcccccaagcctaccatcttcctgccctctatcgccgagacaaagctccagaaggccggcacctacctgtgcctgctggaaaagttcttcccagatgtgattaagatccactggcaggaaaagaagtccaacaccatcctgggcagccaggaaggcaacaccatgaagaccaacgacacctacatgaagttcagctggctgaccgtgcccgagaagtccctggacaaagaacacagatgcatcgtgcggcacgaaaacaacaagaacggcgtggaccaggaaatcatcttcccacccatcaagaccgatgtgattacaatggaccccaaggacaactgctccaaggacgccaacgataccctgctgctccagctgaccaacaccagcgcctactacatgtacttgttgctgctgctgaagtccgtggtgtacttcgccatcatcacatgctgcctgctgcggagaaccgccttctgctgcaacggcgagaagtctagggccaagcgatctggatctggagcaacaaacttctcactactcaaacaagcaggtgacgtggaggagaatcccgggcctactagtatggactggatttggcgcatccttttccttgtcggcgctgctaccggcgcgcattccttcgaacaagttcagcttcaacagcctggcgctgagctggtcaaacctggcgcttctgtgaagatgagctgcaaagccagcggctacgccttcagcagctactggatcaactggatgaagcagaaacccggccagggactcgaatggatcggccaaatctatcccggcgacggcgacaccaactacaacggcaagttcaagggcagagccacactgaccgccgatacctctagcagcacagcctacatgcagctgagcagcctgaccagcgaagatagcgccgtgtacttctgtgcccggtccatcacaacagtcgtgggctgcgctatggactattggggccagggaacaagcgtgaccgtgtctagtacgcgtcctcacaccaagcccagcgtgttcgtgatgaagaacggcaccaacgtggcctgcctcgtgaaagagttctaccccaaggacatcaggatcaacctggtgtccagcaagaagatcaccgagttcgaccccgccatcgtgatctcccccagcggcaagtacaacgccgtgaagctggggaagtacgaggacagcaacagcgtgacctgctccgtgcagcacgacaacaagaccgtgcacagcaccgactttgaagtgaaaaccgactccaccgaccacgtgaagcccaaagagacagagaacaccaagcagcccagcaagagctgccacaagcccaaggccatcgtgcacaccgagaaagtgaacatgatgagcctgaccgtgctgggcctgcggatgctgttcgccaaaaccgtggccgtgaacttcctgctgaccgccaagctgttcttcctccgcgccaagagaagcggatctggcgtgaagcagaccctgaatttcgacctgctgaagctggctggcgacgtggaatccaacccaggcccttctagaatgtaccggatgcagctgctgagctgtatcgccctgtctctggccctggtcacaaatagcgcccctgccagcagcagcaccaagaaaacccagctgcaactggaacacctcctgctggacctccagatgatcctgaacggcatcaacaactacaagaaccccaagctgacccggatgctgaccgccaagttcgccatgcccaagaaggccaccgagctgaagcacctccagtgcctggaagaggaactgaagcccctggaagaagtgctgaatggggcccagagcaagaacttccacctgaggccaagggacctgatctccaacatcaacgtgatcgtgctggaactgaaaggcagcgagacaaccttcatgtgcgagtacgccgacgagacagctaccatcgtggaatttctgaatcggtggatcaccttcggccagagcatcatcagcaccctgacaaagatcgaagtgatgtaccctcctccttacctggacaacgagaagtccaacggcaccatcatccacgtgaagggcaagcacctgtgtccttctccactgttccccggacctagcaagcctttctgggtgctcgttgttgttggcggcgtgctggcctgttacagcctgctggttaccgtggccttcatcatcttttgggtccgaagcaagcggagctaa

SEQ ID NO: 7720 - DNA, 2643 bp, Artificial Sequence
  Synthetic Polynucleotide
atggccttaccagtgaccgccttgctcctgccgctggccttgctgctccacgccgccaggccggacatccagatgacacagagccctagcagcctgtctgccagcgtgggagacagagtgaccatcacatgcaaggccagcgaccacatcaacaactggctggcctggtatcagcagaagcctggacaggcccctaagctgctgatctacggcgctaccacactggaaacaggcgtgcccagcagattttctggcagcggctctggcaccgactacaccctgacaatatccagcctccagcctgaggacttcgccacctactactgtcagcagagctggaacaccccttggacattcggccagggcaccaagctggaaatcaagagactcgaggccgacgtgtcccccaagcctaccatcttcctgccctctatcgccgagacaaagctccagaaggccggcacctacctgtgcctgctggaaaagttcttcccagatgtgattaagatccactggcaggaaaagaagtccaacaccatcctgggcagccaggaaggcaacaccatgaagaccaacgacacctacatgaagttcagctggctgaccgtgcccgagaagtccctggacaaagaacacagatgcatcgtgcggcacgaaaacaacaagaacggcgtggaccaggaaatcatcttcccacccatcaagaccgatgtgattacaatggaccccaaggacaactgctccaaggacgccaacgataccctgctgctccagctgaccaacaccagcgcctactacatgtacttgttgctgctgctgaagtccgtggtgtacttcgccatcatcacatgctgcctgctgcggagaaccgccttctgctgcaacggcgagaagtctagggccaagcgatctggatctggagcaacaaacttctcactactcaaacaagcaggtgacgtggaggagaatcccgggcctactagtatggactggatttggcgcatccttttccttgtcggcgctgctaccggcgcgcattccttcgaacaagttcagcttcaacagcctggcgctgagctggtcaaacctggcgcttctgtgaagatgagctgcaaagccagcggctacgccttcagcagctactggatcaactggatgaagcagaaacccggccagggactcgaatggatcggccaaatctatcccggcgacggcgacaccaactacaacggcaagttcaagggcagagccacactgaccgccgatacctctagcagcacagcctacatgcagctgagcagcctgaccagcgaagatagcgccgtgtacttctgtgcccggtccatcacaacagtcgtgggctgcgctatggactattggggccagggaacaagcgtgaccgtgtctagtacgcgtcctcacaccaagcccagcgtgttcgtgatgaagaacggcaccaacgtggcctgcctcgtgaaagagttctaccccaaggacatcaggatcaacctggtgtccagcaagaagatcaccgagttcgaccccgccatcgtgatctcccccagcggcaagtacaacgccgtgaagctggggaagtacgaggacagcaacagcgtgacctgctccgtgcagcacgacaacaagaccgtgcacagcaccgactttgaagtgaaaaccgactccaccgaccacgtgaagcccaaagagacagagaacaccaagcagcccagcaagagctgccacaagcccaaggccatcgtgcacaccgagaaagtgaacatgatgagcctgaccgtgctgggcctgcggatgctgttcgccaaaaccgtggccgtgaacttcctgctgaccgccaagctgttcttcctccgcgccaagagaagcggatctggcgtgaagcagaccctgaatttcgacctgctgaagctggctggcgacgtggaatccaacccaggcccttctagaatgtaccggatgcagctgctgagctgtatcgccctgtctctggccctggtcacaaatagcgcccctaccagcagcagcaccaagaaaacccagctgcaactggaacacctcctgctggacctccagatgatcctgaacggcatcaacaactacaagaaccccaagctgaccgagatgctgaccgccaagttctacatgcccaagaaggccaccgagctgaagcacctccagtgcctggaagaggaactgaagcccctggaagaagtgctgaatctggcccagagcaagaacttccacctgaggccaagggacctgatctccaacatcaacgtggccgtgctggaactgaaaggcagcgagacaaccttcatgtgcgagtacgccgacgagacagctaccatcgtggaatttctgaatcggtggatcaccttctgccagagcatcatcagcaccctgacaaagatcgaagtgatgtaccctcctccttacctggacaacgagaagtccaacggcaccatcatccacgtgaagggcaagcacctgtgtccttctccactgttccccggacctagcaagcctttctgggtgctcgttgttgttggcggcgtgctggcctgttacagcctgctggttaccgtggccttcatcatcttttgggtccgaagcaagcggagctaa

SEQ ID NO: 7721 - DNA, 2586 bp, Artificial Sequence
  Synthetic Polynucleotide
atggccttaccagtgaccgccttgctcctgccgctggccttgctgctccacgccgccaggccggacatccagatgacacagagccctagcagcctgtctgccagcgtgggagacagagtgaccatcacatgcaaggccagcgaccacatcaacaactggctggcctggtatcagcagaagcctggacaggcccctaagctgctgatctacggcgctaccacactggaaacaggcgtgcccagcagattttctggcagcggctctggcaccgactacaccctgacaatatccagcctccagcctgaggacttcgccacctactactgtcagcagagctggaacaccccttggacattcggccagggcaccaagctggaaatcaagagactcgaggccgacgtgtcccccaagcctaccatcttcctgccctctatcgccgagacaaagctccagaaggccggcacctacctgtgcctgctggaaaagttcttcccagatgtgattaagatccactggcaggaaaagaagtccaacaccatcctgggcagccaggaaggcaacaccatgaagaccaacgacacctacatgaagttcagctggctgaccgtgcccgagaagtccctggacaaagaacacagatgcatcgtgcggcacgaaaacaacaagaacggcgtggaccaggaaatcatcttcccacccatcaagaccgatgtgattacaatggaccccaaggacaactgctccaaggacgccaacgataccctgctgctccagctgaccaacaccagcgcctactacatgtacttgttgctgctgctgaagtccgtggtgtacttcgccatcatcacatgctgcctgctgcggagaaccgccttctgctgcaacggcgagaagtctagggccaagcgatctggatctggagcaacaaacttctcactactcaaacaagcaggtgacgtggaggagaatcccgggcctactagtatggactggatttggcgcatccttttccttgtcggcgctgctaccggcgcgcattccttcgaacaagttcagcttcaacagcctggcgctgagctggtcaaacctggcgcttctgtgaagatgagctgcaaagccagcggctacgccttcagcagctactggatcaactggatgaagcagaaacccggccagggactcgaatggatcggccaaatctatcccggcgacggcgacaccaactacaacggcaagttcaagggcagagccacactgaccgccgatacctctagcagcacagcctacatgcagctgagcagcctgaccagcgaagatagcgccgtgtacttctgtgcccggtccatcacaacagtcgtgggctgcgctatggactattggggccagggaacaagcgtgaccgtgtctagtacgcgtcctcacaccaagcccagcgtgttcgtgatgaagaacggcaccaacgtggcctgcctcgtgaaagagttctaccccaaggacatcaggatcaacctggtgtccagcaagaagatcaccgagttcgaccccgccatcgtgatctcccccagcggcaagtacaacgccgtgaagctggggaagtacgaggacagcaacagcgtgacctgctccgtgcagcacgacaacaagaccgtgcacagcaccgactttgaagtgaaaaccgactccaccgaccacgtgaagcccaaagagacagagaacaccaagcagcccagcaagagctgccacaagcccaaggccatcgtgcacaccgagaaagtgaacatgatgagcctgaccgtgctgggcctgcggatgctgttcgccaaaaccgtggccgtgaacttcctgctgaccgccaagctgttcttcctccgcgccaagagaagcggatctggcgtgaagcagaccctgaatttcgacctgctgaagctggctggcgacgtggaatccaacccaggcccttctagaatgtaccggatgcagctgctgagctgtatcgccctgtctctggccctggtcacaaatagcaactgggttaacgtgatctccgacctgaagaagatcgaggacctgatccagtccatgcacatcgacgccacactgtacaccgagagcgacgtgcaccctagctgtaaagtgaccgccatgaagtgctttctgctggaactgcaagtgatctccctggaaagcggcgacgccagcatccacgacaccgtgaagaacctgattatcctggctaacaacagcctgagcagcaacggcaacgtgaccgagtccggctgtaaagagtgcgaggaactggaagagaagaatatcaaagagttcctccagagcttcgtgcacatcgtgcagatgttcatcaacaccagcaagatcgaagtgatgtaccctcctccttacctggacaacgagaagtccaacggcaccatcatccacgtgaagggcaagcacctgtgtccttctccactgttccccggacctagcaagcctttctgggtgctcgttgttgttggcggcgtgctggcctgttacagcctgctggttaccgtggccttcatcatcttttgggtccgaagcaagcggagctaa

SEQ ID NO: 7722 - DNA, 2586 bp, Artificial Sequence
  Synthetic Polynucleotide
atggccttaccagtgaccgccttgctcctgccgctggccttgctgctccacgccgccaggccggacatccagatgacacagagccctagcagcctgtctgccagcgtgggagacagagtgaccatcacatgcaaggccagcgaccacatcaacaactggctggcctggtatcagcagaagcctggacaggcccctaagctgctgatctacggcgctaccacactggaaacaggcgtgcccagcagattttctggcagcggctctggcaccgactacaccctgacaatatccagcctccagcctgaggacttcgccacctactactgtcagcagagctggaacaccccttggacattcggccagggcaccaagctggaaatcaagagactcgaggccgacgtgtcccccaagcctaccatcttcctgccctctatcgccgagacaaagctccagaaggccggcacctacctgtgcctgctggaaaagttcttcccagatgtgattaagatccactggcaggaaaagaagtccaacaccatcctgggcagccaggaaggcaacaccatgaagaccaacgacacctacatgaagttcagctggctgaccgtgcccgagaagtccctggacaaagaacacagatgcatcgtgcggcacgaaaacaacaagaacggcgtggaccaggaaatcatcttcccacccatcaagaccgatgtgattacaatggaccccaaggacaactgctccaaggacgccaacgataccctgctgctccagctgaccaacaccagcgcctactacatgtacttgttgctgctgctgaagtccgtggtgtacttcgccatcatcacatgctgcctgctgcggagaaccgccttctgctgcaacggcgagaagtctagggccaagcgatctggatctggagcaacaaacttctcactactcaaacaagcaggtgacgtggaggagaatcccgggcctactagtatggactggatttggcgcatccttttccttgtcggcgctgctaccggcgcgcattccttcgaacaagttcagcttcaacagcctggcgctgagctggtcaaacctggcgcttctgtgaagatgagctgcaaagccagcggctacgccttcagcagctactggatcaactggatgaagcagaaacccggccagggactcgaatggatcggccaaatctatcccggcgacggcgacaccaactacaacggcaagttcaagggcagagccacactgaccgccgatacctctagcagcacagcctacatgcagctgagcagcctgaccagcgaagatagcgccgtgtacttctgtgcccggtccatcacaacagtcgtgggctgcgctatggactattggggccagggaacaagcgtgaccgtgtctagtacgcgtcctcacaccaagcccagcgtgttcgtgatgaagaacggcaccaacgtggcctgcctcgtgaaagagttctaccccaaggacatcaggatcaacctggtgtccagcaagaagatcaccgagttcgaccccgccatcgtgatctcccccagcggcaagtacaacgccgtgaagctggggaagtacgaggacagcaacagcgtgacctgctccgtgcagcacgacaacaagaccgtgcacagcaccgactttgaagtgaaaaccgactccaccgaccacgtgaagcccaaagagacagagaacaccaagcagcccagcaagagctgccacaagcccaaggccatcgtgcacaccgagaaagtgaacatgatgagcctgaccgtgctgggcctgcggatgctgttcgccaaaaccgtggccgtgaacttcctgctgaccgccaagctgttcttcctccgcgccaagagaagcggatctggcgtgaagcagaccctgaatttcgacctgctgaagctggctggcgacgtggaatccaacccaggcccttctagaatgtaccggatgcagctgctgagctgtatcgccctgtctctggccctggtcacaaatagcaactgggttaacgtgatctccagcctgaagaagatcgaggacctgatccagtccatgcacatcgacgccacactgtacaccgagagcgacgtgcaccctagctgtaaagtgaccgccatgaagtgctttctgctggaactgcaagtgatctccctggaaagcggcgacgccagcatccacgacaccgtggaaaacctgattatcctggctaacaacagcctgagcagcaacggcaacgtgaccgagtccggctgtaaagagtgcgaggaactggaagagaagaatatcaaagagttcctccagagcttcgtgcacatcgtgcagatgttcatcaacaccagcaagatcgaagtgatgtaccctcctccttacctggacaacgagaagtccaacggcaccatcatccacgtgaagggcaagcacctgtgtccttctccactgttccccggacctagcaagcctttctgggtgctcgttgttgttggcggcgtgctggcctgttacagcctgctggttaccgtggccttcatcatcttttgggtccgaagcaagcggagctaa

SEQ ID NO: 7723 - DNA, 2586 bp, Artificial Sequence
  Synthetic Polynucleotide
atggccttaccagtgaccgccttgctcctgccgctggccttgctgctccacgccgccaggccggacatccagatgacacagagccctagcagcctgtctgccagcgtgggagacagagtgaccatcacatgcaaggccagcgaccacatcaacaactggctggcctggtatcagcagaagcctggacaggcccctaagctgctgatctacggcgctaccacactggaaacaggcgtgcccagcagattttctggcagcggctctggcaccgactacaccctgacaatatccagcctccagcctgaggacttcgccacctactactgtcagcagagctggaacaccccttggacattcggccagggcaccaagctggaaatcaagagactcgaggccgacgtgtcccccaagcctaccatcttcctgccctctatcgccgagacaaagctccagaaggccggcacctacctgtgcctgctggaaaagttcttcccagatgtgattaagatccactggcaggaaaagaagtccaacaccatcctgggcagccaggaaggcaacaccatgaagaccaacgacacctacatgaagttcagctggctgaccgtgcccgagaagtccctggacaaagaacacagatgcatcgtgcggcacgaaaacaacaagaacggcgtggaccaggaaatcatcttcccacccatcaagaccgatgtgattacaatggaccccaaggacaactgctccaaggacgccaacgataccctgctgctccagctgaccaacaccagcgcctactacatgtacttgttgctgctgctgaagtccgtggtgtacttcgccatcatcacatgctgcctgctgcggagaaccgccttctgctgcaacggcgagaagtctagggccaagcgatctggatctggagcaacaaacttctcactactcaaacaagcaggtgacgtggaggagaatcccgggcctactagtatggactggatttggcgcatccttttccttgtcggcgctgctaccggcgcgcattccttcgaacaagttcagcttcaacagcctggcgctgagctggtcaaacctggcgcttctgtgaagatgagctgcaaagccagcggctacgccttcagcagctactggatcaactggatgaagcagaaacccggccagggactcgaatggatcggccaaatctatcccggcgacggcgacaccaactacaacggcaagttcaagggcagagccacactgaccgccgatacctctagcagcacagcctacatgcagctgagcagcctgaccagcgaagatagcgccgtgtacttctgtgcccggtccatcacaacagtcgtgggctgcgctatggactattggggccagggaacaagcgtgaccgtgtctagtacgcgtcctcacaccaagcccagcgtgttcgtgatgaagaacggcaccaacgtggcctgcctcgtgaaagagttctaccccaaggacatcaggatcaacctggtgtccagcaagaagatcaccgagttcgaccccgccatcgtgatctcccccagcggcaagtacaacgccgtgaagctggggaagtacgaggacagcaacagcgtgacctgctccgtgcagcacgacaacaagaccgtgcacagcaccgactttgaagtgaaaaccgactccaccgaccacgtgaagcccaaagagacagagaacaccaagcagcccagcaagagctgccacaagcccaaggccatcgtgcacaccgagaaagtgaacatgatgagcctgaccgtgctgggcctgcggatgctgttcgccaaaaccgtggccgtgaacttcctgctgaccgccaagctgttcttcctccgcgccaagagaagcggatctggcgtgaagcagaccctgaatttcgacctgctgaagctggctggcgacgtggaatccaacccaggcccttctagaatgtaccggatgcagctgctgagctgtatcgccctgtctctggccctggtcacaaatagcaactgggttaacgtgatctccgacctgaagaagatcgaggacctgatccagtccatgcacatcgacgccacactgtacaccgagagcgacgtgcaccctagctgtaaagtgaccgccatgaagtgctttctgctggaactgcaagtgatctccctggaaagcggcgacgccagcatccacgacaccgtggaaaacctgattatccgggctaacaacagcctgagcagcaacggcaacgtgaccgagtccggctgtaaagagtgcgaggaactggaagagaagaatatcaaagagttcctccagagcttcgtgcacatcgtgcagatgttcatcaacaccagcaagatcgaagtgatgtaccctcctccttacctggacaacgagaagtccaacggcaccatcatccacgtgaagggcaagcacctgtgtccttctccactgttccccggacctagcaagcctttctgggtgctcgttgttgttggcggcgtgctggcctgttacagcctgctggttaccgtggccttcatcatcttttgggtccgaagcaagcggagctaa

SEQ ID NO: 7724 - DNA, 2340 bp, Artificial Sequence
  Synthetic Polynucleotide
atggccttaccagtgaccgccttgctcctgccgctggccttgctgctccacgccgccaggccggacatccagatgacacagagccctagcagcctgtctgccagcgtgggagacagagtgaccatcacatgcaaggccagcgaccacatcaacaactggctggcctggtatcagcagaagcctggacaggcccctaagctgctgatctacggcgctaccacactggaaacaggcgtgcccagcagattttctggcagcggctctggcaccgactacaccctgacaatatccagcctccagcctgaggacttcgccacctactactgtcagcagagctggaacaccccttggacattcggccagggcaccaagctggaaatcaagagaggcggaggcggaagtggaggcggaggatctggcggcggaggctctcaagttcagcttcaacagcctggcgctgagctggtcaaacctggcgcttctgtgaagatgagctgcaaagccagcggctacgccttcagcagctactggatcaactggatgaagcagaaacccggccagggactcgaatggatcggccaaatctatcccggcgacggcgacaccaactacaacggcaagttcaagggcagagccacactgaccgccgatacctctagcagcacagcctacatgcagctgagcagcctgaccagcgaagatagcgccgtgtacttctgtgcccggtccatcacaacagtcgtgggctgcgctatggactattggggccagggaacaagcgtgaccgtgtctagtacgcgtggcggaggcggaagtggaggcggaggatctggcggcggaggctctgcgcgtggaatgaggactgaggatcttcccaaagctgtcgtctttctcgaaccccaatggtatcgggtgctcgaaaaagactctgtgacactgaaatgccaaggggcctactctcccgaggacaactccacacagtggtttcataatgagtccctcatcagctctcaggccagctcttatttcattgatgccgctacagtggacgactccggcgagtatcggtgtcagaccaatctgtctacactgtctgaccccgtgcagcttgaggtccacattggatggttgctcttgcaagccccacgctgggttttcaaagaggaagatccaatccatctgcggtgccacagctggaaaaacaccgctctccacaaagtcacatacctgcaaaatggcaaaggacgcaaatacttccatcacaattccgatttttacattccgaaggctaccctgaaagacagcggcagctatttctgccggggactcgtcggctccaagaatgtgtcctccgaaaccgtgaatatcacgattacccaaggactggctgtgcctacaatctctagcttctttccgcctggataccaagtctccttctgtcttgtgatggtcctcctgtttgctgtggacacaggactgtacttttccgtgaaaacgaacatccgcagctccacacgcgattggaaagatcacaagtttaaatggcgcaaagatccccaggacaagcgcgccaagagaagcggatctggcgtgaagcagaccctgaatttcgacctgctgaagctggctggcgacgtggaatccaacccaggcccttctagaatgtaccggatgcagctgctgagctgtatcgccctgtctctggccctggtcacaaatagcgcccctaccagcagcagcaccaagaaaacccagctgcaactggaacacctcctgctggacctccagatgatcctgaacggcatcaacaactacaagaaccccaagctgaccgccatgctgaccaagaagttctacatgcccaagaaggccaccgagctgaagcacctccagtgcctggaagaggaactgaagcccctggaagaagtgctgaatctggcccagagcaagaacttccacctgaggccaagggacctgatctccaacatcaacgtgatcgtgctggaactgaaaggcagcgagacaaccttcatgtgcgagtacgccgacgagacagctaccatcgtggaatttctgaatcggtggatcaccttctgcgccagcatcatcagcaccctgacaaagatcgaagtgatgtaccctcctccttacctggacaacgagaagtccaacggcaccatcatccacgtgaagggcaagcacctgtgtccttctccactgttccccggacctagcaagcctttctgggtgctcgttgttgttggcggcgtgctggcctgttacagcctgctggttaccgtggccttcatcatcttttgggtccgaagcaagcggagctaa

SEQ ID NO: 7725 - DNA, 2340 bp, Artificial Sequence
  Synthetic Polynucleotide
atggccttaccagtgaccgccttgctcctgccgctggccttgctgctccacgccgccaggccggacatccagatgacacagagccctagcagcctgtctgccagcgtgggagacagagtgaccatcacatgcaaggccagcgaccacatcaacaactggctggcctggtatcagcagaagcctggacaggcccctaagctgctgatctacggcgctaccacactggaaacaggcgtgcccagcagattttctggcagcggctctggcaccgactacaccctgacaatatccagcctccagcctgaggacttcgccacctactactgtcagcagagctggaacaccccttggacattcggccagggcaccaagctggaaatcaagagaggcggaggcggaagtggaggcggaggatctggcggcggaggctctcaagttcagcttcaacagcctggcgctgagctggtcaaacctggcgcttctgtgaagatgagctgcaaagccagcggctacgccttcagcagctactggatcaactggatgaagcagaaacccggccagggactcgaatggatcggccaaatctatcccggcgacggcgacaccaactacaacggcaagttcaagggcagagccacactgaccgccgatacctctagcagcacagcctacatgcagctgagcagcctgaccagcgaagatagcgccgtgtacttctgtgcccggtccatcacaacagtcgtgggctgcgctatggactattggggccagggaacaagcgtgaccgtgtctagtacgcgtggcggaggcggaagtggaggcggaggatctggcggcggaggctctgcgcgtggaatgaggactgaggatcttcccaaagctgtcgtctttctcgaaccccaatggtatcgggtgctcgaaaaagactctgtgacactgaaatgccaaggggcctactctcccgaggacaactccacacagtggtttcataatgagtccctcatcagctctcaggccagctcttatttcattgatgccgctacagtggacgactccggcgagtatcggtgtcagaccaatctgtctacactgtctgaccccgtgcagcttgaggtccacattggatggttgctcttgcaagccccacgctgggttttcaaagaggaagatccaatccatctgcggtgccacagctggaaaaacaccgctctccacaaagtcacatacctgcaaaatggcaaaggacgcaaatacttccatcacaattccgatttttacattccgaaggctaccctgaaagacagcggcagctatttctgccggggactcgtcggctccaagaatgtgtcctccgaaaccgtgaatatcacgattacccaaggactggctgtgcctacaatctctagcttctttccgcctggataccaagtctccttctgtcttgtgatggtcctcctgtttgctgtggacacaggactgtacttttccgtgaaaacgaacatccgcagctccacacgcgattggaaagatcacaagtttaaatggcgcaaagatccccaggacaagcgcgccaagagaagcggatctggcgtgaagcagaccctgaatttcgacctgctgaagctggctggcgacgtggaatccaacccaggcccttctagaatgtaccggatgcagctgctgagctgtatcgccctgtctctggccctggtcacaaatagcgcccctgccagcagcagcaccaagaaaacccagctgcaactggaacacctcctgctggacctccagatgatcctgaacggcatcaacaactacaagaaccccaagctgacccggatgctgaccgccaagttcgccatgcccaagaaggccaccgagctgaagcacctccagtgcctggaagaggaactgaagcccctggaagaagtgctgaatggggcccagagcaagaacttccacctgaggccaagggacctgatctccaacatcaacgtgatcgtgctggaactgaaaggcagcgagacaaccttcatgtgcgagtacgccgacgagacagctaccatcgtggaatttctgaatcggtggatcaccttcggccagagcatcatcagcaccctgacaaagatcgaagtgatgtaccctcctccttacctggacaacgagaagtccaacggcaccatcatccacgtgaagggcaagcacctgtgtccttctccactgttccccggacctagcaagcctttctgggtgctcgttgttgttggcggcgtgctggcctgttacagcctgctggttaccgtggccttcatcatcttttgggtccgaagcaagcggagctaa
